United States Patent Application Publication US 2018/0126003 A1 - sequence listing, part 6

SEQ ID NO: 6209 - DNA, 3705 bp, Artificial Sequence
  derived and/or modified sequence
atgaggtccagaagcaacagcggagtgaggctggacgggtacgcgaggttggtgcagcaaaccatcctatgttaccagaatccagtcaccggccttcttagcgctagtcatgagcaaaaagacgcttgggtgagggataatatttattcgatccttgcagtctgggggttagggatggcatatcgtaaaaacgctgatcgagatgaggataaggccaaagcatacgaacttgaacaaaatgtcgtcaaactaatgagaggacttcttcagtgtatgatgcgccaagttgcaaaggttgagaaattcaaacatacccagtcaactaaggatagcctgcacgccaaatataacacagcaacctgtggcactgtggttggagacgaccaatgggggcatctacaagtggacgcaacctccctgttccttcttttcctggcccagatgaccgcgtctggacttaggattatctttaccttggatgaagtcgcctttatccagaaccttgtcttctatattgaagctgcttacaaggttgccgattacggaatgtgggagagaggagacaaaaccaatcaagggattcctgaactgaacgcctctagcgttggaatggctaaagccgctctggaggcaatcgacgagctggatctctttggcgctcacggcgggaggaagtctgtgatacacgtcctcccggacgaggtcgagcattgtcagagcatactttttagtatgctgcctagggcgagcacatctaaagagattgacgccggcctgctttctatcattagctttccagcattcgccgtggaggacgtaaacctcgtcaacgtgaccaaaaacgagataatcagcaaactgcagggacggtacggatgttgcagatttctgcgcgatgggtacaagacccctcgcgaagacccaaacaggctgcactacgacccagccgagctgaaactctttgagaacatcgagtgcgagtggcctgtgttttggacatattttatcatcgatggcgttttcagcggcgacgctgtgcaggtccaggaatatagagaggctctcgaaggaattttgatcagagggaagaatggaatcagacttgtgcccgagctgtatgctgtgcctccaaacaaagtcgacgaagagtacaaaaacccccatactgtggatagagtgccaatggggaaagttcctcatctctggggacagagcctgtacatcctgtcttctctcctggcagagggcttccttgctgcaggcgaaatcgaccctcttaataggaggttctccacttctgtgaaacccgacgttgttgtccaggttactgtgcttgctgaaaacaatcatatcaaagatctcctgagaaagcacggcgtcaacgtacaatctatcgctgatattcaccctatacaagtccagcctggacggatactcagtcacatctacgcgaagttgggtcgaaataagaacatgaacctgagcggtcgtccgtacaggcatattggcgtcttgggaacatcaaagctgtacgtgattcgcaatcaaatcttcactttcacgccacaattcaccgatcagcaccatttctacctggctcttgataacgagatgatagtggagatgctccgcatcgagcttgcgtacttatgcacctgttggcgcatgaccggcaggcctacattgacctttcctatctctcggactatgctgacaaacgacggaagcgacatacacagcgccgttctgagcaccattcgcaagctggaggacgggtactttgggggggctagagttaagctggggaatcttagcgaatttctgactacatccttttacacctacctcacctttctggacccagattgcgacgaaaagctgtttgataatgctagcgagggcacattcagcccagatagtgacagcgaccttgtgggttatcttgaagacacgtgtaaccaagagtcccaagacgaacttgatcactacatcaatcatcttctccagtccacgtcccttcgcagttaccttcctccgctgtgcaagaataccgaggataggcatgtttttagcgcaatccacagcaccagggacatattgtccgtcatggcgaaagctaaaggcctggaggtgccatttgtgcctatgacccttcccactaaagttttgtcagcccatcgcaagagtcttaacctcgttgactctccccagccactcctagagaaggtcccggaatcggactttcagtggccacgtgatgatcatggcgatgtggattgcgagaaactcgttgagcagctcaaggactgctctaacttgcaagaccaggctgatatactatacatcctctacgtgattaaaggcccctcctgggacaccaacttgagtggacaacacggggtcaccgtccaaaacttgctcggtgaactctacggaaaagctggcctgaaccaggaatggggacttatcaggtatatctctggtcttctgaggaagaaggtcgaggtgctcgccgaagcctgcaccgatctactgtcacatcaaaagcagcttacagtgggactgccccccgaaccacgcgaaaaaataatttccgccccattgcctcctgaagaattgaccaaactcatctacgaggcatcgggtcaggacatttctatcgctgtactgacccaagaaatcgtagtatacctggctatgtacgtgcgtgcacagcctagcctgttcgtggagatgctccgtctcagaatcgggctgatcatacaagtaatggcaactgagctggccaggagcctcaattgctctggcgaggaggcaagtgagagtttgatgaatctttcacctttcgacatgaagaatctgctccatcatattttgtcaggtaaggagttcggagtggaaagatctgtgagacccattcacagcagtactagctcaccaacaatcagcatccatgaagtaggacatacaggagtgaccaaaaccgagaggagcggaatcaaccgcctgcgcagtgagatgaagcagatgaccaggaggttcagcgctgatgagcaatttttttctgtgggacaagctgcatcatctagtgcccatagcagcaagagcgcacgcagcagcacaccctcctccccgaccggcactagttccagcgacagtggaggtcaccatatcggatggggcgagcgccagggccagtggctgagaagaaggcggcttgacggggccatcaaccgagtaccagtcgggttctatcagcgagtctggaaaattcttcaaaagtgtcatggcctgagtatcgacggctacgtgcttcctagctctacgactagggagatgactccacacgaaattaaatttgctgtgcacgtggaatcagttttgaacagagtcccgcagcctgaatacagacagctgcttgtggaggctattatggtgttgactcttctgagtgacaccgaaatgacgtctattggcggaatcatccatgtggatcagatcgtgcagatggcatcccagctgtttctgcaagaccaggtttccattggagcaatggacaccttagagaaagaccaggcaactggaatatgtcactttttttatgatagtgctccgtccggcgcttacggcacaatgacctaccttacgcgggctgttgcttcctatctccaagagctgcttccgaactccgggtgtcaaatgcaa

SEQ ID NO: 6210 - DNA, 3705 bp, Artificial Sequence
  derived and/or modified sequence
atgcgcagcagaagcaactccggagtccggcttgatggatacgctagacttgtgcaacaaactatactttgctaccaaaacccagtcaccggtttgctgtcggcctctcatgagcagaaggacgcatgggtccgcgacaacatttacagcatactcgcagtgtggggtctgggcatggcatacagaaagaacgccgaccgcgatgaggacaaggcgaaggcatacgaactcgaacaaaatgtggtgaaactgatgagaggtttgctgcaatgcatgatgagacaagtggcaaaggtggagaaattcaaacatacccagtcaaccaaggacagccttcatgcaaagtacaacaccgcaacgtgtgggactgtggtgggagatgatcaatggggtcacctgcaagtggatgcgacgtccctctttctcttgttcttggctcaaatgactgcatcggggctcagaatcattttcactcttgacgaagtcgcgtttatccaaaaccttgtgttctacatcgaggcagcatataaggtcgcggactacggtatgtgggaacgtggtgataaaaccaaccagggaattccagagttgaacgcctcgagcgttggcatggccaaggctgcccttgaagctattgatgagctcgatctttttggtgctcacggaggtcggaagagcgtgattcatgtcttgcctgacgaagtcgaacattgtcagagcatcctcttcagcatgctgccacgtgcatcgacctcgaaggaaatagacgctggattgctttcgattatctcgtttccagcatttgcggtggaagatgtcaaccttgtgaacgtcaccaaaaatgaaatcatttcgaagttgcaaggaagatatggatgctgtcgattcctcagggatggatacaagacccctcgggaagatcctaatcgactccattacgaccctgccgaactcaagctgtttgaaaacattgagtgcgaatggcccgtgttctggacttacttcatcatcgatggagtcttttcgggagatgccgtgcaagtgcaggaataccgcgaagcactggagggcattcttatcagaggtaagaatggaattagactcgtgccggaactgtatgccgtcccaccaaacaaggtcgatgaagagtacaaaaatccacataccgttgaccgcgtcccaatgggtaaagtcccacatctgtggggtcaatccctgtacatcctgtcctcgcttctggcagaaggctttctggccgcaggcgaaattgatcctcttaatagacggttctcgacttccgtgaagcctgatgttgtcgtgcaggtcactgtgctggcagaaaacaatcacatcaaagacctgcttaggaagcacggtgtcaacgtgcaaagcattgctgatatccatccgattcaggtgcagcccgggcggatcctttcgcacatctacgcaaagctgggccgtaataagaatatgaacctgtccggaaggccctacagacacattggtgtgctcggtaccagcaaactctacgtgatccgcaaccagatattcacgtttacgccgcaatttactgaccagcatcacttttacctggcattggataatgaaatgattgtggagatgcttaggattgaacttgcgtacctttgtacttgttggcgaatgaccggacggccgaccctgacgtttcccatctcgcgtaccatgctgactaacgatggctcggatatacattcggcggtcctttctactattagaaagttggaggatgggtacttcggtggcgccagagtcaaacttggtaatctgagcgagtttttgactaccagcttttacacttatctcaccttcctggaccccgattgtgatgaaaagttgtttgataacgcctccgaaggaacctttagccctgactcggactcagacctcgtcggatacctggaggatacctgtaaccaggagtcacaggatgaacttgaccattacattaaccacttgctgcagagcacgtcgctgcgctcctacctcccacccctctgtaaaaacacggaggacagacacgttttctcggcaattcactctactcgggatattctgagcgtaatggcaaaggccaagggacttgaggtgccgtttgtgcctatgacgctgccaaccaaggtcttgagcgcacataggaagtccctcaatcttgtggattcgcctcaacctctgcttgaaaaggtgccagaatccgattttcagtggccacgcgatgatcacggagatgtggactgtgagaaacttgtggaacaacttaaggattgctcaaaccttcaagatcaagccgatatactctacatcctgtacgtgattaagggcccttcatgggatactaacctcagcggccaacacggagtcacggtccagaatcttctgggagagctgtacggtaaggcgggactgaaccaggagtggggccttatccggtacatctccggattgcttagaaagaaagtagaagtcctggctgaggcctgtacggacctcctttcacaccaaaagcaactcaccgtgggactcccgcccgagcctcgggagaaaatcataagcgctcctttgcctccagaggaactgacgaagctgatctatgaagcatcgggacaggatatatccatagcagtgctgacccaagaaatcgtggtctacctcgccatgtacgtgcgcgcacagccttctctttttgtggaaatgttgcgactgcggatcggattgattattcaagtgatggccactgagcttgccagatcacttaactgctctggtgaagaagcatcagaatcgttgatgaacctttcccctttcgatatgaaaaatctgcttcatcatatcctttctgggaaggaatttggcgtggagcgatccgtgcggcctattcattcatcaacctcgtcccctactatcagcattcatgaagtcggccataccggtgtcaccaaaactgagcgttcgggaatcaatcgcctgcgttccgagatgaaacagatgactcggcggtttagcgcggatgagcagttcttttccgtcggtcaagcggcaagctcctccgcacattcatccaagtcagcacgctcctctaccccatcgagccctactggaacttccagctccgactccgggggacaccatatcgggtggggagaacgccagggccaatggctgcgtcgcagacgcttggacggtgccataaaccgggtgcccgtgggattttaccagcgagtctggaaaattctccagaagtgccatggcctttccattgacggatacgtgttgccctcgtcgactaccagagaaatgactcctcatgagattaagtttgccgtgcacgtggaatcggtgctgaatagagtgccgcagcccgaataccggcaactcctggttgaggcaattatggtgctgacccttttgtctgatactgaaatgacttcgattggcggcattatacatgttgatcagatcgttcagatggcgagccaattgtttctgcaggatcaggtgtcgattggcgccatggacaccctggaaaaggatcaagcaaccggaatttgtcatttcttctacgactcagctccatccggtgcctacggcactatgacttacctcacccgggctgtggcatcttacctgcaggagctgctgcccaacagcggatgtcaaatgcag

SEQ ID NO: 6211 - DNA, 3705 bp, Artificial Sequence
  derived and/or modified sequence
atgcgctcacggagcaactccggagtgcgtttggacggttacgcgagactcgtgcaacaaactattctttgttaccaaaaccctgtgacgggtctgctctctgcgtcgcacgaacaaaaagacgcctgggtccgcgacaacatttactccattcttgcagtgtggggacttggaatggcctaccgcaaaaacgccgatcgggacgaagataaggcaaaggcatacgaactggaacaaaatgttgtgaagctgatgcgtggactgcttcagtgcatgatgagacaggtggcaaaagtggaaaagttcaagcatacccagtcaactaaagatagccttcacgcaaagtacaacaccgcaacctgtgggactgtcgtcggggacgaccagtggggacatctccaggtggatgcaacctcattgtttctgctctttcttgcgcagatgaccgcttccgggctgaggataatctttactctggatgaggtggccttcattcagaacctggtgttctacatcgaggccgcttataaggtggcagactacggtatgtgggagagaggcgacaagaccaatcaaggcattcccgaacttaacgcgagctcagtgggaatggcaaaggccgcacttgaagctattgatgaacttgacctttttggcgctcatggcggccggaaatcagtgatccatgtccttccagacgaggtcgaacactgccaatccatccttttctcgatgctgcctagagcgagcacttcaaaggaaattgacgcaggcctgctgagtatcatttcatttcccgcctttgcagttgaagatgtgaaccttgtcaatgtgacgaagaatgaaatcatttcgaaactgcaggggagatacggctgctgccgtttccttcgggatggctacaaaaccccacgggaagatccgaatcgccttcattacgatccagcagagctgaaacttttcgaaaacattgagtgcgagtggccggtcttttggacctactttatcatcgacggtgtgttttccggagatgccgtccaggtgcaggaatacagagaagcactggagggaatcctcataagaggtaaaaacggtattaggctggtgcctgaattgtacgcagtccctcctaataaggtggatgaggaatacaagaacccccacaccgtggacagagtgcccatgggaaaggtcccgcatctctggggacaatccttgtacatcctcagctcccttctggcagagggatttcttgctgccggtgagatcgaccctctgaatcgacgattttcaacctccgtcaagcctgacgtggtggtgcaagtcactgtccttgcagagaacaatcacattaaggacctgttgcgcaagcatggcgtgaacgtgcagtctattgcagatatccatccaatccaagtgcaacccggcagaattctttcgcacatatacgcaaaacttggacgaaacaagaatatgaatctttcaggcagaccttaccggcacatcggagtgctcggcaccagcaagctgtacgtcatccgcaatcagattttcacttttacgccccagtttactgatcaacatcacttttacctcgcacttgataacgagatgattgtcgagatgttgcgcatcgaactggcctatctttgtacctgctggcgaatgaccgggcgtcctactctgacctttcctatctcaaggactatgctcaccaacgacggatccgatatacactcggccgtcctgtccaccattcggaagctggaagatggttactttggaggagcgagagtgaagctcggaaacctgtccgaattccttactacttcgttttacacctaccttacttttctcgacccagattgtgacgagaagctctttgataacgcatcggaaggaactttctccccggattcagactcagacctggtgggctaccttgaggacacctgtaatcaagagagccaagatgagttggatcactacattaaccatttgctgcaatcaacctcacttagatcgtacctcccacctctttgcaagaataccgaagatcgtcatgtgttcagcgcaatacattcaacgagagacattctctccgtcatggcaaaggcaaaaggactggaggtcccattcgtgccaatgactttgcctaccaaggttctttcagctcatagaaaatcactgaacctcgtggactcgcctcagccactgctcgaaaaggtgcctgaaagcgattttcagtggccacgtgatgatcatggagacgtggattgcgagaagctcgttgaacagcttaaagattgcagcaatcttcaagatcaagcagatatactctacatcctgtacgtgattaagggaccatcctgggatactaacttgagcggccaacatggagtgactgtccagaatctgctgggggaactctatgggaaggcgggacttaatcaggaatggggattgattcgatacatttcaggacttctccggaagaaggtggaggtgctggcggaagcatgtactgatctcctttcgcaccaaaaacagcttaccgtgggtctgccaccagagcctagggagaagatcatttccgctccactccctcctgaggaattgaccaagttgatttacgaagcatccggtcaggatatttctattgctgtcctgactcaggaaattgtggtctacctggcgatgtacgtgcgggcacagccgagcctctttgtcgagatgctgcgtcttagaattgggctgattatccaggtcatggcaactgaattggctcggtcgctgaactgttcaggagaagaagcgtcagaatcgctgatgaatttgagcccttttgatatgaagaacttgctccatcacattcttagcgggaaagaatttggagtcgaaaggtcagtgcggccaattcatagcagtacctcgtcacccactatatcaattcacgaagtgggacacactggcgttactaaaaccgaaagatcgggaataaaccgtctgaggtcagagatgaagcagatgacccgccggttttcagcagatgaacagtttttctccgttggtcaagcagcctcgtcatctgcacactcctcaaaatcggcacgaagctccactccatcatcgcccaccggaacttcatcgtcggattcaggcggacatcatataggttggggcgaaaggcaaggtcagtggcttcggagacgacgcctggatggtgcgataaacagagttcctgtgggattctaccaacgtgtttggaaaattctgcagaaatgtcatgggttgagcatcgatggatacgtccttcccagctcgaccactcgcgagatgactccccacgagattaagtttgccgtgcatgtggagagcgtgcttaatagagtgccacagcctgaataccggcagctgctcgtcgaggcaattatggtgctgactttgctttccgatactgagatgaccagcattggaggcattatccatgtcgatcaaattgtgcagatggccagccagctgttccttcaggatcaagtgtccattggagcaatggacaccctggaaaaggaccaagcaaccggaatctgtcacttcttttacgactccgcaccatcgggagcatacgggaccatgacctatctcaccagagcagtggcgtcttacctccaggagctccttcccaactcgggatgccaaatgcaa

SEQ ID NO: 6212 - DNA, 3705 bp, Artificial Sequence
  derived and/or modified sequence
atgagatcccgcagcaacagcggagtgcggctggatggctacgcacgcctcgtacaacagactatcctgtgctaccaaaaccccgtcacaggactcctctccgccagccacgagcagaaggatgcatgggttcgcgacaatatttattctatcttggccgtttggggtctgggaatggcataccgcaaaaacgccgacagggacgaggataaggctaaggcctatgagcttgaacagaatgtagtaaaactcatgcgaggactgcttcaatgtatgatgcgccaggtcgctaaggttgaaaagtttaagcatactcagtcaacaaaagactctcttcacgccaagtataatactgccacatgcggcaccgtggtcggagacgaccagtggggtcacctccaagtggacgctacatcactgttcctcctgttcctggcccagatgaccgccagcggcctgagaattatttttacacttgatgaggtggccttcatccagaatctcgtgttttatattgaggctgcttacaaagtggctgattacgggatgtgggaacggggggataagacgaatcagggtattccggaactcaatgcctcttccgtgggaatggccaaggctgctctcgaagccattgatgagttggacttgttcggagctcatggtggacggaaatcagtcatccacgtgcttccagacgaagtggaacactgccagtcaatactcttttctatgctgccacgcgccagtacaagcaaagagatcgacgcgggcctcttgtccattatcagcttcccagcttttgccgttgaagacgtgaatctggttaacgtgactaagaacgagattatctcaaaactgcagggccggtacggctgttgtcgctttcttagagacggatataagacgccacgggaagatcccaataggctgcattatgacccagctgagctgaagcttttcgagaacattgaatgcgaatggcctgttttctggacttacttcatcatcgacggagtcttcagtggcgatgcggtgcaggttcaggaataccgagaggcactcgaaggtatattgattagaggaaagaatggaatccggctggtcccagagctttatgctgtcccgcccaataaagttgatgaggagtacaaaaatcctcacacggtagatagagttccgatgggaaaagtgccccacctgtggggtcaaagcctctacatactgagtagtcttctggcagaaggcttcctggctgccggggagattgaccccctgaatcgcagattttccacatccgtcaaaccagacgtggttgtccaggtgactgtgctggccgagaataaccacatcaaggatctcctgagaaagcatggggtcaacgtccaaagcattgccgatatccacccgatccaggtgcagcccggcagaatcctctcacacatctatgccaaactcggcagaaacaagaacatgaacctctccggcaggccatacaggcatattggagtactgggtactagtaagctgtatgtaatccgcaaccagatatttacgtttaccccacagtttaccgaccagcatcacttttacctggcactggacaacgaaatgatcgtggagatgcttaggattgaactcgcctacctgtgcacttgctggcgcatgaccggcagaccgaccctgacattccccattagtaggacgatgctcactaatgatggaagcgacatacattctgcggttctgtcaactatccggaagctggaggacgggtactttgggggggctcgagtaaagctggggaatctgagtgaattcctgacaactagtttctatacatatctgactttcttggaccccgattgtgacgaaaagctgtttgacaatgcttctgagggcacatttagtcctgattccgacagcgatctcgtcggctacctggaggatacatgcaaccaggaatctcaagacgagttggaccattatataaatcatcttttgcagtccactagcctcaggtcttacttgccccccctctgcaagaacacagaagacaggcacgtgttttcagcaatccactctacgcgcgacattctgtctgtcatggcaaaggctaagggacttgaggtgcctttcgtccccatgacgcttcctacgaaggttctgtccgcgcaccggaagagtcttaacctggtagattctccccagcccctcctggagaaagtccccgagtctgactttcagtggccacgggatgatcacggggacgttgactgcgagaagctggtcgaacagttgaaggactgttcaaatctccaggatcaggccgatatcctgtacatactctacgtgattaagggccccagctgggatacaaacttgagcgggcagcacggtgtgaccgtgcaaaacttgttgggcgaactctatggcaaggccgggctgaatcaggaatggggcctcatcagatacatatccggcttgcttcgcaagaaggttgaagtgctggctgaggcctgtaccgatctcctgagtcaccagaagcaattgactgtgggacttcctcccgagccaagggagaagattatcagtgcaccactgccacccgaagagctgacgaagttgatctacgaggcctccggacaagacatatcaatagccgtcctgacacaagaaattgtggtgtatctggcaatgtacgtgcgggcccagccatctctctttgtggagatgctccggctgagaattggtctcattatccaggtgatggctaccgagctcgcaagatcattgaactgttctggggaggaagctagtgagtccctgatgaatctgagtccgtttgatatgaaaaatctgctccaccatatactgagcggcaaggaattcggagtggagagatctgttcgaccgatacacagctctacatcttcccccacaattagcatccatgaagtcggacatacaggagtgacaaagacagagcgctccggtatcaacagactgaggtccgagatgaaacaaatgacccggcgattcagcgcagatgaacagtttttttccgtgggccaggccgcatcatcaagtgcacacagcagtaaaagcgctagaagcagcactccaagctctcctaccgggacctcaagcagtgattcaggaggacatcacattggatggggcgaaagacaaggccagtggttgagacggcgaaggctggacggcgctattaaccgagtgcctgtggggttttaccagagggtgtggaagatccttcagaagtgccatgggttgtccatcgatgggtatgtcctgcccagctcaaccaccagggaaatgactccgcacgaaatcaagttcgctgtacatgtcgagtcagtcctgaaccgcgtgccgcagcctgagtaccgccagcttctggtggaagcaattatggtgctcaccctcctgagcgacaccgaaatgacttctatcggcggcataatacacgtcgaccagattgtgcagatggcatctcagctctttctgcaggaccaggtctccatcggggctatggataccctcgaaaaggaccaggcaacaggcatttgccactttttctatgactcagcgccgtctggggcatacggtaccatgacctatctgacgcgggccgttgccagttacctgcaagagctgctgcccaacagtggatgccagatgcag

SEQ ID NO: 6213 - DNA, 3705 bp, Artificial Sequence
  derived and/or modified sequence
atgcggagtagatcaaattccggtgtccgattggatggatatgcccgactggttcaacaaaccatcctatgttatcagaatcctgtgacaggtcttttgtcagcctctcatgagcagaaggatgcctgggtcagggacaatatctatagtattcttgcagtgtggggattggggatggcttatcgtaaaaacgctgatagagacgaagacaaagcaaaagcatacgaattggagcagaacgtggtgaagctcatgagaggacttttgcagtgtatgatgcgtcaagtagctaaagttgagaagtttaagcatacacaaagcaccaaggatagtctccacgctaaatataataccgctacttgcgggacggtggtaggagatgatcagtggggccatttacaagttgatgctactagcctctttcttttgttcctcgcacaaatgacggcttccggccttagaataatctttaccctcgacgaagttgcctttatacagaacttggttttctacatagaagctgcttacaaggtcgcggactatggtatgtgggaacgtggtgataagaccaatcaggggattcctgaattgaacgctagctcagttggaatggcaaaggcagcacttgaagccatcgatgaactcgatctctttggggctcacggtggaagaaaatctgttattcacgtccttcctgacgaagttgagcattgccagtctattctcttcagcatgcttcctagagcatcaacctccaaggaaattgatgcgggattgctatcaattatttctttccctgctttcgctgtcgaagatgtgaacttggtaaacgttaccaaaaatgagatcattagcaaacttcagggtcgatacggctgttgtcgttttcttagggatggatataaaaccccaagagaagaccctaatcgcttgcactatgatccggcagagttgaagttatttgagaatatcgagtgtgaatggcccgttttctggacgtacttcattattgatggtgtcttttccggcgacgcggtccaagtacaagagtacagggaagctcttgagggtattttgatcaggggtaagaatggtattaggcttgtcccggaactctatgctgtccccccgaacaaggtggatgaagaatataaaaatcctcatacggttgatcgggttcccatgggaaaggtccctcatctgtgggggcagtctctctatattttgagttcactgctggccgagggtttcctggccgctggggaaattgatcctttgaatcgtaggttctccacttctgttaagcccgacgtggtcgttcaagtaactgtccttgctgagaacaaccatattaaagatctcctcaggaaacacggagttaacgtacaaagcatcgcagatattcatcctattcaggttcaacctgggcgtattttgtctcatatatatgcaaagctcggacgcaataaaaacatgaaccttagcggaagaccatacaggcatattggtgttttaggtacaagtaagttatatgtgatccgaaatcaaatatttacttttactccgcagtttacagatcagcatcatttttatttggctttggataatgagatgatcgtggaaatgctcaggatcgaacttgcgtacttgtgcacctgttggcgtatgaccggtcgaccaactcttacctttcccatctcccgtacaatgttgactaatgatggctctgatattcattcggctgtactttccacaattcgaaagttggaggatgggtattttggtggagccagagttaagctcgggaacttgtctgaattcctcacgaccagtttctacacttacctgaccttcctggatcctgattgcgacgagaagctttttgataatgcctctgaggggacatttagcccagactctgactccgacctagttggttatctagaggacacatgcaatcaggaaagtcaggatgaactcgatcattatattaaccatcttctacaaagcacatcactcaggtcttacttaccaccgctctgcaagaatactgaagatagacacgttttctcagcaatacattctacacgggatatactgtctgttatggccaaagctaagggcttagaagtcccttttgttcctatgactcttccgactaaagtactctctgctcatcgcaagtcacttaacttggtggatagtcctcaacctttgcttgaaaaggttcctgagtccgattttcagtggccaagggatgaccatggggatgtcgattgcgagaagttggttgagcagctgaaggattgttcgaatttacaggatcaggctgacattctctacatactttacgtgataaagggcccaagttgggacactaacttgagcggacagcatggtgttaccgttcagaaccttcttggagagttgtatgggaaggcaggactcaaccaagaatggggtttgattcgttacattagtggcctcctgagaaagaaagttgaagttctagccgaggcatgcactgacttgctttcccatcaaaagcaactcacagtggggttgcctcctgaacctcgggaaaaaattatttctgccccactacctcctgaggagttgaccaagctgatctacgaagcttccgggcaagacatctctattgcagtcttgacccaagagatcgtggtatacttagctatgtatgttagggctcagccaagcctgttcgttgaaatgttgcgccttcgcataggtcttatcatacaggtgatggccacagaacttgctcggtccctcaactgctcaggagaggaagccagcgaatctctaatgaacctcagccccttcgatatgaaaaaccttcttcaccatattctttcaggtaaggaatttggagttgagcgatcagttaggcccatccactcatctacaagttctcctactattagcattcatgaagtaggtcatactggagtaacaaagactgaacgtagtgggatcaaccgtcttcgttccgagatgaaacaaatgaccaggaggttttctgctgacgaacaattcttcagcgttggccaagcggcatcctcctctgcacatagcagtaagtctgccagaagttcaacgccttcttctcccacaggtacttctagtagcgattccggagggcatcacattggctggggagagaggcaaggacaatggttgcgcagaagaaggcttgatggggcgataaaccgagtacccgtaggtttttaccaacgtgtttggaagattctacaaaagtgtcacggactgagcattgatgggtacgtgcttccaagctctactactcgcgaaatgactccccatgagataaagttcgctgttcatgttgagtccgttcttaatcgggtccctcaacctgaatacagacaactcttggtggaagcgattatggttttgactctgttatcagatactgagatgactagcatcggcggcatcattcacgtagatcagattgttcagatggcttcccaacttttcctgcaagatcaagtttctatcggggcaatggacacccttgagaaggatcaagccacaggaatctgtcatttcttctacgattcggccccttcaggtgcatacggaactatgacttatctcactagggctgttgcatcatacttacaggagctattacctaacagcgggtgccaaatgcaa

SEQ ID NO: 6214 - DNA, 3705 bp, Artificial Sequence
  derived and/or modified sequence
atgagaagccgttccaatagcggagtgaggttggacgggtatgcccgtctggttcaacaaacaatcctctgctaccagaatcccgtcaccggactgctttccgctagtcatgaacagaaagacgcatgggtcagggacaacatctattccatcctggcagtctggggcctggggatggcgtatcgcaagaatgcagatcgggatgaggacaaggcaaaagcttatgagctagaacaaaacgtcgtcaaacttatgcgcggactactccagtgcatgatgcgacaggtggcgaaagtcgagaagttcaaacatactcagtctacaaaagacagcctgcatgctaaatataacacagccacatgcggaaccgtggttggtgacgatcagtgggggcatctccaagtcgatgccacatctctattcctcttgttcctcgcacagatgacagcgagcggactgagaatcattttcacactggatgaagttgcattcattcagaatctcgtgttttatatcgaggcagcttacaaggtcgcagactacggcatgtgggagaggggcgataagacaaaccagggtattcccgagttgaatgcgagtagtgtggggatggcgaaggccgctctggaggccatcgatgagctggacctcttcggggctcatgggggacggaaaagcgtcatacatgtgctcccagatgaggttgaacactgtcaatccatcctcttctctatgctgccacgggcttcaacttctaaagaaattgacgcaggtctgctatccataatttccttcccggccttcgcagtggaagacgtaaatctggtaaacgtgacaaaaaatgaaatcatcagcaaattgcaggggcgctatggctgttgccggtttttgagagatgggtacaaaacacctcgcgaggatcctaatcgattgcattatgatccagccgagctaaaacttttcgagaatattgagtgtgagtggcctgtcttttggacctattttattattgatggcgtgttttcaggcgacgcagtgcaggtacaggagtaccgcgaagctttagaaggtatcctgatacgaggtaaaaacggtattcgtctggtacccgagttatacgcagtaccccccaacaaggttgacgaggagtataagaatcctcacactgtcgacagggtcccaatgggtaaggtgccccatctgtggggtcagagcctctatattctgagcagcctgctggccgagggcttccttgctgctggcgagatcgacccgctgaataggcgattttccacctccgtcaagccagacgtggttgtgcaggtcaccgtgctcgccgaaaataatcacattaaagatttgctgcgtaagcacggtgttaacgtacaatccatcgcagatatccaccccattcaagtacagccgggacggatactgagccatatttacgccaaactgggcaggaacaaaaacatgaacttaagtggacgaccttaccgccacattggcgtgctgggaaccagcaagctgtatgtcatcagaaaccagatattcacattcaccccgcagtttaccgatcagcaccacttctatctggcccttgataatgaaatgattgtggagatgctaagaattgagctcgcttacctatgcacatgttggcggatgaccggtcgccccactttgacctttccaatatctcgaactatgctgaccaatgacggatcagatatccattccgccgttctctctaccattcggaagctggaggacggttattttggcggagctagagttaagctggggaacctaagtgagttcctaacaacctctttctacacataccttaccttcctggatccagattgcgacgagaaactgttcgacaatgcttctgaggggacattttcacccgattccgattctgatctggtgggctatttggaggacacctgtaaccaagaatctcaagatgagcttgatcactatatcaatcatctcctgcagagtacctccttgcggtcataccttccccccctctgtaagaacacagaggatcgacacgtgttctcagccatccacagcacacgagatatactttccgtgatggccaaggcaaagggcctggaagtgcccttcgtgcctatgacgctgcctacgaaagtgctgagtgcccataggaagtctttaaacctggtggacagtccacaaccgcttctggaaaaggtgcccgagagtgacttccagtggcccagagacgaccacggtgatgtcgactgtgaaaagctggtcgaacagctgaaggactgctctaatctgcaggaccaggccgacattctctatatcctgtacgtaatcaaggggccctcttgggacacgaatctgagtggtcagcatggcgttacagtgcagaacttattgggagaattgtacgggaaagcagggctaaatcaggaatggggtttaatacggtacatctctgggctgctgcggaagaaggtagaggtgttagccgaggcttgtacagacttgctttcccatcagaagcaattgaccgttggtctgccccccgagcctcgggagaaaatcatctccgctcccctgcccccggaggaattgaccaaactcatctacgaagcctccggacaggatatctcaatcgccgtgttgacacaggaaatcgttgtctatctcgcaatgtacgtacgcgcgcagccctccctttttgtggagatgttgcggttacgcatcggattaatcattcaggttatggcaaccgagctggcgaggagccttaactgttccggggaagaagcttccgagtcactgatgaatctgtccccttttgacatgaaaaacctgctacatcatattctgtcaggcaaggagtttggcgtcgaacggtcagtaagaccaatccacagttccacgagttcgcccaccatcagtatccacgaggttggacacacaggagtgacgaagactgagcgtagcgggataaacagattgcgctctgaaatgaagcagatgactagacggttctccgcggacgaacagttcttctcagtagggcaggccgcttccagctccgcccattcctccaaatccgccagatcctctactccttcctcccctactgggacatccagctcagatagcggggggcaccacatcggatggggggaaaggcaggggcagtggcttcgccgtaggcgcctggatggcgctattaatcgggtcccagtcggattctatcagagggtctggaagattctgcagaagtgtcacggcttatcgattgatgggtatgtgctgccgagctcaaccactagagaaatgactccccacgagattaagttcgccgtgcacgtcgagtccgtgctcaacagggtcccccagccagaatataggcagttgctagtggaggccataatggtgctgaccttgctctccgacacggagatgactagcattggcggaatcattcacgtggaccagatcgtccagatggcttcacagctctttctgcaggaccaggtcagcattggagccatggatacattagagaaagaccaagcaacggggatctgtcattttttctatgacagtgctccctcaggcgcttatggaaccatgacctacttgactagggcagtcgctagctacctgcaagagctcctgccaaatagcggatgtcagatgcaa

SEQ ID NO: 6215 - DNA, 3705 bp, Artificial Sequence
  derived and/or modified sequence
atgcgctcccggtcgaattcgggagtgaggttggatggatacgcgaggcttgttcaacagactattttgtgctaccaaaaccccgtcactggtctgctgtctgcatcccatgaacagaaggatgcatgggtgagggacaacatttacagcattctggcagtgtggggactgggtatggcataccggaaaaacgctgacagggacgaggataaggcaaaagcctacgaactggaacagaatgtggtgaagctgatgcgcgggcttctccagtgcatgatgagacaagtggcaaaggtcgaaaagttcaagcacacccaatccaccaaagacagcttgcacgcaaagtataacacggcaacctgcgggactgtcgtcggtgacgatcaatggggccatctccaggtggatgcgacctccctttttctgctttttcttgcgcaaatgactgcatcaggacttagaatcatctttactctcgatgaggtggctttcattcaaaacttggtcttttacatcgaagcagcctacaaggtggcagattacggcatgtgggaacgcggagataagacgaaccaagggattcccgaacttaacgcatccagcgtgggaatggcaaaggcggcactggaagcgattgacgaactggatttgttcggtgcacatggcggacgcaagtcagtgatacacgtgctgcctgatgaagtagagcattgccaaagcatccttttttccatgcttcctcgggcctccacttcaaaggagatcgatgctggactgctgagcataatcagctttcctgcattcgcagtggaagatgtcaacctggtgaacgttactaaaaacgaaatcatctccaaacttcaaggacgttacggatgttgtcgctttctgcgggatggatacaaaacccctagagaggacccaaacaggctgcattacgacccagccgaactcaagctctttgagaatattgagtgtgagtggcccgtgttctggacttacttcataatcgacggcgtgtttagcggcgacgcagtccaggtgcaggaatacagggaggcactggaaggaattctcattcggggaaagaacggtattcgtcttgtccccgaattgtacgcagttccccccaataaggtggatgaagaatacaaaaaccctcataccgtggatagagtcccaatgggaaaagtgccgcatctctggggccagtccttgtatattctttcaagcctgctggccgagggatttttggcagccggtgaaattgatcctctcaatagaagattttcaaccagtgttaaaccagacgtcgtcgtgcaggtgaccgtccttgccgaaaacaatcacatcaaggacctgctccggaagcatggcgtgaacgtgcaatccattgcagatatacatccaattcaggtccaacctggacgtatcctttcccacatctacgcgaaacttgggcggaataagaacatgaatctgtcgggacgcccatacaggcatattggcgtgcttggaacttccaagctctacgtgatcagaaaccagatctttacgtttacccctcaattcaccgaccaacatcacttttatctggctttggacaacgaaatgattgtggaaatgcttagaatcgagctcgcctacctgtgtacgtgttggcgaatgactggacgccccactctgactttccctatttcaagaactatgctgactaacgacggttcagatattcactccgcagttctttctactatcagaaaattggaggatggttactttggtggcgctagagtcaaactcgggaatctttccgagtttctcaccaccagcttttacacctacctcacctttttggaccctgattgtgatgaaaagctcttcgataacgcatccgaaggaacttttagccctgattccgacagcgacctcgtgggctaccttgaggacacctgcaaccaagaatcgcaggacgaacttgatcattacatcaatcacctgcttcaatctaccagcctgaggtcttaccttccaccattgtgtaagaatactgaagatcgccatgtctttagcgccattcattccactcgggatattctctccgtgatggcaaaggcaaagggattggaggtgccatttgtccctatgacccttcctaccaaggtgctttccgcacatcggaagtcactcaacctcgtggactcaccacagccactcctggaaaaggtgcctgaaagcgacttccaatggccaagggacgaccatggagatgtggattgcgaaaaactggtggagcaactgaaggactgctccaaccttcaggatcaagccgatatcctgtacattttgtacgtcattaagggcccttcgtgggatactaacctgagcgggcaacatggagtgaccgtccagaacctgcttggagagctctacgggaaggcaggacttaatcaagagtgggggctcattaggtacatatccggtctgcttaggaagaaggtggaagtgctcgctgaagcgtgtaccgacctgcttagccaccaaaagcagctgaccgtgggattgccgcctgaacctagggaaaagatcatttcggcacctctcccacctgaagaacttacgaagctcatctatgaagcatcgggtcaagatatttccattgctgtgcttacccaggaaatcgtcgtctaccttgcaatgtacgtgagagcacaaccatccctctttgtcgagatgctccgccttagaatcggtcttatcatacaggtgatggcgactgagctggccaggtccctgaattgttcaggtgaggaagcctcagagtcgcttatgaatctttcaccatttgatatgaagaacctgcttcatcacatccttagcggaaaggaatttggagtggagagatccgtccggcctatccattcctccacctcaagccctactattagcatccacgaagtcggtcacacgggagtcaccaagacggaaagaagcggcattaacagactcagaagcgaaatgaagcagatgactagaaggttttcagcagatgagcaattcttctcagtcggacaagccgcgagcagctccgcccattcatcgaagagtgcaaggtcatccaccccgagctcaccaaccggcacgtcatcgagcgattcgggaggccatcacattggctggggagagaggcagggtcagtggcttcggaggagacgtctggacggtgccattaatcgcgtgcccgtgggtttttaccaaagagtgtggaagatactccaaaagtgtcacggactctccatcgacggatacgtgctgccatcgtccaccactagagaaatgaccccacatgaaatcaagtttgcagtgcatgttgagtccgtgctgaacagggtgcctcaaccggaatacagacaactccttgtcgaagcaatcatggttctgactctcctgtcggatactgaaatgacctcgatcgggggcatcattcacgtggaccagattgtgcaaatggcatcccaactctttcttcaggaccaagtgtcaatcggtgctatggacactctggaaaaggatcaagccaccgggatctgccatttcttctacgactccgccccgtccggtgcatacggcacgatgacttatcttactcgagccgtcgcgtcatacctgcaggaactgcttcctaacagcgggtgccagatgcaa

SEQ ID NO: 6216 - DNA, 3705 bp, Artificial Sequence
  derived and/or modified sequence
atgcgcagcagatctaattcgggagtcaggttagatggctatgctagactggtccagcaaaccatactttgttaccagaatcctgtcacaggattgttgtcagcttcccacgaacaaaaggacgcatgggtcagagacaatatttactcaatcttagccgtatggggattaggcatggcttatcgcaagaacgcagatcgcgacgaagataaagcgaaagcgtatgagttagagcaaaacgtcgtgaaactaatgaggggtctgctccagtgcatgatgagacaggtagccaaagttgaaaagtttaaacatacccagtctacgaaggattcacttcacgcaaaatacaatacggccacgtgcggtacggttgtcggcgatgaccagtggggacatcttcaggtcgatgccacgtcactgtttctcttgtttctggcgcaaatgaccgcttcaggattaaggattatctttaccttggatgaggttgcttttattcagaatttagtgttttatattgaggcagcgtataaagttgctgattacggaatgtgggaaagaggcgataagactaatcaaggcatcccggagttaaatgcgtcgtccgtgggcatggcgaaagcagcccttgaagcaattgatgaactcgacttattcggggctcatgggggccgtaagtctgttatccacgtgctaccagatgaagtagaacactgccaatcaattttattttccatgcttcccagagcttctacgagcaaagaaatcgatgctggcctgctttcaattatatcctttcctgcattcgctgtagaggatgttaaccttgtaaacgtgacaaaaaacgaaatcatttccaagttacagggaagatatggatgttgcaggtttctcagagacgggtacaagacgccgcgcgaagacccgaatcgtttacattatgacccagcggaacttaaattatttgaaaatattgaatgtgagtggccagttttctggacatatttcatcattgatggcgtgttttcgggagatgccgtccaagttcaggaatatagggaagcactcgaaggaattcttatcaggggcaagaacgggatacgcttagtgccggaactttatgccgtccctccaaataaagttgatgaggaatataagaatccacacacagtagatcgcgtgcctatgggaaaggttccgcatctctggggacagagcctgtatattttgagctccttactcgcggaaggttttcttgccgcgggcgaaattgatcccctgaatagaagattttcgacgtcagtaaagcctgatgttgtggttcaagtgactgtcttggctgagaacaatcacattaaagatcttctgcgtaaacatggagtcaatgtacaatccatcgccgatattcatccgatccaagtgcaaccaggccgtatccttagccatatttatgcaaagttagggaggaacaaaaatatgaacttaagcggccggccgtatcgtcacatcggtgtgctaggcacgtctaaattgtacgttattagaaatcagatattcacatttactccgcaatttacagatcaacatcatttttatcttgctttggacaacgaaatgattgttgaaatgttacgtatcgaattggcctacctttgcacatgctggcgcatgacggggcgtcctacacttacttttccgattagccggacaatgcttacaaacgacggttctgatatccactccgcggtcttgtcaaccattcgaaaacttgaagatggatattttgggggagccagggtcaaactgggaaacctgtctgagtttttaacaacatctttttacacatatctgacatttcttgatccggactgcgatgagaaactttttgataatgcttccgaaggaacatttagcccggacagcgatagtgatttggttggctacctggaagacacttgcaatcaggaaagtcaagacgaattggatcactatatcaatcatctgcttcaatcaacgtccttacgttcatatttgccgccactctgtaagaatactgaagatcgtcacgtgttttcggcgatccatagcaccagagatattctttcggtcatggcaaaagcgaaagggcttgaggtccctttcgttcctatgacgctacctactaaagttcttagcgctcaccgtaagagcttaaatctcgtcgatagccctcagccattgttagaaaaagtacctgagtcagactttcaatggcctcgcgacgatcacggagatgtggactgtgaaaaattggttgagcaactgaaagattgcagcaatcttcaagatcaagcggatattctttatattctgtatgttattaaaggaccatcgtgggacacaaacctgtccgggcagcatggggttactgtgcagaacctgcttggggaactttatggcaaagcgggattgaatcaggaatggggcttgattaggtatatctctggactgttaagaaaaaaagttgaggtgctggctgaagcctgtacggatctgttgtcccatcaaaaacaactgacggttgggttaccaccggaaccaagagaaaaaatcatctcggcgccactgccgccagaggaactgactaaacttatctatgaggcgtcagggcaagatatctctatcgcagtattaacacaggagattgtagtctatttggctatgtatgttcgcgctcaaccgtctctgtttgtcgaaatgctgcgcttaagaataggccttattatccaagtgatggcaaccgaacttgcacgttctcttaactgctcaggggaagaagcgtctgagtcactgatgaacctgtcaccattcgatatgaagaacttacttcaccacattctttctgggaaggaatttggtgttgaaaggtccgtccggcctattcattctagcacaagcagccctacaataagtatacatgaggtgggacatacgggcgtaacgaaaacggaacggagcggcatcaaccgtctgagatcagaaatgaaacagatgacaagaaggttttccgcagatgaacagttttttagcgtaggtcaagctgccagtagcagcgcacattcttccaagtctgctagatccagtacgccatcctcccctacgggaacgagcagcagcgattcaggcgggcaccatattggctggggagaacggcaaggtcaatggcttcgccggagacgcctagatggcgccatcaatagggttcctgtgggtttttatcagcgggtatggaaaattcttcaaaagtgtcacggtctgtctattgatggatatgtgctcccgagctccacaacacgagaaatgacgccacatgaaatcaaatttgccgtccatgtagaaagcgtgcttaatcgggttccgcaaccagaataccggcagctacttgtcgaagcaattatggtgctcacactgctgtcagacacagaaatgacttctattggcggcattatccacgttgatcagattgttcagatggcatcacagttatttcttcaggatcaggtgtccattggagcaatggacacactggaaaaggaccaagcaactggtatctgccattttttctatgactcagcaccgtctggtgcgtatggcacaatgacatacttaacacgagcggtcgcctcttatctgcaagaattactgccgaattccgggtgccaaatgcaa

SEQ ID NO: 6217 - DNA, 3705 bp, Artificial Sequence
  derived and/or modified sequence
atgaggtctcgctctaatagcggtgtgcggctggatggctacgcacggttggtgcagcagaccatcctgtgctatcaaaaccccgtcactgggctgttgtctgcctctcacgagcaaaaagatgcctgggtgagggataatatttacagcatactggcagtctgggggttgggcatggcctataggaaaaatgccgatcgcgacgaggataaggcgaaggcgtacgaactggaacagaacgtagtcaagctgatgcggggtctgctgcagtgcatgatgaggcaagttgcaaaggttgaaaagtttaaacatacacagtccacaaaggatagtttgcacgccaaatacaacacagcgacgtgcggtacagtcgtgggagatgatcaatggggccacctccaggtcgacgcaacatctctttttttgcttttcctcgcgcagatgaccgccagtggcttgcggattatctttactttagacgaagtcgccttcattcagaacctcgtgttctatattgaggccgcctacaaggtggcagattatgggatgtgggaacgcggagataaaaccaatcagggtatccccgaattaaacgcaagctccgtaggtatggctaaggccgccttggaggccatcgatgaacttgatctgttcggcgcacatgggggaaggaaatcagtgatacacgtgttacccgatgaagtggagcattgtcagtcgatcttattctcaatgctgccaagggcgagcaccagcaaagagatagacgccgggttgctgtcgataattagctttcccgcgttcgcggttgaggacgtgaatctggtgaatgtgacgaagaatgagattatctctaagctccaaggacggtatggctgctgccgctttctgagggacgggtataaaacaccacgagaagatccaaaccgtctgcattacgaccctgctgagttgaagctctttgaaaacattgagtgcgagtggccggttttttggacctactttatcatcgatggcgtgttcagcggagatgccgtgcaggtacaggaataccgggaggctcttgaagggatactaatcagagggaaaaacggtattaggctggtccctgagttatacgcagttccgcctaataaggttgacgaggagtataagaaccctcacactgtagaccgcgtgccaatgggcaaggtgccacacttatggggtcagtcactttacattctcagcagcctgctggcagaaggttttctcgctgctggtgagatagacccgctgaaccgccgtttttccacttcagtgaagcctgacgtggtcgtacaggtgaccgttctcgcagagaataaccatatcaaggacttgctgcggaagcatggagtgaatgtccagagcatagccgatatacacccgattcaggtccagccaggaagaatccttagtcacatttatgcaaagctggggcgcaacaagaacatgaatttatcgggccgcccgtaccgccatataggagtgctcggcacatcaaaactatatgtcatcagaaaccagatattcacattcactccccagtttacagaccaacatcatttttacctagcacttgataacgagatgattgttgagatgctccgcatagagctagcttacttatgcacttgctggcggatgacggggagaccaacattgacatttcccatttccagaacaatgttaactaacgacggctcggacattcactcggccgtactgtcaacaatccgcaaactggaggatggatacttcgggggcgcaagggtgaaattgggaaatctgtccgaatttttgactacatcattctatacctatttaaccttcctggacccagattgtgatgagaaattgttcgacaatgcatcagagggtacgttctctcctgacagtgatagcgacttagtgggctatttggaagatacttgcaatcaggagtcacaagacgagttggatcactatataaaccatctgctgcagtccactagtctccgcagttatctgccacccctatgtaaaaataccgaagatcggcacgtgttctccgcaattcactcaactcgcgatattctcagcgttatggcgaaagccaaaggccttgaggttcctttcgtgcctatgacactgcctactaaggttctctccgcccatagaaaatcactcaatcttgtggacagtccacagccactcctggagaaggtgcctgaaagtgattttcagtggccacgcgatgaccatggggatgttgattgcgagaagctcgtagaacagctcaaggactgtagcaacttacaggaccaagcagatatcctgtacatcctttacgtgatcaagggacccagctgggatactaacctgtcaggtcagcatggcgtgactgtgcagaacctcctgggagaattgtacggaaaggcaggcctaaaccaggaatggggtctcattcggtatatctcgggactccttcgtaaaaaggtagaggttttggccgaagcctgcaccgatctgctgagccaccaaaaacagctgaccgtcggactgccaccggaaccacgcgaaaaaattatctcagcccccttgcctcccgaggaactgaccaaattgatatacgaagcgtcaggccaggatatttctatcgccgtcctgacacaagaaattgttgtctaccttgcaatgtatgttagagcccagccatctctgttcgtggagatgctgcgtttgaggataggactgataatccaggtgatggcaactgagctcgctcgctctttaaattgttccggggaagaggcctctgaatctcttatgaacctcagtccatttgacatgaagaatctcctgcaccacattctctctggcaaggagtttggagtcgaaaggtccgttcgcccgatccattctagcacttcctccccgacaattagcatacatgaggtcggtcataccggcgtaaccaagaccgaaagatcaggaatcaatcgtctgaggtctgaaatgaaacagatgactcggcgctttagcgctgacgagcaatttttctcagtaggtcaggctgcttcttcttctgcccacagttctaagtctgccaggtcctctacaccttctagtccaactggcacctcttcatctgactcggggggccatcacatcgggtggggcgaacggcagggccagtggttgagacggagacgactcgacggtgcaattaatcgggtcccggttggtttttaccagcgcgtgtggaaaatcctacagaaatgtcatggtctgtctatcgacggctatgttcttccctccagtaccacaagggagatgacgccccacgagatcaaattcgccgtccacgtcgagtccgttttgaaccgcgtaccgcagcctgagtaccgtcaattgcttgttgaagcaatcatggtgttaactcttctctctgatactgagatgaccagcataggcggaatcatccacgtggatcagatagtccagatggcctcacagcttttccttcaggaccaggtctccatcggagccatggatacgctggaaaaagaccaggcgaccggaatctgccactttttctacgactctgctcctagtggggcttatggtaccatgacgtatctgacccgcgcggtggccagctatctccaggaactgcttcctaacagcggctgccaaatgcag

SEQ ID NO: 6218 - DNA, 3705 bp, Artificial Sequence
  derived and/or modified sequence
atgagatccaggtccaactccggcgtgcgccttgacggatacgccaggctcgtgcagcagaccatcctgtgctatcaaaaccctgtgactggactcctctcggcatcccatgaacagaaagatgcttgggttcgcgacaacatctatagtattctggctgtctggggactgggcatggcctaccggaagaatgcagatcgcgacgaagataaggcaaaggcgtacgaactcgaacaaaatgtcgtgaagttgatgagaggacttctgcaatgcatgatgcgccaagtggccaaggtggagaagttcaagcacacccagtccaccaaggatagcctgcacgctaaatacaacaccgccacttgtggtactgtggtcggcgacgaccagtgggggcacctgcaggtcgatgccaccagcctcttcctgctgttcctggcgcagatgactgcgagcggactgagaatcatcttcactcttgatgaagtggcctttattcagaacctcgtcttttacatcgaagccgcttacaaggtggctgattacggaatgtgggaacgcggggacaaaactaaccagggaatcccggaactgaacgcctcctcggtgggaatggcaaaagccgcactcgaagccatcgacgaactggacctgttcggagcgcatggcgggaggaaatccgttatccatgtgctgccggatgaggtggaacattgccagtcgatcctcttttcgatgctgccgcgggcgtccacgtcaaaggaaatcgacgcgggcttgctctcaatcatctccttccccgccttcgcagtggaggacgtcaacctggttaacgtgacgaagaatgaaatcatctccaaactccagggacggtacggatgctgccggtttctgagggatggatacaaaactccgagggaagatcctaaccgcctgcactatgaccccgccgagctcaaattgtttgagaacattgaatgtgaatggccagttttctggacttacttcatcatcgacggcgtgtttagcggagacgctgttcaggtgcaagagtaccgcgaggcgcttgaagggatcctcatcaggggaaagaatggcatcagactcgtgccggagctgtatgcggtgccaccgaacaaggtcgatgaggaatacaaaaacccccacaccgtggatagagtccctatgggaaaggtgccacacctgtggggacagtcactgtacatcttgagcagcctgcttgccgagggtttcctggcagcgggagaaattgacccgctgaataggcgcttctcaacctcggtgaagccagacgtggtggtgcaggtcaccgtccttgcagaaaacaatcatatcaaggacctgctccgcaagcacggagtgaatgtgcaatccatcgcagacatccatccgatccaggtgcagccggggcgaatcctcagccatatctacgccaagctgggacgcaacaagaacatgaacctgtccggccgcccataccgccacatcggcgtcttgggaactagcaaactttacgtcatccgcaatcagatctttactttcaccccgcagtttacggatcaacatcatttctacttggcgctggataacgaaatgatcgtggaaatgctcagaatcgaactcgcctacctgtgcacgtgctggcgcatgaccggcagaccgaccctgaccttcccaatcagccggaccatgctgactaacgatggctcggacattcatagcgccgtgctgtccaccatcagaaaattggaggacggatacttcggcggagccagagtgaagctgggaaacctctcggagttcctcactacctccttttacacttatctgactttcctggaccctgactgtgacgaaaagctctttgacaacgctagtgaaggaaccttctcccctgactcggactccgatttggtggggtacctggaagatacgtgcaatcaagagagccaggatgaacttgaccattacatcaatcacttgctgcagtccaccagcctgcggtcgtatctgccacctctctgcaagaacactgaagatagacacgtgttcagcgcaatccactcgactcgggatatcctcagcgttatggccaaagccaaaggacttgaagtgccgttcgtcccaatgaccctgccaactaaggtgttgtcagcccatagaaaatccctgaaccttgtggatagcccgcaacctctcctcgaaaaagtgcctgaaagcgactttcagtggcctcgcgacgaccatggcgatgtggactgtgaaaaactggtggaacagctgaaagattgctcgaacctccaggaccaagccgacattctctacatcctttacgtgatcaaaggaccatcctgggacacgaatttgtcagggcagcacggcgtcaccgtgcagaatctgctgggagagctttacggaaaagctggtctgaaccaggaatggggacttatcaggtacatttcaggcctcctgcggaagaaggtggaggtcctggccgaagcgtgcactgaccttttgtcgcaccaaaagcagctgaccgtgggtttgccgcccgagccacgtgagaaaatcatctcagcccctctcccaccggaggaactcacgaaacttatctacgaagcctcgggacaagacatctccatcgccgtgctcacccaggagatcgttgtctacctggccatgtacgtgcgagcacagccgagcctcttcgtggagatgctgcggctgaggatcggactcatcatccaagtgatggcgactgaactggcacgcagcctgaattgctcaggagaagaggcctcggaatcgctgatgaacttgtcgcccttcgatatgaagaatctgctgcatcacattctgagtggaaaggagttcggggtcgaaaggtccgtgcggccgatccactcatcgactagctcccctacgattagcatccacgaagttggacacactggagtgaccaagaccgaacgctcaggaatcaataggctccggtcagaaatgaaacaaatgactcggagattctcggccgatgaacaattcttctcggtgggacaagcggcctcgtccagcgcccattcatcaaagtcagcccgatcctcaacccctagctcacctaccggcacgtccagctccgattcggggggccaccacatcggctggggcgaacgccaggggcagtggcttcgtagacgacggctggatggcgcaatcaaccgggtgccggtgggattctaccaacgggtgtggaagatcctgcagaagtgccatggtctgagcatcgacggctatgtcctcccgtcgtccaccactagagagatgactccacatgaaatcaaattcgcggtgcacgtcgagtccgtgctgaaccgggtgcctcagccggagtaccgtcagctcttggtggaggcaatcatggtgctgaccctgctgagcgataccgagatgaccagcatcggggggattatccacgtggaccagatcgtccagatggccagccaactgttccttcaagatcaagtgtccattggagccatggatactctggaaaaggaccaggctaccgggatctgccactttttctacgatagcgcaccgtcgggcgcgtacgggaccatgacctaccttacccgcgccgtggcgtcttacctgcaggagttgcttccgaattccggatgccagatgcaa

SEQ ID NO: 6219 - DNA, 3705 bp, Artificial Sequence
  derived and/or modified sequence
atgaggagtcggtctaactcaggagtacgactggacggctatgcccgtctggtacaacaaaccattctgtgttatcagaatcccgtgacaggtctcctttcagcctcgcatgagcagaaggacgcctgggtgcgggataatatttacagcattttggctgtctgggggctgggaatggcttatcgtaaaaatgcagatcgggacgaagacaaggcgaaggcttatgaactggagcagaacgtggtgaagcttatgcgcgggctgttacaatgtatgatgaggcaggtggcgaaagtggagaaattcaaacatacgcagtcgaccaaagacagcctccatgcgaaatataacacggccacttgtggtacagtggtcggggatgaccaatggggccacttgcaggtggatgccacctccctgtttctactattcctcgcccagatgaccgccagcggcctgcgtattatcttcacactggacgaggttgcctttattcagaaccttgttttctacatcgaagccgcttataaggtggccgattacggaatgtgggaacggggcgataagacaaatcaggggattccagaattaaacgcatcctcagtaggtatggcgaaggcggccctggaagccattgatgagttggaccttttcggcgcgcatggcggtcgcaagtctgtgatccatgtgttgccagacgaagtggagcactgccagagcatattgttcagtatgctccctagagcctctacgtccaaggaaatcgatgcaggtttgttatccatcatctcatttccagcgtttgcggtcgaggacgtgaatctcgttaatgtgactaagaatgagatcatcagtaaacttcaaggacgctacggttgctgtcgctttctgagggatggctataagacccctcgggaggaccccaacaggctgcattacgaccccgcggaactgaagctgttcgagaacatcgaatgcgaatggccagttttttggacgtacttcatcatcgacggagtcttctctggggacgccgtgcaggtgcaggaatatcgcgaggccctggaagggattctgatccgcggtaagaatggaataaggcttgtacctgagctgtacgcagtgccccctaacaaggttgacgaagagtacaaaaatcctcacacagtggaccgcgtcccgatggggaaagtcccacacttgtggggacagagtctgtacatcctaagcagcctcctcgccgaaggcttcctcgcagctggggagattgaccccttgaatcggcgattttcaacgagcgtgaaacctgacgtcgtggtacaggtgaccgtgctggccgagaacaatcatataaaagacctgcttcggaagcatggagtaaatgtgcaaagcatcgccgatatccatcccatccaagtgcagcctggaagaatcctcagccacatttatgcaaaactcgggaggaacaaaaacatgaacctgtctggtcggccctaccgacatatcggtgttctcgggacatccaagctgtacgtgatcaggaatcaaatctttaccttcacacctcagttcaccgaccagcaccacttctatcttgccctggacaatgagatgattgtggaaatgctgcgcattgagctcgcatacttatgtacctgctggcgtatgaccgggcggcccaccctgacgtttcccatcagccgcaccatgcttaccaatgatggttctgatattcatagcgccgtcctctctacaatccggaaacttgaggacggttacttcggcggagcccgggtcaaactcgggaacctcagcgagttcctgaccactagcttctacacatatcttaccttcctggaccctgattgcgatgagaagttgttcgacaacgccagcgaaggcactttctcccctgactccgactctgacctggtggggtaccttgaagacacatgtaatcaggagagccaggacgaactggaccattatataaatcatcttctgcaaagtacctccttgagaagctatttgccccccttatgtaagaatactgaagaccgtcacgtgttctctgccatccacagcactagagacatcctctccgttatggctaaggccaaaggcctagaagtcccctttgttcctatgactctgccaactaaggtgctttccgcgcaccgaaagtctctgaatttagtggatagcccccagcctttgctcgagaaggtgccggaatctgacttccagtggcctagggacgatcacggcgatgtcgattgtgaaaaactcgtcgaacagctgaaagactgcagcaatctccaggaccaggctgacatcctgtatatcttatatgttataaaggggcctagctgggataccaatctcagcgggcagcacggtgtgacggtccagaatttattgggtgagctttatggaaaggccggccttaaccaagagtggggtctcataagatacatctctggattgttacggaagaaggttgaggtccttgccgaggcctgtaccgacttgcttagccatcagaagcagttaactgtggggctgccccccgagccgcgggaaaaaatcatttccgcaccactgcctccagaggagttgacaaagctgatttatgaagcaagtggccaagacatcagcattgccgtgctgacccaggagattgtggtgtatctggccatgtacgtgcgggcgcaaccgagcctgtttgtcgagatgctgaggcttcgcatcggtcttatcatacaggtgatggctaccgagcttgctcgatcgctgaactgttcaggcgaggaagcttctgaaagcctgatgaacctgagtccattcgatatgaagaatctactccaccatatcctgagtggaaaagaatttggggtggaacggtcggtgcgtcccatccacagctctacttcctcccccactatctccatccacgaggtggggcacacaggagttacgaagacagaacggtccggtatcaaccgcttgcggtctgaaatgaagcagatgaccagacgcttcagcgcggatgaacaattttttagtgtagggcaggcagcttctagctccgcccactcctccaagagcgctagaagctccacccccagctcacctacaggcacctccagtagcgacagcgggggccaccatatcggatggggcgagaggcaggggcagtggcttcgtcgtcggcgactggatggcgccataaatcgggtgccagttggcttttatcagagagtttggaaaattctgcagaagtgtcacggcctttccattgacggttatgtcctgccatcttctactacaagagaaatgacaccacacgagattaaattcgcggtgcacgtggagagcgtgctaaatcgcgtgccccaacccgagtaccggcagcttctggtggaggccattatggtgctgacacttctatcagacactgaaatgacctctatcggcggaatcatacatgtggatcagatcgtgcagatggcgagccaactgttcctgcaggaccaagtgagtatcggagcaatggacaccttggagaaggatcaggctactgggatctgccacttcttttatgactccgcccctagcggggcgtatggaactatgacatacctcactagagccgtggcatcctacctgcaggagttactgccaaattcaggctgccagatgcag

SEQ ID NO: 6220 - DNA, 3705 bp, Artificial Sequence
  derived and/or modified sequence
atgcgctcgcggtcgaattcaggagtgcgcctggacggctacgcacgacttgtgcaacaaaccattctttgttaccaaaatccagtgaccggacttctttcagcaagccatgagcagaaggacgcatgggtgagagataacatttactccatactggccgtctgggggctgggcatggcttaccgcaagaatgcagatcgcgacgaagataaggcaaaggcatacgaacttgagcagaacgtggtgaaacttatgcgaggccttttgcagtgtatgatgcggcaggtggcaaaggttgaaaagtttaagcatacccagtcgaccaaagatagcctgcatgctaagtacaatactgcaacctgtggaactgtggtgggtgatgaccaatggggacatcttcaggtcgacgctactagcctcttcctgcttttcctggcacaaatgacggcttccggccttcggattatcttcaccctggacgaagtggcgtttattcaaaaccttgtcttttacatagaagcagcgtacaaggtcgcagattacggaatgtgggaacgaggagacaagactaatcagggaatcccggaacttaatgcaagctcggtgggtatggcgaaagccgcactggaagccattgacgagctggatctgttcggggctcatggaggccggaagtccgtaattcacgtgttgccggacgaagtggagcattgtcagtcgatcctcttcagcatgctgcccagagcatcaacgtcaaaagagattgacgcgggactgctttcaatcatttcctttcctgcatttgctgtggaagatgtcaacttggtcaacgtcaccaagaacgagattatctctaagctgcaaggtagatacggctgttgtcgtttccttcgcgatggatataagaccccccgtgaggatcctaaccgactgcattacgatccagcggagcttaagttgttcgaaaacattgaatgtgagtggccagttttttggacctacttcatcatagatggggtgttttccggcgatgccgttcaggtgcaggagtatagggaagcactggaagggattctgattagaggtaagaacggaattcgccttgtcccagagctttacgccgtgcccccaaataaggttgatgaggaatacaagaacccccacactgtggatagagttccaatgggaaaggtccctcatctgtggggacaatcgctgtacatcctgtcatcccttcttgcagaaggattcctcgctgcaggggaaatcgatccacttaatagacggtttagcacctcggtgaagcctgatgtggtcgtccaggtgactgtcctcgcggagaataatcatatcaaagatctgctgcgtaaacatggtgtcaacgtccagagtatagcggatatccaccccatccaagtgcaaccgggccgtattttgtcgcacatctacgccaaactcggtagaaacaaaaacatgaacttgtctggtcggccttaccgccatattggtgtgctcgggacttccaagttgtacgtgataaggaaccagatcttcacctttaccccacaatttactgatcagcatcacttttacctggcgcttgacaacgaaatgatagtggaaatgctcaggattgagttggcctacctttgtacttgctggagaatgaccggtagacctaccctcacttttcccattagcagaactatgctcactaatgacggttccgacatccattcggccgtcctgtccaccataagaaaattggaggacggctactttggtggggcacgcgtgaagctcgggaacctgtcggaattccttacgactagcttttacacctacctcacttttctcgacccggattgtgatgagaaattgttcgacaatgcatcggaaggtacttttagccctgatagcgatagtgatcttgtgggataccttgaggacacgtgcaaccaagaatcccaagatgaacttgatcactacatcaaccatcttctgcaatcaacctcgctccgaagttatctgcctcctctgtgcaagaacactgaagatagacatgtatttagtgccattcactctactagggacattctgtccgtcatggcaaaggcgaaggggctggaagtgcctttcgtgcctatgaccctcccaacgaaggtgctttcggcacatcgcaagagcctgaatctggtcgattcgcctcaacctcttctggaaaaagtgcccgaatctgacttccaatggccaagagatgaccacggagatgtcgattgtgagaaacttgtagaacagcttaaagattgctcgaatctgcaagatcaggcagatatcctctatattctctatgtgataaaggggccgtcctgggatacgaacttgtcgggacagcatggcgtgactgtgcaaaacctcctgggagaactctacggtaaggctggccttaaccaagagtggggactgatacgatacatatcaggtctgttgaggaaaaaagtggaagtgctcgcagaggcttgcaccgatctgttgtcccaccagaaacagcttaccgtgggcctgccacctgaacccagagagaagatcatttctgcacctttgccgcccgaagagctgaccaagctcatttacgaagcatcgggacaagatatttccatagcagtgctgactcaagaaatcgtcgtctaccttgcaatgtacgtgcgagcgcagccatcactttttgtcgaaatgctgaggctgaggatcggcctcattatccaagtgatggcaaccgaacttgcacggtcactgaactgctcaggtgaagaagcctccgagtccctcatgaatctgtccccttttgacatgaagaatcttcttcaccacatcctctccggaaaggaatttggtgtggagcggtccgtgaggccaattcacagcagcacttcatcaccaactattagcatccatgaagtgggccacaccggggtgactaagaccgaacgctccgggatcaaccgtctcagaagcgaaatgaaacaaatgactcggagatttagcgcagatgagcaattcttctctgtcgggcaagcggcctcgtcatcagcacactcgtccaagtccgctcggtcctcgactccatcatcgccaaccggaactagctcgtcggacagcggaggtcatcatattgggtggggtgaacgtcaaggtcagtggctgcgtcgcagacggcttgatggtgcaattaaccgggtccctgtcggattttaccaaagggtgtggaagatacttcagaagtgtcatggtttgtcgatcgacggatacgtcctcccctcttcgaccacccgggagatgaccccgcatgagatcaagtttgccgtgcatgtcgaatcggtgctgaacagagtgccccaacctgaatacagacaactgctggtggaggcaattatggtactgaccctcctgagcgatactgaaatgacgtccattggtgggatcattcatgtagaccagattgtgcaaatggcgtcacagctttttctgcaagaccaggtttctatcggcgccatggacacgctggaaaaggaccaggcaaccggaatttgtcactttttctacgatagtgccccttccggggcctacgggactatgacctatctcaccagagcagtggcaagctacttgcaggagctgctgcctaactcaggatgccagatgcaa

SEQ ID NO: 6221 - DNA, 3705 bp, Artificial Sequence
  derived and/or modified sequence
atgcgcagccggtcaaattcaggagtgagactcgatgggtacgcgcgcctggtgcaacaaacgattctgtgctaccaaaaccccgtcaccgggctcctgtccgcctcccacgaacagaaagacgcatgggtgcgcgacaatatctactcgatcctggctgtgtggggcctgggcatggcctaccgcaaaaacgcggatcgggatgaggataaggccaaggcctacgagctggagcagaacgtggttaaactgatgcggggactcctgcagtgcatgatgaggcaggtcgctaaggtcgaaaagtttaaacatacccaatctactaaagactcactgcatgcgaaatacaatactgccacctgcggtaccgtggtgggagatgaccaatggggtcatctgcaggttgacgccacctcgctgttcctgctctttctggcccaaatgaccgcgtccggtctgcgaatcatcttcaccctggacgaagtggctttcatccagaacctggtgttctacatcgaggccgcttacaaggtggccgactacggaatgtgggaacgcggagataagactaatcaaggaatcccggagctcaacgcttccagcgtgggaatggctaaggccgcactcgaagcaatagatgagctggacttgttcggggcacatggaggaagaaagtccgtgatccatgtgctccccgacgaggtggaacactgccaatccattcttttctcgatgctgcctcgggcctcaaccagcaaggagatcgacgccggactgctgtccattatctccttcccggccttcgcggtggaggacgtcaatctcgtgaacgtgaccaagaacgaaatcatctcgaaacttcagggaagatacggatgctgcagattcttgcgcgacggatacaagacgcccagagaggacccgaaccggttgcattacgacccggccgaactcaaactgttcgaaaacatcgagtgtgagtggccagtgttctggacttacttcatcatcgacggcgtgttttccggagacgcggtgcaggtgcaggaatacagggaagcgctggaaggaatccttatcagaggcaagaacgggatcagactcgtgccggaactgtacgccgtcccacccaacaaggtcgatgaagagtacaagaatcctcatacggtggaccgcgtgccaatgggaaaagtgccgcacctgtggggacagtcactgtacatcctgtcgtcactgctggccgagggattcctcgccgcaggtgagattgacccattgaaccggcgcttttcgacttcggtcaaaccggacgtcgtcgtgcaggtgaccgtgcttgcagaaaacaatcacattaaggatctgctgcgcaaacacggagtcaatgtgcaatctatcgcagacattcacccaatccaggtccagccaggacgtatcctttcgcacatctatgcgaagttggggaggaataagaacatgaatttgtccggcagaccataccggcatatcggagtgctggggacttcgaagctgtacgtgattcgcaaccaaatcttcacctttaccccccagttcaccgaccagcaccacttctacctggccctggacaacgaaatgattgtggagatgctccgcatcgagctggcttacctgtgcacttgctggcggatgaccggacggccaactctgacttttcccatctcgcgcacgatgctgactaatgacggatccgacatccacagcgcagtgctctcgactatcaggaaactcgaggacggatacttcggaggagcgcgcgtgaagctgggaaacttgtcagaattcctgaccacttccttctacacctacctgaccttcctggatccagactgcgacgagaaattgtttgacaatgcatcggagggaacctttagccccgattctgattcagatctggtcggatacctcgaagatacctgcaaccaagaatcgcaggatgagcttgaccactatatcaatcacctgctccagtccacttcattgaggtcatacctccctccactctgcaagaacaccgaggatcggcacgtctttagcgccatccattcgacccgcgacatcctgtccgtgatggctaaagccaaaggactggaggtgccattcgtgcctatgacgctgcctactaaggtgcttagcgcccaccggaaaagcctgaacctggtggactcgccgcaaccgctgctcgaaaaggtgccggagtccgatttccagtggccacgcgacgatcacggcgacgtggactgtgaaaagctggtggaacagctcaaagactgcagcaatttgcaggatcaggctgacatcctgtatatcctgtacgtgatcaagggaccttcatgggatacgaacctttcgggtcaacacggcgtcaccgtgcaaaatctgttgggggaactttacggcaaagccgggctcaaccaggagtggggactgatccgctacatttcaggcctcctccgaaaaaaggtggaggtgctcgcggaggcatgcactgacctcctgtcgcaccaaaagcagctgaccgtggggttgccgccggagccgcgcgaaaagatcatttcggcccctctgccgccagaagagctgactaagctgatctacgaggcaagcggccaagatatctctatcgcggtgctcacccaggaaatcgtggtgtacctggcaatgtatgtgcgcgcccaaccttcactcttcgtggaaatgctccgcctgcgcatcggtctgatcatccaagtgatggccaccgagttggctaggtcattgaactgctcaggagaggaggcgtccgagtcgctgatgaacctgagcccttttgatatgaagaacctgctgcatcacatcctgtcaggcaaggagtttggagtggaacggtcggtgcgcccgatccatagctccacctccagccctaccatctcgatccacgaagtcggacacactggggttaccaaaactgagaggtccgggattaatcggttgcgctccgagatgaagcaaatgactcggagattctccgccgatgaacaattcttctcggtgggacaggccgcttcctcgtccgcacacagctcgaaatccgcgcggtcctcaactccatcgtcgccgaccggaacttcgtcgtctgattcgggaggacaccacattggatggggcgaacgtcagggccagtggctgcgccgcagacgattggacggggctatcaacagagtgccggtgggattttaccagagggtgtggaagatcctgcaaaagtgccacggactgtccattgacggctacgtgctgccgtcctcgaccacccgcgaaatgactccgcacgaaatcaaattcgcggtgcatgtcgaatcggtgctgaaccgcgtgccgcagcctgagtaccggcagctcttggtggaagctatcatggttcttacgcttctctcagataccgagatgactagcatcggcggaatcatccatgtggatcagatcgtccagatggcctcgcagttgttccttcaggatcaggtcagtattggagccatggatacccttgaaaaggaccaggcgactggaatatgccatttcttctacgactccgcccctagcggagcctacgggacgatgacctaccttacgcgggcagtggcaagctaccttcaggagctgctgcccaacagcggctgtcagatgcaa

SEQ ID NO: 6222 - DNA, 3705 bp, Artificial Sequence
  derived and/or modified sequence
atgcggagtcgaagcaactccggcgtccggctcgacggttacgccaggctggtacagcaaaccatcctgtgctatcagaatccagttactggactgctgtcagctagtcatgagcagaaggacgcttgggtccgggacaatatatattcaatcctggccgtttggggcctcgggatggcctatcgtaagaatgcggatcgtgacgaagataaggctaaggcctacgagctggaacagaacgtggtgaagctgatgaggggtttgctacaatgtatgatgcggcaagtggctaaagttgagaagtttaagcatacccagtccaccaaggatagcttgcacgctaaatacaataccgctacctgtggaactgtcgtgggcgacgatcagtgggggcatctgcaggtcgatgctaccagcctgttcctgttgtttcttgctcagatgacagcctccggactgaggatcatcttcacgctcgatgaggtggcattcattcagaatctggttttctacattgaagcggcgtacaaagtcgcggattacggcatgtgggaaagaggagataagacaaatcagggtatacccgagcttaatgcatcttccgtgggcatggccaaagcagccttggaagccatcgatgagctcgatttgtttggagctcatggaggcagaaaaagtgtgattcacgtcttacccgacgaggtggagcattgtcagtccatcctgttcagcatgctgcctcgcgcatcaacgagtaaggagattgacgcaggcctgttgtctatcatctccttccccgcctttgctgtggaggatgtgaatctggtgaatgtaacgaagaacgagattatctctaagcttcagggtaggtacggctgttgccgcttcctgcgggacggctacaagacaccccgagaagatcccaaccgtctgcattatgatcccgcggagcttaaattgttcgaaaatatagagtgcgaatggcctgtgttttggacttacttcatcattgacggagtcttctctggcgatgctgtgcaggtccaggagtacagggaggctctcgaaggcatcctgattcgtggaaagaatggaatcagacttgtgccagagctttacgctgtcccccccaacaaggttgacgaagagtacaaaaatccacacacagttgaccgggtacctatgggcaaggtgccccatctgtggggacagagcctttatatcctgtcctcactgctggcggaagggtttttggccgccggcgagatagatcctctaaatcgccgattctccacttctgtgaagccggatgtagtagtccaggtcacagtcttagcagagaataatcatatcaaggacttgctgcggaagcatggtgtcaacgtccagtctatcgccgatatacaccctattcaggtgcaaccaggccgcatcctctcccatatctacgccaaactgggccgtaataagaacatgaacctgagcggcagaccctatagacacattggcgtcctgggaactagcaagctgtacgttatacgaaatcaaatctttaccttcactcctcaattcacagatcagcaccacttttatctcgcgttagacaatgaaatgatcgtagaaatgctgaggatcgagttggcttatctgtgcacgtgttggcgaatgaccggtcgccccacgctgacctttcctatctccaggactatgttaaccaacgacggaagtgatatccactccgctgtactgtccacaattaggaagttagaggatggatattttggtggagccagggttaaacttgggaacttgtctgagtttcttactacaagcttttacacctatttgacattccttgaccccgactgtgatgaaaagttatttgacaacgcttccgagggcacattcagtcccgattcagacagcgatctcgtggggtaccttgaggatacgtgtaatcaagaaagccaggacgagctggaccattacataaatcatcttctccagagtacatcgctgcgcagctatctacccccactatgcaagaataccgaggaccgacacgttttcagtgccatacactctaccagggatatcctaagtgtgatggccaaagctaaaggcttggaagtaccattcgtgcctatgaccctcccgaccaaagtgctgagcgcccatagaaagtcacttaacctggtggatagcccacaacctcttctagaaaaagtccctgaatctgattttcagtggcccagggatgatcacggagatgtcgattgcgagaagctggtcgaacagcttaaggattgctctaacctgcaggatcaggcagatatcctgtacatcctctatgtgatcaaggggccaagctgggacaccaatctgagcggccaacatggcgtgactgtgcagaacttacttggagagctgtatggcaaggccgggctaaaccaggaatggggattgatccgatatataagcggcctgcttagaaaaaaggtagaggtcctggccgaggcttgcaccgacctgctgtcccaccaaaaacagttgactgtcggcctcccaccagagccgagggaaaaaataatatccgcacctctacctccagaagagttgaccaaactcatctacgaggcctctgggcaggatatttcaattgctgtgcttactcaagaaattgttgtttatctggccatgtacgtgcgggcacagccaagcctgtttgtagaaatgcttcggctgcggattggcctgatcatccaggttatggctaccgagctcgccagatcactgaactgttcaggggaggaggccagcgagtctttgatgaacctaagtccatttgatatgaagaatttattgcatcacatactgtctggcaaggaatttggggtcgagcgcagtgtaagacccatccacagctcaacctcttccccaacgatcagtattcatgaggtggggcacactggagtgaccaaaacagagcgcagcggaatcaataggctgagaagtgagatgaagcagatgacgaggcgcttctccgccgacgagcagttcttcagtgtcggccaggctgccagcagcagcgctcattcctccaagtctgccaggagtagcaccccctcttccccaactggcacttcctcaagcgatagtgggggacaccatatcggatggggagaacgccagggtcagtggctgcgccgccggagattagacggcgccataaatcgggtgcctgtcgggttctatcagcgggtgtggaagattttacaaaagtgccatgggctatcaatcgacgggtatgtcctccctagtagcaccactcgagagatgactccccatgagattaaatttgccgtgcatgtggagagcgtgctcaatagggtgccgcagccggagtatcggcagctgctggtggaagctattatggttctgacattgctcagcgacaccgagatgacctccatcggcggaattatccatgtcgaccagatagtccaaatggcctctcagctgttcctacaggaccaggtttccatcggtgcgatggacacactggaaaaagaccaggcgacagggatttgtcattttttttacgactcagcgccatccggagcttacggtacaatgacctacctcactcgggcagtagcctcttacctgcaggagctcctcccaaatagcgggtgtcaaatgcaa

SEQ ID NO: 6223 - DNA, 3705 bp, Artificial Sequence
  derived and/or modified sequence
atgagatccagatcgaactcaggcgtgcggttggacgggtacgcgcgtttggtgcagcaaaccatcttgtgttaccagaacccggtgacgggacttctgtcagcctcgcatgaacaaaaggatgcatgggtgagagataacatttactccattctggcagtgtggggcctgggtatggcgtacagaaagaatgcggatagagacgaagataaagcaaaggcctatgaactggagcagaacgtggttaagctgatgagaggattgctgcagtgcatgatgcgacaagtcgccaaagtggaaaagtttaaacatacccagtccaccaaggattcactgcacgcaaagtacaacaccgcaacctgtggcactgtagtgggggacgaccagtggggacatctgcaggtggatgcgacttcgctcttcctcctgtttcttgcacagatgaccgcatccggtttgagaatcatctttactctggatgaagttgcattcatccagaaccttgtgttctacattgaggcagcatacaaggtggcggattacgggatgtgggagcgtggagataagaccaaccaggggattcctgagctgaacgcctcctcagtgggtatggcaaaggctgcactggaggcgatcgacgaactcgatctttttggtgcccatggtgggcgaaagtccgtcattcacgtccttccggatgaggtggagcattgccaatcgatcctgttcagcatgctgcctcgagcgtcaacctccaaagaaattgatgccggcctcctttcgataatctcttttcctgcctttgcagtcgaagatgtcaacctggtgaacgtgaccaaaaatgagatcatatcaaaacttcaaggcaggtacgggtgctgtaggttcctgagagacggatacaagactcctcgagaggatcctaacaggctgcattatgatcctgcagagctgaagctcttcgaaaacattgaatgtgagtggccggtcttttggacctacttcatcattgacggcgtcttttcaggtgacgcagtgcaagtacaagaataccgcgaagccctcgaaggtatactgatcagaggtaagaacgggattaggctcgtgccagagctgtacgcagtcccgcccaacaaggtcgatgaagaatacaagaacccacatactgtcgacagggtccccatgggtaaggtccctcatctttggggtcagtcgctctacatattgtcctcgcttctggcagagggcttcctcgctgctggagaaatagatccactgaaccgaaggtttagcactagcgtgaagccagatgtggtcgtgcaggtgaccgtcctggccgaaaacaaccacattaaggatcttcttagaaaacacggtgtgaatgtccaaagcattgcggatattcatccaatccaggtgcaaccaggaagaattctttcccatatctacgctaaacttggtcgtaataagaatatgaacctgtcgggacgaccttacagacacattggtgtccttggaacctcgaagctgtacgtgatacggaaccagattttcactttcaccccccagtttacggaccagcatcacttctatttggcacttgataacgagatgatcgtggaaatgctgagaatcgaactggcatacctctgcacttgttggcgaatgacgggtaggccaactctcacttttccgatttcacgcaccatgttgactaatgatggttcggatattcactcggcagtgctcagcaccattcggaaacttgaagatggttactttggaggtgcacgcgtcaagctcggtaacctgtccgaatttctgaccacctccttttacacttacctcacttttctcgaccccgattgtgacgaaaaacttttcgataatgcatccgaagggacctttagcccggatagcgattccgatttggttggataccttgaggatacctgcaaccaggagtcccaagatgaactcgatcattacattaaccacctcctccaatccacctcactgagaagctatttgcctcccttgtgtaagaatactgaagatcgacatgtgttcagcgccattcactcgacccgcgatatactttccgtgatggcaaaagcgaagggactggaagtccctttcgtgccaatgacccttccaactaaggtgctgtctgctcacagaaaatcgcttaacctcgtggattcgcctcagcctctcctggaaaaggtgcctgagagcgacttccagtggccaagagatgaccacggtgacgtggactgtgaaaaacttgtggaacagctgaaggattgttccaacctccaagaccaagcagacattctgtacatcttgtatgttatcaaaggacctagctgggatactaacttgtcaggccagcatggcgtgaccgtgcaaaaccttcttggagagctgtacggaaaggccggtttgaaccaagaatggggacttattcggtacatttcaggcctcctcaggaaaaaggtggaagtgctggcagaagcgtgcacggacctcctttcgcatcagaagcagctgactgtcggactccctccagagcctagggaaaagattatctcggcccctctgcccccagaggaactgacgaagctgatatacgaagcatcgggacaggatatctcaatagccgtgcttactcaggaaattgtggtttacctcgcaatgtacgtaagagcacagccttcgctgtttgtggaaatgctcaggctgagaattggtctgataatccaagtcatggcaaccgaattggcaaggtcactgaactgttcgggagaggaagcaagcgaatccctgatgaatctgtcgccgtttgacatgaagaatctcctccaccacattctgtcagggaaggagtttggagtggaacgctcagttagaccgattcattcctctacgtcgtcgccaaccatttctatacacgaggtgggtcacaccggggtgactaagaccgagagatcgggcatcaatcggcttaggtcggaaatgaagcaaatgactcgtcgtttttcggcagacgaacagtttttcagtgtggggcaagcagcgtcgtcgtccgcccactcgtcgaaaagcgcccgaagctcaaccccttcgagtcccactggcacgagctcgtccgacagcggcggtcaccatatcgggtggggggaacggcagggacaatggctgcggaggcgtagattggacggagccattaatcgcgtgcctgtgggattttaccaaagagtgtggaagattctgcagaagtgtcatggactttcgatcgacggatacgtgcttccatcatccaccactcgtgaaatgaccccacacgagattaagttcgctgtccatgtggagtcggtcctgaacagggtgccgcaacccgaatacagacagctccttgtggaagcaataatggtgctgactctgctgagcgatactgaaatgacttcgatcggcgggattatacacgtggaccaaatcgtgcaaatggcatcccaactttttcttcaggaccaagtgtccattggcgcaatggacaccctggagaaagatcaggccactggaatttgtcatttcttctatgattcggcaccaagcggagcatacggcaccatgacctacctgactcgcgccgtggcgtcgtaccttcaggagctccttccaaactccggttgtcagatgcag

SEQ ID NO: 6224 - DNA, 3705 bp, Artificial Sequence
  derived and/or modified sequence
atgcgctcccggtcaaattccggggtccggctcgatggctatgcccggcttgttcagcaaaccatcttgtgctatcaaaatccggttaccggactgctctcggcctcgcacgagcaaaaggacgcttgggtccgggataacatctatagcatcctggcagtttgggggctggggatggcgtacagaaaaaatgctgatcgggatgaagacaaggctaaagcctacgaactggagcagaatgtggttaagctgatgcggggactgctgcagtgtatgatgcggcaggtggccaaggtggagaagttcaagcacacccaatccaccaaggactccctgcatgcgaagtacaacacggctacctgcggaacggtggtgggagacgatcagtggggtcacctgcaagttgatgcgacctccttgttcttgctgttcctggcccaaatgactgcctcgggactcaggatcatcttcactctcgacgaggtggccttcatccagaaccttgtattttacatcgaggcagcctacaaggtggccgactacggcatgtgggagcgcggtgataagacgaatcagggtatccctgagctgaatgcaagctcggtgggtatggcaaaagccgcactcgaagctatcgacgaactggacctgtttggagctcacggaggtcgcaaatcggtgatccacgtcctccctgatgaggtcgagcactgccaatccattctgttctcgatgctgccgagggcgtcgacctccaaagagatcgatgctggactgctgagcatcatctccttcccggcattcgccgtggaagacgtgaacctggtgaacgttacgaaaaatgagataatctccaagctgcagggccggtacggatgctgtcggttcctgcgagacggctacaagaccccgcgcgaagacccgaacaggctgcattacgaccctgctgagctgaagttgttcgaaaacatcgaatgcgaatggcccgtgttctggacttactttatcattgatggcgtgttctccggcgacgcagtccaagtccaagaatacagagaggcactcgaaggaattctgatccgcgggaagaacgggatccgcctggtgccggagctttacgccgtgccaccaaataaagtggatgaagagtataagaacccgcacactgtggatcgggtgccaatgggcaaggtgccgcacctgtggggccagtcgctgtatatactcagctcgctgctggccgaaggattcctggcagctggcgaaatcgatccgctcaaccgccgcttcagcacttcggtgaagccagacgtggtggtgcaggtcactgtgctggcggagaacaaccatatcaaagacctgcttcgaaaacacggagtcaacgtgcaatcgatcgcggatatccatccgattcaggtgcagccgggacgcatcctgtctcacatttacgctaaactcgggcggaacaagaacatgaacctttcgggcagaccataccggcacatcggtgtgctgggaacttcgaagctgtacgtaatccggaatcaaatcttcacctttactcctcagtttactgaccagcaccatttttacttggcactcgataacgaaatgatcgtggaaatgctgcgcattgaactggcgtacctgtgcacttgctggcggatgaccggacgtccaaccctgactttcccgatatcccgcaccatgctgaccaacgatggatcagacatccactcggcagtcctcagcaccatccgcaaactggaggatgggtactttggtggcgcccgggtgaagctgggcaacctctcggagtttctgactacttctttctatacctacctgaccttccttgaccccgactgtgatgaaaagctctttgacaatgcatcggaaggcaccttctcacctgactcggactccgaccttgtgggatacctggaggacacctgtaaccaagaaagccaagacgaactggatcattacatcaatcatttgctgcagtcgacttccctgcggagctacctgccgcctttgtgcaaaaataccgaggaccgccatgtcttctcggcaattcactcgactcgggatattctgtccgtaatggccaaggccaagggtctggaggtgccattcgtcccgatgactctccctactaaggtgctgagcgcgcatagaaagtctctgaatttggtcgacagtccacagccgctgctggagaaagtgccagaatcagacttccaatggccgcgcgatgatcatggggacgtggactgcgagaagttggtggaacagctcaaagactgctcaaacttgcaggaccaagcggacatcctgtacattttgtacgtgatcaagggtccatcgtgggacacgaacctctccggccagcacggagtgaccgtgcagaatctgcttggagaactttacggtaaggcgggattgaaccaggagtggggattgatcagatacatcagcggactgctcagaaagaaggtcgaggtgctcgctgaagcctgcaccgacctcttgtcgcatcagaagcaactcactgtcggactgccgcccgagccgcgggagaagatcatctccgcacctctcccgccagaagagctcaccaagctgatttacgaagcctcgggacaggatatctcgatcgccgtcctcacgcaggaaatcgtggtctacttggcaatgtacgtcagagcacagccgagcctgtttgtggagatgctgcgtctcagaatcggtctgatcatccaagtgatggccaccgaactggcacgatcgctcaactgttcaggagaagaggcttcagaatcgctgatgaacctctcgccattcgacatgaaaaatctgttgcaccacattctgtcgggtaaagagttcggagtggagcgctcagtcaggccgattcattcatcaacctcatcccccacgatctcgatccacgaagtgggacatacgggcgttaccaagaccgagcggtcgggaatcaaccgcctgcgttcggagatgaaacagatgactagacggttctccgcggacgaacaattcttctcggtcgggcaagcagccagctcctccgcccattcttccaagtcagcgcggtcaagcactccttcgtcgcctaccggaacctcatcatcggactcaggagggcaccatatcggatggggagaaagacagggccaatggctccgccgccggcgcctcgacggagcgatcaacagggtcccggtgggtttctaccaacgcgtctggaaaatcttgcagaaatgccatggactctctatcgatggttacgtgctgccttcttcaaccacgcgggagatgacgccacacgaaatcaagttcgcagtgcacgtcgaatccgtcttgaaccgcgtgccgcaacccgaataccgccaacttctcgtggaggccatcatggtgctgactctcctctcagacaccgaaatgacgtccatcggaggcatcatccacgtcgaccagatcgtccagatggcctcgcagttgtttcttcaagaccaagtttccatcggagccatggatacgctggaaaaggatcaggcgacggggatctgccacttcttttacgatagcgccccctcgggagcttacggaactatgacctacctgacgcgcgcggtggcctcctacctgcaagaactccttccgaattcgggttgccagatgcag

SEQ ID NO: 6225 - DNA, 3705 bp, Artificial Sequence
  derived and/or modified sequence
atgagatctcgcagcaacagtggagtaagactggatggatatgcccggttggtccaacagaccatcctgtgctaccagaaccccgtaactggactcttgtccgctagccacgaacagaaggatgcttgggtcagagataatatctattccatcctggcagtttggggtctgggtatggcttataggaaaaacgccgaccgagatgaagataaagcaaaagcgtatgaactggagcagaacgtggtcaagcttatgcggggcctgctgcagtgtatgatgaggcaggtcgccaaggttgagaaattcaaacacacccaaagtacgaaggatagcctacacgccaagtacaacaccgcgacatgcgggacagtggtgggtgacgaccagtggggccacctacaggtggacgcaaccagtttatttctgctgttcttagctcagatgacagccagtggccttcggatcatcttcacgctggatgaggttgctttcatccagaacttggtgttctacatcgaagccgcttacaaggtggccgattacggcatgtgggaacggggtgacaagacgaaccagggcattccagagctgaacgcgtcctccgtgggcatggccaaagccgctctcgaggcgatcgacgagctcgatttgtttggcgctcatggagggcgaaaatccgtgattcatgtgctcccggacgaagtggagcactgtcagagtatccttttctcgatgttgccaagggctagcacgtctaaagaaattgacgctggcctccttagtatcatttctttcccagccttcgcagtggaagacgtgaacctcgtcaatgtgacgaagaacgaaatcatttccaagctgcaaggcaggtatggttgttgcaggttccttcgcgatggatataaaaccccacgagaggatcccaaccgacttcactatgaccctgccgaactgaagctcttcgagaacatcgagtgtgagtggcccgttttctggacctatttcattattgatggcgtgttctctggcgacgcagtccaggttcaggaataccgcgaagcgctggagggaattttgatccgcgggaagaacggcatccggttggtccccgagttgtacgccgtgccgcccaataaggtcgacgaagaatataaaaacccacacactgtcgatcgagtccccatgggcaaagtccctcatctgtgggggcaaagcctgtacattctgtccagtctgctcgccgaggggttcctggcagccggagaaatcgaccccctgaatcggcgattctctactagcgtgaagcccgacgtggtcgtgcaggtaaccgtgcttgcagagaataaccatattaaggatctgctgcgcaaacacggagttaacgtacagtccattgctgatatccatcccatccaagtccagccagggcgcatcctgagccatatctatgctaagcttgggaggaataaaaacatgaacctgagtggccgaccctacaggcacataggggtgttaggaacctccaaactgtatgttattcgcaatcaaatatttaccttcactccacagtttaccgaccagcaccacttttacctggccctcgataatgagatgatcgtggaaatgctacgcattgagctggcgtacctgtgcacctgttggcggatgacaggccgccctacactcacctttcccattagtcggactatgctgacaaatgacgggtcagacatccacagtgctgtgctgtccacaatccgcaagctggaagatggatactttgggggcgcccgcgtgaaactcggcaacttaagtgaatttctgacgaccagcttttacacatatctgacctttttggatccggactgcgatgaaaaactgtttgataacgcctctgagggaactttcagcccagactcggattcagatctagttggatatctggaagacacctgtaaccaagaatctcaagacgagctggatcattacatcaaccacctcctgcagagcacatctttacgcagttatctcccacctctgtgcaagaacactgaggatcgccacgtgttttcggcgatccacagcacccgcgacatcctgtccgtgatggctaaggccaagggcctggaagtgcccttcgtccccatgacgctccctacgaaggtcctttccgctcaccgtaagagtctcaatctggtcgattctccccagcctcttttggagaaagtgcctgagtccgattttcaatggcccagagatgatcatggtgacgtggactgcgaaaaactggtggagcaattgaaagattgttcgaacctgcaagatcaagcagatatcctttacatcctgtatgtgattaagggtccttcatgggacactaacctctccggccagcatggggtcacagtgcagaatcttctgggcgagttatacggcaaagcaggcctcaatcaggagtggggcttgattcgttacatcagtgggttgctcaggaagaaggtggaggtgcttgcagaggcctgcactgacctgctatcccaccaaaaacagctcaccgtcggattacccccagagcccagagagaagatcatttccgcccctctccccccggaggagttaacaaagctgatttacgaggcatcggggcaggacattagcattgccgtgctaacccaggaaatcgtagtgtatttggcaatgtacgtgcgagctcagccttctttgttcgtagaaatgctgagattacgtattggactaattatccaggtcatggccactgaactggcccggtccctgaactgctccggagaggaagcatctgaatctctgatgaacctgagcccttttgatatgaaaaatctgctgcatcacatcctctccggcaaggagtttggcgtcgagagatcagtgcgccctatccattcatcgacctcttcccccaccataagtattcatgaggttggacataccggggtcaccaagaccgaacgcagtgggatcaacaggttaaggagcgaaatgaaacagatgacacgccggttttctgctgatgagcagttcttttcggttggacaggccgccagctcaagtgctcattctagcaaatcagccaggtcaagtacaccatctagtccaacgggtacctccagctccgatagcgggggacaccatattggctggggagagcggcagggtcagtggcttcgcaggcggagattggacggcgctatcaatagagtccccgtgggcttttaccagcgggtgtggaagattttacaaaaatgtcacgggctctccattgatggctacgtcttgccctcttcaacgaccagggagatgaccccccatgagatcaagttcgctgtgcacgtagagtcggtgctgaaccgggtaccacagcctgagtatcggcagcttctggtggaagcgatcatggtgctgactctcctctctgacactgaaatgaccagcatcgggggcatcatccacgtggaccaaatagttcaaatggccagtcagttgtttttgcaggatcaggtctccatcggagctatggacacattggaaaaggaccaggcgacaggtatctgccacttcttctacgatagtgccccctccggagcttacgggaccatgacatatctcactcgggccgtggcgtcctatctgcaggagcttctacccaatagcggatgtcagatgcag

SEQ ID NO: 6226 - DNA, 3705 bp, Artificial Sequence
  derived and/or modified sequence
atgcggtcccggagcaattccggcgtgagacttgatggttacgctcggctggtccagcagacaatactttgttaccagaaccccgtgaccggactgctttctgccagccacgagcaaaaagacgcatgggttcgagataacatttactctattttagccgtgtggggcttgggaatggcatatcgaaaaaacgccgatcgcgatgaggataaggccaaagcctacgaactggagcagaatgtggtgaagttgatgcgcggactacttcagtgcatgatgcgccaggtggcgaaggtcgagaaattcaagcacacgcagagcactaaagatagcctgcacgcaaaatacaatacagcgacgtgcggcaccgtagtgggtgatgatcagtggggccacttgcaagtcgatgccactagcctattcctgctgtttctggcccagatgacggctagtgggctacggattatcttcacgttagatgaggtggcattcatccaaaacctggtattttacatcgaggcagcctacaaggtggcggactatggcatgtgggaacgtggcgataagacgaatcaaggaatcccagaactcaatgcttcctccgtcggcatggcgaaagccgcactggaggccattgatgagcttgatctgttcggtgcccacggaggcagaaagtctgtaattcacgtgcttccggacgaggttgagcattgccagtcgatcctgttctccatgctgccacgcgcctctacgtcgaaggagatcgacgccggcctcctttcgatcatatcgttccccgcgttcgctgtggaggacgtgaatctggtgaatgtgacgaagaatgaaataatctccaagctgcaggggcggtacggatgctgtaggtttttacgtgatgggtataagacgccgcgagaggatccaaatcgtctgcactatgatcccgctgagctgaagctgttcgagaatattgagtgcgaatggcccgtgttttggacctacttcatcattgatggcgtcttcagtggcgatgcagtccaggtgcaggagtaccgcgaggccttggagggaatactgatcaggggaaagaacggaatccggctggtaccggagctgtacgcggtacccccaaacaaggttgacgaagagtacaagaaccctcacaccgtggatcgtgttcctatgggtaaagttccgcatctttgggggcaatccttgtatatcctgtccagtctactggccgaaggattcctggcggccggagagattgacccgctgaaccgtcggttctcgacaagtgtgaaacctgacgtcgtggtgcaggtcacagtcttagccgagaacaaccacatcaaggacctgttgcgcaagcacggcgtgaacgttcagtctatagcggatattcatccaatccaggtccaacccggcagaattctgagtcacatctacgccaaactgggtcgcaataagaacatgaacctgagcggccgtccctaccgccatattggcgttttggggacaagcaagctttatgttattcggaaccagatcttcacttttacaccccagtttacggaccagcatcacttctatttagctctggacaacgagatgatcgtggagatgcttcgcattgagctggcctacctgtgcacctgctggcgtatgacgggcaggccgacactgacctttccgatctcccgcaccatgcttaccaacgacgggtccgacatccacagcgcggtgctttctaccatccgcaagctggaagacggctactttggcggcgcacgcgtcaaattggggaacctgtccgagtttctcacaacatccttctatacctacctgaccttcctagacccggattgcgatgagaagctttttgacaatgcttcggagggaacgtttagcccagactcggacagtgatctggtgggctacctggaggacacgtgcaatcaagagagccaggatgagttggatcactacataaatcacctactccagtctaccagcctgcgtagctaccttcctccgctgtgtaagaacactgaagatagacatgtgtttagcgcgattcatagtacaagggatattctgtcagtgatggccaaggcaaagggtttggaggtgccctttgttccgatgactcttcccactaaggttttgtcagcccaccgcaagtcgcttaacctagtggatagtccgcagccgctcctagagaaggtccccgagtccgatttccaatggccacgggatgatcatggagatgttgattgtgagaagctagtggagcaactcaaggattgctccaacctgcaggatcaagcggatattctgtacatcctttacgtaattaagggcccaagctgggacaccaacctgtctggacagcatggcgtgacggtccagaatctgcttggtgagctgtacggtaaggccggcctgaatcaggagtggggtctaatacggtatatctctggtctgctacgtaagaaagtagaggtgttagccgaagcctgcacagacctgctgtcgcatcagaaacagctcactgttggactgccgccagagcccagggagaaaattattagcgcaccactgccacccgaggagcttaccaagctgatctacgaggcctccggccaagatatctccattgccgttctgactcaagagatcgtcgtgtatttagccatgtacgtgcgggcccagccctcactcttcgtagaaatgctgcgactgcgtattggactgatcatccaagtgatggccacggagttggcgcgctcgctaaattgctcaggcgaggaggcttctgagtcgctgatgaatctctctcctttcgacatgaagaacctgttgcatcacattttaagcggtaaggagtttggcgtagaacggtcggtgcgaccgatacacagctccacgagcagtccgaccatctcgatccacgaggtgggccacactggagtcactaagacggagcgcagcggcatcaacagactgcgctccgagatgaagcagatgacgcgacgcttctcggcagacgagcagtttttttcggtggggcaggctgcatcctcctcggcgcacagtagcaaatcggctcggtcatctacgccgtccagtccaactggaacatcgagctctgacagcggtggccatcacattggctggggcgaaaggcagggccagtggctccgtcgccggcgcctcgacggcgccattaatcgcgttccagtgggattctatcagcgagtatggaagattctgcaaaagtgtcacgggctatccatcgatgggtacgttctacctagctcgacaacaagggagatgacgccacacgagataaagttcgcggtgcacgtggaatccgttctgaaccgggtcccacagccagagtaccgccaacttctggtcgaagccatcatggttctgacgcttctgagtgacacggagatgaccagcatcggtggcatcattcatgtggaccagattgtccagatggcgtcccaactgttcctgcaagaccaggtgagtatcggagccatggatactctggaaaaggatcaagcaaccggaatctgccacttcttttacgactcggcaccgagtggtgcatacggcactatgacctacctcactagggcagtcgcttcttacctccaggaattgctgccaaactcaggttgccagatgcaa

SEQ ID NO: 6227 - DNA, 3705 bp, Artificial Sequence
  derived and/or modified sequence
atgaggtcccgcagtaactctggcgtgcgactcgacggatatgcaaggttggtgcagcagacaattctttgctaccaaaaccccgtgaccggtcttctgtccgccagccacgaacaaaaagacgcctgggttagagataacatttattctatcctggctgtgtggggcctgggaatggcctatcgaaagaatgctgaccgggacgaagacaaagccaaggcttacgaactggaacagaatgttgtgaagctgatgagaggactgctgcagtgtatgatgagacaagtggcgaaggttgaaaaatttaagcatacccagagtactaaggatagcttgcacgcaaaatataacaccgctacatgtggcaccgtggtgggtgatgaccagtggggacacctgcaggtcgacgctacctccctgtttctgctgtttcttgcccagatgaccgcaagcggacttaggatcatcttcactctcgatgaagtggccttcattcaaaacctggtgttctatattgaggccgcctataaggtcgctgattatggaatgtgggagaggggcgataagaccaatcagggaatccccgaactgaatgcatcttcagtgggaatggccaaagccgcactcgaggcgatagatgagctcgatctgttcggggcccacggtggtcgaaagagtgtcatccacgttctccccgatgaggtagaacactgccagagcatcctcttcagcatgctgcctcgcgcatctacatccaaggagatcgacgccggtctcctcagtatcatctccttccccgccttcgcggtagaagatgtgaatctggtgaacgtcaccaagaatgaaattataagcaagttgcaggggcggtacggttgttgtcgcttcctgagggatgggtacaaaacgcccagggaagaccccaacaggctgcattacgaccccgctgagctgaagctgttcgagaacatagaatgtgagtggcccgtgttctggacatactttatcatcgatggcgtgtttagtggcgatgccgttcaggtgcaagagtaccgcgaggcactcgaaggtattctgatccgaggaaaaaacggaatcaggttggtccctgagctttacgcagttccccccaacaaggtggatgaagagtataagaacccgcacaccgtcgatagagtgcccatgggcaaggttcctcacctgtggggacagtctctgtatatcctgtcttcattgctggctgaggggttcctcgcagctggtgaaatagatcctctgaatcgccggttttctacatctgtgaaaccagacgtagttgttcaggtaactgtgctggccgaaaataaccatattaaagatctgctgcgcaaacacggggtgaacgtgcagtctatcgccgacatccatcctattcaggtacagcctggcagaatattgtctcacatttatgcaaagctggggcggaacaagaacatgaatctgtccggacggccgtacaggcacatcggagtactcggtacatcaaaactgtacgtgattcgcaaccagatctttaccttcaccccacaattcaccgatcaacaccatttctacctggctctggataacgaaatgatcgttgagatgcttaggatcgagctggcctatctctgcacatgctggagaatgacaggccgccctactctgacatttcctatctcccgaaccatgctgacaaacgatggtagcgacatccacagtgcagtactgtccactatccgaaagctggaggacgggtatttcggaggcgcaagggtaaagcttggaaatctctcagagttcctgactacctcattttacacttacctcacatttctcgaccctgactgtgatgaaaaacttttcgataatgcttccgaaggaaccttctctcctgactccgactcagacctcgtaggctacctggaggatacttgcaaccaggagagccaggacgagctggatcattatattaatcacctcctccaaagtacaagcctcagatcctacctgcctccattgtgcaagaatactgaggatcgccacgtgttctctgccatccactccactagagatatccttagtgttatggcaaaggctaaaggcctggaggtcccttttgttcctatgacactgcctaccaaagtcctctccgctcaccgcaaatctctgaatcttgtcgacagcccgcagccactgctggaaaaggtgcccgaatccgatttccagtggcctagagatgaccatggggacgtagactgcgaaaaacttgtggagcagctgaaggattgcagtaatttgcaagaccaggccgacatcctgtacatactgtacgtgattaaaggtccaagttgggatacaaacctgtcaggtcagcacggcgtgaccgtgcaaaacttgctgggcgaactttatgggaaagccggactgaatcaggaatggggccttatcaggtacatctccggactgctccggaagaaagtcgaggtgctcgccgaggcctgcaccgacttgctgtcacaccagaagcagctgaccgtcggacttccgccagaacctagggagaagatcattagcgctccattgccccccgaggagctgaccaagcttatttatgaggcatcaggacaagacatctctatagccgtgctcactcaggaaatcgtagtgtacctcgccatgtacgtcagagcgcagccatcactgttcgttgaaatgctgagactccgaatcgggcttatcattcaggtgatggcaaccgagctggccagatccctgaactgttccggtgaagaggcatctgaatccctcatgaacttgtctcccttcgacatgaagaatctgcttcaccacatcctgtctggtaaggagtttggcgtggagcggagtgtgaggcccatccactcttctactagcagccccacgatctcaatacacgaggtgggacacaccggcgtgaccaagaccgagagatccggcattaatcggcttaggagcgaaatgaagcagatgaccagacggttcagtgccgatgagcagttttttagcgttggccaggctgcctcttcttccgcacatagcagcaaatccgccaggagcagtacaccatctagcccgaccggcacgagcagcagtgactccggcgggcaccacatagggtggggcgagcgccaggggcaatggctgaggaggagacgcctggacggagccataaatcgcgtgcctgtgggcttttatcagcgggtctggaaaatactgcagaagtgccacggactgagtattgacggctatgttctcccctcttctacaacgagggagatgaccccccatgaaataaaattcgcagttcacgtggaatcagtcttgaacagggtgcctcaaccagagtaccgccagctgctggtggaagcaattatggtgctgaccttgctgtctgataccgagatgacaagcatcggcggaattatccacgtagatcaaattgtccagatggcgtctcagctgttccttcaggaccaggtgagtatcggcgctatggataccttggagaaagatcaggccacgggaatctgtcacttcttctatgacagcgctccaagcggtgcttatgggactatgacctacctgacccgcgctgtagcctcatacctccaggagctgcttcccaatagcggatgccaaatgcag

SEQ ID NO: 6228 - DNA, 3705 bp, Artificial Sequence
  derived and/or modified sequence
atgagatcgaggagcaattccggtgtgcggctggatggctatgctcgcctggtccagcagacaatcctgtgctaccaaaaccccgtgacaggtctgctgtccgcgagccatgagcagaaggatgcttgggtccgcgacaacatctactccatcctggctgtatggggactgggtatggcatatcgcaaaaacgccgaccgagacgaggacaaggcgaaggcctacgaattggagcagaacgtggtcaagctgatgagaggtttgcttcagtgcatgatgcgccaagtggctaaggttgagaagtttaaacatacccaatcaaccaaagattccttgcatgccaagtacaatactgccacgtgtgggacagtcgtgggggacgatcagtggggtcacctgcaggtggacgctacctctctttttctcttatttctagcccagatgacagcatcagggcttcggattatattcacactggacgaagtggcttttattcagaatctcgtgttctacatagaagcagcttacaaagtggccgattacggcatgtgggaacgcggagataagaccaaccaagggatcccagaattgaacgccagctccgtagggatggcgaaagccgctctggaggcaatcgatgagctggacctgttcggtgctcacgggggacggaagtccgtaattcatgtcctgcccgacgaggtcgagcattgccaatcaatactgttctcgatgctgccacgggcttccacatctaaagagatcgacgccggcctgctgagtattatctcctttcctgccttcgctgtggaggatgtcaacctggtgaatgtaacaaaaaacgagattatttcaaagctgcagggccgctacgggtgttgtcgattccttcgcgacgggtacaaaactccccgggaagacccaaatagactgcactacgatcctgccgagctcaagcttttcgagaacatcgagtgtgagtggccagtgttctggacatacttcatcatagatggggtgttttcaggagacgccgtgcaggtacaggaatatagagaggcgctagaggggatcctgattcgtggtaagaatgggatccggctggtgcccgagctgtatgcagtgccaccaaataaagtagatgaggaatataagaatccgcacactgtcgatcgggtccccatgggcaaggtaccccatctctgggggcagtctctgtacattctgtcttccttgctggcagagggctttttggcagccggggagattgaccccctcaaccggcgctttagtacgagtgtcaagccggacgtagttgtgcaggtgacggtcttagccgaaaacaaccacatcaaagacctgttgcggaagcatggtgtcaatgtacagtcaattgcagacatccatccaatccaggtgcagcctggacggatcctgagccacatttatgccaagctgggtaggaacaaaaatatgaatctgtctggaagaccatatcggcatatcggggtgctggggacctccaaactctacgtgattcgcaatcagattttcacattcacgcctcagttcactgatcagcaccacttttacttggccctcgataacgagatgattgtggaaatgctcaggatcgaactggcttacctgtgcacgtgttggcgtatgactgggagaccaactctcacgttcccaatcagcaggaccatgctgacgaacgacggttccgatatccattccgcggtgttgtcaacaatcagaaaactagaagatggctacttcggcggtgccagagtcaaacttggcaacctcagcgaatttctgacgacgtctttctatacataccttacttttctcgatccagactgcgatgagaaactgtttgacaatgctagtgaaggaacctttagtcctgattctgacagtgatcttgtcggttacttggaagatacatgtaatcaggaatcgcaggacgagcttgatcactacatcaatcaccttctacagtcaacctctctgcgttcgtatcttcctccgctgtgcaaaaacactgaggaccgccatgtgttctcagctatacattccactcgcgatatcctgtcagttatggcaaaagctaagggtcttgaagtgccttttgtgcctatgacgttgcccacaaaagtactgtcagctcaccgcaagagcttaaatctggtggacagcccccaaccccttctggaaaaagttcctgaaagcgatttccagtggcccagggacgatcatggcgatgtggattgcgagaagctggtggagcagctgaaagattgttcgaatctccaagatcaggctgatatcttgtacattctgtatgtcatcaagggaccttcttgggacaccaatctgtctggccagcacggcgttactgtgcagaaccttttaggggagctgtacgggaaagcagggctcaaccaggagtggggcctgatccgatatatttctggtctcctgcgcaagaaagttgaggtgctggcagaggcatgcacagatctcctctcccaccaaaaacagctgactgtgggtctcccacccgagcctcgagagaagatcatctctgcgccattgcccccagaggagttgaccaagctaatctacgaggctagcggccaagacatatctattgccgtgctgactcaagaaatcgtcgtgtatcttgcaatgtatgtgcgcgcccagccctccctttttgtagagatgctcagacttcggattggccttattatccaggtaatggccaccgagttggctcgctcactcaattgttccggggaggaagcctccgagagcttgatgaacctcagcccttttgatatgaagaaccttttgcaccacatcctgtccggcaaagagttcggcgtagaacgaagcgttcgcccaattcatagtagtacctcctctcctaccatttctatccatgaagtgggacacaccggggttacaaagaccgagagatcgggaatcaatcgtctaaggtccgagatgaagcagatgactagacgattttccgctgacgagcagtttttctctgtgggacaggcagccagttccagcgcgcactcttccaagtctgccaggagctcaactccgtcctctccgaccggcacctccagtagtgatagtggaggacaccacatcgggtggggggagcgtcagggccagtggcttcggcgacggcgcctagacggcgccatcaaccgcgttccagttggcttttatcaaagagtgtggaagatcctgcagaagtgccacggcttgagtattgacggctatgtcctcccatcttcgacaacacgggagatgacacctcacgaaatcaagtttgctgtgcacgtggagtccgtgctaaatagggttcctcagcctgagtatcgtcaactgctggtggaagcgataatggtcctcacactgctgtccgatacggaaatgacatccatcgggggcattatccatgtcgatcaaatcgtccagatggcctctcagcttttcctccaagatcaggtctcaataggtgctatggacacactcgagaaggaccaggccactgggatttgccatttcttttacgactctgcccccagtggcgcttacggaacaatgacttatctaacccgcgccgtggcttcctatctgcaggaacttctgcccaattctgggtgccagatgcag

SEQ ID NO: 6229 - DNA, 3705 bp, Artificial Sequence
  derived and/or modified sequence
atgcgatcccggagtaacagtggggtacggctcgacggctacgcccgcctcgtgcagcagacaatcctgtgctaccagaacccggtaaccggactgctatcagcctctcacgaacaaaaagatgcgtgggtgagagacaacatttatagcatactggcagtatggggtctggggatggcatacagaaaaaatgcagacagggatgaagacaaagcaaaagcgtacgaactggagcagaacgtggtgaagctgatgcgcggtctgctgcagtgcatgatgcgtcaggtggccaaagtggagaagttcaaacacacccaatctaccaaagactctttgcatgctaagtacaacacagccacttgtgggactgttgtgggagacgaccagtggggccaccttcaagtggatgcaacatcgttgttcctgctctttcttgcgcaaatgaccgcatcaggtctgcggatcatttttaccctcgacgaggtcgccttcattcaaaatttagtattctatattgaggccgcgtataaggtagccgactatgggatgtgggaaagaggggacaagacaaaccaaggcatccctgagctcaacgcatcctcggtgggcatggctaaggctgctctcgaggccatcgacgagctggacctattcggagctcacggaggacgtaagtctgttatccatgtgctgcccgatgaggtggagcactgtcagtctattctgttttccatgctgcccagggccagcacaagtaaggaaatcgatgcaggcctgctgtctatcatctcttttcctgcctttgccgttgaggatgttaatctcgtgaatgttactaagaacgagattatctctaaactgcagggccgatatggctgctgcagattcctgagggatggctataaaacaccacgcgaggaccccaaccggctgcattatgacccagctgaactcaaactgttcgagaatattgaatgtgagtggcccgttttttggacctattttatcatcgatggggtgttttctggtgatgcggtacaagtgcaagagtaccgcgaggccctagaagggatcctgatcagagggaaaaatggcatccgcctggtgcctgagctgtatgctgtgcctcccaacaaagtggatgaggaatacaagaacccccatacggtagaccgggtgccaatgggaaaagtgccccatttgtggggacagtcactgtacattctgtcgtccctactagcagagggtttcctggctgctggtgagatagacccgctcaatcggcggttctcaacgagtgtgaagcccgatgttgtagtccaggttacggtcctggccgagaataaccatataaaggatcttttgagaaagcatggagtgaacgtgcagtcaatcgccgacatacatccaattcaggtgcagccaggtaggatcctttctcatatttacgccaaactcggccgtaataagaacatgaacctgagtgggaggccctatcgccatatcggtgtgctgggcacctccaaattgtacgtaatccgcaaccagatttttacattcacaccacagttcacagaccagcatcatttttacctagcgctggataacgagatgatcgtagaaatgttgcgcatcgaactggcttacctctgcacatgctggaggatgacaggacgccccacattgaccttccccatctcacgtacgatgctgaccaacgacgggtccgatatccacagcgctgtcctttctaccattcgcaaactggaggacggctactttggcggggctcgagtgaagctgggcaacctgagcgaattcctgactacaagtttttacacatacctgacttttttggatccagattgcgatgaaaaactcttcgataacgcgagtgagggcacatttagtccagatagtgacagcgatctcgtgggctaccttgaggacacctgtaatcaagagtcccaggacgaactggatcactatattaaccatctcttacagagcacgagcctgcggtcttatttgccacccttatgtaaaaataccgaggatagacacgtgttcagtgctatccattctacacgagatatcctctctgtcatggccaaagcgaagggcctggaagtcccgttcgtgcccatgaccctgcccaccaaggtactgtccgcccaccgcaaatccctaaatctggtcgacagcccgcagcctctcctagagaaggttcccgagagtgacttccagtggccacgcgacgaccacggggacgtggactgcgaaaagctggtggagcagctgaaagattgctccaaccttcaggatcaggcggacatcctctacattctatatgtgattaagggccccagttgggatactaatctctctgggcagcacggtgttacagtgcagaatctgttaggagagctttacgggaaagccggactcaaccaagagtggggactcatccggtatatcagcgggctgttgaggaagaaggtggaggttctggccgaggcgtgcacagatctcctcagtcatcagaaacaactcacggttggcctgccacctgagcctagagaaaagatcatctccgccccacttcccccagaagaactgacaaaactgatctacgaagccagtggccaggacatctcaatcgcagtgctgacccaagaaatcgtcgtctatctggccatgtacgtaagggctcagccgtcactgttcgttgaaatgcttcgactgagaatcggtctcataattcaggtgatggccacagaactggctcgctcactcaactgtagtggagaggaggcatctgagagcctgatgaaccttagtccattcgacatgaagaatttgcttcaccacattctgtctggcaaggagtttggcgtggaaaggagcgtcaggcccattcattcgtcaacctcctcgcccaccatcagcatacatgaggtgggccacacaggtgtgactaagacagaacgatccggaataaaccgtttaagaagcgagatgaaacagatgacgcgacgcttctccgccgatgagcagttcttcagcgtggggcaagcagcgtcaagcagcgctcatagcagtaaatcggccagaagcagtacccctagctcacccacagggacctcatcttctgattcaggtgggcaccatattggctggggtgagcgacagggccagtggctgaggcgcaggcgtcttgatggtgcaattaacagagttcccgtggggttctatcaaagggtttggaaaatccttcagaaatgtcatggactgagtatcgatggctacgtgctaccctcttctacgacccgagagatgactccccacgagatcaaattcgccgtgcacgtcgaatccgtcctgaaccgcgtcccacagccggagtaccgacagctcctggtggaggccatcatggttttaacattgctcagcgataccgaaatgacaagcatcggcggcatcatccacgtcgaccagatcgtccagatggccagccaactgttcctgcaagatcaggtgtccattggtgctatggacacattggagaaggatcaggcgacagggatctgtcacttcttttatgactccgcaccgagcggcgcttatgggacgatgacttatctcacccgcgcggtcgccagctatctccaggaactactgcccaattcaggttgccaaatgcaa

SEQ ID NO: 6230 - DNA, 3705 bp, Artificial Sequence
  derived and/or modified sequence
atgagatcacggagcaactccggagtccggctggatgggtacgccagactggtacaacagactattttgtgctaccagaaccctgtgaccggactactctccgcctctcacgaacagaaggatgcctgggtgcgtgacaatatatattccatcctggccgtgtggggtcttggaatggcttaccgcaaaaatgccgaccgggatgaagataaggcaaaagcttacgaattagagcaaaacgtggtgaaattaatgcgaggattactacagtgcatgatgcgacaggtggccaaggtggagaagttcaaacatacacagtctacaaaagatagcctgcacgctaagtataataccgctacatgcggcaccgttgtgggcgatgatcagtggggccacctgcaggtggacgctacaagcttattcttactctttcttgcccagatgaccgcctccggacttcggattatctttacactggacgaggtggcttttatccagaacctggtcttctatatcgaggccgcctataaggttgctgattacggcatgtgggagcgtggggataagactaatcagggaattcccgaactaaacgcctctagtgtgggaatggctaaagctgctctggaagcaattgacgagctggacctgtttggtgcccacggagggagaaagtcagtgattcacgtgctgcccgatgaagtggaacattgccaatctatcctgttcagcatgctgcccagggcctccaccagtaaggaaattgacgcaggtctgctgtcaataatctccttcccagcttttgctgtggaggacgtgaacctggtgaatgtcaccaagaacgaaatcattagcaaactgcagggaagatacgggtgttgtcggttcctgcgcgacggttataagacccctagagaggacccaaatagactgcattacgatcccgctgagctgaagctcttcgagaatatagaatgcgaatggcctgtgttctggacctactttatcattgacggcgtgttcagtggcgatgccgtccaggtacaggagtacagggaggccttagagggaatactgatccggggaaagaacggcatcagattagtgcccgagctgtacgccgtgccacctaacaaggtcgacgaagaatacaagaatcctcatacagttgaccgcgtgcccatgggcaaggtacctcacctttggggacagtccctgtacatcctgtcttcactactggccgaaggattcctagccgccggggagatagatcctctcaatagacggttctctacatctgtaaaaccagacgtggtggtgcaagtcactgtgctggccgagaataaccatatcaaagatctgctaagaaagcatggtgtgaatgtgcagtcaatcgctgatatacatcccatacaggtgcagccaggccggatcctcagccacatttacgccaaactggggcggaacaagaacatgaacctgagcggccgcccatacaggcatataggagttctcggaacctctaagctgtatgtgattaggaaccagatcttcacatttactccacagttcaccgatcagcaccacttttacctggccttagataacgagatgattgtggaaatgctgaggattgaactcgcatacttatgcacctgttggagaatgaccggccggcctacactgacctttcctatcagccggacaatgctgaccaatgatggaagtgacatccattcagctgtgctgtccacaatcagaaaactggaggacgggtatttcgggggcgccagagtgaaactgggcaacctgtcagaatttttaaccaccagtttttatacctaccttactttcctagacccagattgtgacgaaaagctgtttgacaacgctagtgaaggcactttctctcctgactccgatagcgatctagtggggtatctcgaagatacatgcaatcaggagtctcaagacgaactggaccattatattaatcacttgttacaatcaacttccctgaggtcctacctacctcccctatgtaagaacacagaagatcggcacgtgttcagtgccatccacagtactagagatatcctgagcgtgatggccaaggctaagggcttagaagtcccattcgttcccatgactctgcctacaaaggtgctgagcgcacacaggaagagtctcaatttagtcgattccccccaacctcttctggagaaggtgccagaaagcgattttcaatggccaagagatgatcacggcgacgtcgactgtgagaaacttgtagagcaactgaaagactgctctaatctgcaggaccaagccgacattctgtatatattgtacgtgattaaaggcccttcttgggatacaaatttatctggccagcatggtgtgactgtgcaaaatctactcggcgagctttacggcaaagccggccttaatcaggagtggggactgatccggtacatctctggcctgctgaggaagaaggtcgaggtgctggcagaggcatgtacagatttactgagccatcagaaacaactgacagtggggctgccacccgagccaagagagaaaattattagcgcaccactgccaccagaggaacttactaagttaatatacgaagcttccgggcaggatatctccattgccgtgttaacacaggaaatcgtggtttacctggctatgtatgttcgggcccaaccttctctctttgtggaaatgttacgcctacgtataggccttataattcaggtgatggctacagaactggctcgcagtctgaactgctctggggaggaagccagtgagtcattaatgaatctgtctcctttcgacatgaaaaatctgttacaccacatactgtccggcaaagagttcggcgttgaacgtagcgtgaggccaattcactcctccactagcagtcccaccatatcaatacacgaggtgggacacacaggcgtaacaaaaaccgaaaggagcggaataaatagactgcggtcagagatgaaacagatgactaggcgtttctccgctgatgagcagtttttcagcgtcggccaggcagcatcttcctctgcccattcttccaagtccgcccgcagctctacccctagcagccccactgggacttctagttctgactcaggcggtcatcacattggttggggcgagcgtcaaggtcagtggttgcggaggcggagattagatggtgccattaaccgggtgccagtcgggttttaccagcgtgtctggaaaatcctacagaaatgccatggtttatctattgacggatacgttctgccctcaagcacaaccagggaaatgactccacacgagataaagtttgcagtgcatgtcgagtcagtactcaatagggttcctcagcccgagtatcggcaactcctcgtcgaggccatcatggttctgacactactgagcgacactgagatgacaagcattggcggtatcatccatgtggaccagatcgttcaaatggcaagtcagctgtttcttcaggaccaggtttccataggggccatggacaccctggagaaagaccaggccactggcatctgccattttttctacgattccgccccaagcggcgcatatggaacaatgacctacctaaccagggcagtggcatcctatctgcaggagttattacctaattctggatgccaaatgcag

SEQ ID NO: 6231 - DNA, 3705 bp, Artificial Sequence
  derived and/or modified sequence
atgcggagccggagcaattctggtgtgcgcctcgacggttacgcgcggctagtgcagcaaactatcctgtgctaccagaacccggtcacgggactgctgtctgctagccatgaacagaaggacgcttgggtcagagacaatatctattcaattcttgctgtgtggggcctggggatggcatacagaaagaacgcagaccgggatgaggacaaggcgaaggcgtacgaactggaacaaaacgtcgtcaagctaatgcgaggactcctgcagtgtatgatgcggcaggtcgctaaggtggagaagttcaagcacacccagtcgacaaaagacagtctgcacgccaagtataacacggccacatgcggaaccgtcgtgggtgacgatcagtgggggcacttgcaggtggacgccactagcttatttctgctctttctggcccagatgactgctagtggcctgcggattatcttcaccctcgatgaggtcgccttcattcagaatttggttttctatatagaagcggcgtacaaagtcgcagactatggaatgtgggaaagaggggataagacaaatcaaggcatcccagaactgaatgcctcttctgtaggaatggccaaggccgcccttgaggctatcgatgaattggatctgtttggggcgcacggtgggagaaagagcgtgatccatgtgttgcccgacgaggtagagcattgccagagcattctgttctctatgctcccccgagcatcaaccagcaaggagatcgacgccgggcttttgagtatcattagcttccccgccttcgccgtggaggatgtgaatctggtaaacgttacaaagaatgaaataatttccaaattgcaggggcggtacggctgctgccgctttttgcgggacggctataaaactcccagagaagatcccaatagactgcattatgatccggcggagttaaagctgttcgaaaacattgagtgtgagtggccagtgttttggacgtatttcattatcgacggggttttttcaggcgacgccgtgcaggtgcaggagtaccgcgaggctctggaaggcatactgatacgcggcaagaatgggattcgcctagtccctgagttgtatgctgtacctcctaacaaggttgacgaggagtacaaaaacccgcacactgtggatcgagttccaatgggcaaggttcctcacctgtggggacagtctttatatatcctgtcaagtcttttagctgagggatttttagccgctggagagattgaccccctgaaccggcgcttttccacgtctgtcaaaccagacgttgtggtgcaggtgactgttttagctgagaataaccatatcaaagatcttcttcgaaagcatggcgtgaatgtgcaaagtatcgcggatattcatccaattcaggttcagccaggccggattctatcacatatttacgccaagctgggccggaataagaacatgaatttatcgggcaggccctataggcacatcggtgtgctagggacctccaaactgtacgttatcagaaaccagatcttcacgttcacaccccagttcaccgatcagcaccatttttatttggctctcgacaatgaaatgatcgtggaaatgctgaggattgagctagcttatctctgcacttgctggcgcatgaccggtcgccctacattgacttttcctatctcacggactatgcttaccaatgacgggtctgacatccactccgcagtactgtccactattcgaaaattagaggatggttacttcgggggggcgcgcgtaaaactgggcaacttgagcgaatttctgacaacttctttttacacgtacctgacctttctggaccccgactgcgacgagaagctcttcgacaacgcttcggaagggaccttctctcctgacagcgacagtgatctggttgggtatctagaggacacgtgtaaccaagagtcacaagatgagctcgatcactacatcaatcatcttctccagtccacttccctccgatcttatctacctccactgtgcaaaaatacagaagataggcatgtgttctccgctatccattcgacccgagacattctatcggtcatggcaaaagcaaagggactggaagtgcctttcgttccgatgacactgccaaccaaggtgctctcagcccaccggaagagtctcaatttagtcgactccccacaacccctactcgagaaggtgccagagtctgatttccagtggccacgggacgaccatggcgacgtcgattgtgaaaagctggtagagcagcttaaagactgctctaacctccaggaccaagccgacatcttgtatattctttacgtaattaagggaccgtcttgggacaccaacctcagcggccagcatggcgtgacagtgcagaacctgctaggcgaactttacgggaaagccgggctcaatcaggagtggggactgatcaggtacatctctggccttcttcgcaaaaaggtggaggtcctcgcggaggcgtgcactgaccttttgtctcaccagaaacaactaactgtgggcttgccccccgaaccacgcgagaagattatttcagcccctttgccacccgaagaactgactaagcttatttacgaggccagtgggcaggacatcagcatagccgtacttacccaggagatcgtggtttatctggctatgtatgttagggcacagccatccctgtttgttgagatgctccgtcttcgcatcggcttaattattcaggttatggcaactgagttagcccgcagcctcaattgttccggtgaggaagcctccgagtcgttgatgaatctttctccattcgatatgaaaaatctgttacaccatatccttagcggcaaggaattcggggtggaaaggtcagtcaggccgatccacagtagtacaagtagtcccactatttccatccacgaggttgggcatactggtgtaacaaaaaccgagaggtcgggcatcaatagactgagaagtgaaatgaagcagatgacacgacgcttttccgctgacgagcaattcttctccgtgggccaagcagcgagttctagtgcgcactcatctaagtccgccagaagcagcacaccttctagcccaaccggaacaagtagttccgattccggcggacatcacatcggatggggtgagaggcaggggcagtggcttaggcgacgacgactggacggagccattaatagagtccctgtcggattctatcagcgtgtgtggaaaatactgcagaaatgccacggactgagcatcgatgggtatgtgctgccaagttccaccacacgggagatgaccccccatgagatcaaattcgcagtccatgttgagtcggtacttaatcgggtgcctcagcctgagtataggcagctgctggtggaagctatcatggtgctgacactgctgtctgatactgagatgaccagtatcggcgggatcattcatgtcgaccaaatagtgcagatggcatcccagctttttctgcaggatcaggtctccatcggtgccatggacacactcgaaaaggaccaggccacaggaatatgtcatttcttttatgattccgctcccagtggcgcttacggcactatgacatatttgacgcgggcagtggcttcgtacctgcaggagctgctgccaaactctggatgtcaaatgcaa

SEQ ID NO: 6232 - DNA, 3705 bp, Artificial Sequence
  derived and/or modified sequence
atgcgcagtcgcagcaacagcggggtacgactggatggatacgctaggttggtccagcagaccatactttgttatcaaaaccctgtgaccggactgctgagtgctagccacgagcaaaaggacgcctgggtgagagataatatttacagcattttagctgtttggggactgggcatggcctatcggaagaatgccgaccgcgatgaggataaggcaaaagcatatgaactcgagcaaaatgtagtaaaacttatgagaggattactgcaatgcatgatgcggcaggtcgcgaaggttgagaagtttaagcatactcagtcaaccaaagactcactccatgctaagtataatactgcgacatgcgggaccgtggttggggacgatcagtggggtcacctgcaggtggatgccacttcattgttcctcttgtttctagctcaaatgaccgccagtgggctgcggattatcttcactctcgacgaagtagctttcatccagaatctcgttttttatatcgaagcagcctacaaggtggccgactatggaatgtgggagcgcggcgacaaaacaaaccaaggtatccccgaactgaacgcttcttctgtagggatggcaaaagctgcattggaggccatagatgaattagatctgttcggtgcccacggcggaagaaagagtgtcatccatgtgctgccagacgaggtggagcactgtcagtccatcctgttctcaatgctgccacgagcctccacctcaaaggagatagatgctgggctcctgagtatcatcagctttcctgcctttgcggtggaagatgtgaacctggttaacgttaccaaaaacgagattatttccaagcttcaaggccgttatggttgctgccggtttctgagggacgggtacaaaaccccccgagaagatccaaatagattacactatgacccagcggagctgaagctgtttgagaacatcgaatgtgagtggcccgtgttctggacgtactttatcatagacggcgtctttagcggagatgcagtacaggtccaggaataccgagaagcacttgaggggatcttgattagaggcaaaaacggcatacgtctggtgcctgaactgtatgccgtgccacccaacaaggttgacgaggagtataagaatccccacacggtggaccgggtgccgatgggcaaggtgccccacctgtggggtcagtccctatacatcctgtcgagtttgctggcagaaggctttctggcagcgggagagattgatcccctgaatagaagatttagtacttcagtgaagccagatgtggtggtgcaggtgacagtactagctgaaaataaccatataaaggatctccttaggaagcacggagttaacgtccagtccatcgccgatatacatccaattcaggtgcagcctggacgtatcctcagtcacatttacgccaaattgggcaggaataagaatatgaacctgtccggcaggccttatcggcacattggggtgctaggcacatccaagctgtacgtgatcagaaatcagatctttactttcaccccacaatttactgaccaacatcacttctacctcgcgctcgacaacgagatgatagttgaaatgcttcggatcgagctcgcatacctttgtacctgttggaggatgaccgggaggcccaccttaacgttccctatttctaggactatgctgaccaatgacgggtccgatatccactcagctgtgctgagcacaatcagaaaattggaggacggatactttggcggtgccagagttaagctcggtaatctatcagaattcctgaccacatccttctacacctacctgacctttctggacccagactgtgacgagaaactcttcgataatgctagcgaagggaccttctcacctgattcagattccgatctcgtgggctacttggaggacacatgcaaccaggagtcccaggacgaattggatcattacattaaccacctgctccagagcacctccctgcggagctacctaccgcctctgtgtaagaatactgaggacaggcacgtcttcagtgctatccactccaccagggatatactgagtgtgatggcaaaggctaaaggactagaggttccctttgttcctatgacacttccaactaaggtactctctgcacatcgaaagagtctcaatctagtggactctccccagcctctgctcgaaaaagtccccgaatctgacttccaatggccgagggacgaccatggtgatgtggactgcgaaaaattggttgaacaactgaaagactgttctaacttacaggaccaagccgatatcctgtacatcctgtacgtaatcaagggaccgtcctgggacactaacctttccggccagcatggggtgactgtgcagaacttgcttggtgagctctacgggaaggcaggattaaaccaagaatggggtctgattcgttatataagtggcctactgcggaaaaaagtcgaagtcctcgcagaggcttgcacggacctactgagccaccagaaacagttgaccgtcggactgcccccagaacctcgcgaaaaaatcatcagcgctccactgcctccggaggagctgactaaattgatatatgaggcatctgggcaagatatatctattgccgtgttgacacaggaaatcgttgtctacctggcaatgtacgtgcgtgcccaaccctctctttttgtggaaatgctgcgcctgagaatcggtctgatcattcaggtcatggccaccgagctcgcccggagcttgaattgctcgggagaagaagccagcgaaagcctgatgaacctctctccatttgatatgaagaatctgctacatcacattctatccgggaaggagttcggcgtggagcgaagcgtgcgaccaatacacagttcaacgtcgagcccgaccattagcatccacgaggtaggtcatactggagtgaccaagacggaacgcagtggcatcaacagacttcggtcagagatgaaacagatgacacggcgcttttccgccgatgagcagtttttcagcgtgggacaagctgccagctcctcagcccacagctccaaatcggctcggagtagcacccctagctcaccaactgggacgtcaagcagcgactccgggggccaccatatcggatggggggagcggcagggacagtggctgaggcggaggagactggatggagccattaatagggtgcccgtaggattctatcagcgagtctggaaaatcttacagaagtgtcacgggttaagcatcgatgggtacgtgcttccgtctagtacgaccagagaaatgaccccccacgagattaaattcgccgtgcacgtcgaatcggtgctcaaccgtgtgccccaaccggagtacaggcagttgctggtggaagccatcatggtgctgactctgcttagtgatacggaaatgacttccatcggcgggatcattcacgtggaccaaatagttcagatggccagccaattgttcttgcaggaccaggtttccatcggtgccatggatactctggaaaaggatcaggcgacgggaatctgccacttcttctacgattcagccccctccggagcctacggcacgatgacatatcttactcgcgccgttgcttcttatctccaggagctcctgccaaattcgggatgtcaaatgcag

SEQ ID NO: 6233 - DNA, 3705 bp, Artificial Sequence
  derived and/or modified sequence
atgagatcgcgatccaactcaggagtccgactggatggttacgccagactcgttcagcagaccattctttgctaccagaatcccgtgactggtctgctttccgcatcgcatgaacaaaaagatgcatgggtcagagacaatatctattcaattctggcggtgtggggacttggtatggcttataggaagaatgcagatcgcgatgaagataaggcaaaggcctacgaattggaacaaaacgtggtcaagctgatgcgcggacttctgcagtgtatgatgaggcaagtggcaaaggtcgaaaagttcaagcatacccaatcgacgaaggattcgctgcacgccaagtacaacactgcaacctgtggtactgtggtgggagacgaccaatggggccatcttcaagtcgatgccacctccctcttccttctctttcttgctcagatgaccgcttcgggacttcggattatcttcactctggacgaggtcgcgtttatccagaacttggtcttttacatcgaggcagcatacaaggtggccgattacggaatgtgggaacgcggagataaaactaaccaaggtattcctgaactcaacgcatcgtcggtgggaatggccaaggcagctctggaggccatagatgaattggatctgtttggagctcacggtggtcggaagagcgtgattcatgtgctgcccgatgaagtggagcattgtcaatccatccttttttccatgctgccaagggcgagcacctcgaaggaaatcgatgcaggacttttgtcgattatctcttttccagcttttgcggtggaagatgtgaatcttgttaacgtgaccaagaacgagatcatttcaaagctccagggaagatacgggtgttgccggtttctgcgggacggatacaaaaccccacgggaggaccctaataggctccattatgatcccgcagagctgaaattgttcgagaacattgagtgcgaatggcccgtgttttggacctacttcatcatcgacggcgtgtttagcggtgacgccgtgcaggtgcaggaataccgtgaagctctggaaggaattctgatacgtgggaagaacggtatccgtcttgtcccagagctctacgctgtcccacctaataaggtcgatgaagaatacaaaaatccacataccgtggatagagtgccaatgggcaaggtgcctcatctttgggggcagtccctgtacatactttcttcactgctcgcagaaggatttttggccgctggagaaattgatcctctgaatcggagattctcaacctctgtgaagcccgacgtcgtcgtccaagtgactgtgcttgcagaaaacaatcacattaaagacctgcttcgaaagcacggggtgaacgtccaatccatcgccgatatccatcctattcaggtccaacctggtcggatcctgtcccacatctacgcaaagctcggcagaaacaaaaacatgaacctgtccggacgcccttacagacatataggtgtgctcgggacctcgaagctctacgtgattcgcaaccagatctttacctttacgccacaattcaccgaccagcaccacttctaccttgcactggacaacgagatgatcgtggaaatgctcagaatcgaactggcatacctttgcacttgttggcggatgactggccgcccaacccttacttttcccatatcgcgcactatgcttacgaacgatggaagcgatatccatagcgcggtcctttcgacgattcgcaagctggaagatggatactttggaggcgcacgcgtgaagctcggcaatctctccgaattccttactacttcgttttacacgtatcttacgttcctggatccagattgtgatgaaaagctctttgataacgcatcggagggtactttttctccagacagcgactctgatctcgtcgggtacttggaagatacctgtaaccaagagagccaagatgaacttgatcattacattaaccaccttctgcagagcacttcactcagatcataccttccccctctttgcaaaaacaccgaggatcgacatgtgttttcggcaattcactccacccgcgatattctttcggtgatggcgaaagcgaaaggacttgaggtcccttttgtccctatgacgctcccaactaaggtcctgtcagcacatagaaagtcgcttaatctcgtcgattcccctcagccccttttggaaaaggtccctgaatctgattttcagtggccgagagatgatcatggagatgttgactgcgaaaagctggtcgaacaactgaaggattgctccaatctgcaagaccaggcagacatactgtacattctgtacgtcattaaggggccctcatgggataccaacctctcggggcagcacggagtcaccgtgcagaacctgctgggagaactgtacggtaaggcagggttgaaccaagagtggggccttatcaggtacatttcggggctcctccggaaaaaagtggaggtgctggcagaagcatgtactgacctcctttcccatcaaaagcagttgaccgtgggtctgcccccggaaccacgtgaaaagataatctcggctccacttcccccagaagaactgactaagttgatatacgaagcatcaggacaagatatctcaattgcagtgcttactcaagaaattgtggtgtacctggcaatgtatgtgagggcccaaccaagcctttttgttgagatgttgcggctgcgtatcggcctcatcatccaggtgatggcaacggaacttgcccgttccttgaattgtagcggtgaagaagcctcggagtcactgatgaacctttcccctttcgatatgaaaaatcttctgcatcatattctttccggaaaagaatttggggtggaacgttcggtgcggccaatccattcctccacctcctccccaactatttctatccacgaagtgggacacaccggagtgaccaagaccgaacgatcgggaattaacaggcttcggtccgagatgaagcaaatgaccagaaggttttcggcagatgagcagttcttctcagtgggtcaggcggcatcgtcctccgcccattcgagcaaatcggcacggtcgtcgactccatccagcccgaccggcacctcttcatcggatagcggtggtcatcacatcgggtggggtgaacggcaaggccagtggcttaggagacggaggctggatggggcaatcaacagagtgccggtgggcttctaccaaagagtgtggaagatacttcagaagtgtcatggactctccattgatggatatgtgctgccttcctcgaccaccagagagatgacccctcatgagattaagtttgctgtgcacgtggagtcagttcttaacagggtgcctcaacccgaataccgccaactgctcgtggaagccataatggtgcttactctgctcagcgataccgaaatgacttcaattggcggtatcattcacgtggatcaaatagtgcagatggcatcgcagctttttctgcaagatcaggtgtcgattggagcgatggatactctggaaaaggaccaagcaacgggaatttgtcatttcttctacgactcggcaccatctggtgcatacggcactatgacctaccttactcgggccgtcgcaagctatctgcaagagcttttgcctaacagcggttgtcaaatgcag

SEQ ID NO: 6234 - DNA, 3705 bp, Artificial Sequence
  derived and/or modified sequence
atgcggtcgcgctctaattcaggagtgcggctcgatgggtacgcacgcctggtccagcagaccattctctgctatcagaaccccgtgactggcttgctgtccgcctctcacgaacaaaaggacgcctgggtgagagacaatatctactcgatcctggctgtgtggggcctgggaatggcataccggaagaacgctgaccgggacgaagataaggctaaggcatacgagctcgagcaaaacgtggtcaaactcatgcggggtctgctgcagtgcatgatgcgtcaggtggcaaaggtcgaaaagttcaagcatacccagtcgactaaggatagcttgcacgcgaaatacaacaccgctacctgcggtacggtcgtgggcgatgaccagtggggacatctgcaagtggacgcgacttccctgttcctgctctttcttgctcagatgaccgcctcgggcctgcgcatcatcttcacgctggacgaggtcgcgtttatacagaaccttgtgttctacatcgaagcagcctacaaagtcgccgattacggaatgtgggagcggggagacaaaaccaatcaggggatcccggaactcaatgctagcagcgtgggaatggcgaaggccgccctggaagccatcgacgaactcgacctgtttggcgctcacggcggaaggaagtcggtcatccacgtgctccctgacgaggtcgaacattgtcaatcgattttgttctccatgcttccacgcgcctccacttccaaggagatcgatgcaggactgctgagcatcatctcattcccggccttcgccgtggaggatgtgaatctggtcaacgtgactaagaatgaaatcatctcgaaacttcaaggtcggtacggatgctgtcgcttcctcagagatggatacaaaactccgagagaggatccaaatcggctgcactacgatcccgcggagttgaagctcttcgaaaacattgagtgcgaatggccggtgttctggacttactttatcatcgatggagtgttctcgggggatgcagtgcaggtacaggagtaccgggaagcactggagggcatcctgattcggggcaaaaatggaatcaggttggtaccggaactgtacgcagtgcctcccaacaaagtggatgaagagtacaaaaacccccacaccgtggatagagtccctatgggcaaggtgcctcatctgtggggacaaagcctgtacatcctctcgtcgttgctggcggagggattcctcgcggccggcgagatcgaccctctgaaccgccgcttctcaacctcggtcaagccagacgttgtggtccaggtgactgtgctggcggaaaacaaccacataaaagacctgctccgcaagcacggagtgaatgtgcagtccatcgctgacatccacccaatccaagtgcaaccaggaagaatactcagtcacatctatgccaagctgggaagaaacaagaacatgaacctgtccggcaggccataccggcatatcggtgtcctcggtacttcgaagctgtatgtgatcaggaaccagatctttaccttcactccgcagtttactgatcagcatcacttctacctcgccctcgataacgaaatgattgtggagatgctgcgaatcgaattggcatacctgtgcacttgctggagaatgacgggccgaccgactcttacttttccgatcagccggacgatgctgaccaacgatggctcggacatccacagcgcagtgctctcgaccatcagaaagctcgaggacggctacttcggtggggcaagggtcaaactgggcaacctgtccgagtttctcaccacctccttttacacgtacctgactttcctggatcctgattgcgatgaaaagctcttcgataatgcatccgaagggaccttctcgccggatagcgacagcgacctggtgggatacctcgaagatacctgcaatcaggaatcgcaggatgaactggatcattacatcaatcacttgctgcagagcactagcctccggtcctacctgccgccgctttgcaagaacactgaggaccgccacgtgttctctgccatccattccacccgggacatcctctccgtgatggccaaggcgaaagggttggaagtcccattcgtgcccatgaccttgcctactaaggtgctttcggcacataggaaatcgctgaatctcgtggacagcccgcagccgctgctcgaaaaggtaccagaatcggactttcagtggccgagagacgaccatggagatgtcgactgtgagaaattggtggaacaactgaaggactgtagcaacttgcaagaccaggcggacattctgtatatcctttacgtgattaagggcccatcctgggataccaatctcagcggacaacacggcgtcacggtgcagaacctgctgggggaactgtacggaaaggcaggtctgaaccaagagtggggactgatcagatacatttccgggctgctgcgaaaaaaggtcgaggtgcttgccgaggcgtgtaccgaccttcttagccaccaaaagcagttgaccgtcgggcttccccctgagccacgtgagaaaatcattagcgctccgctcccaccggaagaactcaccaaactgatctacgaagcctctggccaggacatcagcatcgcggtgctgacccaagagattgtggtctatctggccatgtacgtgcgtgcccaaccgtccctcttcgttgaaatgctgagacttcgcatagggctcattatacaggtgatggccactgagttggctcgatctctcaactgcagcggagaagaggctagcgagtcgttgatgaacctctcgccgttcgacatgaagaatctgctgcatcacatcctgtcaggaaaggaattcggagtggaaaggtcagttaggcctatccattcatcaacctcctcaccaaccatctccatccacgaggtgggacacaccggcgttactaagaccgagcgctccggtatcaacagactgcggtccgaaatgaagcaaatgacccgccggttctctgccgacgaacagttcttctccgttggacaggccgcgtcgtcatcggcccattcttccaagtcagcacgctcctctactccgtcgagtcccactggtacttcgtcatcggattcgggcgggcaccacatcggatggggggagcgccaggggcagtggttgcggaggcgccgcctcgacggggctatcaaccgcgtgcctgtgggcttttaccagagggtctggaaaatcctccagaagtgccatggactctccattgacggctacgtcctgccgtcatccactacgcgcgaaatgacgccgcacgagattaagttcgctgtccatgtggaatcagtcctcaaccgggtcccacaaccggaatataggcagctcctcgtggaggctatcatggtgctcaccctgctctccgacactgagatgacgagcatcgggggaatcatccacgtggaccagatcgtgcaaatggcctcacagctcttcctccaagaccaagtgagcataggagcgatggacaccttggagaaggaccaagcgactggaatctgccacttcttttacgactcagccccgtccggagcctacggaaccatgacctacctgactcgggctgtcgcgagctacctgcaagaactgctccccaattcgggatgtcagatgcag

SEQ ID NO: 6235 - DNA, 3705 bp, Artificial Sequence
  derived and/or modified sequence
atgagatcgcgtagcaattccggagtgcggctggatgggtacgcacggctcgtccaacagaccatcctttgttaccaaaacccagtgaccggcctcctttccgcgtcgcatgagcaaaaggacgcgtgggtcagagataacatatactcgatactggccgtctggggtcttggaatggcttaccgcaagaacgcggaccgagatgaggataaggctaaggcctacgaacttgagcagaatgtcgtcaagctgatgcggggcctgctccaatgcatgatgagacaggtggctaaggtggaaaagttcaagcacacccaatccaccaaggactcgctgcatgcgaagtacaacaccgcaacgtgtggaaccgtggtgggcgacgaccagtggggacacctccaagtggatgccaccagcctctttcttctctttctcgctcaaatgaccgcgtccggactgagaatcattttcactcttgacgaggtggcattcatacagaaccttgtgttctatattgaagcggcttacaaagttgcggactacggaatgtgggaaagaggtgacaagactaatcagggtattcctgaacttaatgcgtcatccgtgggcatggccaaggccgccctcgaggcaattgatgagctggatctgttcggcgcccatggaggacgcaagtccgtgattcatgtcctgccagatgaagtcgagcattgccagtcaattctgttttcaatgttgccacgtgcatcgacttctaaagaaattgatgcaggactcctctcgattatctccttcccagcatttgcagtcgaggacgtgaatctcgtcaacgtgactaaaaacgaaatcataagcaaactgcaggggcggtacggatgttgccgctttcttagagacggttacaagaccccaagagaggatccaaataggctccattacgatcctgccgaacttaagctctttgaaaacattgagtgtgagtggcccgtcttttggacgtacttcatcattgacggcgtgttttctggtgatgcagtgcaggtgcaagaatacagggaagcgctcgaaggtatcctgattcgaggaaagaatgggattagactcgtgccagaattgtacgccgtgccgccgaataaggtggatgaagagtacaagaacccgcataccgtcgaccgcgtgccaatgggtaaagtgccccacctctgggggcaatcactttacatcctctcgtcactgctggctgaaggttttcttgcagccggtgagattgatccactcaaccgacggttcagcacctctgtgaaaccggatgtagtggtgcaagtgacggtgcttgcagaaaacaaccatatcaaggacttgctgcggaaacacggggtcaacgtgcaatcgatcgcagacattcatcctatccaagtgcaacctggaagaatcttgtcccacatttatgcaaaacttggccgaaacaagaatatgaacttgagcggtagaccttaccgtcatatcggtgttcttggtacgtcaaaactttatgtgattaggaatcagatctttaccttcacccctcagtttacggatcagcaccacttttacctcgcacttgacaacgaaatgatcgtcgagatgctgaggatagaacttgcctacctgtgtacctgttggaggatgactggacgtcctacccttaccttcccgattagcaggactatgcttactaatgacggaagcgacatccattccgcagtgttgtcaactatccgtaaacttgaggacggttacttcggtggcgcacgggtgaagctgggcaacttgtcggagtttcttaccacttcattttacacgtacctcacttttcttgatccagactgtgacgagaagctgtttgataatgcaagcgagggaactttttccccagattccgattcggatctggtgggatatctggaagatacctgtaatcaggagtcgcaggatgaactggaccattacattaatcacttgctccaatctaccagcctgagatcgtacctcccgccactgtgcaagaacactgaagatagacacgtgttttccgcaatacactcgaccagagatatcctgtccgtgatggcaaaagcaaagggactggaagtgccctttgtgcctatgaccctgcctactaaggtcctgtcagcgcaccgcaaatctctcaatctcgtcgattcacctcagcctcttcttgagaaggtgcctgaatcagattttcagtggcctcgcgatgatcacggtgatgtggactgtgagaagctggtcgagcaattgaaagactgtagcaacctgcaggaccaggccgacattctttacattctctacgtgattaagggaccctcgtgggataccaacctcagcggacagcatggcgtgaccgtgcaaaatctgctgggcgagctgtacggtaaggcaggcctgaatcaggaatggggacttattcgctacatatcagggttgctccggaaaaaggtcgaggtgttggccgaagcctgtacggacctgctttcgcaccagaagcaactgactgtgggcctgccgccggaacctcgggaaaagattatcagcgctccgctgccaccggaggagctgactaagctcatctacgaggcatcaggtcaggatatttctattgcggtgcttacccaagaaatcgtcgtctaccttgccatgtatgttagagcccaaccttcgctcttcgtggaaatgcttagattgcgaatcggcctcattatccaagtgatggcaaccgaactggcgcggtcgctgaattgctccggtgaagaggcgagcgaatcacttatgaatctctctcctttcgacatgaaaaaccttctgcaccacattctgagcggcaaggaattcggcgtggaacgctcggtgcggcctatccatagctcaacttcgagccccaccatttccattcacgaagtcggacataccggcgtcactaagaccgagagaagcggtattaaccggctgagatcagagatgaagcaaatgaccagaagattttccgcagatgaacagtttttctcggtcggacaagctgcatcctcatcggcacactcttccaaatcggcacgtagctctaccccgtcctcgcctaccggaaccagctcaagtgattctggaggtcaccatatcggatggggagaacggcaaggacagtggctgagacgtcgtagactcgatggagcaatcaatcgcgtgcctgtggggttttaccagcgcgtgtggaagatcctgcaaaaatgtcatggactgagtatcgatggttacgttctgccatcctcaaccactcgtgaaatgactccacatgaaatcaagtttgcagtgcatgtcgaatcagttcttaatcgggtccctcaacccgaatacagacagctgctggtggaagcaattatggtgctcactttgctgagcgacaccgaaatgacctcgattggtgggataattcatgttgatcagattgtgcaaatggcatcacaactttttcttcaggatcaagtcagtatcggagcaatggacacccttgagaaagatcaagctaccgggatttgccatttcttctacgacagcgccccctcgggtgcctacgggaccatgacctaccttacccgcgccgtcgcttcgtacctccaggaacttctccctaattccggctgccaaatgcag

SEQ ID NO: 6236 - DNA, 3705 bp, Artificial Sequence
  derived and/or modified sequence
atgcgtagcagatctaattcgggagtgagactggacggctacgcccgcctcgtccagcaaaccatactctgctaccaaaacccggtcaccggactcctctctgcgagccacgaacaaaaggacgcgtgggtcagagataacatctactccatcctggctgtgtggggtcttgggatggcgtaccgcaaaaacgccgatcgcgatgaggacaaggcaaaagcctacgagctggagcagaatgtggtgaaactcatgcggggactcctccaatgcatgatgcggcaggtggctaaagtggaaaagtttaagcacactcagtcgaccaaggactccctccatgcaaagtacaacaccgccacttgcggtacggtagtcggtgacgaccagtggggacatctccaggtagatgctacgtcgctcttcctgctgttcttggctcagatgacggcatccggtttgcggattatctttactctcgatgaggtggccttcattcagaacctggtgttctacattgaggctgcttacaaggtggcagactacggaatgtgggaaagaggggacaagactaatcagggcatcccggagctgaacgcctcctctgtgggaatggccaaggcggccctggaggcgatcgacgaactcgacctgttcggagcgcatggcggacggaagtccgtgatccatgttctgccggacgaggtggaacactgtcaatccatcctcttctccatgctgcctcgggcatcgacctctaaagaaatcgacgccggacttctctcaatcatctcgttccctgcgttcgccgtggaagatgtcaatctggtgaacgtgaccaaaaacgagatcatttcgaagctgcagggacgctacggctgctgtcggtttcttcgcgacggctacaagactccgcgcgaagatcctaaccgcctccactacgacccggcggagctgaagctgttcgaaaacatcgagtgcgagtggccggtgttttggacttacttcattatcgacggggtcttttcaggcgacgctgtgcaggtgcaggaataccgcgaggccctggagggtattcttatcaggggtaaaaacggcatccgcctggtgccggaactctacgcagtgccgccgaacaaagtggatgaagaatacaaaaacccccacactgtagatagagtgccaatgggaaaggtgccgcatctttggggacagtccttgtatatcctgtcaagccttctggccgaaggattccttgcagccggagagatcgatccgctgaaccgcagattttcaacttccgtgaagccggatgtcgtggtgcaagttaccgtgcttgcggagaacaaccacatcaaggacttgctgagaaaacacggagtcaacgtccaatcaatcgcagacatccacccgatccaggtccagccaggccgcatcctgtcccacatctacgcaaaactgggacggaataagaacatgaatctgtcgggacggccatatcggcatatcggcgtcctgggaacctcaaagttgtacgtcatcagaaaccagatcttcaccttcactccacagttcaccgaccagcaccacttctacctcgcgctggacaacgagatgatcgtagagatgctccggatcgaactggcttacctgtgcacgtgctggcgtatgactggcaggcctaccttgactttccctatcagcagaacgatgctgactaacgatggaagcgatatccacagcgctgtcctttcgactattcggaagctggaggacgggtactttgggggtgcccgtgttaaactgggaaatttgagcgaattcctgaccaccagcttctacacttacctcacttttctcgacccggattgtgatgaaaagttgttcgacaatgcatccgaaggcactttctcccccgattccgactcagacctggtggggtacctggaagatacctgcaatcaagagtcccaggacgaactggaccattacatcaaccaccttctgcagagcacgtccctgcggtcctacctcccgcccctttgtaagaataccgaggaccgccacgtgttttcggcgatccattcgactagagatatcctgtccgtcatggcgaaggcaaagggcctggaagtgccgtttgtgccaatgacccttccaaccaaggtcctgtcggctcataggaagagccttaaccttgtggattccccgcaaccgctgctcgagaaggtcccagaaagcgatttccaatggccacgcgatgatcacggtgacgtggactgcgagaagctcgtggaacagctgaaagattgctctaacttgcaggatcaagccgacattctctatatcctgtatgtgatcaaaggaccctcgtgggacaccaatttgagcggacagcatggagtgactgtgcagaacctcctgggagaactgtatgggaaagccggattgaaccaagagtggggattgattcgctacatctccggactcctgagaaagaaggtggaagtgctcgccgaagcatgcaccgatcttcttagccaccaaaagcagttgactgtgggcttgccaccggaaccgcgggaaaagatcatctcggcccccctgccgcctgaggagctgactaagctcatctacgaagcatccggacaagacatctcgatcgccgttctcacccaggaaatcgtcgtgtacctcgccatgtacgtgcgggcgcagccttcactgtttgtagagatgctgcgtctcaggatcggccttatcattcaggtgatggctaccgaactggcgagatcactcaactgctccggggaagaggcgtccgaatcactgatgaacctgtcgccattcgacatgaaaaatctgctccaccatattctgtcgggaaaggaattcggtgtggaacgcagcgtgcgaccaatccactcgtccacctcgtcgcctacgatttcaatccatgaggtcggtcacactggcgtgaccaagaccgaacgcagcggtatcaataggttgcggagtgagatgaagcaaatgactagacgattctcggcggacgagcaattctttagcgtcggccaggccgcctcatcctcggcgcacagtagcaagtccgcccgcagttctaccccgtcatcgcccaccggaacctcatcgagtgacagcggtggacatcatatcggatggggggaacgccaggggcagtggctgcggaggcggcggctcgatggagcgataaatcgggttcctgtcgggttctaccaaagggtgtggaaaattctgcaaaaatgtcacggcttgtccatcgacggatacgtgctcccttcaagcaccactcgcgagatgaccccccatgaaatcaagttcgccgtccacgttgagagcgtcttgaatcgggttccacagccagagtacaggcaacttctggtcgaagcaatcatggtgctgactctcctgtcggatacggaaatgacctcgatcggcggcatcatccatgtcgaccaaattgtgcagatggccagccagcttttcctgcaagatcaagtgtcgattggagcgatggacaccctcgaaaaggaccaggcaaccggaatctgccacttcttctacgattcagctccgtcgggggcctacggaactatgacttatctgacccgcgccgtcgccagctacctgcaggaactgctgccaaatagtggatgccagatgcag

SEQ ID NO: 6237 - DNA, 3705 bp, Artificial Sequence
  derived and/or modified sequence
atgcggagccgatctaactccggcgtgagactggatggatacgctaggcttgtccaacaaacaattctgtgttaccagaatccggtgacgggactgctgtcagcttcacacgaacagaaggacgcatgggtgagggacaacatatattcaatcctcgccgtgtgggggctgggcatggcgtacagaaagaacgcggacagagacgaggacaaagcaaaggcctatgaacttgagcagaacgttgtgaagttgatgcgcggtctactccaatgcatgatgcgacaggtagccaaagtagaaaagttcaagcacacacagagcactaaggactcattacatgccaagtataacaccgccacttgcggcactgtggttggagatgatcagtgggggcacctgcaggtcgacgccacttccctcttcctgctttttctggcccagatgaccgcctctggactcaggatcatatttaccctcgatgaggtggcgtttatacagaacctggttttttatattgaggccgcatacaaggtagctgattacggcatgtgggaacgcggagacaaaaccaatcaaggcatcccagaactcaacgcctccagcgtcggtatggccaaagctgcgttggaggctatagacgagctggacctgttcggagcacatggcgggcggaaaagcgtgatccacgtcctgccagatgaggtagagcactgccagtccatcttattttccatgctccccagggcctccactagcaaagagatcgatgctggcctcctctctatcatcagcttcccggcctttgctgtggaggatgttaatttagtgaacgtgaccaagaacgagatcatatcgaagctccagggccgatatgggtgctgccgtttcctcagggacggctacaagacgccccgagaagaccccaatcggctccattacgaccctgcggagctgaaactcttcgagaatatcgaatgtgagtggccagtcttttggacctacttcataattgacggcgtttttagtggcgacgccgttcaggtgcaagaatatagggaagccctggagggaatacttatccgggggaaaaacggaattcgcctggtccccgagctgtatgcagttccccccaacaaggtcgatgaagagtataagaacccccacaccgtggatcgcgtacctatgggcaaggtgcctcacctctggggtcagagtttgtacatcctttccagcctgctcgctgaaggattcctggctgcaggtgaaatcgacccactgaacaggcgcttctccacaagcgtaaagcctgatgtggtcgtgcaggttacggtcctggcggagaataaccatataaaggacctgctgcgtaaacacggtgttaacgttcagagtatagctgacattcaccccatacaggtgcagcctggacgcatcttgtctcacatttatgcgaaactggggcgcaataaaaatatgaacctctctgggaggccctaccggcatattggagtacttgggacatccaaactgtatgtcatacggaaccaaatctttacattcaccccccagttcacagatcagcaccacttctatctggccctagacaacgaaatgattgtggagatgttgcggatcgagctggcctacctgtgcacctgttggcggatgaccggtcgcccgacattgacattcccaataagccggaccatgcttaccaacgatggtagcgacattcattcagctgtgctgtccaccatcagaaagctggaggatgggtattttggaggtgcccgggttaaactgggcaaccttagtgaattccttactacgtccttctacacatatttaacctttctagaccccgattgtgacgagaagttgttcgataacgcaagcgagggcactttctctccagactctgactccgatctcgtgggctatctcgaggatacatgcaaccaggaatcgcaggatgagctggatcactacataaatcatttgttgcagtccacatcgctccggtcttatttaccacccctgtgtaagaacacagaggataggcatgtgtttagcgccatccactcaaccagggatatcttgtcagtaatggctaaggccaagggtctggaagtcccgttcgtgcctatgactttacccacaaaagtcctgtccgcgcaccgaaagtctctgaatttagtggatagtcctcaacctttgttagagaaggtgccagagagtgactttcaatggccccgcgatgaccacggagatgttgattgcgaaaagctggtggagcagcttaaggattgttctaacctgcaggaccaggccgatatactgtatattctctacgtgataaaaggcccatcatgggacacaaacctgtcgggccagcatggcgtgaccgtgcagaacctcctaggggagctgtatggcaaggcaggtctgaatcaggaatggggactgattcgatacatatcaggattgctccgtaagaaggtggaggtcctggctgaagcatgcactgatcttctgtcgcatcaaaaacaacttaccgtggggctgccccctgagccaagggagaagatcatcagcgctcctctccccccagaggagttaactaaattaatttacgaagctagtggtcaggacatcagcattgctgttctcacacaggaaatcgtcgtgtacctcgcaatgtacgtcagggcccagcctagcctgttcgtcgagatgctgcgtcttcgtatcggcctgatcattcaggtgatggctacggagttggcacggagcctgaactgctccggagaagaggcatcagagagcctcatgaacctttcacccttcgacatgaagaatctgcttcaccacatcctatcaggcaaagagttcggggtggaaagatcagttagaccaatccactcatccaccagttcacctactatttcaattcacgaagtggggcatactggagttacaaagaccgagagaagtggaattaaccggctcaggagtgaaatgaagcagatgacacggaggtttagcgccgatgaacagttcttctctgttgggcaggctgcctcaagttccgctcacagcagcaaatcagcacgttcttcgacaccgtcatctcctacaggaacatcaagctctgactctggagggcaccacataggctggggagagaggcagggccagtggcttcgccgtcgacggctcgacggagccataaatcgcgtccccgttggcttttaccagcgggtctggaaaatcctgcagaaatgccacggcttgtccattgatggttatgtgcttccatcaagcacaactcgagagatgactcctcacgaaatcaagttcgccgtccatgtggaaagtgttctgaatagggtgccccagcctgaatatcgacaactgctagttgaggcaatcatggttctgacattactgtcagacactgagatgacaagcataggtggaatcattcatgtagaccagatcgtccagatggcctcccagctctttctgcaggatcaagtcagcatcggggctatggatactctagagaaggaccaggcgaccggaatatgtcacttcttctacgacagtgccccttctggggcttacgggaccatgacctatcttaccagggcggtcgcttcatatttacaagaacttctgccaaactctggctgtcaaatgcag

SEQ ID NO: 6238 - DNA, 3705 bp, Artificial Sequence
  derived and/or modified sequence
atgcgctcacgatcaaactccggggttcggttggacggttatgctagactggtgcaacaaactattctgtgctatcagaaccctgtgactgggctcctgtccgcgtcccacgaacaaaaggatgcatgggtcagggacaatatttactccatactcgcggtttggggcctgggtatggcataccggaagaacgccgaccgcgacgaggataaggccaaagcctatgaactcgaacaaaacgtcgttaagctcatgcgaggacttctgcagtgtatgatgcgccaggtggcaaaagtggagaagttcaaacacacgcagagcactaaggactctctccatgcgaaatacaatactgctacctgcggcactgtcgtgggtgacgaccagtggggccacctgcaggtggatgctacctccctgttcctgctctttctcgctcagatgacggccagtggactgaggattatattcacactggatgaagtagccttcattcagaacctggttttctacattgaggccgcctataaggtcgcagactacggcatgtgggaaagaggagataagaccaatcagggtatccccgaactgaacgcatcaagcgtcggaatggccaaggctgcgctcgaggctatcgatgaacttgatttgttcggagcccatggcggcagaaagagcgtcatacacgtgttgcccgacgaggtcgaacactgtcagtccattctgttttctatgctgcccagggccagcacatctaaggagatcgacgcagggctgcttagcataatttctttcccagccttcgctgtagaagacgtcaacctggtgaatgtgaccaagaatgagataatctcaaagctccaaggtcgatacggctgttgtcgcttcttgcgcgacggatataagactcccagagaggatccaaacaggttgcactatgacccagcagagcttaagctctttgagaacatcgagtgcgaatggccggttttttggacctacttcattatcgacggcgtattctccggggacgctgtccaggtgcaggaatacagagaggccttggaggggattttgatccggggcaaaaatggaattcgccttgtgcctgaactctacgctgttccacctaataaagtcgacgaagaatataaaaatccacataccgtggacagagtgcctatgggaaaggtgccccacctctggggtcagtccctgtacatcctgtcctccctgttggctgagggctttctcgcagctggtgagattgaccctctcaaccgacggttctccaccagcgtgaagcccgatgttgttgtccaggtgaccgttttggccgagaataatcacatcaaggacctcctgcgaaagcacggagtgaacgtccagtcaattgccgacatccatcctattcaggtccagcccggcagaatcctttctcacatttatgctaagctgggtcgaaacaagaacatgaacctgtctggcaggccctatagacatattggagtattgggcaccagcaaactctacgtgatccgcaaccagatattcactttcaccccacaattcacagaccagcaccacttctacttggccctcgataatgaaatgatagtggaaatgcttcgaatcgagctggcttatctctgcacgtgttggcggatgaccggtagacctacgctgacatttcctatctctcgcaccatgcttacaaatgacgggagcgatatccatagcgccgtgctgtccactatacgaaagctcgaagacggctactttggcggtgcacgagtcaagcttgggaatttgagcgagttcctgacgacatccttctacacctatctgaccttcctcgatcccgattgtgatgaaaagctctttgataacgcctccgagggcacattttctccagatagcgacagcgacctcgtcgggtaccttgaggacacctgtaaccaagagagtcaggatgagctcgatcactacatcaaccacctcctgcaaagcaccagcctgcgctcttacctgcccccgctctgcaagaatactgaagaccggcacgtgttcagcgcaattcactctaccagagacattctttcagtgatggctaaggccaaaggactggaggtcccttttgtgccaatgacactcccaactaaagtgctgagtgcacacaggaagtctctcaacctggttgatagtcctcagccacttctggagaaggtgcccgagtctgatttccaatggccacgagatgaccacggagatgtggattgcgagaaactggtggagcaactcaaggactgtagcaatctccaggaccaggccgacattctgtatatactttatgtgataaagggacccagttgggataccaacctcagcggacagcatggtgtgacagtgcagaaccttctgggggagctctacggcaaagctggcctgaatcaggagtggggattgatacggtacatatccggcctgctgcgcaaaaaggtggaggtcctggccgaagcttgcacggatctgctcagccaccagaagcagctcacagtgggacttcccccagagcctagagagaagattatctctgcaccactccccccagaggagttgacgaaactcatttacgaggcctcaggtcaggacatctccatcgcggtgctcacacaagaaattgtagtatatcttgccatgtatgtgagagcccagcccagtcttttcgttgaaatgctgcgactgcgcatcgggctcattattcaggtgatggcaactgagctggcccgaagccttaactgctctggcgaagaggcaagtgagtcactgatgaatctctctccattcgatatgaagaacctcctccaccacatcctcagcgggaaagagtttggagtggagaggtccgttcgcccaatccatagctctacatcaagccccaccatttcaatacacgaggtcgggcatactggggtcacaaaaactgagaggtctggcattaaccgcttgaggagcgaaatgaaacagatgaccagaaggtttagcgccgatgaacaattcttctccgtgggtcaggcagcgtcaagttcagctcacagcagcaaatcagcaagaagcagcacgccgtcttcccccaccggtacaagttctagcgacagcggtggccatcacatcggttggggtgaaaggcaggggcaatggcttagacgcagaagactcgacggggccatcaaccgggttcctgttggattttaccagagagtctggaagatcctccagaaatgccatggactctctattgacggctatgttttgccttctagtacaaccagagagatgacacctcatgagatcaaattcgccgtccacgttgagtctgtcctgaatagagtaccccagcctgaataccggcaactcttggtcgaggctatcatggtgctgactctcctctctgataccgaaatgacgtctatcggcggcatcatccatgttgaccagatcgtacagatggcaagccaacttttcttgcaggaccaagtgagcatcggtgccatggacactctggagaaggaccaggccactgggatctgccacttcttctatgactccgcccccagtggcgcctacgggactatgacctacttgactagagctgttgctagctacctgcaagaactgcttcccaactctgggtgccagatgcag

SEQ ID NO: 6239 - DNA, 3705 bp, Artificial Sequence
  derived and/or modified sequence
atgagatcaagatcaaattctggagtacgtttagacggatatgcaagattagttcaacaaacaattttgtgttatcaaaatccagtaacaggtttattatcagcttctcatgaacaaaaagacgcatgggttcgagataatatttattcaatcttagccgtttggggtcttggaatggcttatagaaagaatgctgatagagatgaggataaagctaaagcctatgaattagaacaaaacgttgttaagttaatgcgaggattacttcaatgtatgatgagacaagttgcaaaagttgaaaaatttaaacatacacaatctactaaagattcattacatgctaaatataatactgcaacatgtggaacagttgttggtgatgatcaatggggtcatttacaagttgatgcaacttctctttttcttttgtttcttgctcaaatgacggcttctggattacgtatcatttttactcttgatgaagttgctttcatacagaatcttgttttttatattgaagctgcatataaagttgcagattatggaatgtgggaaagaggagataaaacaaatcagggtattccagaattaaatgcttcaagtgttggaatggcaaaagctgctttagaagctatagatgaacttgatttatttggagctcatggaggaagaaagagtgttatacatgttctcccagatgaagttgaacattgtcaatcaattctttttagtatgttaccaagagcttctacatctaaagaaattgatgctggtttattatcaataataagtttcccagcttttgcagttgaagatgttaatttggtaaacgttactaaaaatgaaattattagtaaattacaaggaagatatggttgttgtagatttttaagagatggatataaaacaccaagagaggatccaaatagattacattatgatcctgctgaattaaaactattcgaaaatattgaatgtgaatggccagtattttggacttatttcattattgacggagtattctcaggagatgctgttcaagttcaagaatacagagaagcccttgaaggtattttaataagaggaaaaaacggtattagattagttccagaattatatgctgttccaccaaataaagttgacgaagaatacaaaaacccacacacagtagatagagttccaatgggtaaagtacctcatttatggggacaatcactttatattttaagttctcttttagctgaaggattccttgctgctggagaaatagatccattaaatagaagattctctacttctgtcaagccagatgttgtagttcaagtcactgttttggctgaaaataatcatattaaagatcttcttagaaaacatggtgttaatgttcaatcaattgctgatattcatcctattcaagttcaaccaggaagaatattgagtcatatttatgcaaaactaggacgtaataaaaatatgaatttatcaggacgaccatatagacatattggagtattagggacatcaaaattgtatgttattagaaatcaaatttttacatttacaccacaattcactgaccaacaccacttttatcttgcattagataatgaaatgatagttgagatgttacgaattgaattagcttatctttgtacttgttggagaatgacaggaagaccaacattaacattcccaatttcaagaactatgttaactaatgatggatctgatattcactcagcagttttatcaacaattagaaaattagaagatggttatttcggtggagcaagagttaaattaggaaatttgagtgaatttcttactacatcattttatacttatcttactttcttagatccagattgtgatgaaaaattatttgataatgcttcagaaggtactttttctccagattctgattctgatcttgtaggatatttagaggatacatgtaatcaagaatcacaagatgaattagatcattatattaatcatcttttacaatcgacttctcttcgttcttatctcccaccactttgtaaaaacacagaagatcgacatgtttttagtgctatacattccactagagatatactttcagttatggcaaaagcaaaaggacttgaagttccattcgtaccaatgacacttcctactaaggttttaagcgctcatagaaaatctttaaatttagttgattctccacaaccacttcttgaaaaggttcctgaaagtgattttcaatggccaagagatgatcatggagatgttgactgtgagaaactagttgaacaattaaaggattgttcaaatttacaagatcaggctgatattctttatattttatatgtcattaaagggccaagttgggatacaaatttatcaggacaacatggagtaacagttcaaaatcttttaggagaattatatggaaaagcaggacttaatcaagaatggggattgattagatatatttcaggattacttagaaaaaaagttgaagttttagcagaagcatgtacagatttactttcacatcaaaagcaacttacagttggacttccacctgagccaagagaaaagataatttcagctccattacctccagaagaattaactaagttaatttatgaagctagtggacaagatatttctattgctgttttaacacaagaaattgttgtgtatttagctatgtatgttagggcacaaccatctttgtttgttgaaatgttaagattaagaattggtcttataattcaagttatggctacagaacttgcacgaagtttaaattgttctggtgaagaagctagtgaaagtttaatgaatctttcaccatttgatatgaaaaatttacttcatcatattctttctggaaaagaatttggtgtggaaagatcagttagaccaatacatagtagtacttcatctccaactatttccattcatgaagttggtcatacaggtgttactaaaactgaaagatcaggaattaatagacttagatcagaaatgaaacaaatgacaagaagattttcagcagatgaacaatttttttcagttggacaagcagcatcttctagtgcacattcatccaagagtgcaaggtcatcaacaccttcatcgccaactggaacttcatcttcagattctggtggacatcatattggatggggtgaaaggcaaggacaatggttacgaagaagaagacttgatggagctattaatagggttccagttggattttatcaaagagtttggaagattttacaaaaatgtcatggactttcaattgatggttatgttcttcctagttctacaacaagagaaatgactcctcatgaaattaagtttgcagttcatgtagaatcagttttgaatagagttcctcaaccagaatatcgtcagctattagtagaagcaattatggttttaactctattatcagatactgaaatgacttcaattggaggaattattcatgtagaccaaattgttcaaatggcaagtcaattatttttacaagaccaagtttctattggtgcaatggatacactagaaaaggatcaagcaacaggaatttgtcattttttttatgattcagcaccttcaggagcatatggaactatgacatatttaacaagagctgttgcatcatatttacaagaattgcttcctaactctggttgtcaaatgcaa

SEQ ID NO: 6240 - DNA, 3705 bp, Artificial Sequence
  derived and/or modified sequence
atgaggtcgagatcaaattccggagtccgcctcgacggatacgcccggctcgtgcagcaaaccatcctgtgctaccagaaccccgtgactggactcctgtccgccagccatgagcagaaggacgcctgggtgcgggacaacatttactcgatccttgcagtgtggggactgggaatggcctatagaaagaatgccgaccgcgacgaagataaggctaaggcctatgagttggagcagaacgtcgtcaaactgatgagaggactgctgcaatgcatgatgcggcaagtggctaaagtggagaagtttaagcatacgcagtccacgaaggactccctgcacgccaaatacaacacggccacgtgcggaaccgtcgtgggggatgatcagtggggccacctgcaggttgatgcgacctcgctgttccttcttttcctcgctcagatgactgcgagcggacttcgaatcatcttcaccctggacgaggtggccttcatccaaaatctcgttttctacatcgaggcagcgtacaaggtcgccgactatgggatgtgggaacggggtgacaagactaaccaaggaattccagagctgaacgctagcagcgtggggatggccaaagcggcattggaggcgatcgatgaactggatctgttcggcgcccacggaggacgtaagtcagtgatccacgtccttccggatgaagttgaacactgtcagtcgatactgttctcgatgctgccccgcgcgtccacctcgaaggagattgatgcgggattgttgagcatcatctcattcccggcttttgcggtcgaggatgtcaatctggtgaatgtcacgaaaaacgagatcatctctaagttgcagggccgctacggatgttgccgcttcctcagggatgggtacaagaccccgcgggaagatcctaaccgcttgcactatgatcctgcggaactgaagttgttcgaaaacatcgagtgcgaatggccagtgttttggacctacttcatcatcgacggggtgttctcgggagacgccgtgcaggtgcaggaatacagagaagccctggagggcatccttattcggggcaagaatggcatccgattggtccctgagctgtacgccgtcccgccgaataaagtcgatgaagagtataagaaccctcacaccgttgatcgcgtgccgatgggaaaagtgccccacctctggggccaaagcctgtacatcctgtcgtcactgttggctgaaggattcctggcggccggggaaatcgacccgctgaatagacggttttccacttccgtgaaaccggatgtggtggtgcaggtgaccgtgctggccgagaataaccatatcaaggaccttttgagaaagcatggagtgaatgtccaatccattgcagacatccacccaatccaggtgcaaccaggacggatcctcagccacatttacgcgaaacttggacggaacaagaacatgaacctctcaggacgcccataccgccacattggggtgctcgggacctcgaagctctacgtcatccgaaatcagatcttcaccttcactccgcagtttaccgatcagcatcatttctacctcgccctggacaacgagatgatcgtcgaaatgttgagaatcgaactggcctacctgtgcacctgctggagaatgactggaaggcctactctcaccttcccaatctcacgcactatgttgactaacgacggatcggacatccattcggctgtgctgtcgaccatccgcaaacttgaggatggttacttcggcggtgcccgcgtgaagctgggcaacttgtcagaattcctgaccacctcgttctacacttacctcacgttccttgatccggactgcgacgagaaattgtttgataatgcctcggaaggaacgttctcgcctgacagcgactcggacttggtcggatatcttgaagatacctgcaaccaggaatcgcaagatgagttggaccactacatcaaccatctgctgcagtcgaccagccttcgttcatacctgcccccgctgtgtaagaacactgaagatcgccacgtcttttcagcgattcacagcacgagagatatcctgtcggtgatggcgaaggccaagggcctggaagtcccattcgtgccgatgactctcccaaccaaagtcctgagtgcgcaccgcaagtcactcaacctggtggattccccacagccactgttggagaaggtccctgagtcggacttccaatggcctagggatgatcacggcgacgtggactgcgaaaagctggtcgagcagcttaaagactgttcgaacctccaggaccaggcggacatcctttacatcctgtacgtgatcaaaggaccgtcgtgggacactaacctgagcggacaacacggagtgacggtccagaaccttctcggagaactctatggcaaagcgggactgaaccaggagtggggactgataaggtacatctcgggactgctgcgcaaaaaggtggaagtccttgctgaagcctgcaccgacctcctctcccaccagaagcagctgaccgttggccttcccccggagccgagggaaaagatcatttccgcccctctgccgcctgaagaactgactaaactgatctacgaggcgagcggacaggacatctccatcgccgtcttgacccaagagatcgtggtctacctcgctatgtacgtgcgcgcgcaaccgtccctgttcgtggaaatgctgaggctccggattggactcatcatccaagtgatggcaaccgaactggcccgctcactgaactgctccggagaggaagcatcagagagcctgatgaatctgtcacctttcgacatgaagaacctgctgcaccacatactgtccggaaaggaattcggagtggagcgatcggtgcggcccatccacagctccactagctcccctaccatctcgatccatgaggtgggtcataccggagttaccaagaccgagcggtcaggaatcaacagactgagatcagagatgaagcaaatgaccagaaggttttcggcggacgaacagtttttcagcgtggggcaagccgccagctcctccgcgcattcgtctaagtcggcccggtcgagcaccccctcttcgccgactggtacttcgagctcagattccgggggacaccatatcggatggggtgagcgccagggtcagtggttgcggagaaggcggctcgacggcgcaatcaatcgggtgcccgttgggttctaccagagagtttggaaaatactgcagaagtgccacggactttcaatcgacggatatgtgctgcctagctcgaccaccagggagatgaccccgcacgagatcaagttcgcggtgcacgtggagtccgtgctcaatcgcgtgccacaaccggaataccggcaactgctggtggaggcaattatggtccttaccctgctctctgacaccgagatgacctccatcggaggaatcatccacgtggaccaaatcgtgcagatggcatcccagctgtttctccaagatcaggtttccatcggcgcgatggacactctggagaaggaccaggccactggaatctgtcacttcttttacgactcggcgccaagcggcgcatacggcaccatgacctaccttacgagagccgtggccagctacctgcaagaattgctgccgaacagcggctgtcaaatgcag

SEQ ID NO: 6241 - DNA, 3705 bp, Artificial Sequence
  derived and/or modified sequence
atgcggtcgcggtcgaattcaggtgtccgcctcgatggatacgcgagactggtgcagcaaactatcctgtgctaccagaacccggtcactggcctgctctcggcatcgcacgagcagaaggatgcgtgggtgcgggataacatctattcgatcttggcagtgtggggactcggcatggcataccggaagaacgcggacagggatgaggacaaggccaaagcatacgaactggaacagaacgtggtgaaacttatgagaggcttgctgcagtgtatgatgcggcaggttgcaaaagtggagaagttcaagcacactcaatccactaaggacagcctgcatgctaaatacaatactgccacttgtggaactgtggtgggggacgaccagtggggacatctgcaggtggacgccacctccctgtttctgcttttcctcgcccagatgaccgcttccggactgcggatcattttcaccctggacgaagtggctttcatccagaatctcgttttctacatcgaagccgcttacaaggtcgctgactatggcatgtgggaacgaggagataagactaatcagggaattccagagttgaacgcgtcctcggtcgggatggctaaagctgcactcgaggcaatcgacgagctggacctgtttggggcacatggtggtcgcaagtcggtgattcacgtactgccagatgaagtggagcattgccaatccatcctcttctcgatgctccctcgcgcctcgacttccaaagaaattgacgctggcctgctgtcaatcatctccttcccggccttcgcggtggaagatgtgaacctggtcaacgtcactaagaatgagatcatctcaaagctgcaaggccggtatggctgctgcagattcctgagagatgggtacaagactccgagagaagatccgaatcgcctccactacgacccggccgaactcaagctgttcgagaatatagagtgcgaatggccggtgttttggacttatttcatcatcgatggggtcttttctggggatgccgtgcaagtccaggaatatcgcgaagccttggaggggatcctgatccgggggaagaatggaatcaggctcgtgcctgaactctacgccgtgccaccgaacaaggtggacgaggagtacaagaacccacacactgtcgaccgggtgccaatggggaaggtgccccatctctgggggcaatcgctctacatcctttcctccctgctggcagagggattcctcgcagccggagagatcgatccactgaatcggcgcttctccaccagcgtcaagccggacgtggtggtgcaagtcaccgtgcttgcagagaataaccacatcaaggacctcctccgcaagcacggcgtcaatgtgcaatccatcgctgacatccacccgatccaggtccagccaggtcgcattctgtcgcatatctacgccaagttgggacggaacaagaacatgaatctttccggtcgtccatacagacacattggagtgttggggacctccaaactctatgtcatcagaaatcaaatcttcacttttaccccgcagtttacggaccagcaccacttctacctcgcactggataacgagatgattgtcgaaatgctgagaatcgagttggcatacctgtgcacttgttggaggatgactggcagaccgaccctgacgttcccgatctcgcgcaccatgctgaccaacgatggatcagatatccactcagccgtgctgtcaaccatcagaaaactggaagatggctattttggaggcgctcgggtgaaactcggaaacctctcggagttcctcactaccagcttctacacttacttgacctttctggacccagactgcgacgagaaattgttcgataacgcatctgaaggaaccttcagcccggactcggattcagacctggtggggtacctggaggatacgtgtaaccaagaatcccaggacgagttggatcactacatcaatcacctgctgcagagcacttccctgcggagctatctgccgcccctttgcaaaaacacggaagatagacacgtgttctcggccatccattcaactagagatattctgagtgtgatggcgaaagcgaaaggactggaagtgccgttcgtgcctatgaccctcccaactaaagtcctctcggctcacagaaagtcgctgaaccttgtggactccccgcaacctctgctggaaaaggtgccggaaagcgactttcaatggccacgggacgatcacggagatgtcgactgtgagaaactggtcgaacaactcaaagactgctcgaacctccaagaccaggccgacatcttgtacatcctttacgtgattaagggaccctcctgggataccaatctgtcggggcagcacggagtgactgtgcagaatctcctcggagagttgtacggaaaggccggcctgaatcaagagtgggggctcatcaggtacatctcgggactgctgagaaagaaggtggaggttctggccgaggcatgtaccgatctgcttagccaccaaaaacaactcactgtcggactgccgccagaaccgcgcgaaaagatcatttcggccccgctgccgcctgaggaactgactaagctcatctacgaagcctcaggacaggacatttcaattgccgtgctgacgcaagagattgtggtgtacctggcgatgtacgtgcgcgctcaaccgtcgctctttgtggagatgctgcggctgcgcatcggcctcattattcaagtgatggcaacggagttggcccgctcgctgaactgttctggagaggaagcatcagagtccctgatgaacctgagccccttcgatatgaaaaatctgctccatcacatccttagcgggaaagaattcggcgtggaaagatccgttcggccaatccattcatcaaccagctcccctaccatctcaatccacgaggtgggccacactggtgtgactaaaactgagcgcagcggtatcaacaggctgaggtcagaaatgaagcagatgaccaggcggttctcagctgatgaacagttcttctcagtcggacaggcagctagcagctccgcgcactcaagcaaatcggcccgctccagcactccttccagccccaccggtacgagcagcagtgattctggtggacaccatatcggatggggagagcgccagggacaatggcttcgcagaaggagactggacggcgctatcaaccgggtgccggtcggattctaccagcgggtgtggaaaattctgcagaagtgccacggactttccatcgacggatacgtcctgccatcatcaaccacgagggaaatgactcctcatgaaatcaagttcgcagtgcatgtcgaaagcgtcctgaatcgggtcccccaaccggagtaccggcagctcctcgtggaagctattatggtgctgaccctgctctctgacaccgaaatgacctccatcgggggtatcatccacgttgaccagatcgtgcaaatggcttcccagctgttcctgcaggaccaagtcagcatcggtgccatggacactctggaaaaggatcaggcaaccgggatttgccactttttctacgattcagctccatcaggcgcctacggcaccatgacgtaccttactcgcgcggtggcgtcatatttgcaggagttgctgcctaactccgggtgccaaatgcaa

SEQ ID NO: 6242 - DNA, 3705 bp, Artificial Sequence
  derived and/or modified sequence
atgcgctccagatcaaacagcggtgtgaggctggacggttacgccagattggtccagcagactattctgtgctaccagaacccagtgaccggtttgctttcagcgagccatgagcaaaaggacgcatgggtccgagataacatttactcgatactcgcagtgtggggtcttggaatggcttatcggaagaatgcagatagagatgaggacaaggccaaagcgtacgaactcgaacaaaacgtggtcaagctcatgagaggtttgctgcaatgtatgatgcgccaggtggccaaagtggaaaagtttaaacatactcagtcgactaaggatagccttcatgcgaaatacaacactgcaacttgtgggaccgtggtgggagatgaccagtggggacatctgcaagtggatgccacgagcctgtttctcctttttctcgcacaaatgaccgcgtcaggacttcggatcatattcaccctggatgaagtggccttcatccaaaacctggtcttttacatcgaagccgcctacaaagtggccgattacgggatgtgggagaggggggacaaaactaaccaaggcatacctgaattgaacgcttcctccgtgggcatggcgaaggccgctctggaagcaatcgatgagctggatctttttggagcgcacggaggaagaaaatcggtgatccacgtccttccagacgaagtcgaacattgccaatcaattctgttcagcatgcttcctcgtgcatcgacttccaaggagattgacgcgggactgctttcaatcatttcctttccggcattcgcagtggaagatgtgaatctggtgaacgtgactaagaatgagattatctccaaacttcagggtaggtacggttgttgccgtttcctgcgcgatggctacaagacccctagagaggatcccaaccgccttcactacgacccggcagaactcaagctgtttgagaatatagaatgtgaatggcctgtgttttggacgtacttcatcatagacggagtgttctccggtgacgcagtgcaggtgcaagagtatcgggaagcactcgaaggcattctgattcggggtaagaacgggatccggctcgttccagaactctacgcagtcccacccaacaaggtggacgaagaatacaaaaatccacatacggtggaccgggtgccaatgggaaaggtcccacatctgtggggccagtccctttacatactttcgagcctcctggctgagggatttcttgcggcaggagagatcgaccccctgaaccgtagattttcgacgtcagtcaaacccgatgtcgtggtccaagtgacggtgcttgctgagaataaccacattaaggatttgctgcgaaaacacggggtgaacgtccaatcaattgccgacattcatcctattcaggtccaacccgggagaattctgtcccacatttatgccaagctcggacgaaataagaatatgaaccttagcgggcggccttacagacacattggtgtcctcggtacctcgaagctgtacgtgatcaggaaccagatctttacttttactcctcaattcactgaccagcatcatttctaccttgcattggataacgaaatgattgtcgaaatgctgagaattgagttggcttacctttgcacctgttggcgcatgacgggaaggccaaccctgacttttcctatttcgagaaccatgctgaccaatgatggctccgatatacattcggcagtcctctcaactatccgtaaacttgaagatggttactttgggggcgcacgtgtcaaattgggaaatctgtccgagtttctgacgaccagcttttacacttatcttaccttccttgatccagattgcgacgaaaagctgtttgacaacgcatcggaaggcaccttttccccagattccgacagcgaccttgtgggttacctcgaagatacgtgtaaccaagagagccaggatgaactggatcattacatcaatcacctgctgcaatccacttcactcagaagctaccttccacctctgtgcaagaacactgaggatcggcatgtcttttcggcaatccactcgactcgagatatactcagcgttatggccaaagcaaagggactggaggtgcccttcgtgcccatgacgctccccactaaggtcctgtctgcccacagaaagtccctgaaccttgttgattcaccgcagcccctcctcgaaaaggtccctgagtcggactttcaatggcccagagatgatcatggcgacgtcgactgcgagaaattggtggaacagcttaaggattgttcaaacttgcaagatcaggccgatattctgtacattctttacgtgattaagggtccgtcgtgggataccaatttgtcgggacagcatggggtgactgtgcagaatcttctcggagaactttacggaaaggcaggactcaatcaggaatggggacttatacgctatatctcaggacttctcagaaaaaaggtcgaagtgctggcagaggcctgtactgatctgctgtcacatcagaagcaattgaccgtggggttgcccccagaacctagggagaagatcatcagcgcaccactcccaccagaagaactgacgaaacttatctacgaagcgtcggggcaagatatatcaattgctgtgcttactcaggagattgtcgtgtacctggcgatgtacgtccgagcacaaccatcgttgtttgttgaaatgctcagacttcgtataggtttgataattcaggtgatggcaaccgaacttgctagatcgttgaattgttctggcgaagaggcttcagaatccttgatgaacctgagccctttcgacatgaagaatttgcttcaccacattctgtccggtaaggaatttggcgtggaacgctcagtccgtcctattcactcctcgacttcaagcccaaccatttcgattcatgaagtgggtcataccggtgtgaccaagacggagcggagcgggattaaccgcctgagatccgagatgaagcaaatgacccgacgcttttcggcagatgagcagttctttagcgtgggccaagcggcatcatcgtccgcacatagcagcaagtcggcccggtcctcgactcctagctcgccgaccggtacttcctcatcggactccggggggcaccatatcggatggggcgaaaggcagggacagtggcttcggcggagaaggctcgacggggccataaaccgcgtgccggttggattctaccagcgggtctggaaaattctgcaaaaatgtcatggcctgtccatagatggatacgtccttccctcgtcaacgactcgtgaaatgacgcctcacgagataaagtttgctgtccatgtggagtctgtgctgaatagagtgccccaaccagaataccgacaacttcttgtggaagcgattatggtcctgaccctcctttcggataccgaaatgacctccatcggtggcataatccacgtcgaccaaatcgtccaaatggcctcgcaacttttcctccaagatcaagtgtccattggtgcaatggatactctggaaaaggaccaagcaaccggtatttgtcatttcttctatgattccgcaccgagcggggcatacggaactatgacctacctcactcgcgcagtggcttcctacttgcaagaacttcttccaaactcgggatgtcagatgcaa

SEQ ID NO: 6243 - DNA, 3705 bp, Artificial Sequence
  derived and/or modified sequence
atgaggagtcgcagcaacagtggcgtgcgtctcgatggttacgccagactcgttcaacaaactatcctgtgttatcagaacccggtcaccgggctcctctcggcctcacacgaacagaaagatgcttgggtaagggataatatttatagtattctggccgtatggggattaggcatggcatatcgtaaaaacgcagacagggatgaggacaaggccaaggcttacgagttagagcaaaacgtggtgaagctaatgcgaggcctccttcagtgcatgatgcgtcaagttgcaaaggtggaaaaatttaaacatacccagtctactaaggattcgcttcacgcgaaatataacactgcaacctgtggcaccgtggtgggcgatgatcagtggggccacttacaagtggacgcgactagcctgttcctcctcttccttgcgcaaatgaccgcctctggtctgaggattatttttactttagacgaagtagctttcatccagaacctggtattttacatcgaagccgcctacaaggtggccgattatggtatgtgggagagaggtgacaaaactaaccagggaatcccagagctaaacgcatcctccgtgggtatggcgaaagctgcgctggaagcaatagatgagctggacctgttcggagctcacgggggccgtaagtctgtgatccatgtgctgccagatgaagtcgagcactgccagtctattctgttctctatgttgccccgcgcatctactagcaaggagatcgacgctggcctgctctctatcatttcgttcccggcctttgctgtggaggatgtcaacctagttaatgttacaaaaaatgagattataagtaagctgcaggggaggtatgggtgctgtagatttttacgggatggatataagaccccgagggaagatcctaaccgcttacactacgaccccgcggagttaaaattgttcgaaaatatcgaatgcgaatggcccgttttttggacctacttcattatagacggggtcttctccggagatgccgtccaggtgcaggaatatagggaggctcttgagggaatcttgatccgtggtaagaatgggattcgtctggtccccgagctttacgccgttcccccaaataaggtggatgaggaatacaaaaatccacatacagtagacagagtgcctatgggcaaggtgccccatctgtgggggcagtcactctacattctgtcttccctcctggcagaggggttcctggccgccggggagatcgaccctttaaaccggaggttctcaaccagtgtcaagccagacgtggtcgtgcaggtgacagtgctagcagaaaataatcacattaaagacttactacgtaaacatggtgtgaacgtgcaatcgattgccgatattcacccgatccaggttcagccaggtaggatcctgagtcacatttatgcaaaactagggaggaacaagaacatgaacctttcaggaagaccctataggcatattggggtgttgggcacaagcaagttgtatgtgatacgcaaccagatttttacattcacaccccaatttactgatcagcaccatttctacctggccctggataacgagatgatcgtggaaatgctacgaattgagttggcctacctgtgtacctgttggaggatgacaggcagaccgactctcacgtttcccatctctcgaactatgctcacgaacgacgggagtgatattcacagcgccgttctgtcgacaattagaaagctggaagatggttattttggaggagctcgggtgaaactgggaaacctatccgagtttttaacgacttccttctatacttatctgactttcttggaccctgactgcgacgaaaaattgttcgataacgcgtcagagggcactttcagcccagatagcgactctgacctggtgggctatttagaagacacttgcaaccaggaatcgcaggatgagctcgaccactacattaatcacctcctgcagagcacatctctgcgctcatatctgcctcctctttgtaaaaacaccgaagatcggcacgtgttttctgctatacattcgacccgggatatcctgagcgtaatggctaaagcgaaaggccttgaagtcccgttcgttccaatgacccttccgacaaaagttctgagtgcccatagaaagagccttaatttggtcgactcgccccagcccctgctcgagaaggtgcctgaaagtgacttccagtggccaagggacgaccatggggatgttgactgtgaaaagctcgttgagcaactgaaggactgctccaatttgcaggaccaggccgatattctttacatcctctacgtaataaagggcccatcctgggacactaacctgagcgggcagcacggcgtaactgtacaaaatttattgggggagctctacggcaaagcaggactgaatcaagagtggggattaatacgctacatttctgggctgcttagaaagaaagtcgaggtgcttgcagaggcctgtacagatctgctgtcgcaccaaaagcagctaaccgtgggcctgccacctgagccacgcgaaaagatcatatccgcacctctcccccctgaggagctcactaaattaatctatgaagcaagcggacaggacatctcaatcgccgttctgactcaggaaatcgtggtatatcttgccatgtacgtgagagcacaaccaagcctgtttgtggagatgctgcgcttgagaatcggcctgatcatccaggtgatggcaaccgaacttgccaggagcctgaactgctctggtgaggaagcctcagagtctcttatgaatctgagtccgtttgacatgaagaaccttcttcaccatatcttaagcggcaaggaattcggggtggaaaggagcgtcagaccgattcacagctcaacttctagtccaacaatcagtatacacgaggttggccataccggcgtgaccaaaacagaacggtcagggatcaataggttgcgcagcgaaatgaaacagatgacgagaagatttagcgccgacgaacaattcttctctgtggggcaagccgcatcaagttcagcccacagcagcaaatctgctagaagcagtacccccagttctcccactgggaccagcagctccgactcaggaggccaccatatcggttggggagaaagacaggggcagtggctccgtagaaggcgtctcgatggcgcaatcaaccgcgtgcccgtcggcttttaccagcgagtctggaaaatcttgcagaagtgtcacgggctttcaatagatggctatgtgctgccgtcttctacaactcgtgagatgaccccccacgagattaagtttgccgtgcacgtggagtctgtgctgaatagggtcccgcagccagaataccggcagctgctggtcgaagctatcatggttctgaccctgttgagcgatactgaaatgaccagcatcggaggaatcattcacgtcgaccagatcgtccaaatggctagtcagctgtttctccaggatcaagtctctataggagctatggacaccctggagaaggaccaagccactggaatttgccattttttttacgatagcgccccttcgggggcatacggtacgatgacatacctcactcgtgcggttgcaagctacctgcaagaacttctacccaacagcggttgtcaaatgcag

SEQ ID NO: 6244 - DNA, 3705 bp, Artificial Sequence
  derived and/or modified sequence
atgcgctctcgatctaacagtggggttcggttagatgggtacgcgcggcttgtgcagcagactatcctgtgctatcagaaccccgttacaggcctcctgagcgctagccatgagcagaaggacgcctgggtgagggacaatatttactcaatcctggcagtgtggggtttgggcatggcttacaggaaaaacgctgacagagacgaagacaaagccaaggcgtacgagttggagcagaacgtggtgaagctcatgaggggcctgctgcagtgtatgatgagacaggtcgcaaaggtcgaaaaatttaagcacacccaatccaccaaggactcactacacgctaaatacaacacagctacatgcggtacagtagttggggacgatcagtggggtcatctgcaggtggatgccacaagcctcttcctactcttccttgctcaaatgactgcaagtggcctaagaattatcttcacactggatgaggtagcattcattcagaaccttgttttctatatagaagctgcctacaaggtggccgattatggaatgtgggagagaggggacaaaaccaaccagggaatcccagaactgaatgccagctcagtgggcatggccaaggccgccctggaagctatcgacgaactcgacctatttggcgcccatgggggacggaaatctgtgatccatgttctccctgacgaggttgagcattgccagtccattctattttccatgctgccccgagcatccacgagcaaggagattgatgccgggctcctttctattataagctttccagcgttcgcagttgaggacgtaaacttggtgaatgtcacaaagaacgaaattatcagtaagcttcaagggaggtatggttgttgcagattccttagggacggatacaagacgccacgagaggacccaaatcgcctgcactacgaccctgccgagttgaagttgtttgagaacattgaatgcgagtggcccgtgttctggacttatttcataattgacggagtgttttctggagacgccgttcaggtgcaggagtacagagaggccctagaggggattttgatccgcggtaaaaatgggatacggctggtccccgagttgtacgccgtcccacccaataaagtcgatgaggagtataagaacccacacactgttgacagagttcctatggggaaggtcccccacttgtgggggcaatctctgtacattctgtctagtctacttgccgaaggcttcttggctgcaggagaaattgaccctctgaaccggcggttttctacatcagtgaaacctgacgttgtggtccaggtgactgtgctcgccgagaacaatcacatcaaagatcttctgcgcaagcacggagtgaacgtccagagtatcgccgacatccaccccatacaggtgcagcctgggcgcattctcagccatatctacgctaagctcggtcgcaataaaaacatgaatctttcggggcggccctatagacacatcggagtcctgggaacatccaagctgtatgtgatccgcaaccagattttcaccttcacccctcaattcaccgaccagcatcatttttacctggcgctggataatgagatgattgtggagatgctgcgcatcgaactggcctacttgtgtacttgttggcgaatgaccggtagaccaacactcaccttccccatttcacggactatgcttacgaacgatggtagcgacatccactcagctgtactgagtaccattaggaaactggaggatgggtatttcgggggggcacgtgtcaagctgggcaacctgagcgaattcttaaccacgtcattctacacctaccttacctttctagaccctgattgtgatgagaagctctttgacaatgccagtgaaggcactttcagccctgatagcgacagtgatctcgtaggctacctagaagatacctgcaatcaggaaagtcaggacgagttggaccactacatcaaccacttactgcagtccaccagtttaagaagctacttaccgcctctgtgtaagaataccgaggacagacacgttttctctgcaatccactccacaagggacatcctgtccgtgatggccaaggcaaaaggcctggaagttccattcgtccccatgacattgcccaccaaagtgctgtctgcacatcgtaagagcctgaacctggtggatagcccacagccattactggagaaggtgccggaaagcgacttccagtggcctcgagacgatcacggagacgtcgattgtgaaaagctagtagagcagctcaaagattgttctaatctccaggaccaggccgacatattgtacatcctatacgtgatcaaaggaccatcctgggacaccaatctgtctggccagcacggtgtcaccgtacagaatctgctcggcgagctgtatggcaaagcaggcctgaatcaagaatggggtctcataaggtatattagtggactgctgcgaaaaaaggtggaagtcctagctgaggcatgcacagacctgctctcccaccaaaaacaactcaccgttggtttgccacccgagccccgggaaaagattatcagcgctcccctgccccccgaagagctcacgaaactgatctacgaggctagtggacaggacatttccattgccgtgctgacacaggaaatcgtggtgtacctcgcaatgtacgtgcgtgctcaaccgagcctgttcgttgagatgctcaggcttagaatcgggctgatcatccaagtgatggctaccgagctagcccggtctctcaactgtagcggagaagaagcctcagaatcactcatgaacctgagtcccttcgacatgaagaacttactgcatcacattctttcggggaaagaatttggcgtcgagcgctccgtgagaccaattcacagctcaacctctagccctaccatatccatacacgaggtgggacacacgggtgtaacaaaaaccgaacgcagtggaattaaccgcttgagatcagagatgaaacagatgacacgccggttttctgctgacgagcagttcttcagtgtcggacaggcggcttcctcatccgctcactcctcaaagtccgcacgatcctccaccccaagttcaccaactggcaccagctcctcagactctggagggcatcacattggctggggcgagaggcaggggcagtggctccggcggaggcggctggatggggccatcaacagggtgccggtgggtttttaccaaagagtttggaagattttacagaagtgccatggactttccattgacgggtacgtcctaccaagcagtaccaccagagagatgactccacatgagattaagtttgcagtgcacgtagagagtgtcctgaaccgggtcccccagccagagtacaggcagctactagttgaagccatcatggtcttgactttactatcagataccgaaatgacttctataggtggcattatccatgtagatcaaatcgttcaaatggcctctcagttatttctccaagatcaagtgagcatcggggcgatggacactctcgaaaaggatcaggcgacggggatctgccactttttctatgattccgctccatcaggtgcatacggaactatgacctatctaacacgggcagtggcctcgtacctgcaggaactcctacccaactctggatgtcagatgcag

SEQ ID NO: 6245 - DNA, 3705 bp, Artificial Sequence
  derived and/or modified sequence
atgagaagccggagcaatagcggcgtgaggttggatggttatgccaggctggtgcagcagactattctttgctatcagaaccccgtcaccggactgctgtcagcgagtcacgaacaaaaggatgcttgggttcgggataacatctattcaattctggccgtttggggcttgggcatggcttaccgcaaaaatgcggatagggacgaagataaagcaaaggcgtacgagctcgagcagaacgtggtcaagctgatgcgcgggctgctgcaatgcatgatgcgtcaagttgctaaggtggaaaaattcaaacatactcagtcaactaaggactccctccatgcaaagtacaacaccgcaacatgcgggacggtggtcggggatgatcaatggggacatctccaagtggacgcgactagtttgtttctcctgtttctggctcagatgactgcgagcgggctgcgcatcatctttacgctcgatgaggtagcttttattcagaacctagtgttctatattgaggccgcctacaaagtggcggactacggtatgtgggagagaggggacaaaactaatcaaggaattccggagctgaatgcctccagtgtgggaatggcgaaggctgcactcgaggccatcgatgagctcgacctctttggggcacacggaggacgaaaatccgtcatccacgttctccctgacgaggttgagcattgccagagcatcttattctcaatgctcccccgggcctcgacatccaaagaaatagatgctggccttctgtctatcatatctttcccagcgttcgcggtggaggacgtcaacctggttaacgtgacgaagaatgaaatcatatctaagcttcagggcagatacggatgctgcaggtttctccgggatggttataagaccccacgagaggatccaaaccggctccattatgatccagctgagctgaagcttttcgaaaatattgaatgcgagtggccggtgttctggacatactttatcatagatggggtattttcaggggacgctgtgcaggtgcaagagtatcgggaggctctcgagggaatcctgattcgcgggaagaatggtatccgattggtgcctgagctgtacgcggtgccacctaacaaagttgacgaagagtacaagaacccacacacagtggatcgcgtacctatggggaaggtaccacatctgtggggccagtccctgtacattttaagcagccttttagcagaggggttcttggccgccggagagatcgatcccctgaaccgacgtttcagcacctcggtgaagccagatgtggtggtacaagtcactgtgctcgccgagaataaccatattaaagacctactccgtaaacacggtgtaaatgtgcagagtatcgccgatatacatcctattcaagtgcaacctggaagaatcttgagtcacatatatgcaaaactggggcggaataaaaacatgaatctctccggcaggccataccgccacatcggggtactggggacctccaaactctacgtcatcaggaaccagatcttcaccttcacccctcagttcactgatcaacaccacttctatctggctctggataatgagatgatcgtggaaatgctgcgtatcgagttagcctacctttgtacatgctggcggatgactggtcggccaactctgacctttcctatttccagaactatgctcaccaacgatggctctgacattcactcagccgttctaagtaccattaggaagctcgaggacggctactttggcggggcccgagttaagctagggaacttatcagaattcttaacaacctcattctatacctacctcacgtttcttgacccggattgcgacgaaaagctttttgacaacgcgtccgaaggcacattctccccagatagtgattcagacttggtgggatacctcgaggatacgtgcaatcaggaaagtcaagatgagcttgaccattacattaaccacctgcttcaatccacttcgctgcgatcttatctgcccccactgtgcaaaaacactgaggaccgacatgttttctcagccattcactccacgcgagatatcctgagtgttatggcaaaggccaagggattggaagtgccctttgtccccatgactctcccaacgaaggtgctgtcagcccaccgcaagtccttgaacctggtggatagtccccaacccttactagagaaggttccggagagcgactttcagtggcctcgggatgaccacggggacgtagactgtgagaaactcgttgagcagttgaaggactgtagcaacttgcaagaccaagcagacatactgtatatattgtatgtgataaaaggaccctcgtgggacaccaatctgagcggccagcatggtgtgacagtgcagaatttgctcggtgagctttatgggaaagctggcctgaaccaggagtggggcttgattcgttatatctcagggttgcttcggaaaaaggtcgaggtgctggcggaagcatgtaccgacctactcagccaccagaaacagcttacagtgggactgcctccagagcctcgggagaaaataataagtgcccctcttccacctgaagaattaacaaaactgatctatgaagcctcgggacaagacataagtatcgccgttctaacccaggagatcgttgtataccttgcaatgtatgttagggcccagccctctctgtttgtcgagatgctgcgcctgcgaatcgggctgatcatccaggtaatggccacggaactggcgaggagtctaaactgcagcggagaggaggccagcgaatcattgatgaacttgtccccattcgacatgaaaaatctcctgcaccacatcctgtccggcaaggagttcggggtggagagatctgtccggcctattcatagtagcacgtcttccccaactatctccatccatgaggtcggccacaccggagttactaagacagaacgctccggtatcaaccggttgcgcagcgagatgaagcaaatgaccagacgctttagtgccgacgagcagtttttttcagttgggcaggctgcctctagctccgcccactctagtaagagcgctcgctcaagcactccttcatcgccaaccggtactagctcgagtgactccggaggtcatcatatagggtggggggagaggcagggccagtggctgagaaggcgaagactggacggggctattaatcgggtgccagtgggattttaccagcgggtgtggaaaattctgcagaagtgtcatggtctgagtatagatgggtatgtattgccgtcatcaaccacccgggaaatgaccccccacgaaattaagtttgctgtgcacgtggaatcagtgctgaaccgggtgcctcagcccgagtaccgccagctgttggttgaggccatcatggtgctgacccttctgagtgataccgaaatgacgtcaattgggggaataatccacgtcgaccagatcgtgcaaatggccagccagctctttctccaggaccaggtctcaattggagcgatggacactctcgaaaaggaccaggcaaccggaatctgccattttttttatgactctgccccatccggggcctatggcactatgacgtacctgacccgcgctgtagccagctatttacaagaactgctccccaatagtgggtgccagatgcaa

SEQ ID NO: 6246 - DNA, 3705 bp, Artificial Sequence
  derived and/or modified sequence
atgcgctccaggagcaattccggggtaaggctggacgggtacgcacggttggtacagcagacgatcctttgttaccagaatccggtcactggtttgctgagtgctagccacgagcaaaaggatgcgtgggtgagagacaacatttatagtatcttggccgtctggggcctggggatggcctaccgaaagaacgctgacagagatgaagacaaggccaaagcatacgagctcgagcagaatgtggttaagttgatgcgtggactgctccagtgtatgatgcgccaggtggccaaggtggagaagttcaagcacacccagagcaccaaagacagcttgcacgccaagtacaatactgccacctgcggcactgtggtcggcgatgaccagtggggtcatctgcaggtggacgctacctccctttttttgctgtttctcgctcaaatgaccgcgagtggactgcggattatctttaccctagatgaagtggccttcatccaaaacctggtcttctatattgaagccgcctataaagtggcagattacggtatgtgggagagaggagacaagaccaaccaaggcatacctgagctgaatgcctcctcagtcggcatggctaaagccgctctggaagccatagacgagctggatctttttggcgcacatggaggccggaaatctgtaattcacgtgttacccgatgaggtggagcactgccaatccatcctgttctctatgctgccaagagcttctacaagtaaagagattgacgccgggctgctgtccattattagtttcccagccttcgctgtagaggatgtgaacctggtcaacgtgaccaaaaatgagataatcagcaagctccagggtaggtatgggtgctgtagattccttagggatgggtacaagactccacgggaggatcccaatcgtttgcattatgaccctgccgagctcaaactcttcgagaacatcgagtgcgagtggcctgtattctggacttattttattattgacggggtattctctggcgatgctgtccaggttcaggagtacagagaggcactggaaggaatcctgatccgcggaaagaacggtatcaggcttgttcccgagttatacgccgtacccccaaacaaggtggatgaagaatacaagaacccccatactgtggacagggtaccgatgggaaaggtaccacatttatggggtcagtcgctgtacatcctctccagtctcctggcagaggggtttttggctgcgggagagatcgacccactgaacaggcggttcagcacgtccgtcaaacccgacgtcgtggtgcaggtgaccgtgttggccgaaaacaaccatatcaaggaccttctaagaaagcatggggtgaatgtccaatccatagctgacattcatcccatccaggtccagccaggacgaattctcagccatatctacgctaaacttggcagaaataagaacatgaatctgtcaggtagaccatatcggcacattggcgtgctcgggaccagcaagttgtatgttatccgtaaccagatctttacattcaccccgcaattcaccgaccagcatcacttctacctggccctggataacgaaatgatcgttgaaatgttgcggatcgagctcgcctacctgtgtacctgttggagaatgacgggacgtccgactcttacctttcctattagccgcaccatgctcacaaatgatggttccgacattcatagcgctgtcttgtccactattcgcaagcttgaggacgggtactttggcggcgcccgcgtcaagctaggaaacctgagtgagttcctgacaacttccttctacacctacttgacattcctggatcctgactgtgatgagaaactgttcgacaacgcctcagaggggacattcagcccagattcagacagcgacctggtgggatatctggaggacacctgtaaccaggagtcccaggacgagctggaccactatatcaatcacctgcttcagagtacaagcctgcgctcctacttgccccccttatgcaagaatacagaggatcgacatgtattttccgcgattcactccacacgcgacatactgtcagtgatggctaaagcgaagggtttggaagttccatttgttcccatgacacttcccacgaaggtcttatctgcccaccggaagagccttaatttggtggactcgccccagcccttgttggagaaggtccctgaatcggactttcagtggccacgggacgaccacggagatgtcgattgtgaaaaacttgtggagcagttgaaggattgttcaaatttacaggaccaggccgatatcttatacatcctatatgtgataaaagggcctagctgggatactaatttatcaggacaacacggcgtcaccgtgcagaatctgctgggagaactgtacggcaaggcaggcctcaaccaggaatggggactaatccgctatatatccggcctcctgaggaagaaggtggaggtgttggccgaggcttgcactgacctcctgagtcatcaaaagcaattaacagttgggctgccacccgagccccgggaaaagattatatctgctccgctgccaccggaggaattaacaaagttgatttacgaagctagcggccaggatattagcatagccgtactgacacaggaaattgttgtgtacttggccatgtacgtgagagcccagccttctttgttcgtggagatgctgaggctgagaatcggattgattatccaggtaatggccacggaactcgctaggagtctcaactgctccggcgaggaggcctccgagagcctgatgaacctatcacctttcgacatgaagaacttgttgcaccatattctgagtggtaaggaattcggcgtggagcgcagtgtgcgacccatccatagtagtacgtcttcccctactatatcaatacatgaggtgggccatactggggttaccaaaacagaaagaagcggcataaaccggctaagaagcgagatgaagcagatgactcgccgcttcagcgcagacgagcagttttttagtgtagggcaggctgcctccagctccgcccacagctccaagtcagctagaagctccaccccaagtagtccaacaggcaccagtagcagcgattccggaggacaccatatcggatggggggagcgtcaggggcagtggctgagaagaaggcgcctagatggcgctataaatcgtgtgcccgtcggcttctaccagcgagtttggaagatactgcagaaatgtcatggcctgtcaattgacggctatgtactgcccagtagcactactagagagatgacaccccacgagataaaatttgctgttcacgtggagtccgtcctcaacagagtcccccaaccagagtatcggcagttactcgtggaggctatcatggtgttgacccttttgagcgacacagagatgacctctatcgggggtataattcatgtggaccagatagtgcagatggcgagccagttattcctgcaggaccaggtgtccataggggcgatggacaccctggaaaaagatcaagcaactgggatctgtcacttcttttatgacagcgcacccagtggcgcctacgggaccatgacttatctaacccgcgcagtggcgtcctatctacaagagctgttgccaaatagcggttgtcagatgcag

SEQ ID NO: 6247 - DNA, 3705 bp, Artificial Sequence
  derived and/or modified sequence
atgaggagccgaagtaattccggcgttagactcgacgggtatgccaggctggtccagcagacgattctgtgctaccagaatccagttacaggactcttgtccgcttcacatgaacaaaaagatgcatgggtaagagacaacatttattccattcttgcagtatgggggttgggaatggcctacagaaaaaacgctgatagagacgaggataaggccaaggcctatgagctggagcaaaatgttgtgaagctgatgcgcggcttgttgcagtgcatgatgaggcaggtcgcaaaggtcgagaaattcaagcatactcagagtaccaaagactccctgcacgctaaatacaatactgctacttgcggtaccgttgttggagatgatcagtgggggcacttgcaggtcgatgcaactagtttgtttctgctcttcctggcccagatgactgcgtcaggtctcagaattatcttcactctggatgaggtggcctttatccagaacttggttttctacatcgaggccgcttataaggtggccgattatggaatgtgggagaggggggataaaacaaatcaaggcatccccgaactgaatgctagctcggttgggatggccaaggctgccctggaggcgattgacgagttggatctctttggagcacatggcggcaggaaatccgtgatccacgtgcttcctgatgaagtggagcactgccagagtatcttgttctctatgctgcctagggcctccacatcaaaagagattgacgctggactacttagtatcatctctttccctgctttcgcggtggaagatgtcaatctcgtgaatgtgactaaaaacgaaatcatcagcaagctccaggggcgatacggatgttgcaggttcctaagggacgggtacaaaacaccccgcgaagaccctaaccgcttgcactacgatcccgctgagctaaagttgtttgagaatatcgagtgcgaatggcctgtattttggacgtattttatcatcgatggggtcttcagtggggatgcagttcaagtgcaggagtacagggaggcactggaaggcatcttaatcaggggaaaaaacggcatacgactggtgcctgaactctatgccgttcctcctaacaaggtggatgaggaatataagaacccacataccgtggatcgagtgccgatgggaaaagtgccacacctctggggtcagtctctgtacattctgagttccctgctggctgaaggttttctggctgctggagaaatcgatcccctcaacaggagatttagtacctctgtcaagcctgatgtggtggtgcaggtaacagtgctggcggaaaataaccacatcaaagacttgctgagaaagcatggcgtaaatgttcagtctatcgctgacattcaccccattcaggtccagccaggaagaattctgtctcatatttatgccaaactaggccgaaacaagaacatgaatttgagtggccgtccataccgacatattggcgtgctggggacatctaaactttacgtgatcagaaaccaaatatttacattcactccccaattcaccgaccaacatcatttctatctggccctggacaacgaaatgatcgtggagatgctgcgtatagaacttgcatatctgtgtacttgttggagaatgacgggtcgacccactttgactttcccaatatccaggaccatgctaaccaatgacggctcggatatccacagtgcagtactgtcgaccataagaaagctcgaggacggctactttggaggagcacgtgttaagctggggaacctgtcggaatttctgacaacaagtttctatacctatctgacgtttcttgaccccgattgtgacgagaagctgtttgataatgccagcgaaggtacgttctcgccagactctgactctgaccttgtgggctacctggaggatacatgtaaccaggaatctcaggatgaattagaccattatattaaccacttattgcagtcgacgagccttcgctcttatctgcctcctctttgcaagaacactgaagacaggcacgtgttctctgctattcattcaaccagggatatactatcagtgatggccaaagcgaagggactggaagttccattcgtccctatgaccctgccaaccaaagtgctgtcggcacacagaaaatccctgaaccttgtggactcgccacagcccctgttagagaaagtgccggaatccgactttcagtggccacgcgacgatcacggggacgtcgactgcgagaagcttgtagagcagctaaaggactgcagtaacctccaggatcaggctgatatcttatacatactgtacgttatcaaaggcccctcgtgggatactaatctttcaggacagcatggcgtcaccgttcagaacttattgggggagctgtacggaaaggcaggcctgaaccaggaatgggggctaatacgatatatcagcggtctattgcgtaagaaagtggaggtgctagcagaggcatgtaccgatctgctctctcatcagaaacagctgactgtggggttgccccccgaaccccgtgagaagattatttcagcccctctgcctccggaagagcttactaagctgatttacgaggcgtctggacaggacatctctatcgcagttctcacacaggagatcgtcgtgtatctagcgatgtacgtaagggcccaaccctccctgttcgttgagatgctgcgcctcagaatcggacttataatccaggtgatggcgactgaactggcgagatctttaaattgctcaggggaagaggcttccgagtcactgatgaatctgtcacctttcgatatgaaaaacctccttcatcacattctcagcggcaaggagtttggtgttgaaagatccgttagaccaatccattcatcaacctcctctccaaccatctcaatccacgaagtgggacacacgggtgtaactaagacagagcggtccggcattaatcgattacgatccgagatgaagcagatgacccgacgattttcagccgatgaacagttcttttccgtagggcaggcggcttcatcttccgcccacagcagcaagtctgctcgatcctcaaccccatctagccccacgggaacgagtagctcagattctggtggccatcatatcggctggggcgagagacagggccaatggttgcgccgtcgaaggctcgatggagccattaaccgagtcccagttggattctatcagcgagtctggaaaatcctgcagaagtgtcatggcctgagcatcgacggatacgtgctgccaagctcgaccacaagagagatgactcctcacgagatcaagtttgcagttcatgtggaatcggtgttgaatcgagtgccccagcccgagtacagacagctgctcgttgaagccatcatggtgctcaccctccttagcgatactgagatgacaagtatcggtggcataattcacgttgatcagatcgtacagatggcgagtcagctcttcttacaggatcaggtttcaatcggcgctatggataccctggaaaaggatcaagcaacaggaatttgccattttttttatgactctgcgcctagcggggcgtatggcaccatgacctatttaacccgagcggtcgcctcctacctccaggaactcctcccaaattctgggtgccagatgcag

SEQ ID NO: 6248 - DNA, 3705 bp, Artificial Sequence
  derived and/or modified sequence
atgcgcagcagatccaactcaggagtgagacttgatggctacgctaggcttgtgcaacaaacgattctgtgttaccaaaacccggtgactgggcttctgtcagccagccatgaacagaaggacgcctgggtgagggataacatttactcgatacttgcagtgtggggacttgggatggcttaccgtaagaatgcagaccgagatgaggataaggcgaaggcatacgagctggaacagaacgtggtcaaacttatgagaggactgctccaatgcatgatgaggcaagtggccaaggtggaaaagtttaagcacactcaaagcaccaaggactcgctgcatgctaagtacaacactgcgacgtgtggcactgtcgtgggagacgatcaatggggacacctgcaggtcgacgcaacttcactgttcctcctcttcctggcacaaatgacggcatccggacttagaatcatattcacgctggacgaggtggctttcatccaaaatctcgtgttttacattgaggcagcatacaaggttgccgattacggtatgtgggagcgaggggacaaaaccaatcagggcattccggagcttaatgcatcaagcgtcggaatggcgaaggccgcacttgaggcaatcgatgagctggacctttttggagcacatggcggtcggaaatcggtgattcatgtgctcccagatgaggtcgagcactgccaatccattctcttttccatgctcccgagggcaagcacctcgaaggagattgacgcaggacttctgtcaatcattagttttcctgcattcgcggtcgaggatgtcaacttggtgaatgtgaccaagaacgagatcatctctaagttgcagggaagatacggttgttgccgctttctgagggatggatacaagacgccacgggaggaccctaacagacttcattacgaccctgccgagctgaaactttttgaaaacattgagtgtgagtggccagtgttctggacttacttcattattgatggagtgttctccggcgacgcagtgcaggtgcaggaatacagagaagcactggaaggaatcctcataaggggtaagaacggaatcagattggtgccggaactttacgcggtgccccccaacaaggtggatgaagaatacaagaaccctcatactgtggacagagtgcccatgggtaaggtacctcatctgtggggccaatcgctgtacatcctttcgtcgctgcttgccgagggctttctggccgcgggagaaattgatccactgaaccgcaggttttccacttccgtcaagcctgacgtggtcgtccaggtgaccgtgctcgcagagaacaaccatatcaaggacctgcttagaaagcacggagtgaacgtccaatctatcgcagatatccatccaatccaagtgcagccgggaagaattctgagccacatatatgcaaaactgggaaggaacaagaacatgaacctctcgggtcgaccatacagacatataggggttctgggtactagtaagctgtacgtgatcaggaaccaaatctttaccttcactcctcagtttacggatcaacaccatttctacctggcactggacaacgagatgatcgtcgagatgcttaggattgagcttgcctacctctgcacctgctggcggatgactggtagacctactcttactttccccatctcgaggacgatgctcaccaatgacggatccgatatccattccgcggtcttgagcactatcaggaagttggaagatggctattttggaggcgcaagagttaaacttggaaacctctcagagtttctgactacttcgttttacacttacctcacgtttctggatccggattgtgacgaaaaactctttgataacgcatccgaaggaacctttagccccgactctgactcggacttggtgggatacctggaagatacctgcaaccaggaatcgcaggatgaacttgaccactacatcaaccatttgcttcagtcgactagcctgagatcatacctcccacctctgtgcaaaaacactgaggatcggcacgtctttagcgcgattcactcgacccgtgatatactgtccgtgatggctaaggcaaagggccttgaagtgccatttgtgcccatgacgctccctactaaagtcctgtcggcacatcgaaagagcttgaatctggtggactcgccacaacccctgctggaaaaggtccctgaatcggacttccaatggcctcgggatgaccatggcgacgtggattgtgaaaaactcgtcgaacaacttaaggattgttcgaatttgcaagatcaggccgatatactttacatcctttacgtgattaaaggtccgtcgtgggataccaacctgagcggacaacacggagtgactgtccagaaccttctcggagaattgtacggaaaggctggtttgaaccaagaatggggcctgattcgctacatatccgggcttctccggaaaaaggtggaggtcctggccgaagcgtgtaccgaccttctctcccaccaaaaacaactgacggtgggacttccacccgagcctagggaaaagatcatctccgcacctcttccacccgaagaactcaccaagctcatttacgaagcatcagggcaggacattagcattgccgtgctcacccaagaaatagtggtgtatctcgcgatgtacgtgagagcacagccatccctctttgtcgaaatgcttcgcctgcgcatcggactgattatccaggtcatggcaacggagctggcacgctcactcaactgctctggggaggaagcctccgaatccttgatgaacctgagccctttcgacatgaaaaacctgcttcatcacattctgtcaggtaaagaatttggagtcgaacgctcagtgcggcctatccattcctccaccagctcgccaaccatatcgatccatgaggtcggtcacactggagtcactaaaacggaaaggtcagggatcaacaggctgaggtcggagatgaagcagatgacccgtagatttagtgcagatgaacaattcttttctgtgggccaggcggcctcaagctccgcacactcctccaagtccgcacgttcatccactccttcatcacccactggaacctcgtcgtcggatagcggagggcaccatattggctggggggaacggcagggtcaatggctgcgccgtcgacgcctggacggagccattaaccgggtgcctgtgggtttctatcaaagagtgtggaagattcttcagaaatgtcacggactgtctattgatggttatgtcctccccagctcgactacccgcgagatgaccccccatgagattaagtttgctgtgcacgtggagagcgtcttgaaccgcgtcccacagcctgaatataggcaattgctcgtggaagctatcatggtgctgacccttctgagcgataccgaaatgaccagcattggagggattatccatgtcgaccagattgtgcaaatggcttcccaactttttcttcaagaccaggtgagcattggtgcaatggatacccttgaaaaagaccaggccaccggaatctgtcacttcttttatgattccgcaccttcaggtgcatacggaacgatgacctacctcacccgggcagtggcatcatacctgcaggaactgcttccaaacagcggatgtcaaatgcag

SEQ ID NO: 6249 - DNA, 3705 bp, Artificial Sequence
  derived and/or modified sequence
atgaggagtcgttcgaacagtggggtgaggctggacggctacgcacgtctggtgcagcagacgatactctgttatcagaacccagtgaccggcctgctcagtgcctctcacgagcaaaaggacgcttgggtcagggacaatatatatagcatccttgccgtctggggtctaggtatggcttaccgcaagaatgcagatagggacgaagataaggcgaaagcctacgagttggaacagaacgtagtcaagttgatgaggggacttctccagtgcatgatgcgccaggttgcaaaagtggaaaagtttaagcatacgcagagcaccaaagattccctacacgcaaaatataatacagcgacatgcggtactgtggtcggtgatgatcaatggggccatctgcaggttgacgctacatcgctattccttctttttctcgcgcagatgaccgctagtggactgcggattattttcacgttggacgaggtcgcattcatccagaatttggttttctacatcgaggccgcttacaaggttgccgactacggcatgtgggaaaggggagacaaaactaatcagggcattcccgagctgaatgcttcctctgtgggcatggccaaagctgcgctggaggcgatcgacgagctggatctgtttggcgctcacggcggacggaaatccgtgattcacgtgctgccggatgaggtggaacattgccagtccatcctctttagcatgcttccaagagcctctacgtcaaaggagatcgatgctgggcttctgtccattatctcctttcccgccttcgctgtagaggatgttaacttggtgaatgtgaccaaaaatgagatcatatccaagcttcaggggcggtatggttgttgccggtttctgcgggatggatacaagaccccaagggaggacccaaataggctccattacgatcctgctgagctgaagctattcgaaaacattgagtgtgagtggcccgtcttttggacctacttcatcattgatggggtctttagtggcgacgccgtgcaagtgcaggagtaccgtgaagcattggaaggtatattgattaggggaaagaacggcataaggctggtccccgagctgtatgcggttccacctaataaagtcgatgaggagtacaagaacccacacactgtggatcgcgtccccatgggaaaggtaccccacctgtgggggcagagcctttacattttgtccagtctgctcgccgaggggttcttggccgccggggagatcgacccactgaatcggaggttttccacaagcgtgaagccggacgtcgtggttcaggtaacagtgctcgctgagaataaccacatcaaagatctcttaaggaaacatggggtgaacgtgcagtctattgctgacatacatcctatccaagtacaacccggtcgcattctgagccacatctacgcaaaactcggccggaacaaaaacatgaatttgagtggcaggccgtacagacatatcggagtgctgggcaccagcaaattatacgtgatacgaaatcagatcttcactttcaccccccagtttacggaccagcaccatttttacctcgcacttgataatgaaatgatcgtcgaaatgcttcgcatagagctggcctacctatgtacatgctggcgcatgactgggcgccctacactgacctttcccatctcaaggacaatgctcaccaacgatggtagcgatattcattctgcagtactctccactattagaaagctcgaagacggttactttgggggtgcaagagtaaaattgggtaacctgtctgagtttctgacaacatcattttatacctacctcacatttctcgacccagactgcgatgaaaagctgtttgataacgcttcagaggggactttcagccctgatagtgattccgatctagtaggatatctggaggacacctgcaaccaagagtcccaggatgagctagatcactatatcaatcatctccttcagtccactagcctgcgaagctacctgccccccctgtgcaagaataccgaagaccgtcacgttttctctgccattcactccacccgcgacatactgtccgtaatggctaaggctaaaggtttggaggtgcccttcgtgccaatgactctgccaactaaggtgctgagtgcccatcggaagagcctgaacctggtagattctccacagccactcttggaaaaggtaccagagagtgatttccagtggcctagagacgaccatggagatgtagactgcgagaagctcgtggagcagctgaaggactgctccaatctccaggaccaggctgacattctctatatactgtacgtgatcaaaggtccctcctgggatacaaacctttcaggccaacatggggtgactgtccagaatttgctaggcgagctgtacgggaaggccggtcttaatcaggaatggggactcatccgttatatcagcggtctcctaaggaaaaaagtggaagttttggctgaggcctgtactgatctgctcagccatcagaagcaactgaccgtgggcctcccacccgagccccgcgagaagattatcagtgcaccgcttccaccggaagaactcactaagctgatctatgaggcctctggtcaggatattagcatcgccgttttgacacaggagattgttgtgtatctagctatgtatgtgcgtgcacagccgtccttgtttgtggaaatgcttcgcttgagaatcggtctgattattcaggtgatggcaaccgaactggctcgctccctgaattgttccggagaagaggcctccgagtccctgatgaatctgagtcccttcgacatgaagaacctgctccaccacatcctcagcggtaaggagttcggcgtagagcggtccgtgaggccaatacacagcagtaccagctcccccacaatcagtatccatgaagtcggccacaccggggttacaaagacagagcgtagtgggatcaatcgattaaggtcagagatgaaacagatgactcggagattctcagctgacgagcaattttttagtgtggggcaggccgcgtcatccagtgctcactcaagcaagtccgcccggagtagtacgccatcttcacctactgggacatcatcttctgatagcggtggccatcacatcggctggggggagaggcaaggacagtggctgaggcgcaggcggctcgacggtgctattaacagggtaccagtgggcttttaccagagggtatggaagattttgcaaaagtgccacgggctctcgatcgacggatatgttttaccgtcaagcacaactcgcgaaatgacaccccatgaaattaagttcgctgtccacgtggagagcgtgctaaatcgggtgccacagcccgaataccgccaactgcttgtcgaggcgattatggtactgaccctcctatcggacactgagatgacctcaatcggaggaataatccatgtagatcagatcgtacaaatggcgagccagctgttcctgcaggatcaggtgtctattggcgcgatggatacactggagaaggaccaagcaaccggaatctgtcacttcttctacgacagcgctccaagcggtgcatatggaacgatgacctatttgacacgtgcggtggcgtcctatctgcaggagctcctgcctaactctggctgtcagatgcag

SEQ ID NO: 6250 - DNA, 3705 bp, Artificial Sequence
  derived and/or modified sequence
atgcggtcccgcagtaacagtggcgtcagactagacggatacgctaggttggtccagcagaccatactctgctatcagaaccccgttaccggccttttgtcagccagtcacgagcaaaaggacgcctgggtaagagacaacatatactccattctggctgtttggggacttggcatggcgtatcggaagaacgctgaccgcgatgaagacaaagccaaggcctacgagttggaacagaatgtcgtcaaacttatgcgtggtctgttgcagtgtatgatgcgacaggttgcgaaagtggaaaaattcaagcacacccagagcaccaaggatagcttgcatgccaaatacaataccgcgacctgtgggacggtggtaggggatgatcagtggggccaccttcaggtggacgccacttccctttttctcctttttctagcacaaatgaccgcaagcggactgcgtattatatttactctggatgaagtagcttttattcaaaacttggtgttttacatcgaagctgcttataaggttgcggactatggcatgtgggagagaggcgataagacaaatcaggggatccccgagttgaacgctagtagtgttggtatggctaaagcagcgctggaagccattgatgaactggacctgtttggagcccacggaggacgcaagagtgtaatccacgtcctgccagacgaagttgaacactgccagtcaatcctgttttctatgctgccaagggctagcacatcaaaggaaatagatgctggattgctgtcaatcatctcttttcccgctttcgcagtcgaggacgtgaatctcgtgaacgttacgaagaatgaaattatcagcaagctgcaaggccgctacggatgttgtcgcttcctgcgggacgggtacaagacaccgcgggaggatcctaaccgcctacactatgatcctgcggaactgaagctgtttgagaatattgagtgcgagtggcctgtgttctggacatacttcattattgatggtgtgttttctggggatgccgtgcaggtgcaagagtaccgcgaggcactggaagggatcctaatcaggggtaaaaatggcataagactcgtgcctgagctgtatgctgttcccccaaataaggtggacgaagaatataagaacccgcacacagttgaccgagttccaatgggcaaggtcccgcatctgtggggccagtcgttgtacattctgtcatctctactggcggaaggtttcctcgccgccggcgagattgatccactaaaccgccgtttcagcacctctgtaaaacctgatgtggttgtgcaggtgacagtactcgcagagaataatcatatcaaggatctgcttcgtaaacatggtgtcaatgttcagtccattgcggacatacatcccatccaagtgcagccgggcagaatcctgtcacacatttacgctaagcttgggcggaataagaacatgaacctctcaggccgcccctatcggcacatcggcgtgctgggaacctccaaactctacgtcatacgcaatcaaattttcacctttaccccccaatttactgatcagcaccatttctacctcgcactggataacgagatgattgtggagatgctgcgaattgagctcgcttacctgtgcacatgctggagaatgaccggccgaccaacactgacatttcctatttctaggacaatgctgactaatgacggttccgatattcatagcgccgtgttgtccaccattcggaagcttgaagatggctacttcgggggggctcgtgtgaaactgggaaacctgtcagagtttctgaccacatccttttatacttacttgacattcctcgaccctgattgtgacgaaaagctgttcgacaatgcgagcgaaggaacctttagcccagattctgattccgatctggtggggtacctcgaggacacatgtaaccaggagtctcaggacgagctagaccactatattaaccacctgctccagtccacttcgctgcgcagctacctgcctccgttgtgcaagaataccgaggatcggcacgtgttcagtgctattcactcaacccgagacattcttagcgttatggcgaaggctaaagggttagaggttccgttcgtccccatgaccctgcctaccaaggtgctatcggcacaccgaaagtctctgaacctagtggactcaccacagcccctcctggagaaagttcctgaaagcgatttccagtggccccgtgacgatcatggagatgtggattgcgagaaattggtcgagcagctgaaggactgctctaacttgcaggaccaggcagacatcttgtacattttatatgtgataaaaggcccatcctgggacacgaacctttccgggcagcacggagtgaccgtgcagaacctcctcggtgaattgtatgggaaagccggactgaaccaggagtgggggctgattcggtatatctccggtctactgagaaaaaaggtggaagtccttgccgaagcatgcacagatctcctgagccaccagaagcagctgaccgtgggcctgccgcctgagccaagagagaagattatctcggccccgctgccgccagaagaactcactaagctgatatacgaagcatccgggcaagacatatccatcgccgtcttgacacaggagatagtcgtgtacctcgctatgtacgtacgcgctcaaccatccctctttgtagaaatgctgaggctgaggataggcttaatcatccaggtcatggccacagagctggcaagaagcttgaactgctctggagaggaggcgagcgagagcttaatgaacctgtccccatttgacatgaagaacttgctccatcatatattgagcggaaaagagtttggtgtcgaaaggagcgtgaggcctattcatagttccacaagcagccccacaatttctatacacgaggtgggacataccggggtgacaaaaaccgagcggtccggcatcaaccgcctgcgcagcgaaatgaagcagatgactcgcagatttagcgcggatgagcagttctttagcgttgggcaggcagccagctcctccgcccactcctccaagagcgcccgtagcagcactcctagctcccccactggaacgtcatcttctgattctgggggccaccacatcggttggggtgaaagacaaggccagtggctgcgacgcagaaggcttgacggtgccattaatagggtgcccgtgggattttaccaacgggtttggaaaattctccagaagtgccatggcctgagcatcgatggctatgtattgccttcaagtactacacgagaaatgaccccccatgagattaaattcgccgtgcatgtggagtctgtcctgaaccgcgtgccacagccggagtatcgccaacttcttgtagaggccataatggttctgaccttgctatcagatacagaaatgacctctatagggggaatcattcacgtagaccaaatcgtacaaatggcgagccaattattcctgcaagatcaggtctcaattggggcaatggacacgctggaaaaggaccaggccacaggaatctgccacttcttttatgatagtgccccgtcaggggcctacgggactatgacttatcttacccgggctgtagcttcttacctccaggaactactgcccaattcgggctgccaaatgcag

SEQ ID NO: 6251 - DNA, 3705 bp, Artificial Sequence
  derived and/or modified sequence
atgcggtcaaggtccaactctggggtcaggttggatgggtacgccagactcgttcagcagaccatattgtgctaccagaaccctgtgactggcctcctgtcggctagccacgagcagaaagacgcatgggtgcgcgacaacatctactcgatcctggcagtgtggggtctgggaatggcataccgcaagaacgccgatcgcgatgaggataaggctaaggcctacgaattggagcaaaacgtggtgaaactgatgcgggggctcctgcagtgcatgatgcggcaggtggccaaggttgaaaagttcaagcatactcagtcgactaaggattccctccatgccaagtacaataccgccacctgcggcaccgttgtgggagacgatcagtggggacacttgcaggtcgacgcgacctcccttttcctgctttttctggcgcagatgactgcttcagggctgcggataatcttcaccctcgacgaagtggcttttatccaaaacctcgtgttctacatcgaagcagcgtacaaagtcgccgactacggcatgtgggagcgcggagataagaccaaccaaggtatcccagaactgaacgcgtcctcagtcggcatggccaaggctgcgctggaagccatcgacgagcttgatctgtttggtgcgcacggaggcagaaagtcagtcatccacgtgcttccggacgaagtggagcattgccagtccatcctgttctcaatgctgccgcgcgcttccacttcaaaggaaattgacgcggggctgctctcgatcatttcatttccagcgttcgcagtggaggacgtgaacctcgtgaacgtgactaaaaacgaaatcatttccaaacttcaaggacggtacggctgctgtcggttcctgcgtgatgggtacaagaccccaagagaagatccaaacagacttcactacgacccagcagagctgaaactgttcgagaacatcgagtgcgaatggcctgtgttctggacttatttcatcatcgacggcgtgttctcaggcgacgccgtgcaggtgcaggagtaccgcgaggcgctggaaggtatcttgatccggggcaagaacggaatccgccttgtccctgagctgtacgcggtgcctccgaataaagtggatgaggagtacaagaatccgcacaccgtggacagagtgccaatggggaaagttccgcacctgtggggccaatctttgtacatcttgagcagcctgctggcagagggattcctggcagcgggagagatcgatccgctcaatcgccggttctcaacctccgtgaagcctgacgtggtcgtgcaggtgaccgtgctcgctgaaaacaatcacatcaaagacctgctccgcaagcacggagtcaatgtgcagagcatcgcagatattcacccaatccaggtgcaaccgggaagaatcctgtcccacatctacgcaaagctggggcgcaacaagaacatgaacctgtctggtagaccgtacagacacatcggcgtcctgggaacctcgaaactgtatgtgatcaggaatcaaatcttcactttcactcctcaattcactgaccagcatcacttctacctcgcattggataacgagatgatcgtcgaaatgctccggattgaacttgcatacctgtgcacctgctggcgtatgaccgggcgcccaacgctcaccttccccatctcgcgcactatgctgactaacgatggatcagacatccactccgcggtgctgtcgactatcagaaagctggaggacggatactttggcggtgccagagtgaagttgggaaacctttctgagttcctcactacctccttctacacctacctgacctttcttgacccggattgcgacgaaaagctgttcgataatgcttcggaaggaaccttctccccggatagcgactccgatttggtgggctacctcgaggatacctgtaaccaggagtcgcaagatgagctggaccactacatcaaccatctgctccagagcacttcgctgcgctcctacctcccaccgttgtgcaagaacactgaggaccggcacgtcttttccgctattcactcaactcgggacatcctgagcgtgatggccaaggcaaaaggactggaagtgccctttgtgccaatgactctcccgaccaaagtgctgtcagctcacagaaagtcactcaacctcgttgattcaccccagcctctgctcgagaaagtgcctgaaagcgacttccaatggccgcgggacgatcacggagacgtcgactgcgaaaagctcgtggaacaactgaaagactgcagcaaccttcaagaccaggcagacatcctgtacattttgtatgttatcaagggcccgtcatgggataccaacttgagcggacaacatggagtgacggtgcagaacctcctcggagagctttacggcaaagctgggctgaaccaagaatggggactgatccgctacatctcaggactcctccgcaagaaggtggaagtcctggcggaagcctgtactgacctgctgagccaccaaaagcagctgaccgtcggactgcctcctgaaccgcgcgaaaagatcatctccgcccctctgccgccagaagagctgactaagctgatatacgaagcgagcggacaggacatcagcatcgccgtcctgacccaagaaatcgtggtctacctggccatgtacgtgcgggcgcaaccatcgttgtttgtggagatgctgcgcctgcgtattggtttgatcatccaggtgatggccaccgaactcgctagatcactcaattgttccggggaagaagcgtccgaaagcctcatgaacctttcgccttttgacatgaagaatctgcttcaccacatcctcagcggcaaagagttcggggtggagagatcagtgaggccgatccactcctcgacttcgtcccccactatctctatccacgaagtggggcataccggagtaactaagactgaacggtccggaatcaaccggctgagatccgaaatgaagcagatgactagacggtttagcgccgacgaacagttcttctccgttggacaggcagcctcatcctcggcacactcgtcaaagagtgctaggagcagcaccccgtcgtccccgactggaacctcgagctccgactcaggcggccatcatatcggttggggtgagagacagggacaatggctcaggagaagaagattggatggagccatcaatcgcgtgcccgtgggattctaccaacgggtgtggaagattttgcagaagtgtcacggactctccatcgatggctacgtgttgccatcgtcaaccacccgcgagatgactccgcacgagattaagtttgccgtgcacgtggagagcgtgctgaaccgggtgccacagcctgagtatagacagctcttggtggaagcaatcatggtgcttactctcctgtcggacactgagatgacttccatcggaggaatcatccacgtcgatcagatcgtccagatggcctcccagctcttcctgcaggaccaggtgagcattggagccatggataccctcgagaaagaccaagccactgggatctgccatttcttctacgattcggcgccctcgggtgcttacggaactatgacctatctcaccagagcggtggcctcatatctccaagaactgctccccaactcgggatgccagatgcaa

SEQ ID NO: 6252 - DNA, 3705 bp, Artificial Sequence
  derived and/or modified sequence
atgcgctcccgctcgaattcgggagtgagactcgatggatacgccagactcgtgcagcagactattctctgttaccagaatcctgtgactggccttctttcagcaagccatgagcagaaggatgcatgggtccgggacaacatatactcgatcctcgcagtgtggggacttggtatggcctaccgcaagaacgcagatcgggacgaagataaggcaaaagcctacgagttggaacagaacgtggtcaagctcatgagaggactgctgcaatgcatgatgcgccaagtcgcaaaggtggagaagtttaagcacacccaatccaccaaggactcccttcatgcaaagtacaacactgccacctgtgggactgtggtcggtgacgaccaatggggtcatctgcaggtggacgccaccagcctgttccttctgttcttggcacagatgactgcgtcgggcctgcgaatcatctttactctggatgaagtggcctttatccaaaaccttgtgttttacatcgaagcagcatacaaggtcgcagactacggaatgtgggagaggggcgataagactaaccagggcattcccgagctgaacgcgtcgtccgtcggaatggcaaaggcagcactcgaggcgatagatgaactggatctctttggtgcccacggaggcaggaagagtgtgatccacgtcctcccagatgaagtcgaacactgtcaatcaatccttttttcgatgctgcctcgcgcatcgacttcgaaggaaattgacgcaggactcctttcgattatctcgttcccagcgtttgccgtggaagatgtcaaccttgtgaacgtgaccaagaatgaaatcatatccaagctccagggaagatacggatgttgtcgtttcctgcgcgacgggtataagacccctcgcgaagatccaaacagacttcattacgaccctgccgaattgaagttgtttgaaaacatcgagtgtgaatggccagtgttctggacgtactttatcatcgacggtgtgttttctggcgatgccgtgcaagtgcaagaatacagagaggctcttgaaggcattcttattagaggtaagaatggcattcgccttgtcccagaactttacgcagtgcccccaaacaaggtcgatgaagagtacaagaacccacacaccgttgatcgcgtgccaatgggaaaggtcccacatctttggggacaatcgctttacatcctgtcatccctcttggccgaaggattccttgcggccggagagattgatcctctcaacaggcggttttcaacttcggttaagcccgacgtggttgtgcaagtgaccgtccttgcagaaaacaaccatatcaaggacctcctgcgcaagcacggcgtaaacgttcagtcaattgcggatattcatccgatccaggtgcagccaggtcgcattctgtcccacatatacgctaagctcggacgaaacaagaatatgaacttgagcggccgcccttacaggcatattggtgtgttgggaacctccaaactctacgtgatccgcaaccagattttcacgttcaccccgcaattcaccgatcagcatcacttttatctcgcacttgataacgaaatgatagtggaaatgctcagaattgaacttgcatacctctgcacttgctggcggatgaccggacgtcctaccctgacgtttccaatttcccgtaccatgcttactaacgacggctcagatatccattccgccgtgctttctactataaggaagttggaggacggttacttcgggggagcgagagtgaagttggggaacctgtcagaatttctcaccacttccttttacacctacctgacttttctcgaccctgattgtgatgaaaagttgtttgataacgccagcgagggtactttcagccccgatagcgattccgatctggtgggttacctcgaggatacctgcaaccaggaatcacaagatgagctcgatcattacataaatcatcttctccagagcacttcgctgagaagctacctgccacccctttgtaagaatactgaagatcggcatgtcttttcggctatacattcgaccagagacattctttccgtgatggctaaggcaaagggcctcgaagtccctttcgtgcccatgacccttcctactaaggtgttgtccgcacaccgtaagtccctcaacctcgtggacagccctcaacctcttcttgaaaaggtacccgagagcgatttccagtggcctagagatgatcacggtgatgtggattgtgagaagctggtcgaacaacttaaagattgctccaacctccaagaccaagcagatattctttacatcctttatgtgattaaaggaccatcgtgggataccaatctttcgggccaacatggggtgacggtccagaatctcctgggagaactgtatggaaaggcaggcctcaatcaggagtggggcctcatcagatacatttcgggtctgctgaggaagaaggtggaagtcctcgccgaggcatgcactgaccttctctcacatcaaaaacagctgactgtgggtctgcctcccgaaccacgcgaaaagatcatttccgcacccctgccgcccgaagaactgacgaaactgatctacgaagcatcgggacaggacatttcgatcgccgttctgactcaggagattgtcgtgtacctggccatgtacgtcagagcacagccaagcctgttcgtggaaatgcttagactgcgcatcggactgattatccaagtcatggcaaccgaactggcgcgtagcctcaattgttctggagaggaggcgtccgaatcccttatgaacctttcgccattcgatatgaagaaccttctgcatcatatcctctcaggaaaggaatttggagtggaacgatcagtgcggcctatccactcgtctacctcgtcccctactatttctatacatgaggttggtcacacgggtgtgactaagaccgaacgctcgggtattaaccgactcaggagcgaaatgaagcaaatgacccgcagattctccgcggatgagcagttcttctcagtggggcaagcagcctccagctccgcacactcgtccaaaagcgcaagaagctcgaccccatcaagcccgaccggtacgtccagctcggactcaggaggtcatcacattggctggggagaaagacaaggtcaatggctgcgacggcggagacttgacggcgcaattaaccgcgtcccggtcggattctaccaacgcgtttggaaaattctgcaaaagtgtcatggtctttccatagatggatacgttcttccgtcaagcacgaccagggagatgacgccgcacgaaatcaagtttgcagtgcatgtcgagtcggtcctcaaccgcgtgccacaacctgaatacaggcaactccttgtggaggctatcatggtgctgactcttctgtccgacaccgaaatgacttcgattggaggtatcattcacgtagaccaaattgtgcagatggcatcccagctgttcctgcaagaccaggtgtcgatcggtgccatggataccctcgaaaaggaccaggccacggggatatgtcatttcttctacgatagcgcaccttctggagcttacggaaccatgacctatctgactagggcagtggcatcgtacctgcaagaacttctgcctaactcagggtgccagatgcaa

SEQ ID NO: 6253 - DNA, 3705 bp, Artificial Sequence
  derived and/or modified sequence
atgcggtcccgatcaaatagcggggtgagactcgacgggtacgcacgcctggttcaacagactatcctctgctatcagaatccggtgaccggcctgctgtccgcctcacatgaacagaaagacgcatgggtgagggataacatctactcgatcttggccgtttggggactgggaatggcataccgaaagaatgcggaccgcgatgaagataaagctaaagcgtacgagctggaacagaatgttgtgaagttgatgcgcggcttgctccagtgcatgatgcggcaggtggcaaaagtggagaagttcaagcatacgcaatcaaccaaagactcgctgcacgccaagtacaacactgcaacttgtgggaccgtggtgggagacgatcagtggggacatctccaggtggacgccacgtcattgttcctgctgttcctggcacagatgactgcatctggcctgcgtatcatcttcacgctggacgaagtggcctttatccagaacctggtgttctacatcgaagctgcatacaaagtcgcggactacgggatgtgggaaaggggagataaaacgaatcaaggcatccctgagctgaacgcgagctccgtgggaatggcaaaggctgccctcgaagctattgatgagctggatttgtttggcgcgcacggcggcaggaagtcggtgatccacgtcttgccggatgaagtggaacactgtcagtcaattctcttctcaatgctcccgcgcgcctcgaccagtaaggaaatcgacgccgggctcctgtcgatcatcagtttcccggcgtttgccgtcgaggatgtgaacctggtgaatgtgactaagaatgagattatctccaaactccagggcagatacggatgctgcaggttcttgagagacggctacaagacccctcgcgaagatccgaatagactccattatgacccagccgagctgaagctcttcgagaacatcgaatgcgagtggccggtgttttggacttactttatcattgatggtgtcttttcaggcgatgcggtccaagtgcaggaatacagagaagcgctggagggaatccttatccgaggaaagaacggcatcagactggtccccgagctgtacgccgtgccgccgaacaaggtcgacgaggaatacaagaacccccataccgtcgaccgagtgccgatggggaaggtgccgcatctttggggacagtccctctacatcctgtcgtccctgctggcagaaggattccttgccgccggagaaatcgaccctttgaaccgccggttctctacttcagtgaagcctgacgtggtggtccaggtgaccgtactggcagaaaacaaccacatcaaggacctgctgcgcaagcatggcgtgaacgtgcagtccatcgccgacatccacccaatccaagtgcaacctgggagaatcctctctcacatttacgccaagctgggaagaaacaagaacatgaacctgtccggtcgcccataccggcatatcggagttctgggaactagcaagctgtacgttattagaaatcagattttcacttttacccctcagttcactgatcagcaccacttctacctggctcttgacaatgaaatgatcgttgagatgttgcgtatcgagctggcgtacctgtgcacctgctggcggatgaccggacggccgaccctcaccttcccgattagccgcactatgctgaccaacgacgggtcggacatccatagcgcggtcctctcgaccatcagaaaattggaagatggatacttcggaggggcccgcgtgaagctggggaatctctcggaattcttgaccacgtcattttacacttacctcactttcctggacccagactgcgacgagaagctgttcgataacgctagcgaaggaaccttcagccccgactcagactcggatctggtcggatacttggaggacacttgcaaccaagaaagccaagatgaattggaccactacataaaccatctcctccaaagcacttcgttgcggagctacctcccccctctctgcaagaacacggaggaccgccacgtgttctccgccatccattccacgcgcgatatcctctcggtgatggccaaagccaaaggcctcgaagtaccattcgttcccatgaccctcccgaccaaagtcctgtcggcccacagaaaaagccttaatctggtcgacagcccccagccgcttcttgagaaggtgccagagtcagacttccaatggccgcgcgatgatcatggagacgtggactgcgaaaaacttgtggaacagctgaaggactgctcaaacctccaagaccaagctgatattctgtatatcctctacgtgatcaagggcccgtcctgggacactaacctgagcggacagcacggggtgaccgtgcagaacctcctgggtgaattgtacggaaaggcaggcctcaatcaagaatggggactcatacggtatatcagcggattgctgcggaagaaggtggaagtgctggccgaggcctgtactgatctcctgtcgcatcagaaacaactgactgtgggattgccgccagagccgagagaaaagatcatctccgcgccgctgccacccgaggaactgacgaagctcatctacgaagccagcggtcaggacataagtatcgccgtgctgacccaagagatcgtggtgtacttggctatgtacgtccgcgcgcagccgtcgctgttcgtggagatgctcagactgcgcatcggcttgatcatccaggtcatggctactgaactggcgcgctccctcaattgctcgggggaagaagcatctgaatcactgatgaatctgtcgccttttgacatgaagaatctcctgcaccacatcctttcgggaaaagaatttggtgtcgagcggtccgtgcgtccgattcactcgtcaacttcctcaccaaccatctccattcacgaagtgggtcatacgggggtcactaaaaccgagaggagcggtattaaccgcctgcggtcggaaatgaagcagatgacccgccgcttcagcgcggatgaacaattcttcagcgtgggtcaggcagcttcctcgtcagcacactcgtccaaatcggcacgcagttcgaccccgtcctcccctactggaacttcctcctctgattcaggaggacaccatatcggatggggagagcggcaaggacagtggcttaggcgcaggcgtctggatggcgctatcaacagagtcccagttggcttctaccagcgggtgtggaagatcctgcaaaagtgtcacggacttagcattgacggttacgtcctcccttcatcgaccaccagagagatgactccacatgagatcaagtttgccgtccacgtggagtcggtgttgaaccgcgtaccgcaaccagagtacaggcaactgctggtggaggcaatcatggttctcaccttgctctccgacaccgaaatgacttcgatcggcggcatcattcacgtggatcagatcgtacagatggcctcacagctcttcctgcaggatcaggtttcaatcggagctatggacacccttgagaaggaccaggctaccggaatctgtcactttttctacgactcggcgccctccggtgcctacggtaccatgacttatctgaccagagcagtggcgagttacttgcaagagctccttcctaactccggatgccaaatgcaa

SEQ ID NO: 6254 - DNA, 3705 bp, Artificial Sequence
  derived and/or modified sequence
atgcggtcccgaagtaattctggtgtgaggttggacggctatgctaggctggtgcaacagacgattctgtgttatcagaatccagtgaccggactgctctccgcctctcatgaacagaaagacgcttgggtgcgcgacaacatctactccatactggccgtctggggattggggatggcttacagaaagaatgcggaccgagatgaagataaggcaaaggcttacgagttggagcagaatgttgttaaattgatgcgcggtctgttgcagtgcatgatgcgccaagtggcaaaagttgagaagttcaaacacacccagagcaccaaggacagcttacacgccaagtacaataccgctacgtgcggaacagtggtcggcgacgatcagtggggacatcttcaggtggatgctacatcactattcctactgttcctggctcaaatgactgcctccgggctgagaataatattcaccctagacgaggttgccttcatccagaacttagtcttctacattgaggctgcgtataaggtggctgactacggaatgtgggagcgcggtgacaaaaccaaccaggggattcctgagttgaacgcctcttccgtgggtatggccaaggccgctctagaggcaatcgacgagcttgacttgttcggcgcacatggcggacgcaaaagtgttatacacgtgctgccagatgaggtggagcactgtcaaagcatattattttctatgttaccaagggcatcaaccagcaaagagatagacgcagggcttctctcaattatatccttccccgcctttgccgtagaggacgtgaatctggtcaatgtgaccaagaacgaaattattagcaagctacaggggagatacgggtgctgccggttcctgagagatggatacaagacccctcgggaggatcctaaccggcttcactacgacccggcggaactcaagttgtttgagaatatcgaatgtgagtggccggtgttctggacttacttcattatagatggggtctttagcggagacgccgtccaggtccaggagtatcgcgaagctttggaaggtatcctaatcagagggaagaacggaatccgcctggtccctgaactgtacgcggtccctcctaataaggtggatgaagagtataagaacccccatacagtggacagagtgccgatgggcaaggtgcctcatctgtgggggcagtccctctacatcctgtcctccctgttggctgagggatttctggcggcaggagagatagatccactgaatagacggttttcaacttccgtgaaacctgatgtcgtggtgcaagttacagtgttggccgagaacaatcacatcaaagatcttctccgaaaacatggcgttaacgtacaatctatcgccgatattcatccaattcaagtgcagccaggtcggatactgtcccacatatatgctaagctcgggcgaaacaagaatatgaatctgagcggcagaccctatagacacatcggcgtcctggggaccagcaagctatatgtgattcgaaaccagattttcacgtttactccacaattcactgatcaacaccacttttacctggcattagacaatgaaatgatagtagaaatgctgcgtattgagctcgcgtatttatgtacatgctggagaatgactggaaggccgaccttaactttcccaatctccaggactatgttgacaaacgatggttctgacatacactcggccgtcttgtctaccatccggaaattagaggatgggtatttcggcggggcacgtgtgaagctcgggaaccttagcgagttcttgacaacgtcattttacacctatctgaccttccttgaccctgactgcgacgaaaaactatttgacaacgcctccgaaggcaccttcagcccagacagcgatagtgacctggtggggtatctggaggacacctgcaaccaggaatcccaggatgagctcgatcactacataaatcacctgctgcagtccacctcactcaggtcatacctaccgcccttgtgcaagaatacagaggaccgacatgtgttctctgcgatccattccaccagggacattctctccgtgatggctaaggccaaggggctcgaggtgcccttcgtgccaatgacgctgcctacaaaagtgctctctgcacatagaaaaagtcttaatttggtcgattccccccagccattgcttgagaaagttcccgaaagtgacttccaatggcccagggacgatcatggtgacgttgactgtgagaagctggtggagcagttgaaagattgctcaaacctgcaggaccaggcggatatcctgtacatcctctatgtcatcaagggaccttcttgggataccaatttatctgggcagcacggtgtaaccgtgcagaatctgttaggggagctttacgggaaggctggcctgaatcaggaatgggggttgatccgttacatatccggactattgagaaagaaagtagaagtgttggccgaagcctgcaccgacctgcttagccaccagaagcagctgacagttggactccccccggagccccgagaaaagataatttccgctcctctgcctcccgaggagcttactaagttgatttatgaggcctcaggacaagatatttcaatcgccgttttgacccaggaaatagtggtgtatctcgccatgtatgtgcgcgcccagcctagcctgtttgtcgagatgctaaggctaaggataggcctcatcatccaggtgatggcaactgaactggccaggagcctcaactgtagcggcgaggaggctagtgaatcactcatgaatctaagccccttcgacatgaaaaaccttctgcaccatattctgagtggcaaagagtttggagtcgagcgcagcgtaaggccgatccatagttcaacctcttctcctacaataagcatccatgaagttggacacaccggcgtcactaaaaccgaaagatccggtatcaatcgtctgagaagcgagatgaaacagatgacccgccgcttctcagcggacgagcaattcttcagtgtggggcaggccgcatcatctagtgcgcactcatccaagtccgctcgcagctcaacccccagctcgccgaccgggaccagctcctccgatagtggagggcaccatatcggctggggagagaggcagggacagtggctgcggcgcaggaggctggacggggccatcaacagggttccagtcggcttttaccagagggtatggaaaatattgcagaagtgccatggtctttcaatagatgggtacgtgctgccatcctcaaccacccgggaaatgaccccacatgaaataaagttcgcggtgcacgtggagagcgttctgaatcgcgtcccgcagccagagtatagacagttgctggtagaggccattatggtcctgactctcctaagcgatacagaaatgacgtcaatcggcggtatcatccacgtcgaccagatcgtccaaatggcgagccagctgttcctgcaggaccaggtttcaataggcgctatggacacgctagaaaaggatcaggcgactggcatttgtcacttcttctacgattctgctccatctggcgcatacggcaccatgacttacttgacccgtgcagtagccagctacctacaggagctgctgcctaactcaggatgtcagatgcag

SEQ ID NO: 6255 - DNA, 3705 bp, Artificial Sequence
  derived and/or modified sequence
atgagatcccgctcgaattcaggggtgcgcctggacgggtacgcacgccttgtgcagcaaacgatcctgtgctaccaaaatcctgtgactgggcttttgtctgcgtcccatgagcagaaggatgcatgggttcgcgataacatatacagcatcctggccgtgtggggactcggcatggcatatcgcaagaacgcagatcgggatgaagataaagccaaggcatacgagctcgaacaaaacgtggtgaaactgatgagaggccttctccagtgcatgatgcgccaggtcgcaaaagtggaaaagttcaagcatacccagtcgaccaaggacagcctccatgcaaagtataacactgcaacttgtgggactgtggtgggcgacgatcagtggggacacctccaggtggatgccacctcgttgtttctcctttttctcgctcaaatgactgcctcgggtctgagaatcattttcactctggacgaagtcgctttcatccaaaatctggtcttttacatcgaggccgcctacaaggtcgcagattacggtatgtgggagcggggagacaagaccaaccaggggatccctgaactcaacgcctcctcggtgggcatggcaaaggcagcgctcgaggctatcgacgaactcgacctctttggcgcacacggagggcgcaagtccgtgatccacgttctgcctgatgaggtggagcactgccagtccatcctcttttcaatgctgccacgcgcttcgacctcgaaagaaattgacgccggactgctgagcattatctcgttcccagccttcgccgtcgaagatgtcaatctcgtgaatgtcactaaaaacgagatcatctccaagctccagggacgctacggttgctgccgctttctgcgggatggatataagaccccaagggaggatccaaacaggctgcactacgacccggccgaattgaaattgttcgagaacattgagtgcgagtggcctgtgttttggacctacttcatcatcgatggggtgtttagcggtgacgcagtgcaagttcaggaatatcgggaagccctggaaggaatcctgataagaggcaaaaacggcatcagactggtcccagagctgtacgcggtgcctcccaataaggtggacgaagagtacaagaacccgcataccgtggaccgcgtcccgatgggaaaagtgccgcatctgtggggtcagtcgttgtacatcttgtcgtccttgctcgccgaagggttcctcgccgccggggaaatcgatccactgaaccgcagatttagcacttctgtcaagcccgacgtggtggtccaggtgaccgtgctggccgagaataatcacatcaaggacctgctgaggaaacacggtgtgaatgtgcagtcgatcgccgacattcacccaatccaagtgcaaccgggaagaatcctgagccacatctacgccaagctgggcaggaacaaaaacatgaatttgtcgggcagaccctaccggcacattggtgtcctcggcacttcgaagctctacgtgataagaaatcagatcttcacgttcaccccacagttcaccgatcagcaccacttctatttggcgctggataacgagatgatcgtggaaatgctgcgcatcgaattggcatacctgtgcacttgctggaggatgaccggtcggcctactctgaccttcccgatcagcagaactatgcttactaatgacggaagcgatatccactcagcggtgctgtcaacgatccgtaaactggaagatggctacttcggcggcgccagggtcaaactgggaaacctttcagaattcctgactacctcgttctacacctacctgactttcctggatcctgattgcgacgaaaaacttttcgacaatgcctcagaaggaactttctcgccagactccgattccgacctcgtgggatacctggaggacacttgtaaccaagagtcccaggatgagcttgatcactacattaaccacttgctgcaaagcacctcgctgcgcagctacttgccaccgctctgcaagaacactgaggaccgccatgtcttttcggccatccactcgactcgcgacatcctgagcgtgatggccaaagctaagggtttggaagtgccatttgtgcccatgactctgccgacgaaggtcctgtccgcacaccgcaagtcactcaatttggtcgactccccgcagccgctgctcgaaaaggtgcccgaatccgacttccagtggccgagggatgatcacggagacgtggattgtgagaaattggtcgagcagctgaaggactgctccaatctgcaagatcaggcggacatcttgtacatcctgtacgtgatcaagggaccctcatgggataccaatctgagcggacagcacggagtgacggtccagaatcttttgggtgagctgtacggaaaagcgggactgaaccaggagtggggactcatcaggtacatctcaggactgctgcgcaaaaaggtggaagtgcttgcagaagcatgcaccgacctgctttcgcaccagaagcaactcacggtgggattgccgccggaaccgcgggaaaagatcattagcgcgcctctgccgccggaagaactgacgaagctgatctacgaagctagcggccaagacatctcgatcgctgtgctgacccaagaaattgtggtgtacttggcaatgtacgtgcgggcgcagccatcgctgttcgtggaaatgttgagactgcggatcggcctgatcattcaggtcatggcgactgagctggcgcggtccctgaattgctcaggagaagaggcttccgaatcgctgatgaacctgtcaccgttcgacatgaagaaccttctgcaccatatcctgtcaggaaaggaattcggggtggagcggtcggtccgcccaattcattcgtccacttccagcccgaccatctcaatccacgaggtggggcacactggagtgacgaaaactgaaagatccggaattaaccgcttgcggtctgagatgaagcagatgacccgtagattctcagccgatgagcagttcttctcggtgggacaggcggccagctcctcggcgcattcttcgaagagcgccagatcatccactccatcctctcccacgggcacctcctcgtcagacagcggaggccatcacattggatggggcgaacgtcagggtcagtggctgcggcggagacggttggacggagcgatcaatcgggtcccagtggggttctaccagcgggtttggaagatcctccagaagtgtcatgggctgtctatcgacggatacgtgctgccgtcgtcgaccacgagagaaatgacgccgcacgagatcaagtttgccgtccacgtggaatccgtcctgaaccgcgttccgcagccagaatacagacagctgctggtggaggcgatcatggtcctgactctgttgagcgatactgagatgacctcaatcggcggcatcattcatgtggaccagattgtccagatggcgagccaactctttctgcaagaccaggtgtccatcggagccatggacactctggaaaaggaccaggccaccggcatctgccatttcttctatgacagcgcgccgtccggtgcctacggtaccatgacttatctgactcgggccgtcgcatcatacttgcaggaacttctcccgaattccggctgccaaatgcaa

SEQ ID NO: 6256 - DNA, 3705 bp, Artificial Sequence
  derived and/or modified sequence
atgcgtagccggtcgaactcaggggtgcggctcgatggatacgcccgactggtccagcaaaccattctttgctaccagaaccctgtgacgggactgctcagtgcctcgcatgaacagaaggatgcatgggtccgtgacaatatctacagtatccttgcagtgtgggggctcggaatggcatacagaaagaacgccgatcgtgacgaggacaaggccaaggcgtacgaattggaacaaaatgtggtgaaacttatgaggggccttctgcagtgtatgatgaggcaagtagccaaagtagagaagtttaagcacacccaaagcaccaaggattccctccacgcaaaatacaacactgcaacttgtggaactgtcgtgggagacgaccagtggggtcatcttcaagttgacgctacttctcttttcctcctttttcttgcgcagatgactgcctcaggtctgcggatcattttcaccctcgacgaagtggctttcatccagaaccttgtgttttacatcgaggcagcctacaaggtggcagattacggtatgtgggaaagaggagataagaccaatcaaggcatacctgagctcaatgcgagctcagtcggtatggcaaaggcagcacttgaagcaatagatgaactggacctttttggcgcacatggagggcgcaagtccgtgattcatgtgttgcctgatgaagttgagcactgccaaagcattcttttctcgatgcttcctcgcgcatcgacttcaaaggaaatcgatgcaggactgctgtcgatcattagttttcccgcattcgcagtggaagatgtcaacttggtgaacgtgacgaagaacgaaatcatttcgaagctccagggtcgctacggatgctgtcggtttctgcgcgacggatacaagactccgcgagaagatcctaaccggctccactatgatcctgcggaattgaaattgtttgagaacattgagtgtgaatggccggtgttctggacctatttcattattgacggtgttttcagtggggatgcagtgcaagtgcaggagtaccgagaagcccttgaaggcatcctgataagaggtaagaacggcattcggctggtgcccgagctgtacgccgtgccaccgaacaaggtggacgaagaatacaaaaatcctcataccgttgaccgagtcccaatggggaaggtcccacatctttggggacagtcgctttacatactttcgtcccttcttgcagagggctttctcgcggcaggagaaatcgacccgcttaaccgccgattttcgacttcggtgaaaccagatgtggtggtgcaagtgaccgtgctcgcagaaaacaaccatatcaaggacctgctcaggaagcatggtgtcaacgtgcaatcgatagcggatatccacccgattcaagtgcaacctggtcggatcctgtcacacatatacgcgaaactcggacgaaataagaatatgaacctgtcaggacgcccatacagacacattggagtgctcgggacctctaagctgtacgtcattcgtaatcaaatcttcacctttacccctcagtttactgaccaacaccacttctacctggcattggacaacgaaatgatagtggaaatgctgcggatcgaactcgcctacctgtgtacctgttggcgcatgaccggaaggccaacgctcactttcccaatttcccggactatgcttacgaacgatgggtccgatatccattcggcagtcctttccacgattaggaaactggaggatggatacttcggcggcgccagagtgaaactgggtaacttgtccgaatttcttaccacctcattctatacctaccttactttcctggatccagattgcgatgagaaactgtttgataatgcgtctgaaggtaccttttcgcccgactccgattccgatctggtaggttatcttgaggacacctgcaatcaggaatcgcaggacgagctcgatcattacataaatcatcttctccagagcacgagcctgaggtcgtaccttcctccactgtgtaagaacactgaagatcgccatgtcttttccgccattcactcaacccgcgatatcctcagtgtcatggctaaggctaaagggcttgaagtgccttttgttcctatgacccttcctactaaagtcttgagcgctcatcggaaaagcctgaatcttgttgatagcccccaacctctgctcgaaaaagtgcctgaatccgactttcaatggccaagggatgatcacggtgacgtggattgtgaaaagctggtggaacaactgaaggactgctccaacctccaggatcaagcagatattctttacatactctacgtcattaagggaccatcttgggataccaatctgtctggacaacatggagtgactgtccaaaaccttctcggggagctctacggtaaagccggacttaaccaggaatgggggctgattagatatatctcgggcctgcttcgtaagaaggtggaagtcctggcggaagcctgtaccgaccttctttcacatcaaaagcagctgaccgtgggactcccaccagagcccagagaaaagatcatttcagcaccacttccacctgaggagctcactaagctcatttacgaagcatcggggcaggacatttctatagcagtcctgactcaagaaatcgtggtgtaccttgcaatgtacgtccgggcacagccatcgttgtttgtcgagatgctgagactccggattggactgattattcaagtgatggctaccgaacttgcaaggtccctgaattgctcgggcgaggaggctagtgagtcgcttatgaatctcagccctttcgatatgaagaacctgctgcaccatatcctctccggtaaggaatttggagtggagagaagcgtcagaccgattcattcgtccacttcgtcgccaactattagcatccatgaggtgggacataccggagtgacgaaaactgagagatccggaatcaacagactccgatccgaaatgaaacagatgacccgacgcttttctgcagacgaacaattcttttcagtgggtcaagccgcatcgagctcggcacactcgagcaagtcggcacgctccagcaccccttccagcccaactgggactagcagctcggactccggaggacatcatattggctggggagaacgacagggtcaatggttgagacgccgtcggcttgacggcgcaatcaatagagtccctgttggtttttaccagcgggtgtggaagattctgcagaagtgtcatggtctttcaattgatggttacgtgctcccttcgtcgaccactagagaaatgactccccacgaaatcaagttcgcggtgcacgtggagagcgtgttgaacagagtaccccagcctgagtacaggcagttgcttgtggaagcaattatggtgctcacgctgctctccgacacggagatgacgtccattgggggtatcatccatgtggatcaaattgtccaaatggcctcacaactgtttctgcaagatcaagtgtcaataggtgcgatggatactcttgaaaaggatcaagccaccggaatctgtcatttcttctacgattccgcaccctcaggcgcatacggaaccatgacctacctgactcgagcagtggcctcctaccttcaagaactcctccccaactccggctgtcagatgcag

SEQ ID NO: 6257 - DNA, 3705 bp, Artificial Sequence
  derived and/or modified sequence
atgaggtcccgctctaattctggtgttcggctcgacggatacgcgcgtttagtccagcaaacaatcctttgctaccaaaacccagttacaggactcctgagtgcgagccacgagcagaaggacgcttgggtgagggacaatatctatagcattctagcggtctggggccttggcatggcttatcgtaagaacgccgatagagacgaagacaaagcgaaagcgtacgaactcgaacaaaacgtggtaaaacttatgagggggctgctgcagtgtatgatgcgtcaggtcgcaaaggtggagaagtttaagcatacccagtcaaccaaggattcccttcacgccaaatacaacacagcaacttgcggaactgtcgtcggtgatgatcagtgggggcacctgcaggtcgatgccacttcccttttcttacttttcttggcccagatgactgcctcaggtcttcgtattatttttactctagacgaagtcgcattcatccagaacttggtattctacattgaggcggcttacaaggtcgcagattacggaatgtgggaaaggggagataagacgaatcaaggcatccctgaacttaatgcttcctcggtggggatggccaaagccgcgctggaagccatcgacgagctagacttgtttggggcgcatgggggacgcaagagcgtaatccatgttttgcctgacgaggttgaacactgccaatctatcctgttcagcatgttaccacgcgcttcgacctccaaggaaattgatgcgggacttctaagcatcatctcatttcccgcgtttgcggttgaagatgtcaatctggttaatgtgaccaagaatgagataatctcgaagttgcaggggagatatgggtgctgccggtttctacgcgacggctacaagactccgcgagaagacccaaaccgtttgcactatgatcctgctgagctcaaactgttcgagaatatcgaatgcgaatggcccgtattctggacatactttatcatagatggagtgttctcaggagatgctgtgcaggtgcaagaataccgagaagctctagaaggtattctcattcgaggaaaaaacgggatcaggctcgttccggagctgtacgccgtgccgccgaacaaagtggatgaggagtacaaaaacccacatacggtagatcgcgttcctatgggcaaggtaccccacttatggggccagtccctatatatactgtcaagccttcttgctgagggtttcctcgctgccggggagattgatcctcttaaccggagattttcgacaagtgtcaagcccgacgtcgtcgtccaggtcacggtgttggcggaaaataatcatatcaaggatctgctccgaaagcacggggtcaacgttcagtctatcgcggacatccatcccatccaggttcaacctggtcgaatcctcagccatatttacgcgaaactgggaaggaataaaaatatgaacctctctggtcgcccctaccgccatataggtgtccttggaacatccaagctctatgttatccgcaaccaaatctttacattcaccccgcagttcacggatcagcatcatttctacctggctcttgataatgagatgatcgtggaaatgttgcgtatcgaattggcgtacctgtgtacttgctggaggatgacaggccggccgacccttacgttcccgatctcgcgcactatgctcaccaatgacgggagtgatatccattcggcagtattgtcgacgattcggaagctagaggatggttatttcgggggcgcccgggtgaaacttggcaacttaagcgagttcctaacgaccagcttctatacgtatctaaccttcctggatcccgattgtgacgaaaagcttttcgataacgcgtcagaaggcacgttttctccagacagtgacagtgatctagttggctatttagaagatacctgtaatcaagaatcccaggacgagcttgaccactatattaatcacctgttgcagagtacgtcgctcagatcgtatttgccaccgttatgcaaaaacactgaagacaggcatgtgttttcggcaatccactcgacgcgggatattttgagcgttatggcaaaggccaagggtctcgaagtcccattcgttccgatgacgttgccaacgaaggtgctctctgcccacagaaagagcctcaaccttgtcgattccccacagcccttgctcgaaaaagtgcctgagtcggactttcaatggcctcgtgatgaccatggcgacgtggattgcgagaaattggtcgagcagcttaaggattgttctaacctgcaggatcaagcggacattctctatatcctttacgtgatcaagggcccgagttgggatacaaacctttcaggccagcatggggttactgtacagaacttgctgggtgagctctatgggaaggctggacttaaccaggagtggggtctcatccggtatatcagtggtcttctaaggaagaaggtggaagtgctcgccgaggcatgtacagacttgctatcccatcagaaacaactgaccgtcgggctgccgcctgagccgcgagaaaagatcatcagcgcacccttgccgccagaggagctgacgaagttgatttatgaagcaagcgggcaggatatctccatcgctgtcctcacacaagaaattgtggtgtacttggctatgtacgtccgcgctcaaccaagccttttcgtcgagatgctgaggctaaggattgggctgatcatccaagtcatggccactgagctagctcggtccttaaactgttccggtgaagaggcctctgaatccctcatgaacctttcaccgttcgacatgaagaacctcctacaccacatcctcagcggtaaggagtttggagtagagcgttcagttcgcccaatacatagttcaacatcttcccctacgatttccattcatgaagtaggtcacacgggggttacaaagaccgagcggtctggcataaaccggttaagatccgagatgaagcagatgactcggagattttcggcggacgagcagttcttcagcgttggtcaagctgcttcttcgtcagctcattcttcgaaatcggctcgatcgtcgactccctcatccccaactggtacctcaagtagtgatagcggcggccaccatattggctggggcgagagacagggtcagtggttgcgcagacgacgattggatggtgcgatcaatcgcgtgcctgttggtttctatcagcgggtgtggaaaattttgcagaagtgccatggcctgtccatcgacggctacgtcctaccatcctcaacgacacgtgagatgaccccccacgaaattaagttcgccgtacatgttgagtcggtgcttaacagagttccacaaccggaataccgccagttgctcgtggaggctatcatggtgctaacgctattgtccgatactgagatgactagtattggcggtatcatccacgtcgaccagatagtgcaaatggcatcccagctgtttttgcaggaccaagtctctattggtgctatggacactcttgagaaggaccaggcaactggcatctgccacttcttctatgattccgctccttctggagcctacggaacaatgacctatttaacgcgggcggtcgcgtcatatctacaggagttattgcccaactcgggctgtcagatgcag

SEQ ID NO: 6258 - DNA, 3708 bp, Artificial Sequence
  derived and/or modified sequence
atgagaagcagaagcaacagcggcgtgagactggacggctacgccagactggtgcagcagaccatcctgtgctaccagaaccccgtgaccggcctgctgagcgccagccacgagcagaaggacgcctgggtgagagacaacatctacagcatcctggccgtgtggggcctgggcatggcctacagaaagaacgccgacagagacgaggacaaggccaaggcctacgagctggagcagaacgtggtgaagctgatgagaggcctgctgcagtgcatgatgagacaggtggccaaggtggagaagttcaagcacacccagagcaccaaggacagcctgcacgccaagtacaacaccgccacctgcggcaccgtggtgggcgacgaccagtggggccacctgcaggtggacgccaccagcctgttcctgctgttcctggcccagatgaccgccagcggcctgagaatcatcttcaccctggacgaggtggccttcatccagaacctggtgttctacatcgaggccgcctacaaggtggccgactacggcatgtgggagagaggcgacaagaccaaccagggcatccccgagctgaacgccagcagcgtgggcatggccaaggccgccctggaggccatcgacgagctggacctgttcggcgcccacggcggcagaaagagcgtgatccacgtgctgcccgacgaggtggagcactgccagagcatcctgttcagcatgctgcccagagccagcaccagcaaggagatcgacgccggcctgctgagcatcatcagcttccccgccttcgccgtggaggacgtgaacctggtgaacgtgaccaagaacgagatcatcagcaagctgcagggcagatacggctgctgcagattcctgagagacggctacaagacccccagagaggaccccaacagactgcactacgaccccgccgagctgaagctgttcgagaacatcgagtgcgagtggcccgtgttctggacctacttcatcatcgacggcgtgttcagcggcgacgccgtgcaggtgcaggagtacagagaggccctggagggcatcctgatcagaggcaagaacggcatcagactggtgcccgagctgtacgccgtgccccccaacaaggtggacgaggagtacaagaacccccacaccgtggacagagtgcccatgggcaaggtgccccacctgtggggccagagcctgtacatcctgagcagcctgctggccgagggcttcctggccgccggcgagatcgaccccctgaacagaagattcagcaccagcgtgaagcccgacgtggtggtgcaggtgaccgtgctggccgagaacaaccacatcaaggacctgctgagaaagcacggcgtgaacgtgcagagcatcgccgacatccaccccatccaggtgcagcccggcagaatcctgagccacatctacgccaagctgggcagaaacaagaacatgaacctgagcggcagaccctacagacacatcggcgtgctgggcaccagcaagctgtacgtgatcagaaaccagatcttcaccttcaccccccagttcaccgaccagcaccacttctacctggccctggacaacgagatgatcgtggagatgctgagaatcgagctggcctacctgtgcacctgctggagaatgaccggcagacccaccctgaccttccccatcagcagaaccatgctgaccaacgacggcagcgacatccacagcgccgtgctgagcaccatcagaaagctggaggacggctacttcggcggcgccagagtgaagctgggcaacctgagcgagttcctgaccaccagcttctacacctacctgaccttcctggaccccgactgcgacgagaagctgttcgacaacgccagcgagggcaccttcagccccgacagcgacagcgacctggtgggctacctggaggacacctgcaaccaggagagccaggacgagctggaccactacatcaaccacctgctgcagagcaccagcctgagaagctacctgccccccctgtgcaagaacaccgaggacagacacgtgttcagcgccatccacagcaccagagacatcctgagcgtgatggccaaggccaagggcctggaggtgcccttcgtgcccatgaccctgcccaccaaggtgctgagcgcccacagaaagagcctgaacctggtggacagcccccagcccctgctggagaaggtgcccgagagcgacttccagtggcccagagacgaccacggcgacgtggactgcgagaagctggtggagcagctgaaggactgcagcaacctgcaggaccaggccgacatcctgtacatcctgtacgtgatcaagggccccagctgggacaccaacctgagcggccagcacggcgtgaccgtgcagaacctgctgggcgagctgtacggcaaggccggcctgaaccaggagtggggcctgatcagatacatcagcggcctgctgagaaagaaggtggaggtgctggccgaggcctgcaccgacctgctgagccaccagaagcagctgaccgtgggcctgccccccgagcccagagagaagatcatcagcgcccccctgccccccgaggagctgaccaagctgatctacgaggccagcggccaggacatcagcatcgccgtgctgacccaggagatcgtggtgtacctggccatgtacgtgagagcccagcccagcctgttcgtggagatgctgagactgagaatcggcctgatcatccaggtgatggccaccgagctggccagaagcctgaactgcagcggcgaggaggccagcgagagcctgatgaacctgagccccttcgacatgaagaacctgctgcaccacatcctgagcggcaaggagttcggcgtggagagaagcgtgagacccatccacagcagcaccagcagccccaccatcagcatccacgaggtgggccacaccggcgtgaccaagaccgagagaagcggcatcaacagactgagaagcgagatgaagcagatgaccagaagattcagcgccgacgagcagttcttcagcgtgggccaggccgccagcagcagcgcccacagcagcaagagcgccagaagcagcacccccagcagccccaccggcaccagcagcagcgacagcggcggccaccacatcggctggggcgagagacagggccagtggctgagaagaagaagactggacggcgccatcaacagagtgcccgtgggcttctaccagagagtgtggaagatcctgcagaagtgccacggcctgagcatcgacggctacgtgctgcccagcagcaccaccagagagatgaccccccacgagatcaagttcgccgtgcacgtggagagcgtgctgaacagagtgccccagcccgagtacagacagctgctggtggaggccatcatggtgctgaccctgctgagcgacaccgagatgaccagcatcggcggcatcatccacgtggaccagatcgtgcagatggccagccagctgttcctgcaggaccaggtgagcatcggcgccatggacaccctggagaaggaccaggccaccggcatctgccacttcttctacgacagcgcccccagcggcgcctacggcaccatgacctacctgaccagagccgtggccagctacctgcaggagctgctgcccaacagcggctgccagatgcagtag

SEQ ID NO: 6259 - DNA, 3851 bp, Artificial Sequence
  derived and/or modified sequence
gggaaataagagagaaaagaagagtaagaagaaatataagagccaccatgcgatcgaggtccaattcgggtgtgcgcctggacggttatgccagactcgtgcagcagacaattctctgctatcaaaatccggtgacggggctcctcagcgcgtcacacgagcagaaagacgcctgggtgcgcgacaatatctacagcattctcgcggtatggggtcttggaatggcgtataggaagaacgccgatagggacgaggataaagccaaagcgtacgagctcgaacagaacgtcgtaaagctgatgcggggcttgctgcaatgcatgatgcgccaagtcgctaaggtcgagaagttcaaacatacgcagagcactaaggactccctgcacgcgaaatacaatacagctacgtgcgggacagtggtgggcgatgaccagtggggacatctccaagtcgacgcaacctcgcttttcttgttgttcctggctcagatgacggcatcgggtttgcgaatcatctttactttggatgaagtcgcgttcatccagaatctcgtattctacattgaagccgcgtataaggtagcggattatggcatgtgggagaggggtgacaagactaaccaaggtatcccggaactcaacgcctcgtcagtcggcatggccaaagcggcgttggaagcgatcgacgagttggatctttttggagctcacggtgggaggaaaagcgtcattcacgtattgcccgatgaagtggagcactgtcaatcgatcttgttctcgatgctccctagggcatcgacatccaaggaaatcgatgcggggttgctgtcgatcattagcttcccggcgttcgcagtcgaggatgtcaacctcgtcaacgtgacaaagaacgagattatcagcaaacttcaagggaggtatgggtgctgccggttccttagggatggttacaagaccccgagagaagatccgaatagacttcactatgacccggcagagctcaaactttttgagaacatcgaatgcgagtggcccgtgttttggacttactttatcatcgatggggtattttcgggtgatgcggtccaagtgcaagagtatcgggaggctctggaaggtattctcatccgcgggaaaaatgggattcgactcgtgcccgagctctatgcggtacctcctaacaaggtggacgaggagtacaagaatcctcacacagtggatagggtccctatgggaaaggtaccccatttgtggggccagtcgctctacattctgtcatcgcttctcgcggaagggttcctggcggctggagaaatcgatcccttgaataggaggttttcaacgagcgtcaagcctgatgtggtcgtccaagtgacggtgctcgccgaaaacaatcatatcaaagaccttctccggaagcacggcgtgaatgtccagtcgattgcggatattcacccaattcaagtgcagcccggaagaatcctgtcgcatatctacgcgaagttggggcggaataagaacatgaacctgtcgggtcgaccgtatcggcatattggagtcctcggtacgtcaaaactttatgtcatccgaaaccagatcttcacgttcactccacagtttacggaccagcatcacttctatcttgcgctggacaacgagatgatcgtggaaatgcttaggattgaactggcgtatttgtgcacttgttggaggatgaccggacgacccaccctcacattcccaatctcccggacgatgttgacaaacgacggatcagacatccattccgccgtgctctcaactatcaggaaactggaggacgggtactttggaggtgctagggtaaaactcggaaatctgtccgagtttctgacgacttcgttttacacttatcttacgttcctcgaccctgactgcgacgaaaagctgtttgataacgcttcagaagggactttctcgcctgattcagactccgatctcgtcggatacttggaggacacatgcaatcaggaaagccaggatgaactggaccactacatcaaccacttgcttcagtcgacctcattgcgctcgtatcttcctcccctgtgcaagaatacggaggaccgccacgtcttttcggcaattcatagcacgcgagacatcctgtcggtgatggcgaaagcgaagggccttgaggtcccatttgtacccatgaccctgccgacaaaagtgttgtcagcccaccggaagtcacttaacttggtggactccccgcagccattgctcgaaaaagtccctgagtcagacttccagtggcccagggacgatcacggtgacgtcgactgtgaaaagctggtggaacagctgaaggactgctcgaatctccaagatcaggcagacatcctttacattctctatgtaatcaaaggtccttcatgggatacgaatttgtcgggtcagcacggggtgaccgtacagaacttgcttggggagctctacgggaaagccggtcttaatcaagaatggggcctgatccggtacatttccggactcttgcggaagaaggtcgaagtgttggctgaagcatgtaccgatctcctctcgcatcagaagcagttgactgtgggactccctcccgagcccagagaaaagattatctcggccccattgccgccagaagaacttacaaaacttatctatgaagccagcgggcaggatatttcgatcgccgtattgacgcaagagattgtggtctatttggcgatgtacgtgagggcgcagccctccttgtttgtcgagatgctccgcttgagaatcggactcattatccaagtaatggcaactgaactcgctcgctccctcaattgcagcggggaggaggcttccgaatcccttatgaacttgagcccgttcgatatgaagaaccttctccatcatatcttgtcagggaaggagtttggggtcgagcgctcagtgaggccgatccacagctcgacctccagccctacgatctcgatccatgaggtagggcacaccggagtcacaaagaccgagaggtccgggatcaatagactgcgatcggagatgaagcagatgacaagacggttcagcgccgatgagcaattcttctcagtaggacaggcggcatcgtcgtcagcacattcgtcaaagtcagcaaggtcctcgactccgtcatcgcctacgggcacaagctcatcggattcgggagggcatcacatcggctggggcgagcgccaggggcaatggttgaggagaaggagactcgatggagccattaaccgggtccccgtcggtttctaccagagagtctggaagatccttcaaaaatgtcacgggctttcgattgacggttacgtccttccctcatccaccacccgcgagatgactccccacgaaatcaaattcgcggtgcatgtcgagtccgtgcttaatagagtcccgcagcccgagtataggcagcttttggtcgaagccattatggtgcttacgttgttgagcgatacggagatgacgagcatcggcgggattattcacgtggatcagatcgtgcagatggcgtcccagctctttctccaagaccaagtcagcatcggtgcgatggatacgctggaaaaggaccaagccacgggcatttgtcactttttctacgattcggcaccgtcgggagcctatggaacaatgacatacctcacgagagcagtagcctcctacttgcaagagctgctgcccaacagcggctgtcagatgcaatgataagctgccttctgcggggcttgccttctggccatgcccttcttctctcccttgcacctgtacctcttggtctttgaataaagcctgagtaggaag

SEQ ID NO: 6260 - DNA, 3708 bp, Artificial Sequence
  derived and/or modified sequence
atgaggagtcgcagcaattccggggtgcgactcgacggttatgcacgcttggtgcaacaaactatcctttgctatcagaaccccgtgaccggcttgctgtcggcctctcacgagcagaaggatgcatgggtacgtgacaacatttattctatactggcggtttggggtttgggcatggcgtatagaaaaaatgccgaccgggacgaggacaaagcgaaagcctacgagctcgagcaaaatgtcgtcaaactcatgagaggactgctgcagtgtatgatgcgacaggtggcaaaggtagaaaaattcaagcatacccaatctactaaggactccctgcacgctaagtacaacacggctacgtgcggaaccgtcgtgggagatgatcagtgggggcaccttcaggtcgacgctaccagcctctttctcctatttttggcccagatgactgcctctgggttacgcattatattcactctggatgaggttgctttcatccagaatcttgtcttctatatcgaggctgcctataaggtggccgactacggaatgtgggagcgcggagacaagacaaaccagggcattccagaactcaatgcttctagtgtaggcatggccaaggcagctctagaggccattgatgagctggatttattcggcgctcatggcgggcgcaagtcagtcattcacgttctccctgacgaggtcgagcattgtcagagcatcctcttctcaatgttaccacgagccagtacctctaaagagatcgacgccgggctgttgagtataattagctttcctgcttttgccgtggaggatgtgaatctcgtcaatgtgaccaagaacgagattatttccaaattgcagggaaggtatggttgctgcagatttctgcgagatggctacaaaacacctagagaggatcctaaccgtctgcactacgatcctgccgaactcaagctgttcgagaatatcgaatgcgaatggcccgttttttggacctacttcataatcgatggagttttttcaggggacgcagtgcaggtccaagagtatcgggaggctttggaaggcatcctgattcgagggaagaatgggatccgattggtcccggaattgtacgccgtgccacccaacaaagttgatgaagaatacaaaaatccgcataccgtggatcgcgtccctatgggaaaagtaccccacctatgggggcagagtctgtacattctgagttcccttctggctgagggattcctggccgctggtgagatcgatccccttaaccgccggttttccacctccgttaagccagatgtcgtcgtccaggtcacggtgttggcggaaaacaaccacatcaaggatctgcttcgaaaacatggcgtgaacgtgcagtctatcgccgatatccatcccatccaggttcagcctggacgcatcctgagccatatttacgcgaagcttgggcgcaataaaaacatgaacctgagcggtcgtccatatcgacacatcggtgtgctgggcacttctaagttgtatgtgatccgcaaccagattttcacgttcacaccccagttcactgaccaacaccacttctatctggccctggacaacgaaatgattgtggagatgctgcgtatcgagctagcgtatctgtgcacttgctggcgcatgaccgggaggccaactctcaccttccctatcagtcgtacgatgctaacaaacgatggctctgatattcacagtgcggtcctcagcacaatacggaaactggaggatggctattttggcggggcccgtgtgaagctgggaaacctgtcggagttcttgactacaagtttctatacctacctgacttttctagaccctgattgcgacgagaagctatttgacaatgcgagcgagggtacattctctcctgacagtgattcagacctcgtggggtatctagaagatacctgtaaccaggaatcccaggatgaactggatcattatatcaaccacctccttcagtctacaagcctgcgcagttacctgccccccctgtgcaaaaacaccgaggaccgtcacgtcttttcagctattcactccacacgcgatattctgtccgtcatggccaaagccaagggtctggaagtgccatttgttccaatgaccttgcctaccaaagtactttctgcccatcggaagtctctgaatctggtggattcaccacagccacttctggaaaaagtgcccgaaagtgattttcaatggcctagggatgaccacggcgacgtcgactgcgaaaagctcgttgaacagttaaaggattgctctaatctccaggaccaggcggatattctgtacatactatatgttatcaaaggcccaagctgggatacaaaccttagcggtcagcacggggtgactgtccagaatctcctcggtgagctatacggcaaggctgggttgaaccaagaatggggcttaatcagatatatctcgggcctgttacgaaagaaagtcgaggtgttagccgaggcctgtaccgatctgctgagccaccaaaagcaacttaccgtggggctccctcctgaacctcgtgagaagattatttcagcccctctgccccctgaagagcttaccaaattgatttatgaggcgtcaggacaagatatttcaattgctgtgctgacgcaggagatcgtggtgtatctcgccatgtatgtccgcgctcagccgtccctgtttgttgagatgctgcgcttgaggattggtttgatcatccaggtgatggccaccgagcttgctcggtctcttaattgtagtggcgaagaagcgagcgagagtctgatgaacctaagtcctttcgatatgaagaacctgctgcatcacattctcagcggcaaagaatttggggttgagcgatcggtccgaccaattcactcatccacatctagtcccacaatctctattcatgaagtaggccataccggggtgacgaaaaccgagcgctcaggcataaatagactgagatcagaaatgaagcagatgacacggcgcttctccgctgatgagcagttcttctccgtcggccaagcggcctcttcatccgcccatagctctaagtccgcccggtctagcaccccaagtagccctacaggtacctcttcatcagacagcggcggacaccacattgggtggggcgaacgccaagggcagtggttgaggcggcggaggcttgacggagctatcaatcgagttcctgtaggattctaccagagggtctggaagatcttgcagaagtgtcacggcctgagtattgacggctacgtcttaccatcgagtaccacacgggaaatgacccctcacgaaatcaagtttgctgtgcacgttgagtctgtgttgaaccgggtgcctcagcccgaatacagacagttactggttgaagccataatggttctgacactgctatcagatactgaaatgactagtatcggcggtattatccacgtcgatcaaatagtgcagatggccagtcagctctttcttcaagaccaggtgtccattggagccatggataccttggagaaagaccaggccacaggaatatgccactttttctatgattctgctccctccggagcatacggcaccatgacatacttaacgagggcggttgccagctacctgcaagagctgctccctaacagcggctgtcaaatgcagtag

SEQ ID NO: 6261 - DNA, 3708 bp, Artificial Sequence
  derived and/or modified sequence
atgaggagccgcagcaacagcggcgtgcggctggatggctacgcccggctggtgcagcagaccatcctgtgctaccagaaccctgtgacaggcctgctgagcgccagccatgagcagaaggatgcctgggtgcgggacaacatctacagcatcctggccgtgtggggcctgggcatggcctacaggaagaatgctgacagagatgaggacaaggccaaggcctatgagctggagcagaatgtggtgaagctgatgaggggcctgctgcagtgcatgatgaggcaggtggccaaggtggagaagttcaagcacacccagagcaccaaggacagcctgcacgccaagtacaacacagccacctgtggcaccgtggtgggagatgaccagtggggccacctgcaggtggatgccaccagcctcttcctgctcttcctggcccagatgacagccagcggcctgcgcatcatcttcaccctggatgaggtggccttcatccagaacctggtgttctacatcgaggccgcctacaaggtggccgactatggcatgtgggagcggggggacaagaccaaccagggcatccctgagctgaatgccagctctgtgggcatggccaaggccgccctggaggccattgatgagctggacctgtttggagcccatggaggcaggaagagcgtcatccacgtgctgcctgatgaggtggagcactgccagagcatcctcttctccatgctgccccgggccagcaccagcaaggagattgatgctggcctgctgagcatcatctccttccctgcctttgctgtggaggatgtgaacctggtgaatgtgaccaagaatgagatcatcagcaagctgcagggccgctatggctgctgccgcttcctgagagatggctacaagaccccccgggaggaccccaaccggctgcactatgaccctgctgagctgaagctgtttgagaacattgaatgtgagtggcctgtgttctggacctacttcatcattgatggagtcttctctggagatgctgtgcaggtgcaggagtaccgggaggccctggagggcatcctgatccggggcaagaatggcatccggctggtgcctgagctgtatgctgtgccccccaacaaggtggatgaggagtacaagaacccccacacagtggacagagtgcccatgggcaaggtgccccacctgtggggccagagcctgtacatcctgagcagcctgctggccgagggcttcctggccgccggggagattgaccccctgaacagacgcttcagcacctctgtgaagccagatgtggtggtgcaggtgacagtgctggccgagaacaaccacatcaaggacctgctgaggaagcacggcgtgaatgtgcagagcattgctgacatccaccccatccaggtgcagcccggccgcatcctgagccacatctatgccaagctgggcaggaacaagaacatgaacctgagcggccggccctaccgccacatcggcgtgctgggcaccagcaagctgtatgtgatccggaaccagatcttcaccttcaccccccagttcacagaccagcaccacttctacctggccctggacaatgagatgattgtggagatgctgagaattgagctggcctacctgtgcacctgctggaggatgacaggccggcccaccctgaccttccccatcagcaggaccatgctgaccaatgatggcagtgacatccacagcgctgtgctgagcaccatcaggaagctggaggatggctactttggaggagcccgggtgaagctgggcaacctgtctgagttcctgaccaccagcttctacacctacctgaccttcctggaccctgactgtgatgagaagctgtttgacaatgccagcgagggcaccttctccccagacagcgacagcgacctggtgggctacctggaggacacctgcaaccaggagagccaggatgagctggaccactacatcaaccacctgctgcagagcaccagcctgcggagctacctgccccccctgtgcaagaacacagaagatagacatgtgttttctgccatccacagcacccgggacatcctgtctgtgatggccaaggccaagggcctggaggtgccctttgtgcccatgaccctgcccaccaaggtgctgagcgcccacaggaagagcctgaacctggtggacagcccccagcccctgctggagaaggtgcctgagagtgacttccagtggcccagagatgaccatggagatgtggactgtgagaagctggtggagcagctgaaggactgcagcaacctgcaggaccaggccgacatcctgtacatcctgtatgtgatcaagggccccagctgggacaccaacctgagcggccagcacggcgtgacagtgcagaacctgctgggggagctgtatggcaaggccggcctgaaccaggagtggggcctcatccgctacatcagcggcctgctgaggaagaaggtggaggtgctggccgaggcctgcacagacctgctgagccaccagaagcagctgactgtgggcctgcccccagagccccgggagaagatcatcagcgcccccctgcccccagaggagctgaccaagctgatctatgaggccagcggccaggacatcagcattgctgtgctgacccaggagatcgtggtgtacctggccatgtatgtgcgggcccagcccagcctgtttgtggagatgctgcggctgagaattggcctcatcatccaggtgatggccacagagctggcccggagcctgaactgcagcggggaggaggccagcgagagcctgatgaacctgagcccctttgacatgaagaacctgctgcaccacatcctgagcggcaaggagtttggagtggagaggtctgtgcggcccatccacagcagcaccagcagccccaccatcagcatccacgaggtgggccacactggagtgaccaagacagagaggagcggcatcaaccggctgcggtctgagatgaagcagatgacccggcgcttcagcgcagatgagcagttcttctctgtgggccaggccgccagcagcagcgcccacagcagcaagagcgcccggagcagcacccccagcagccccaccggcaccagcagcagtgacagcggcggccaccacatcggctggggcgagcggcagggccagtggctgcggcggcggcggctggatggagccatcaacagagtgcctgtgggcttctaccagagggtgtggaagatcctgcagaagtgccacggcctgagcattgatggctacgtgctgcccagcagcaccacccgggagatgacccctcatgagatcaagtttgctgtgcacgtggagagcgtgctgaacagagtgccccagcctgagtaccggcagctgctggtggaggccatcatggtgctgaccctgctgagtgacacagagatgaccagcatcggcggcatcatccacgtggaccagatcgtgcagatggccagccagctgttcctgcaggaccaggtgtccatcggggccatggacaccctggagaaggaccaggccaccggcatctgccacttcttctatgattctgcccccagcggggcctacggcaccatgacctacctgaccagggctgtggccagctacctgcaggagctgctgcccaacagcggctgccagatgcagtag

SEQ ID NO: 6262 - DNA, 3708 bp, Artificial Sequence
  derived and/or modified sequence
atgcggagccggagcaacagcggcgtgcggctggacggctacgcccggctggtgcagcaaactatcctctgttatcaaaaccccgtgactgggcttctttctgcgagccacgagcagaaggacgcatgggttagggacaatatctatagcatcctcgctgtgtggggtcttggcatggcgtataggaagaatgcagatcgagacgaagacaaggcaaaggcttacgaactggaacagaacgtggtgaagcttatgaggggcttgttgcaatgtatgatgcgtcaggtggctaaagttgagaagttcaaacatacccagtcaacaaaggactcactgcacgccaagtacaatacagctacctgtgggaccgttgtgggcgacgaccagtggggtcatctgcaggtggacgctacctcactctttctgttattcctggctcagatgacggcttctggcttgagaattatttttaccctggacgaagtggcttttattcagaatcttgtcttttacatcgaagccgcatacaaagtggcagactatggaatgtgggaacggggcgataaaacaaatcagggcatccccgaattaaatgctagctccgtaggcatggctaaagccgctttggaagccattgacgaacttgatttgtttggagcacacggcggaagaaagtcagtgatccatgtcctgcccgacgaggtggagcactgtcagtctatcttgtttagcatgctgcctcgtgcctctacctcaaaagagattgacgctggtttgctctctatcattagcttccctgcttttgcagtcgaggatgtaaatctggtcaacgtgacaaagaatgagattatatctaagctacaggggagatacgggtgttgcagattcttgagagacggatacaaaactcctcgggaagaccccaaccgactgcattatgaccctgctgaacttaagcttttcgagaatattgaatgcgaatggcctgtcttttggacatattttatcatcgacggagttttctccggggacgctgtccaggtgcaggaatatcgcgaggccctggaaggtatcctgattagaggcaagaacggcattcggctcgtccccgaactgtacgctgttccacctaataaagtcgacgaagaatataaaaaccctcatactgtcgaccgtgtgcctatgggaaaggtgccccacctttgggggcagtcgctttatatcctgagtagcctgctagctgaaggcttcttagccgctggcgagatagacccactgaacagaagatttagcactagtgttaaacccgacgtggtcgtgcaggtaactgtcctagctgagaataatcacatcaaagacctacttcggaagcacggtgtgaacgttcagtcgattgccgacatacaccccattcaggtgcaacctggaagaatactgtctcacatttacgctaagttgggcaggaacaaaaatatgaacctaagtggcaggccttataggcacatcggggtcttaggtacaagcaagctgtacgtaatccggaatcaaatctttaccttcacaccacagttcactgaccaacatcatttctatcttgcactggataacgaaatgatcgtggaaatgcttaggatagaactggcctacctgtgcacctgctggcggatgactgggaggccaacccttacctttccaatatcgaggactatgctaactaatgatggatcagacatacactctgctgttctttcaaccatcagaaaactggaagacggctatttcgggggtgctcgggttaaattaggcaatctgagtgaattcctgactacttctttttatacgtacctgacctttctcgacccagattgcgacgaaaagttgttcgacaacgcaagcgagggcaccttttctccagattctgattccgatctggtgggctatcttgaagacacctgtaaccaggaatctcaggatgagttagatcattatattaaccatctactacagagcacaagcctgagatcatatctgccaccactatgtaaaaacacagaagaccgccacgtttttagcgccatccactctacaagagatattctctcagtcatggccaaggccaaggggctggaagtcccctttgtgccaatgacacttcctacgaaagtactgtctgctcaccgcaagagtctgaacctggttgacagtccacagccactcctggaaaaagttccagaaagcgacttccagtggcctcgcgatgatcatggggacgtggattgcgaaaagctggtcgaacagctcaaggattgttccaatcttcaggatcaagctgacattctctacatcctgtatgttatcaaaggcccatcatgggatactaacttatcggggcaacacggcgttaccgtccaaaacctgcttggggaactgtatggcaaagccggacttaaccaggaatgggggttgatccgctatataagcgggctgttgcggaagaaagtagaagtgctggccgaggcttgcactgatctgctgagccaccagaagcagctaacagtcggacttcccccagaacctagggagaagattatctctgctcctctgcccccagaggagctgactaagctaatttacgaggctagcggacaggatatttctatagcagtactcacgcaggaaatagtggtgtacctggccatgtacgtgagggcacagcccagtctctttgtggagatgctgaggctcaggatcggactcattatccaggtgatggcaacggagttagccaggtctctgaactgttcaggcgaggaagccagtgagtcgctgatgaacctgagccccttcgacatgaaaaacttgctccaccacatactctccggaaaggaattcggggttgagaggtcggtaaggccaatccactcttccacctctagtcccacaatctccatacacgaggtgggacacaccggggtcaccaaaactgagcgctcgggaattaacagattgcggtcagaaatgaagcaaatgacccggcgattttccgccgacgagcaattcttctccgtgggccaggctgcttcaagcagcgctcattcctcaaagtctgcgagaagctctacaccctcttcaccaacagggacaagcagcagtgacagcgggggtcaccacatcggttggggcgaacggcagggacagtggttgagacggaggcgcctggatggcgcaatcaatagggtgcccgtgggcttttaccagcgagtgtggaagattttgcaaaaatgccacgggctgagcattgatggctacgtcctcccgtcatcaacaacccgggagatgaccccacatgaaatcaagttcgccgtccacgtcgagagcgtgttgaatcgagttccgcaaccagaatataggcagctcttggtcgaggctataatggtgctcacactcctgagcgacacggagatgacgtctatcggcggaatcatccatgttgaccagattgtccagatggcgtcgcaactgttccttcaggaccaggtgagcatcggagccatggacacgctggagaaagaccaggccaccggcatatgccacttcttctacgattccgcaccttccggagcttacggcacaatgacttacctgaccagagccgtcgcaagttaccttcaagaactgctacctaacagcggatgccagatgcaatag

SEQ ID NO: 6263 - DNA, 3708 bp, Artificial Sequence
  derived and/or modified sequence
atgcgatcccgctccaattcgggcgtgaggctcgatggctatgctcgtcttgtacagcagacgatcctgtgctaccagaaccctgtgacaggtctcctgtcggctagccacgagcagaaggacgcgtgggtccgtgacaatatttacagcatcctggctgtatggggcctggggatggcctaccggaagaacgccgaccgggatgaggacaaggcgaaggcttacgaactggagcagaatgttgttaaattgatgcggggtttgctgcagtgtatgatgcggcaggtggcaaaagtggaaaagtttaagcacacacagtcaactaaggattccctgcatgcaaaatacaatacggcaacctgcggtaccgtggtcggcgatgatcagtggggtcatctgcaggtggatgcaacatcacttttcctactgtttctggctcaaatgacagcttcagggctccgcattatctttactctcgatgaggtagccttcatccaaaacctggtcttctacattgaagctgcctacaaagtggcagactacggtatgtgggaacgcggtgacaagaccaatcagggaatacctgagctaaacgcatcttctgtgggaatggccaaggcagcactggaggcgattgacgagctagatctgttcggcgcacatggcggtaggaagagcgtaatacatgttctccccgatgaagtggagcactgtcagagcattctattcagtatgttgccccgtgcctctacgtcgaaagagatcgatgctggtctcttgagcatcatctcttttcccgcatttgccgtggaggacgtgaatctcgtgaacgtaacaaagaacgagatcatctctaagctgcaaggccgttatggctgttgcagatttctgagggacggctataaaaccccccgagaagatccgaatagactgcattacgacccagccgaactcaagctgttcgagaatattgaatgtgagtggccagtcttctggacatattttatcattgacggagtgttctcaggagatgccgtccaggtgcaagagtaccgagaggctctagaagggatactgattcgtgggaaaaacgggatcaggctagtgcccgaactgtatgcagttcctccgaataaagtagacgaggagtacaaaaatcctcatacagtagaccgggtgccgatgggcaaggtaccacacttgtggggacagtctctgtacatcctgtcctcgctgctggcagagggctttctcgctgcgggagagattgatccactgaatcgtcgcttcagcaccagtgtcaagcccgacgtggtagtgcaagttaccgtgcttgccgagaataaccacatcaaagacttgcttaggaagcatggtgtgaatgtccaaagtattgcggacattcatcccatacaggttcagcctggccgaattctaagtcacatttatgccaagctcggaaggaataagaacatgaatctgagcgggaggccttaccgacatataggggtgttgggaacctccaagctgtatgtaatccgtaaccagattttcacctttaccccgcagttcactgaccaacaccacttctaccttgcgctcgataacgaaatgattgttgagatgctgcgaatcgaactggcatatctatgcacgtgctggcggatgacagggcgtcccacccttacttttccaatctcacgcaccatgctgacaaacgatggcagcgatatccactccgctgtgctgtccacgatccggaaacttgaggatggctacttcggtggcgcaagagtcaagctgggaaacctaagcgaattcttgaccacaagcttctatacgtacctcaccttcctggacccggactgtgacgagaaactatttgacaatgcatcagagggaacttttagccctgactcagattccgacctggtgggctatctggaagacacttgtaatcaggaatcccaggatgaactggaccattacatcaatcatctgctccagtctacatccctgaggagttacctaccaccattatgtaaaaataccgaggacagacacgtcttctctgcaatccattcaaccagagatattcttagtgtaatggcaaaggccaaggggttggaggtaccgtttgtgcccatgacgcttcccaccaaagtactgtctgcccaccgcaagtctctgaatctcgtagactctccacagccccttttggagaaggtgccagaatctgacttccaatggccacgtgatgaccatggcgacgttgactgcgaaaagctcgttgaacaactgaaagattgttccaatctccaggaccaagcggatatactgtatatcctatacgttataaagggaccttcctgggacaccaatctgagcggccaacatggggtgactgtgcaaaacctactcggggagctttacggcaaggccggactcaaccaagagtggggcctcattaggtatatctcaggcctgctgcgcaaaaaggtggaggtactggccgaggcttgtacagacctcctcagccaccagaaacagttaactgtgggcctgcctccagaacccagggagaagattatctctgcccctctgcccccagaagagctcaccaagctgatctacgaggctagtggtcaggacatcagtattgccgtgcttacgcaggaaatcgtggtgtatctggcaatgtatgtgcgagctcaacctagcctgttcgtcgagatgttgcgccttcgcatcgggctgataatccaggttatggccacggaacttgcacggtccctgaactgttcgggggaagaggcaagtgagtccctaatgaacctgtctccctttgatatgaaaaatctgttgcaccatattctgagcgggaaagaattcggggtcgagcggtctgtgcgccctatccatagcagcacctcatccccgactatttccatccatgaggtgggacacaccggcgtgactaagaccgaaaggagcgggattaacaggttaaggtccgagatgaagcagatgacacggaggttcagcgccgacgaacagttttttagtgtgggccaagctgcctcgtctagcgcccactccagcaagagcgccaggtcctcaaccccgtccagcccaaccggtacttcctcgtctgactccgggggtcaccacattggctggggtgagaggcagggacagtggctgcgtcgtagacggcttgatggtgccatcaatcgcgttcccgtcggattttatcagagggtgtggaagatccttcagaagtgccacggactatccatcgacggatacgtacttccttcgtctactacacgggaaatgaccccccatgaaatcaagtttgctgtgcatgtggagagcgtgcttaatagagtaccacagcccgagtacagacaactcctcgtggaagccattatggtcctgacactgctgtccgataccgaaatgaccagcatcggcggtattattcatgtagaccaaatcgtccagatggctagccagctgttcctacaagatcaggtctccataggagctatggatacccttgaaaaagatcaggcgactggaatttgccattttttttacgatagtgccccaagtggcgcatacgggactatgacatacctcactagagctgtggcttcatatttgcaggaattactacccaatagtggatgccagatgcagtag

SEQ ID NO: 6264 - DNA, 5559 bp, Artificial Sequence
  derived and/or modified sequence
cggagggcgggtccaaggcgcccaggtggccgcggcagaagggcctgtttctctggccttggctgtggttggcagccggccggggagagaagggactcagggaggcaacctggttcccgcccgttgctgatttcgcagcggctctcccgggccgcccccttttccttcctcctcaggccgcgacttggagggttccgctccgcggcgggggcagagccaggggcggggctgagcgcggcctgggcgatctccccggcggctggggtgggctggcgtcttcttcgcgcccgggggacctcctcgcgaccgccgggacgtaaaaggggcttggcaggggcgtcctcgccccactcccggaacctggtttcccgctgctcccgcgagcgtcgggagcccagcaggcctggccgaggcgggaccttcgtcgctccagcccccgtccccgcccccgcgcctccccgccgcgcggagctctggttggcttgctttccaaccggactttggggctagcgtttagaaaagtctcgacctcctccggcccggtcccatcccaagaaccgactaaggctgtgagtgtccgggaaccagacccgcttggaggccacagccccgacgtcccgcgcccacgcggcagatcgggcgctgcggcctgggagcctcggggagatgcggagcaggagcaattccggggtccgcttggacgggtacgcgcggctggtgcagcaaaccatcctgtgttaccagaatcccgtcacggggctgctgtcagccagccatgagcagaaggatgcctgggtgcgggataacatctacagtatcctggccgtgtggggcctgggcatggcctaccgtaagaatgcagaccgcgatgaggacaaggccaaggcctacgagctggagcagaacgtggtgaagctgatgcgaggtcttctccagtgcatgatgagacaggtggccaaagtggagaagttcaaacacactcagagcaccaaggacagcctgcacgccaagtacaacaccgccacctgtggcacggtggtgggcgacgaccagtggggccacctccaggtggatgccacctctctcttcctcctgttcctggcccagatgaccgcctcaggcttacgtatcattttcactctcgatgaggtggccttcatacagaatcttgtcttttacatagaagctgcatataaagtcgctgattatggaatgtgggagcgtggagataagactaatcagggcatcccggaattgaatgcaagctccgtaggaatggccaaggcagctcttgaggcaattgatgaactggacctttttggagcccatggaggacgcaagtcagtgattcatgttctgccagatgaggtcgagcactgccagtctattctgttctccatgctgccaagagcgtcgacatctaaagaaattgatgctggacttctttccattatttccttcccggcctttgcagtggaagatgtaaaccttgtaaatgtgaccaaaaatgaaattatttctaagctccaggggcgttatggatgctgtcgcttccttcgagatggttataaaactccaagagaggaccctaatcgactgcattatgaccctgctgaactcaagctcttcgaaaacattgaatgtgagtggcctgtgttttggacatattttataatagatggagtcttcagtggtgatgctgttcaggtccaagaataccgagaggccctggagggaatactcatcagaggcaagaatgggatccgcctggtgcctgaactctacgctgtcccgcctaacaaggtagatgaagagtacaagaatcctcacacagtagaccgagttcctatggggaaggtgcctcatctgtggggccaatccttgtacatcctcagctcgctgttggcagagggattccttgccgctggtgaaatcgatcccttaaatagaagattttccacttcagtcaaacctgatgttgtagtacaagttactgttttggcagaaaacaatcacattaaggacttattgaggaaacacggggtgaacgtccagagtatcgcggacattcatccaattcaagtccagccgggccggattcttagtcacatatatgccaagcttggacggaataagaatatgaatttgagtgggcgaccgtatcgacatattggtgtccttggaacctctaaactatatgtgattaggaaccaaatctttacttttacaccccagttcaccgaccagcatcacttctacctggccctcgacaatgagatgatcgtggagatgctaaggatcgagctggcctacctgtgcacctgctggaggatgacgggcagacccacactcaccttccccatcagtcgcaccatgctcacaaatgatggctcagacattcattctgctgtgctctccacaattagaaaactagaggatggatattttggaggagccagagtaaaattagggaacctttcggaatttctcaccacatcgttctacacatatctgacttttctggatccagactgtgatgagaagttgtttgacaatgccagcgaagggactttcagtcctgatagtgattcagatttggtaggatatctggaagacacctgtaatcaagaaagccaagacgaacttgaccattatatcaaccaccttctgcaaagcacatcgttgaggtcctatctgcctcctctttgtaagaacacagaagaccgccatgtcttcagtgctatccactccacgcgggacatactttctgtgatggcaaaagcaaagggtttggaagttccatttgttcccatgactttgccgactaaagttctaagtgcccaccgtaaatcactgaatcttgttgattctcctcagccactcctagaaaaggttcctgaaagtgactttcagtggcccagagatgaccatggtgacgtggactgtgagaagctggttgagcagctaaaagattgttcgaacctacaggaccaagcagacattctgtacattctttatgtcataaagggtcccagctgggacacaaatctctctggacagcacggggtcaccgttcaaaaccttcttggtgagctctatgggaaagccggcttgaaccaggagtggggtctgattcgctacatctcaggccttctcaggaagaaagtggaggtcctggctgaggcctgcacagacctgctttcgcaccagaagcagctcaccgtgggcctgccgcccgagccccgggagaagatcatctctgcgccccttcccccagaggagctcacaaaactcatctacgaggccagtgggcaggacatcagcattgccgtcctcacgcaggagattgtggtttacctggccatgtatgtcagggcgcagcccagcctctttgtggagatgctgagactccggattggactgatcattcaggtgatggccacggagctggcacggagcctgaactgctcaggagaagaggcttctgaaagtttgatgaacctcagccctttcgatatgaaaaatctcctgcaccatattctaagtgggaaagagtttggcgttgaaagaagtgtgcgccctatccactcctccacatccagccctaccatctccatccacgaggtgggccataccggagtcaccaaaactgagaggagtggcattaacagactgaggagtgaaatgaaacagatgactaggcggtttagtgctgatgaacagttcttttctgtgggccaggccgcgtccagcagtgcgcattcctccaagtctgcgaggtccagcaccccatcctcgcccactggcacgtcatcctcagactcgggaggacatcacatcggctggggtgagcggcagggccagtggctgcgcaggagaaggctggatggggccatcaacagggtccccgtgggattctaccagagggtgtggaagatcctccagaagtgccacggtctctccatcgatggttatgtcctcccatcctcgacgacccgagagatgaccccgcatgagatcaagtttgctgtccatgtcgaatcggtgctgaaccgcgtgccgcagcccgagtaccggcagctgctggtggaagccatcatggtgctgacgctgctctcggacacggagatgaccagcatcgggggcatcatccacgtggaccagatcgtgcagatggccagtcagctgttcttgcaggaccaggtgtcaattggtgccatggacaccctggagaaagaccaagccacaggaatctgccacttcttttatgacagcgctccgagtggggcttatgggacgatgacctacctaacaagagcagtggcttcttatttgcaggaattgttgcccaattcgggctgccagatgcaatagggtctcacctggaaacatgatcacactctcaatctgtcacgtgccccctagccttactgggaaccttctgtcccccaagatcccctgtgctatcaggaaagcatgtcccatcagaaacactctcggggggcaatggtagcactcaccctgaaactgatgtatgttaaagccacagagatagagctgaggagtcctgtgttcccccgcaaggagcaccccgggatcattttctaggttcatttctctggaacatttgctgtagcatctggtctcacggactctgaggaggaattggaaattggtctcttttgagtgcagagggaactgagacgccagcttaaattggctcttgcagagagttacagaaatagtttcgatgagctagtgacacatcctaaagatgcaaagatcctcctggcggcagtagccttgacaagggccacctcttcacaggatgcagtctgtctgtgcaccaaactcttcaccaaatagaacacttgtgtctctctgtggaatgggggttttcttgtgccttgcttgctttcatagccttccattttattggcatggctgccttgatgtaacataattctctgtccccaagatttagaaaattcctcttcgttcaccttggctcatggtcttccagggtttttatcctggctgtctatgaactagggttttctcctgccttaggaaaaatactgcatcttctggaatctagaaaaaaaaaaaaaaaaagacaaggctcctcttatagccaggcaagcagttgtttagggctagacctgttgtccccgctcgcgtggggtgaacgccccgcagtggatactgtcctcctgtgctctgggcgaggcgtcatagggtgagcacaagtcagcagtgccatggaagtgaacaggcatgtccccgcagaaacaatgcttccctctgaaaaatagagccaggctaggaacctgtaccctcttggtagaagcactttggtcttcactctcttgggtgggtgcagttggaggcaccgattggaggagagcaaggttgagtcaggtgtcagggtctggcaaatcttttgccaatgccctagcaatggagtttctctccgggcattgtcttaccttgggggaaggaaacaaaaccaatgggaaaacagtttctgtaaataataaaccttgaaagacaaatgct

SEQ ID NO: 6265 - RNA, 3851 nt, Artificial Sequence
  derived and/or modified sequence
gggaaauaagagagaaaagaagaguaagaagaaauauaagagccaccaugcgaucgagguccaauucgggugugcgccuggacgguuaugccagacucgugcagcagacaauucucugcuaucaaaauccggugacggggcuccucagcgcgucacacgagcagaaagacgccugggugcgcgacaauaucuacagcauucucgcgguauggggucuuggaauggcguauaggaagaacgccgauagggacgaggauaaagccaaagcguacgagcucgaacagaacgucguaaagcugaugcggggcuugcugcaaugcaugaugcgccaagucgcuaaggucgagaaguucaaacauacgcagagcacuaaggacucccugcacgcgaaauacaauacagcuacgugcgggacaguggugggcgaugaccaguggggacaucuccaagucgacgcaaccucgcuuuucuuguuguuccuggcucagaugacggcaucggguuugcgaaucaucuuuacuuuggaugaagucgcguucauccagaaucucguauucuacauugaagccgcguauaagguagcggauuauggcaugugggagaggggugacaagacuaaccaagguaucccggaacucaacgccucgucagucggcauggccaaagcggcguuggaagcgaucgacgaguuggaucuuuuuggagcucacggugggaggaaaagcgucauucacguauugcccgaugaaguggagcacugucaaucgaucuuguucucgaugcucccuagggcaucgacauccaaggaaaucgaugcgggguugcugucgaucauuagcuucccggcguucgcagucgaggaugucaaccucgucaacgugacaaagaacgagauuaucagcaaacuucaagggagguaugggugcugccgguuccuuagggaugguuacaagaccccgagagaagauccgaauagacuucacuaugacccggcagagcucaaacuuuuugagaacaucgaaugcgaguggcccguguuuuggacuuacuuuaucaucgaugggguauuuucgggugaugcgguccaagugcaagaguaucgggaggcucuggaagguauucucauccgcgggaaaaaugggauucgacucgugcccgagcucuaugcgguaccuccuaacaagguggacgaggaguacaagaauccucacacaguggauagggucccuaugggaaagguaccccauuuguggggccagucgcucuacauucugucaucgcuucucgcggaaggguuccuggcggcuggagaaaucgaucccuugaauaggagguuuucaacgagcgucaagccugauguggucguccaagugacggugcucgccgaaaacaaucauaucaaagaccuucuccggaagcacggcgugaauguccagucgauugcggauauucacccaauucaagugcagcccggaagaauccugucgcauaucuacgcgaaguuggggcggaauaagaacaugaaccugucgggucgaccguaucggcauauuggaguccucgguacgucaaaacuuuaugucauccgaaaccagaucuucacguucacuccacaguuuacggaccagcaucacuucuaucuugcgcuggacaacgagaugaucguggaaaugcuuaggauugaacuggcguauuugugcacuuguuggaggaugaccggacgacccacccucacauucccaaucucccggacgauguugacaaacgacggaucagacauccauuccgccgugcucucaacuaucaggaaacuggaggacggguacuuuggaggugcuaggguaaaacucggaaaucuguccgaguuucugacgacuucguuuuacacuuaucuuacguuccucgacccugacugcgacgaaaagcuguuugauaacgcuucagaagggacuuucucgccugauucagacuccgaucucgucggauacuuggaggacacaugcaaucaggaaagccaggaugaacuggaccacuacaucaaccacuugcuucagucgaccucauugcgcucguaucuuccuccccugugcaagaauacggaggaccgccacgucuuuucggcaauucauagcacgcgagacauccugucggugauggcgaaagcgaagggccuugaggucccauuuguacccaugacccugccgacaaaaguguugucagcccaccggaagucacuuaacuugguggacuccccgcagccauugcucgaaaaagucccugagucagacuuccaguggcccagggacgaucacggugacgucgacugugaaaagcugguggaacagcugaaggacugcucgaaucuccaagaucaggcagacauccuuuacauucucuauguaaucaaagguccuucaugggauacgaauuugucgggucagcacggggugaccguacagaacuugcuuggggagcucuacgggaaagccggucuuaaucaagaauggggccugauccgguacauuuccggacucuugcggaagaaggucgaaguguuggcugaagcauguaccgaucuccucucgcaucagaagcaguugacugugggacucccucccgagcccagagaaaagauuaucucggccccauugccgccagaagaacuuacaaaacuuaucuaugaagccagcgggcaggauauuucgaucgccguauugacgcaagagauuguggucuauuuggcgauguacgugagggcgcagcccuccuuguuugucgagaugcuccgcuugagaaucggacucauuauccaaguaauggcaacugaacucgcucgcucccucaauugcagcggggaggaggcuuccgaaucccuuaugaacuugagcccguucgauaugaagaaccuucuccaucauaucuugucagggaaggaguuuggggucgagcgcucagugaggccgauccacagcucgaccuccagcccuacgaucucgauccaugagguagggcacaccggagucacaaagaccgagagguccgggaucaauagacugcgaucggagaugaagcagaugacaagacgguucagcgccgaugagcaauucuucucaguaggacaggcggcaucgucgucagcacauucgucaaagucagcaagguccucgacuccgucaucgccuacgggcacaagcucaucggauucgggagggcaucacaucggcuggggcgagcgccaggggcaaugguugaggagaaggagacucgauggagccauuaaccggguccccgucgguuucuaccagagagucuggaagauccuucaaaaaugucacgggcuuucgauugacgguuacguccuucccucauccaccacccgcgagaugacuccccacgaaaucaaauucgcggugcaugucgaguccgugcuuaauagagucccgcagcccgaguauaggcagcuuuuggucgaagccauuauggugcuuacguuguugagcgauacggagaugacgagcaucggcgggauuauucacguggaucagaucgugcagauggcgucccagcucuuucuccaagaccaagucagcaucggugcgauggauacgcuggaaaaggaccaagccacgggcauuugucacuuuuucuacgauucggcaccgucgggagccuauggaacaaugacauaccucacgagagcaguagccuccuacuugcaagagcugcugcccaacagcggcugucagaugcaaugauaagcugccuucugcggggcuugccuucuggccaugcccuucuucucucccuugcaccuguaccucuuggucuuugaauaaagccugaguaggaag

SEQ ID NO: 6266 - protein, 1093 aa, Artificial Sequence
  derived and/or modified sequence
MAGAAGLTAEVSWKVLERRARTKRSGSVYEPLKSINLPRPDNETLWDKLDHYYRIVKSTLLLYQSPTTGLFPTKTCGGDQKAKIQDSLYCAAGAWALALAYRRIDDDKGRTHELEHSAIKCMRGILYCYMRQADKVQQFKQDPRPTTCLHSVFNVHTGDELLSYEEYGHLQINAVSLYLLYLVEMISSGLQIIYNTDEVSFIQNLVFCVERVYRVPDFGVWERGSKYNNGSTELHSSSVGLAKAALEAINGFNLFGNQGCSWSVIFVDLDAHNRNRQTLCSLLPRESRSHNTDAALLPCISYPAFALDDEVLFSQTLDKVVRKLKGKYGFKRFLRDGYRTSLEDPNRCYYKPAEIKLFDGIECEFPIFFLYMMIDGVFRGNPKQVQEYQDLLTPVLHHTTEGYPVVPKYYYVPADFVEYEKNNPGSQKRFPSNCGRDGKLFLWGQALYIIAKLLADELISPKDIDPVQRYVPLKDQRNVSMRFSNQGPLENDLVVHVALIAESQRLQVFLNTYGIQTQTPQQVEPIQIWPQQELVKAYLQLGINEKLGLSGRPDRPIGCLGTSKIYRILGKTVVCYPIIFDLSDFYMSQDVFLLIDDIKNALQFIKQYWKMHGRPLFLVLIREDNIRGSRFNPILDMLAALKKGIIGGVKVHVDRLQTLISGAVVEQLDFLRISDTEELPEFKSFEELEPPKHSKVKRQSSTPSAPELGQQPDVNISEWKDKPTHEILQKLNDCSCLASQAILLGILLKREGPNFITKEGTVSDHIERVYRRAGSQKLWLAVRYGAAFTQKFSSSIAPHITTFLVHGKQVTLGAFGHEEEVISNPLSPRVIQNIIYYKCNTHDEREAVIQQELVIHIGWIISNNPELFSGMLKIRIGWIIHAMEYELQIRGGDKPALDLYQLSPSEVKQLLLDILQPQQNGRCWLNRRQIDGSLNRTPTGFYDRVWQILERTPNGIIVAGKHLPQQPTLSDMTMYEMNFSLLVEDTLGNIDQPQYRQIVVELLMVVSIVLERNPELEFQDKVDLDRLVKEAFNEFQKDQSRLKEIEKQDDMTSFYNTPPLGKRGTCSYLTKAVMNLLLEGEVKPNNDDPCLIS

SEQ ID NO: 6267 - protein, 1086 aa, Artificial Sequence
  derived and/or modified sequence
MACSPDAVVSPSSAFLRSGSVYEPLKSINLPRPDNETLWDKLDHYYRIVKSTLLLYQSPTTGLFPTKTCGGDQKAKIQDSLYCAAGAWALALAYRRIDDDKGRTHELEHSAIKCMRGILYCYMRQADKVQQFKQDPRPTTCLHSVFNVHTGDELLSYEEYGHLQINAVSLYLLYLVEMISSGLQIIYNTDEVSFIQNLVFCVERVYRVPDFGVWERGSKYNNGSTELHSSSVGLAKAALEAINGFNLFGNQGCSWSVIFVDLDAHNRNRQTLCSLLPRESRSHNTDAALLPCISYPAFALDDEVLFSQTLDKVVRKLKGKYGFKRFLRDGYRTSLEDPNRCYYKPAEIKLFDGIECEFPIFFLYMMIDGVFRGNPKQVQEYQDLLTPVLHHTTEGYPVVPKYYYVPADFVEYEKNNPGSQKRFPSNCGRDGKLFLWGQALYIIAKLLADELISPKDIDPVQRYVPLKDQRNVSMRFSNQGPLENDLVVHVALIAESQRLQVFLNTYGIQTQTPQQVEPIQIWPQQELVKAYLQLGINEKLGLSGRPDRPIGCLGTSKIYRILGKTVVCYPIIFDLSDFYMSQDVFLLIDDIKNALQFIKQYWKMHGRPLFLVLIREDNIRGSRFNPILDMLAALKKGIIGGVKVHVDRLQTLISGAVVEQLDFLRISDTEELPEFKSFEELEPPKHSKVKRQSSTPSAPELGQQPDVNISEWKDKPTHEILQKLNDCSCLASQAILLGILLKREGPNFITKEGTVSDHIERVYRRAGSQKLWLAVRYGAAFTQKFSSSIAPHITTFLVHGKQVTLGAFGHEEEVISNPLSPRVIQNIIYYKCNTHDEREAVIQQELVIHIGWIISNNPELFSGMLKIRIGWIIHAMEYELQIRGGDKPALDLYQLSPSEVKQLLLDILQPQQNGRCWLNRRQIDGSLNRTPTGFYDRVWQILERTPNGIIVAGKHLPQQPTLSDMTMYEMNFSLLVEDTLGNIDQPQYRQIVVELLMVVSIVLERNPELEFQDKVDLDRLVKEAFNEFQKDQSRLKEIEKQDDMTSFYNTPPLGKRGTCSYLTKAVMNLLLEGEVKPNNDDPCLIS

SEQ ID NO: 6268 - DNA, 3279 bp, Artificial Sequence
  derived and/or modified sequence
atggcaggagcagctggactcactgccgaagtgagctggaaagtgctggaacggcgtgcaagaactaaaaggtcgggttcagtgtacgaacctctcaaatcgataaacttgcctcgacctgacaatgaaaccctttgggataagctcgatcactactacaggattgttaaaagcacgcttctcctttaccaatccccaactactggtcttttccctaccaagacctgcggtggtgaccaaaaggcaaagatccaagactccttgtactgcgcagcaggggcgtgggcacttgcacttgcctaccggagaatcgatgatgataaaggaaggactcatgagcttgagcacagcgccatcaagtgtatgagaggtattctgtactgttacatgcgtcaggcagataaggtccagcagtttaaacaagatcctcgacccaccacttgtctccactccgtctttaacgtgcatacgggcgacgaactgttgtcgtacgaagaatatggacaccttcagatcaatgccgtcagcctgtacctcctgtacctggtggaaatgatctcctccggtctgcagatcatctataacaccgacgaagtgagcttcattcagaacctggtcttttgtgtggagagagtgtacagagtgcctgattttggagtctgggaacgaggttcaaagtacaacaacggttccaccgagctgcattcttcatcagtggggctggcaaaggcagcactcgaggcgatcaatggatttaacctctttggcaatcagggatgttcgtggtcagtgatttttgtggatctggatgctcacaaccggaacagacaaaccctgtgctctcttcttccacgcgaatcaaggtcccataacactgatgcagcactgctgccatgtatttcgtacccagctttcgctctggatgacgaggtgctttttagccagacccttgataaggtcgtgcgaaagctgaaggggaagtacgggtttaagcgctttctgcgcgacggatacaggactagccttgaggatccaaatcgttgctactacaagcccgccgaaatcaagctgtttgacggaatcgaatgtgaatttccaatattctttctgtacatgatgatagacggtgtgtttagaggaaatccgaaacaggtgcaggagtaccaagatctcctgactcctgtgctgcaccatacgaccgagggatacccggtggtgcccaagtactactacgtccctgcagattttgtcgaatacgaaaagaacaacccaggttcgcaaaagagatttccctcgaactgcggcagagatggaaagctctttttgtgggggcaagcattgtacataattgcaaagctgcttgcggacgaacttatttcccctaaggatatcgatcctgtccagagatacgtccctctgaaagaccaacgcaacgtgagcatgaggttctcaaatcaagggcctcttgaaaatgatctggtggttcatgtcgccctgattgcggaatcacagagactgcaagttttccttaacacgtacggaattcagactcagacgcctcagcaggtggagcctattcaaatttggccacaacaggagttggtgaaggcataccttcagctggggattaatgaaaaacttggtctgagcggcagacccgatcgacctatcggctgtctcggcacctctaagatttaccgtatcctcggcaaaaccgtggtgtgctaccctatcatttttgacctctccgatttctacatgtcgcaggatgtctttttgctgatcgatgacatcaaaaacgcactgcagttcataaagcaatactggaagatgcatggacggccgctgtttctggtgcttattagagaagataacattagaggatcaagatttaacccgattctcgatatgcttgcagccctcaagaaaggtatcataggaggagtgaaggtccatgtcgatagacttcagacccttatttcaggagccgtggtggaacagctcgactttcttagaatttcggatacggaggagcttcctgagtttaagagctttgaagaactggaaccccctaagcattccaaagtgaagcgccagtccagcactccatcggcacctgagctcggacagcaacccgatgtgaacatttcagaatggaaggacaaaccaacccacgagatactgcaaaaacttaacgattgctcgtgccttgcatcccaggccatcctgctgggtatacttctcaaaagggagggtccgaactttatcactaaggagggtactgtgtctgatcatatcgaacgcgtgtaccggagagcaggttcccagaaattgtggctcgcagtgcgatacggtgccgcatttacccagaagttttcctcctcgatcgcaccacacatcacgacctttcttgtgcatggtaagcaggtgacgctgggtgcattcggacacgaagaagaagtgatctccaaccccctcagcccccgagttatacagaacatcatatactacaagtgtaacactcatgatgaacgcgaagctgtgatacagcaagaacttgtcattcacatcggatggatcatctcaaacaatcctgagctttttagcggtatgttgaaaattcggattggatggattatacacgctatggagtacgaactgcaaattcgcggtggtgacaaacctgcattggacctttaccaattgagcccgtcagaggtgaaacaactgctcctggacattctgcagccacagcaaaatggacgatgttggctgaaccgtaggcaaattgatggaagcctgaatcgcactcctaccggtttctacgatcgcgtgtggcaaatcctcgaaagaactcctaatggcatcattgtcgcaggaaagcaccttccacaacaacctactctgagcgacatgactatgtacgaaatgaactttagccttctcgtggaagataccctgggtaacatcgaccaacctcagtaccggcagattgtcgtcgaactcctgatggtggtgtcaatcgtgctcgagagaaatcctgaattggagtttcaagataaagtggacctggaccggctggtgaaagaggcatttaacgagtttcagaaagaccagtcacgcctgaaggaaatcgagaagcaagatgacatgacgtccttctacaatactcccccacttggaaagaggggaacttgttcctaccttactaaggcagttatgaacctgcttcttgaaggagaagtgaagccaaataacgatgacccttgtctgatttcc

SEQ ID NO: 6269 - DNA, 3279 bp, Artificial Sequence
  derived and/or modified sequence
atggccggtgctgccggactgactgcggaggtgtcgtggaaagtgctggagcggcgcgcacgcactaaaagatcgggctcagtctacgagccgcttaagtccatcaacctgccccgcccagacaacgaaaccctctgggataagctggatcattactaccggatcgtgaagtctacgttgttgctttaccagtcgcccaccactgggctgtttccgaccaaaacgtgcggaggggatcagaaggccaaaatccaagattcactgtattgtgcagcgggagcctgggccctcgcattggcctataggagaatagacgacgacaagggaagaactcacgagctcgagcattcagcgatcaaatgtatgcggggtatcctgtactgctacatgcgccaagcagacaaggtgcaacagtttaagcaggatccgcgcccgaccacttgcctgcatagcgtgtttaatgtgcataccggagacgaattgctgtcctacgaggagtacggtcacctgcagatcaacgcagtctctctgtatcttctctatcttgtggaaatgatttcgtccggactgcaaatcatctacaatactgacgaagtgtcatttatccaaaaccttgtgttctgtgtcgagcgggtgtacagagtgccggatttcggcgtctgggagcgaggatccaaatacaacaacggatccactgagctgcactcctcatcggtcggactggcgaaggccgctctcgaggcgatcaacggctttaatctgttcggaaatcaaggttgcagctggtcagtcatctttgtggatctggacgctcacaaccggaaccggcagacgctctgttccctgcttccgcgagagtcgcgtagccataataccgacgctgcgctgctcccatgcatcagctaccctgcgtttgcactggacgatgaggtgctgttctcgcagacgctcgacaaagtggtgaggaaactgaagggaaagtatggattcaagcggttcctccgggatggataccgcacgtcgctcgaagatccgaaccgctgctactacaagcctgcggaaatcaagttgtttgacggcatcgagtgcgagttcccgatctttttcctgtacatgatgatagacggtgtgttcaggggcaatcctaagcaggtccaggaataccaggacctcctgactccagtgctgcatcacactaccgaagggtatccggtggtgccaaagtactactacgtcccggctgactttgtggaatacgaaaagaacaacccaggaagccaaaagaggttcccctctaattgcggaagagacggcaagctcttcctgtggggtcaggcattgtacatcattgcgaagctgctggcagatgaactgattagcccgaaagacattgaccccgtgcaaagatacgtgcccctcaaggaccagcggaacgtgagcatgcggttctcgaaccaaggacctcttgaaaacgatctggtggtacacgtcgcacttatagctgagtcacagcggcttcaagtgttcttgaatacctacggaatccagacccaaactccgcaacaggtcgaaccaatccagatctggcctcagcaggagcttgtcaaggcctatcttcagctcggcattaatgagaagctggggcttagcggacgcccggacagacctatcggctgcctgggaacttctaagatctacagaatcttgggaaagaccgtggtctgctacccgattatcttcgatctgagcgacttctacatgtcacaggatgtgttcctcctgattgacgacatcaagaacgccctgcagtttatcaaacagtactggaagatgcacggacgacccctgtttctcgtgttgatccgagaggacaacatccgcgggtccaggttcaaccccatcctggacatgctggccgctctgaagaaaggaatcatcggaggtgtgaaggtgcacgtggaccgcctgcagactttgatcagcggagccgtcgtggagcagctggattttctgcgcatctccgacactgaagaactccctgagttcaagtcattcgaggagcttgagccaccgaaacacagtaaggtgaagcgccaatcctcaaccccaagcgcgcccgagctgggtcaacaaccagacgttaacattagcgagtggaaggacaaaccaactcacgaaatcctgcaaaagctgaacgattgctcgtgtctggcctcccaagccattcttctgggaatcctcttgaagcgggagggaccgaacttcatcactaaagaaggaactgtttcggaccatatcgagcgagtgtacagacgggctggcagccagaaactctggctggccgtgcgatacggcgcagcctttacccagaagtttagttcttcgatcgccccgcatatcaccacttttctggtgcatggaaagcaagttaccctgggagcgtttggacacgaagaggaagtcatcagcaatcctctctctccgcgggtcatccaaaacattatctattacaagtgcaatacgcacgacgagcgagaagcggtcatccaacaagaactggtcatccacatcggatggatcatctccaacaacccggagctgttcagcggcatgcttaagatccggatcggatggattattcacgccatggaatacgaactccaaatcagaggaggggataaacccgctctcgatctctaccaattgtcaccttccgaagtgaagcagctcctgctcgatatccttcagccgcaacaaaatggacgttgttggttgaaccggcgccagatcgatgggtccctgaatcgcactccgaccggcttttatgatagggtctggcagattctcgaacggacgccaaacggcatcatcgtggcgggcaagcacctcccacagcagccaactctgagcgatatgaccatgtacgagatgaacttctcactgctcgtcgaagatactctggggaacattgaccagccgcaatacagacagatcgtcgtcgaattgctcatggtggtgtccatcgtcctggaacgcaacccagagctggagttccaggacaaggtggacttggaccgcctggtgaaggaggccttcaatgaattccagaaggatcagtcccgactgaaggaaatcgaaaagcaggatgatatgacgagcttctacaataccccaccgctgggaaaaagaggaacctgctcatacctgaccaaagccgtcatgaatctcctgctggagggagaggtgaaaccaaataacgacgacccgtgcctgattagc

SEQ ID NO: 6270 - DNA, 3279 bp, Artificial Sequence
  derived and/or modified sequence
atggccggcgcggcaggcctcaccgccgaggtctcctggaaggttctcgagaggcgcgctagaacaaagaggagtggtagcgtgtatgagccattgaagtcgattaatctgcctaggcctgataatgagactctctgggataaattggaccattactatagaatagttaaatccaccttgctgctgtatcagtctcccacaacaggcctgtttccaaccaagacctgcgggggggatcagaaagccaagattcaggattctttatactgcgccgccggcgcctgggctctggcgctggcctacagaaggatagacgacgataaggggaggactcacgagcttgagcatagcgccatcaagtgcatgcgagggatattgtactgctacatgaggcaagcggacaaagttcagcagtttaagcaggacccacggcctacaacgtgcctgcacagcgtgttcaacgtacatactggtgacgaattattatcatatgaggagtacggacatctacaaatcaacgccgtgtctctgtacctcctgtatctcgtggagatgatatccagcggactgcagattatctataacactgatgaggtttctttcattcagaacctggtcttctgcgtggaaagggtgtatcgcgtcccagacttcggcgtctgggaaagagggagtaagtataataacggttcaacagagctgcacagttcaagcgttgggctggcaaaggctgccctggaggcgataaatgggttcaacctctttggaaaccaaggctgcagttggtcagtgattttcgtggatctggacgcccacaaccgaaaccggcagaccctctgttcacttctgcccagggagtctcgcagtcacaatacggacgctgcactcctgccgtgtatcagctaccccgcatttgcactggacgatgaggtgctgttctctcaaacactcgacaaggtggttcgaaagttgaaggggaagtacgggttcaagagatttcttagagatggctatagaacatctctggaggacccgaacaggtgttattacaagcctgccgaaattaaactttttgatgggattgagtgtgagttccccatatttttcttgtacatgatgattgatggggtcttccgcggaaaccctaagcaggtccaggaatatcaggatcttttgactccggtgctccaccatacaaccgagggctatcctgtggtgcccaagtactattacgtgcccgctgacttcgtggaatatgaaaaaaacaatccagggtcccagaaacgctttccaagcaattgtggaagggacggaaagttatttctgtggggccaagccctgtacatcattgcaaagctgttggcagatgaacttatctccccaaaagatatcgacccagtccagcggtacgtgcccctcaaagaccagagaaatgtctccatgcgatttagtaaccaggggccactggaaaacgatctcgtcgtacacgttgcacttattgctgagtcacagagacttcaggtgttcctcaatacctatggaattcagacccagacaccacagcaggtcgaaccaatccagatatggccgcagcaagagctcgttaaagcctatctgcagctggggatcaatgagaaactaggtcttagtgggaggcccgatagacctattggctgtctaggaacctccaaaatctatcgtatcttgggaaagaccgtcgtttgttatccgataatcttcgacctgagtgacttttacatgagtcaagacgttttcctcttgatcgacgacattaagaacgccctgcagttcatcaaacagtattggaaaatgcatggtagaccgttgtttctggttctgataagagaggacaatattcgtggatctcgtttcaatcccattctcgacatgctagcagctctcaaaaaggggattatcggtggggtcaaggtccatgtcgaccgcctgcagacgcttatttcaggggccgtggttgagcagttagatttcctccgtatttcagataccgaggagcttcctgagtttaagagcttcgaggagctggagcctccgaagcactccaaggtaaagagacagtcctcaactccgtccgctccggagcttgggcagcagccggacgtgaacattagcgaatggaaagacaagccaacgcacgaaatactgcagaaactcaacgattgctcatgtctggcgagtcaggccatcttgcttggtatactactgaaaagagaaggacccaacttcatcaccaaagagggaaccgtgtctgatcatattgaacgagtctaccgcagggcgggatctcagaagttatggctggctgtgcggtatggtgcagccttcactcagaaattttcctcaagtatagcgcctcacatcactacattcctcgtgcacgggaagcaggtcaccctcggagcctttggtcatgaagaggaggttatctcgaatcctctgtcaccacgagtgattcaaaacataatttactacaaatgtaacacacatgatgaacgggaggccgtcatccagcaggaactcgtgatccatatcggctggattattagtaacaatccagaacttttttctggaatgctgaaaattcgcatcggctggattatccacgcgatggagtatgaactgcagattagaggaggtgacaagcccgctcttgatctgtaccagctgtcaccatctgaagtgaaacaactgctcctcgatattttacaaccacagcagaacggccgctgctggttgaaccgcaggcaaattgatggctccctcaaccggacccccacaggtttttacgacagagtttggcagattctcgagagaacacctaacggcataatcgtggcgggaaagcaccttcctcagcagcccaccctgtcggacatgacgatgtacgagatgaatttttcactcctggtagaagacaccctgggaaatatagaccagcctcagtataggcagatcgtcgtagaattgttgatggtcgtgtctatcgtgcttgagaggaatcctgagctcgagttccaggataaagtggatctcgacagactggtgaaggaggcctttaacgaattccaaaaggatcaaagcaggctgaaggagattgagaaacaggatgacatgaccagtttctataatacccctcccctcggcaagcgaggtacctgttcgtatctcactaaggccgtaatgaacttgttactcgaaggcgaagtaaagccaaataatgatgacccctgtctcatatct

SEQ ID NO: 6271 - DNA, 3279 bp, Artificial Sequence
  derived and/or modified sequence
atggcaggagctgccggactgactgcagaggtgtcttggaaggtcctcgaacgcagggctcggaccaagcggagcggatcagtgtacgagcccctcaagtcaattaaccttccacggcccgataacgagacgctttgggataaactggatcactactaccgaattgtgaagagcaccctgcttctgtatcaatctccaacgactggtctgtttcctactaaaacctgcggaggagatcaaaaagctaagattcaggattcgctttactgtgcagccggtgcatgggcgttggcgctggcttacaggagaattgatgacgacaagggtcggacccacgagctcgaacattcagccatcaaatgcatgcgaggaatcctttactgttacatgcgccaagcagataaggtgcaacaattcaaacaagacccgaggccgactacgtgtctccattcggtctttaatgtccatactggggacgaacttctttcctacgaggaatacggacacctgcagattaatgccgtcagtctttacctgctttacctggtcgagatgatttcatctggtctgcagattatctacaataccgacgaagtgtcgtttattcagaaccttgtattctgtgtggaacgagtgtaccgagtgcctgactttggtgtttgggaacgggggagcaaatacaacaatggatcaacggaactccacagctcctctgtcggtctggccaaggccgcacttgaagcgataaacggttttaacctctttgggaatcaagggtgctcatggtcggtgatctttgtagaccttgatgcacacaaccgtaatagacagaccctttgttcgctgcttccacgggagtcgcggtcgcataacactgatgcagcacttctcccatgtattagctaccctgcttttgcccttgatgacgaagtcctctttagccaaacgcttgataaggtggtcagaaagctgaagggcaagtacggttttaagcggtttctccgcgatggatacaggacttcccttgaagatcccaatcgctgttactataagcctgctgagattaagctgttcgacggcattgaatgcgaatttcctattttctttctgtacatgatgatagatggcgtgttcagaggaaaccctaagcaagtgcaggagtaccaggatctgcttactccagtcctccatcacacgactgaaggttaccccgtcgtcccaaagtactactacgtcccggcagatttcgtcgaatatgagaagaacaaccctggaagccagaagagattcccatcgaactgcgggcgagatggaaaactcttcctttgggggcaggccctctacatcattgccaagctgctggccgatgagctcatttcgcctaaggacattgatccagtgcagcgttacgtgcctctgaaggatcagcgtaacgtgtccatgcggtttagcaatcaggggccgctggaaaatgacctggtggtgcatgtggcattgatcgcggagtcacagagactgcaggtgttcttgaacacttatggtatccaaacccagactccacagcaagtcgaacccattcagatctggcctcagcaagaactggtgaaggcttatcttcagctggggattaatgaaaagctcggcctgtccggacggcctgataggccaattggatgcctcggaacttccaaaatctaccgcattctgggtaaaacggtggtctgttaccctatcatcttcgatctcagcgatttctacatgtcccaggatgtgtttctcctcattgatgacatcaaaaatgcccttcaattcattaaacaatactggaagatgcatggtcggcccttgttccttgttcttattcgggaagataacattcgggggagcagatttaacccgatacttgacatgcttgcagcacttaagaaagggattattggcggagtcaaggttcatgtggataggctccaaaccctgatatccggtgcagtcgtcgaacaacttgattttcttagaatctcggacaccgaagaattgcccgagttcaagagctttgaagaactggaaccacccaagcactccaaagtgaagaggcagagttcaactccctcagcaccagaattgggccaacaacctgatgttaacatatccgaatggaaggacaaacctacccacgaaattctgcagaaacttaatgattgttcgtgtctggcgagccaggcaatcctgcttggaatcttgctcaaaagggaaggtccgaactttatcactaaggaggggactgtctccgaccatattgaaagggtgtatcgccgcgcaggaagccaaaagctctggctggccgtgcgctacggagccgcattcactcaaaagttttcatcatctatcgccccccatataacgactttccttgtgcatggaaaacaggtgacgctgggcgcctttgggcatgaagaagaggtgatttccaaccctcttagcccgcgcgtgattcaaaacataatctattacaagtgtaacacccacgatgagagagaagctgtcatccagcaggagctggtgatacatatcggctggatcataagtaacaatccagagcttttttccggaatgcttaagatcaggattgggtggattattcatgctatggaatacgagctgcaaatcaggggcggtgataaacctgcacttgacttgtaccagttgtccccatcggaggtgaagcagttgcttctggacattcttcaaccccagcagaacggcagatgctggctcaatcgacgtcaaatcgatgggtcacttaatcgcaccccaaccggtttctacgatcgcgtctggcaaatcctcgagcggaccccaaatgggatcatagtggcaggtaagcatctgcctcaacaacctaccttgtccgacatgactatgtacgaaatgaacttttccctgctcgtggaggataccctcggtaacatagaccaaccccaataccggcaaatagtggtcgaactccttatggtggtgagcattgtgctggagagaaacccagaacttgaatttcaagacaaagtggacctggatcgtctggtgaaagaggcctttaacgaatttcagaaggaccaatccagacttaaggaaattgaaaagcaggatgacatgacgagcttttacaacacgcctccacttggcaagcggggtacctgtagctacctgaccaaggccgtgatgaacctgctcctggaaggagaggtgaaaccaaacaatgacgatccttgtctgatatca

SEQ ID NO: 6272 - DNA, 3279 bp, Artificial Sequence
  derived and/or modified sequence
atggcaggagcagcaggtttgaccgcagaagtgtcctggaaagtgcttgaaaggcgagcaagaactaagcgcagcggaagcgtgtacgagcctctgaagtcgatcaacctgccgcgccctgataacgagacgctgtgggataaacttgaccattactacagaatagtaaaatcgactttgctgctgtaccaatcgcctactactgggcttttcccaactaagacctgcggtggggaccagaaggcgaaaattcaagattcactctactgtgcagcaggagcctgggcacttgctctggcctaccgacggatcgacgacgataagggaaggactcacgagcttgaacattcggctattaagtgcatgcgtggaattctgtactgttacatgcgacaagcggataaggtgcagcagtttaagcaagacccaagaccaaccacctgccttcattcagtgttcaacgtacataccggagatgaattgctgagctacgaggaatacggacacctgcagattaatgccgtgtcgctttaccttctttaccttgtcgaaatgatctcgtctggtctgcagataatctacaacacggatgaagtgagctttattcagaatcttgtgttctgcgtggaacgggtctaccgggttcctgactttggcgtctgggagagaggctcgaagtacaataacggctccaccgaattgcactcatcatccgtgggacttgctaaagcggcacttgaagcgatcaacggattcaatctgtttgggaaccaaggctgttcgtggagcgtgatctttgtggatcttgatgcgcacaaccgaaaccggcaaaccctctgtagcctcttgccacgcgaatccaggtcccataacaccgatgcggcgctccttccctgcatatcatacccggcttttgctctcgatgacgaggtgcttttttcccaaactctcgacaaagtggtcagaaaacttaagggaaagtacggttttaagcggttcctcagggacggttaccgtaccagcttggaagatcccaatcgctgttattacaagcccgccgaaatcaaacttttcgatggtatagagtgtgaatttccgatcttttttctctacatgatgattgatggtgtgtttcgtggtaatcctaaacaagtgcaagagtaccaagacctcctgactcccgtcctgcaccacactactgaaggatacccagtcgtgccaaagtattactacgtgcccgcagatttcgtcgaatacgaaaagaataaccccggctcccaaaagcggttcccatcgaattgtggacgtgatggtaagctgtttctctgggggcaagcgctctacatcattgcaaaactcttggctgacgaattgatctctccaaaggacattgatcctgtccaacgttacgtgcccctgaaagatcaaagaaacgtgtccatgagattttccaatcaggggccactcgagaatgaccttgtcgttcatgtcgcccttattgcagaatctcagcgattgcaggtctttttgaatacctacggcattcaaacccaaactcctcagcaggttgagcccatacaaatctggcctcagcaggaactggtgaaagcatatctccaactgggtatcaatgagaagctcggattgagcggtcgccctgatcggcctatcggttgcctgggaacgtcgaagatataccgaattcttggaaagaccgtggtctgttatcctatcatttttgatcttagcgacttttacatgtcccaggatgtctttctcctgatcgatgatatcaagaacgccctgcagttcattaaacagtactggaagatgcacggcagacctctcttccttgtgttgatcagggaagataacataagaggttcgcggttcaatccaattctggatatgcttgctgccctgaaaaaaggtatcattggtggagtgaaggtgcatgtcgataggctccagaccctgattagcggtgctgtggtggaacagctcgactttcttcgcatttcggatacggaagaactgcctgaattcaagtcgtttgaggaacttgagcctcccaagcatagtaaagtgaaacggcaaagctcgaccccatctgcacctgaactgggacagcagcctgatgtgaacatctctgagtggaaggacaagcctacccatgaaattctccagaaactgaacgattgctcgtgtcttgcttcccaagcaattcttcttggcattttgctgaagcgtgaagggcccaacttcataaccaaggagggtactgtgagcgaccatattgagcgtgtgtacagaagagcaggaagccagaagctgtggcttgcagtcagatatggggcagcattcactcagaagttcagctcgtcgatagctccgcatatcactacgtttcttgtgcacgggaaacaggtgactctcggagcctttggacacgaagaagaagtgatctcgaatcctctcagccctcgcgttatacagaatatcatctattacaagtgtaatacccacgatgaaagagaagcagtcatccagcaagaattggttattcatattggctggatcatttctaacaacccagaacttttctcggggatgctgaagattcggattggttggattattcatgcgatggaatacgaactccagattaggggtggtgataagccggcacttgacctttaccagctgagcccaagcgaggtgaaacaactcctgctggacatcctgcagccgcagcaaaacggccgctgttggctgaaccggcgccagatagatggatcccttaaccggactccgaccggtttttacgatcgcgtgtggcagattctggagaggaccccaaatggaatcatcgtcgctggaaagcatctgccgcaacagcctacgctttcggatatgaccatgtatgaaatgaacttctccctgctggtggaggacacgctgggtaacatcgatcaacctcaatacaggcaaattgtcgtcgagctgctgatggtggtgtccatagtccttgagagaaaccccgaactggagttccaagataaagttgatcttgaccgacttgtgaaggaagcctttaacgaatttcagaaggatcaatcccggctgaaagagatagagaagcaagacgacatgacttcgttttacaacactccaccactggggaagcgaggtacgtgctcctaccttactaaagctgtcatgaatcttcttctcgaaggagaggtgaagcccaacaacgacgatccatgtcttatatca

SEQ ID NO: 6273 - DNA, 3279 bp, Artificial Sequence
  derived and/or modified sequence
atggcaggagccgccggacttactgcggaagtcagctggaaggtgctcgagcgccgggccagaaccaagcgctcaggatccgtgtatgaacctctgaagtcgattaatctccccagaccagacaatgaaaccctgtgggacaagctggatcactactaccggatcgtgaagtctaccctcctgctttaccagtcgccaaccaccggactgtttccgaccaagacttgtggaggcgatcagaaagccaaaatccaggacagcttgtactgtgctgcaggggcgtgggctttggctttggcataccgccggatcgatgatgacaagggtaggactcatgaactcgaacatagtgcaatcaagtgtatgcgcgggatactgtattgctacatgcggcaggcggataaagtgcagcagttcaagcaggacccgcgcccaaccacctgcctgcactcagtgtttaacgtgcatacgggagacgagttgctctcgtacgaagagtacggtcatctgcagatcaacgcggtcagcctgtacctgctgtacctggtggagatgatcagcagcggactgcagatcatatacaacactgacgaggtcagttttatccagaacttggtgttctgtgtggagcgcgtctaccgcgtccctgatttcggggtctgggagaggggctcgaagtacaataatggatcgactgagttgcactccagctcagtgggtctggccaaggcggccctcgaggcgatcaatggattcaacctgttcggaaatcaaggctgctcgtggagcgtcattttcgtggacctggacgcgcacaaccgaaacagacagacgctgtgctcgcttctgccgcgggaatcaagatcacataacactgatgccgccctcctgccttgcataagctatcccgctttcgcgctggatgacgaggtccttttcagccagaccctggacaaggtcgtgcgcaaactgaagggcaagtatggattcaagcgctttttgcgcgacggctacaggacttcactggaggaccccaatagatgctactacaagcctgccgagatcaagctgttcgacgggatcgaatgtgaatttccgatcttttttctttacatgatgattgacggggtattccgcggaaatccaaagcaagtgcaggagtaccaagatctgctgaccccagtcctccaccacactaccgagggctacccggtggttccgaagtactactacgtgccagcggacttcgtcgagtacgaaaagaacaatccggggagccaaaaaagattcccgtccaactgcggccgggatggaaagctgttcctgtggggccaagcgttgtacatcatcgctaagctgttggccgacgaactgatctcgccaaaggatatcgatccggtccagcggtacgtcccgctgaaggatcagcgcaacgtttcgatgagattctctaatcaggggcccttggagaacgacctcgtggtccacgtggctctcatcgccgaaagccagagactccaggtgttccttaatacgtacggcatccagacccaaacgccgcaacaggtggaaccgatccaaatctggccccagcaagagctggtgaaggcctacctgcagctcggaatcaatgaaaaactcgggctctcgggacgcccggaccggccgatcgggtgcctcggaacttcaaagatctaccgcatcctcggcaagaccgtcgtgtgctaccctatcatattcgacctgtcggatttctacatgagccaagatgtgttcctgctgatcgacgatatcaaaaacgcgctgcaattcatcaagcaatattggaagatgcacggacggccactgttcctggtgctgatccgggaagataacatccgaggatcgcggttcaacccgatcttggacatgctcgccgctttgaagaagggcattattggaggagtgaaggtccatgtagaccggctgcagactctgatctctggcgcggttgtggaacagctcgacttcctccggatctccgacactgaagaacttcctgagttcaagtcattcgaggagctcgaaccgccgaagcattcgaaagttaagcggcagtcgtccacgccgtcggccccagagctcggacagcagccagatgtcaatatctccgaatggaaggacaagccaacccatgagatcttgcagaagctcaatgactgcagctgcctggcaagccaggcaatcctgctcggtatcttgctgaagcgggaaggaccgaatttcattactaaggagggcactgtgtcggaccacatcgaacgcgtgtacagacgagcgggctcacagaagctgtggctggcggtgcggtacggggcagccttcacccaaaagttttcctcctcaatcgcgcctcatatcacgaccttcttggttcatggtaagcaggtgacccttggagccttcggacacgaagaagaggtgatctcgaacccactgtcacctcgcgtcatccaaaacatcatttactacaagtgtaacacccatgacgagcgcgaagcggtgatccagcaggagctggtgatccacatcgggtggatcatcagcaacaatccggagctgttcagcggaatgctcaagatccggatcggctggattatccacgcaatggaatacgaattgcagatcagaggcggagacaagcctgccctggatctctatcagctgtcgccgtcggaggtgaagcaactgctgctggatatccttcagccgcagcagaatggaaggtgctggctgaatcgaaggcagatcgacggctccctcaacagaacccctaccggattctacgacagagtgtggcaaatcctcgagcggactccgaatggcatcatcgtggccggcaagcacctcccgcagcagccaaccctgagcgatatgactatgtacgaaatgaacttcagcctcctggtggaagatacccttggaaacattgatcaacctcaatacagacagatcgtggtggagctgctgatggttgtctcaatcgtcctggaacggaatccggaactggagttccaagacaaggtggatcttgaccggcttgtcaaagaggcctttaacgaatttcagaaggatcaatcccgccttaaggagattgaaaagcaagacgacatgacctccttctacaacaccccgccgctgggcaagcgcggaacctgcagctacctgactaaggccgtgatgaacctgctgctggagggagaagtcaaacctaacaacgacgatccttgtctcattagc

SEQ ID NO: 6274 - DNA, 3279 bp, Artificial Sequence
  derived and/or modified sequence
atggccggcgccgccggcttaacagcagaagtttcttggaaagtcctagagagaagagcccgaactaagcgctccggcagcgtgtatgagcccctgaagtccattaatctgccaagacctgacaacgagacgttatgggacaagctcgatcactattataggattgtcaagtctacactcctgctgtaccaatcgcccactacaggtttgtttcccacaaagacatgtggcggagaccaaaaagcaaaaatccaggatagtctttactgcgctgcaggagcttgggcccttgcgctggcatatcggcgtattgatgatgataaggggagaactcatgagctggagcattctgctattaagtgcatgcggggcattttgtactgctacatgagacaagccgacaaagtgcaacagtttaagcaggatccccggcccacaacttgcctccatagcgtctttaatgttcatacaggggatgagctcttgagctacgaggaatatggccacctgcagataaatgcggtgtctttatacctgctctatctcgtggaaatgatcagctccggcctgcagatcatctataatacggacgaagtttcgttcattcagaatctggttttttgtgtggagcgcgtctatagggtgcctgacttcggtgtgtgggagcgcgggtccaaatataacaatgggtctacagagttacattctagcagtgtcggcttagccaaggctgcgctcgaagccattaatggctttaacctgttcggcaatcaagggtgttcctggagcgtaatcttcgtggatcttgacgcccacaatcgcaatagacaaacattgtgctcgctgctgccaagagagtccaggtcgcacaacacagacgccgccctgctgccatgtatctcttacccagcctttgccctcgacgatgaagtcctgttttcccagaccctggataaagtggtaagaaaattaaaagggaaatacggatttaaacggtttttacgggacgggtaccggacaagcctggaggacccaaacagatgttactacaaacctgcggagataaagctgtttgatgggattgagtgtgaattccccatcttcttcctgtacatgatgattgacggggtgttcagggggaaccctaagcaggtgcaggagtaccaggacctgctaactcctgtactacaccacacaacagagggatatcctgtcgttccaaagtattactatgttcctgccgatttcgtagagtatgagaaaaataaccccggatctcagaagcgattcccatccaactgtgggcgcgatggcaagctgttcctatggggccaggctctgtatattatcgcgaagctacttgccgatgaactcatttcacccaaggatattgatcccgttcagaggtacgtgcctcttaaagaccagaggaacgtgtcaatgagattttcaaaccaaggccctttagaaaatgacctggtggtgcatgtggctcttatagccgagagtcagaggctgcaggtgtttctgaacacttatggaattcagacccagacccctcaacaggtcgaacccattcagatatggcctcagcaggaactagtgaaggcttatctgcagctgggtatcaatgagaagctggggctgagcgggcggccagaccgaccgatcggctgcctgggtacaagtaagatctaccgcatcttggggaaaaccgtggtgtgttacccaatcatcttcgatctttcagacttttacatgtctcaggatgtatttctcctgattgacgatatcaagaatgcactgcagttcattaagcagtactggaagatgcatggaagaccactgttcttggtcctcatccgagaagataacattagaggctccagattcaatcctattcttgatatgctggcggccctcaagaaaggcatcatcggcggtgttaaagtacatgtcgacaggcttcagaccttaattagcggcgccgtcgtggaacagttggatttcctcaggatctctgatactgaggagcttccggagtttaaatcatttgaggaattggaaccgccgaaacactccaaagtcaagagacagagtagcacccccagtgcccctgagttggggcaacagccggacgtaaacatttctgaatggaaggacaagcccacccatgagatcctccagaaactgaacgactgctcctgtcttgccagtcaagcaatcttactcgggatactgcttaagcgggagggacccaactttatcacaaaagagggcacagtgagcgaccatatcgagcgtgtgtacaggagggccggaagtcagaaattatggctggccgtcagatacggtgctgcttttacccagaagttttcatcatcaatcgctcctcacataactaccttcctggtccatgggaagcaggtgaccctcggtgccttcggccatgaggaggaagttatcagcaaccctctctcccctcgggtgatccagaatataatctattataaatgtaatactcatgacgagagggaggccgtcattcaacaggagttagtgatccatatcggatggatcatcagtaacaatcctgagctgttttccggaatgctaaaaatcagaataggctggatcatacacgccatggagtacgaattgcaaattcgaggcggagacaagccagccctggatctttaccaactgtcgcctagcgaggttaagcagctgctgttggatatcttgcaaccgcagcagaacggtcgttgttggctaaatcggcgccagatcgacggatccctgaataggaccccgactgggttttacgacagagtttggcagatcctagagagaacccccaacgggattatagtggcagggaaacatttgccacagcagcccaccttgagcgatatgacaatgtatgagatgaatttttcactgctggtggaggacactctagggaatatcgatcagcctcagtaccgccaaattgtggtggagcttttaatggttgtatctatagtcctggaacgcaatcctgagctggaattccaagacaaagtagatctcgatcgactggtgaaggaggcatttaacgagtttcagaaagaccagagccggctgaaggagatcgaaaaacaagacgacatgacgagtttttacaacacgcctcccctcggcaagcgtggaacatgttcatacctcacgaaggctgtaatgaatctgctcttggaaggcgaggtgaagccgaacaatgatgatccgtgcctcatttca

SEQ ID NO: 6275 - DNA, 3279 bp, Artificial Sequence
  derived and/or modified sequence
atggcgggtgcggcgggtttaacggcggaagtttcgtggaaagtattagaacgacgtgcgcgaacgaaacgttcgggttcggtatatgaaccgttaaaatcgataaatttaccgcgaccggataatgaaacgttatgggataaactagatcattattatcgaatagttaaatcgacgctactattatatcaatcgccgacgacgggtttatttccgacgaaaacgtgtggtggtgatcaaaaagcgaaaatacaagattcgctatattgtgcggcgggtgcgtgggcgttagcgttagcgtatcgacgaatagatgatgataaaggtcgaacgcatgaattagaacattcggcgataaaatgtatgcgtggtatattatattgttatatgcgtcaagcggataaagtacaacaatttaaacaagatccgcgtccgacgacgtgtttacattcggtttttaatgtacatacgggtgatgaattattatcgtatgaagaatatggtcatttacaaataaatgcggtatcgttatatttattatatttagtagaaatgatatcgtcgggtctacaaataatatataatacggatgaagtatcgtttatacaaaatttagtattttgtgtagaacgtgtatatcgtgtaccggattttggtgtatgggaacgtggttcgaaatataataatggttcgacggaattacattcgtcgtcggttggtttagcgaaagcggcgttagaagcgataaatggttttaatctatttggtaatcaaggttgttcgtggtcggtaatatttgtagatctagatgcgcataatcgtaatcgtcaaacgttatgttcgttactaccgcgtgaatcgcgatcgcataatacggatgcggcgctattaccgtgtatatcgtatccggcgtttgcgctagatgatgaagtactattttcgcaaacgctagataaagttgttcgaaaattaaaaggtaaatatggttttaaacgatttctacgtgatggttatcgaacgtcgttagaagatccgaatcgttgttattataaaccggcggaaataaaactatttgatggtatagaatgtgaatttccgatattttttctatatatgatgatagatggtgtatttcgaggtaatccgaaacaagtacaagaatatcaagatttattaacgccggtattacatcatacgacggaaggttatccggtagttccgaaatattattatgttccggcggattttgtagaatatgaaaaaaataatccgggttcgcaaaaacgatttccgtcgaattgtggtcgtgatggtaaattatttctatggggtcaagcgctatatataatagcgaaattattagcggatgaactaatatcgccgaaagatatagatccggtacaacgttatgttccgttaaaagatcaacgaaatgtttcgatgcgtttttcgaatcaaggtccgctagaaaatgatctagtagttcatgtagcgttaatagcggaatcgcaacgtttacaagtttttctaaatacgtatggtatacaaacgcaaacgccgcaacaagtagaaccgatacaaatatggccgcaacaagaactagtaaaagcgtatttacaattaggtataaatgaaaaattaggtctatcgggtcgtccggatcgtccgataggttgtctaggtacgtcgaaaatatatcgtatattaggtaaaacggttgtatgttatccgataatatttgatttatcggatttttatatgtcgcaagatgtttttctattaatagatgatataaaaaatgcgctacaatttataaaacaatattggaaaatgcatggtcgtccgttatttttagttttaatacgtgaagataatatacgtggttcgcgatttaatccgatactagatatgttagcggcgttaaaaaaaggtataataggtggtgttaaagtacatgttgatcgtttacaaacgctaatatcgggtgcggtagtagaacaactagattttttacgtatatcggatacggaagaattaccggaatttaaatcgtttgaagaactagaaccgccgaaacattcgaaagtaaaacgacaatcgtcgacgccgtcggcgccggaactaggtcaacaaccggatgtaaatatatcggaatggaaagataaaccgacgcatgaaatattacaaaaactaaatgattgttcgtgtttagcgtcgcaagcgatattactaggtatactactaaaacgagaaggtccgaattttataacgaaagaaggtacggtatcggatcatatagaacgtgtttatcgtcgagcgggttcgcaaaaactatggttagcggtacgttatggtgcggcgtttacgcaaaaattttcgtcgtcgatagcgccgcatataacgacgtttttagttcatggtaaacaagtaacgttaggtgcgtttggtcatgaagaagaagttatatcgaatccgctatcgccgcgagttatacaaaatataatatattataaatgtaatacgcatgatgaacgtgaagcggtaatacaacaagaattagtaatacatataggttggataatatcgaataatccggaactattttcgggtatgctaaaaatacgaataggttggataatacatgcgatggaatatgaattacaaatacgtggtggtgataaaccggcgctagatttatatcaactatcgccgtcggaagtaaaacaactattattagatatattacaaccgcaacaaaatggtcgttgttggttaaatcgtcgacaaatagatggttcgctaaatcgtacgccgacgggtttttatgatcgtgtttggcaaatattagaacgtacgccgaatggtataatagtagcgggtaaacatttaccgcaacaaccgacgctatcggatatgacgatgtatgaaatgaatttttcgctactagtagaagatacgctaggtaatatagatcaaccgcaatatcgtcaaatagttgtagaattattaatggttgtttcgatagtactagaacgtaatccggaactagaatttcaagataaagtagatttagatcgattagtaaaagaagcgtttaatgaatttcaaaaagatcaatcgcgactaaaagaaatagaaaaacaagatgatatgacgtcgttttataatacgccgccgttaggtaaacgaggtacgtgttcgtatttaacgaaagcggttatgaatctattattagaaggtgaagtaaaaccgaataatgatgatccgtgtttaatatcg

SEQ ID NO: 6276 - DNA, 3279 bp, Artificial Sequence
  derived and/or modified sequence
atggctggagctgcaggactgaccgctgaggtatcttggaaggtgctggaacgccgggcgcgtactaaacggtctgggagcgtgtacgagcctctgaagtcaataaatctgcctagacctgataacgaaactctttgggacaagctggatcactattaccgaattgtgaagagtactcttctactttatcagagccccacaaccggtctattccccactaagacatgtgggggggatcagaaagcaaaaatccaggattctctgtattgcgctgcaggcgcttgggctctggcactggcctacagaaggattgatgacgacaaaggccgcacacacgaactggaacattccgccataaagtgcatgagggggatcttgtactgttatatgaggcaggccgacaaagttcagcagttcaagcaggacccacgtcctactacttgtctacatagcgtgttcaatgtgcacactggtgacgaactgttgagctacgaggagtacgggcacctgcagattaacgccgtgtccctctacttgctctacctcgtggagatgatctccagtggattacagattatttacaatacagatgaggtttcttttattcagaatctggttttttgcgtcgagagggtgtacagggtgcccgacttcggcgtgtgggagaggggtagcaaatataacaatggatcaaccgaactacattcctctagcgtgggcttggccaaggccgccctggaagcaattaatgggtttaacttgttcggtaaccagggctgcagttggagtgtgatcttcgtcgatctggacgctcacaatcgaaatcgccagaccctctgttccctattgcctcgagaaagcagaagccacaacacagacgcagctctcctgccatgcatatcataccctgcttttgccctggatgacgaagttcttttttctcagactctggacaaagtggttcggaagctgaaagggaagtatggtttcaaacgattcctgcgggacggttaccgaacatctttggaggaccccaaccgctgctactataagccagcagaaattaagctgtttgacgggatcgagtgtgagttcccaatcttctttctgtatatgatgatcgacggtgttttccggggtaatccgaaacaagtccaggaataccaggacctgctgactccggtgctgcaccatacgacagagggttatcccgtggtgcctaaatactactacgtccccgccgattttgtcgagtacgaaaagaataaccccggtagtcagaagcgcttcccctccaactgcgggagagacggcaagctgttcttgtggggtcaggccctatacattattgccaagctcctggccgacgagttaattagtccaaaagatatcgatcctgtccaacggtacgtgccgttgaaagatcaacgaaatgtctccatgaggttcagcaaccaaggtcccctggagaacgatctggtagtccatgtcgccctgattgcagagtcacagagattacaggtgttcctgaacacatatggtattcagacccaaaccccccagcaggtggaaccaatacagatctggccacaacaggaactggttaaggcctacctgcaactgggcattaatgaaaaattggggttgtctggacggcccgatagacccatcggatgtctgggcaccagcaagatctaccgcattctgggcaagaccgtcgtgtgttatcccatcatattcgatctgtcagatttctatatgtctcaggatgtctttttactgatcgatgatatcaaaaatgcacttcagttcataaaacaatactggaagatgcatggccgcccgttgttcctggtgctaatcagagaggataatatcagggggtcccgtttcaaccctatcttggacatgttggccgctctaaagaaggggataataggtggagttaaggtccacgttgacaggctgcaaaccctaatctcaggtgcagtggtggaacagttggactttcttaggatttctgataccgaagaattgcccgaattcaaatccttcgaggagttggagccaccaaagcattccaaggtgaagcggcaatccagtacaccgtcagcacctgaactaggccagcagcccgacgtcaacatcagcgagtggaaagataagccgactcatgagatcctccagaaactgaacgattgctcttgtcttgcttctcaggccattcttctaggaatactgctcaagagggagggaccgaattttatcaccaaagaaggcacggtgagtgatcatatagagcgcgtctaccggcgggccggcagccagaaactgtggctagctgtgcgatatggcgcggccttcactcagaaattctcaagctctatcgctccacacattacgacttttttggtccatggcaaacaggtgaccctgggagcttttgggcacgaagaggaggtcataagtaatccgctttcaccccgggtaattcagaatattatctactataaatgcaacacccacgacgaacgcgaggcggttatccagcaagaactcgtgatccatatcgggtggatcatctcgaataatccggagctgttcagcggcatgttgaagatcagaattgggtggatcattcatgcaatggagtatgagctgcaaattcgaggcggagataagccggccctagatctgtatcaactaagcccatctgaggtgaaacagctgctcttagatatattgcaaccacaacagaacggacgatgctggcttaacaggagacagatcgacggcagcctgaatcgcacccctaccggattctatgatcgcgtttggcagattcttgagcgcactcccaacggcataatagttgcagggaagcacctcccacagcagcccactctgagtgatatgacaatgtatgagatgaatttttctcttctcgtggaggatactttaggaaatatcgaccagccacagtaccgacagattgtagtcgaattgttaatggttgtttcaatagtgctggagaggaatcccgagctcgagtttcaagataaagttgacttggaccgacttgtgaaagaagcatttaacgagttccaaaaggatcaaagcagactgaaggaaattgaaaagcaggacgacatgactagtttctataatactcctcccttaggcaagcgtgggacttgtagctacctcacaaaagctgtcatgaacttgctgctagagggtgaggtgaaaccaaataatgatgacccatgcttaatctca

SEQ ID NO: 6277 - DNA, 3279 bp, Artificial Sequence
  derived and/or modified sequence
atggccggagcagccggcttgaccgctgaggtctcgtggaaggtcctggagcgacgcgcccgtaccaagagatcgggttctgtttacgagcctctcaagtccatcaacttgcctcgccccgataacgagacactgtgggataagctcgatcactactataggatcgtcaagagcacgctgctcttgtaccaatcgcctacgacaggactgttccccaccaagacatgcggaggcgaccagaaggccaagattcaggactcgctctattgtgcggccggtgcttgggctctggccctcgcctaccgccggattgatgatgataagggccgcacccacgagctagagcatagcgctatcaagtgcatgcgcggtatcctttactgctatatgcgtcaggccgataaggtccagcagttcaagcaggatccgcgccctaccacctgcctgcatagcgtcttcaacgtgcatactggcgatgagctcttgtcctacgaagagtacggacacctgcagatcaacgctgtcagtttgtatctattgtacctggtggagatgatatcctccggcctgcagataatctacaacactgatgaggtgtcgttcatccagaacctagttttctgtgttgagagagtctacagggttcccgacttcggagtgtgggagagaggctctaagtataacaacggcagtacggagctgcacagctcctctgtaggtcttgcgaaggccgctctggaagcgattaacggtttcaacttgttcggtaaccagggttgtagttggtctgttatcttcgttgatctagatgctcacaatcgcaacagacaaaccctttgcagcctcctcccgcgtgagtcccgaagtcacaatactgatgcggccctgctcccctgtatttcttacccggcttttgcccttgatgatgaggtcctattttctcagaccctggataaggtggtccggaagcttaaaggcaagtatggtttcaagcgtttcctgcgcgacggctaccgcactagcctggaagaccccaaccggtgctactacaagcctgcagaaatcaagctgtttgacggaattgagtgtgaatttccaatcttcttcctctacatgatgattgatggcgttttccgtggaaacccaaagcaggtccaggagtatcaggacctccttacccctgtgttgcatcatactacagagggataccctgtggtgccaaagtactattacgtcccagcggatttcgtggagtatgagaaaaacaaccccggctctcaaaagcgtttcccctctaactgtggtcgcgacggaaagttatttttgtggggacaggctctgtacatcattgctaagctgctggccgacgaactcatctctccaaaggatatcgatcctgtgcagcgttacgtcccccttaaggatcagcgcaacgtcagcatgcgcttcagcaaccagggtcccttggagaacgatctggttgttcatgtcgccctcatcgccgagagccagaggcttcaggtattccttaatacctacggtatccagacacagactccccagcaggtggagcccattcaaatttggccccagcaggaactggtcaaggcgtacctccagttgggcatcaacgagaaacttggtctgagcggccgccctgatcgtccgatcgggtgtctgggaacatctaaaatctatcgtattctgggtaagacagtcgtctgctatcccattatttttgacctgagtgatttctacatgagccaggacgttttcttgctgatcgatgatatcaagaatgccctgcagtttatcaaacagtattggaagatgcacggcaggccgttgtttctggtcttgatcagggaggacaacattcggggctcccgtttcaacccgatcctcgacatgctcgcggcgctcaagaaggggattattggcggtgtaaaggtgcatgtggatagactacagacccttatctccggtgctgtcgttgaacagctcgatttcctgagaatctccgataccgaggagcttccagagtttaagtccttcgaggagttggagcctcctaagcactctaaggtcaagcgccagtcgagcacgccgtcggcccctgagcttggtcagcaacccgacgttaatatctcggaatggaaggacaagccgacccacgagattctgcaaaagctcaacgattgctcgtgcctcgcaagtcaggcgattctactgggaattctactgaaacgcgagggtccaaactttatcaccaaggaaggcaccgtctctgatcacatcgagagggtatacaggcgggccggttctcagaagctctggctcgctgtccgctacggtgccgctttcacccagaagttctcttcgagtatcgccccgcacatcactactttcctggtccacggaaagcaggtgactctgggtgcctttggtcacgaagaagaggtcatctcgaacccactctcaccccgtgtgatccaaaacatcatttactacaagtgcaacacgcacgatgaacgggaggccgtcatccagcaagaactcgtgatccacatcgggtggataatttcaaataaccccgaactcttcagcggcatgcttaagattcgtatcggctggattatccacgcaatggaatacgaacttcagatccgcggaggcgacaagcccgctctcgatctgtatcagctttccccctcggaggtcaagcagctccttcttgacatcctacagccccagcagaacggtcgatgctggttgaaccgccgccagatcgacggctcgcttaaccgtacgcccacgggcttctacgatcgcgtgtggcagatactcgagcgcactcctaacggcatcatcgtcgctggcaagcatctcccccaacagccgactctgtcggatatgacaatgtacgagatgaacttctcattactggtcgaagacactctcggcaatatcgatcagcctcagtaccgccagatcgtcgtggagctgctcatggtggtcagtatcgtgcttgaacgtaacccggagctagaattccaggataaagtcgatctggatcggcttgtgaaggaggcgtttaacgagtttcaaaaggatcagtcgcggttgaaggaaattgagaagcaagacgatatgaccagcttctataacaccccccccctaggcaagcgtgggacatgtagctacctgaccaaggctgttatgaacctgctgctggaaggtgaggtcaagcctaacaacgacgatccctgcctcatctct

SEQ ID NO: 6278 - DNA, 3279 bp, Artificial Sequence
  derived and/or modified sequence
atggctggagcagctgggcttacggccgaggttagttggaaggtactcgaacgccgagcccggactaagcgctccggaagcgtgtatgagccacttaagagtattaacctgccgcggccagacaacgaaaccctgtgggacaagctggatcactactataggattgtgaaatctacactgctgctgtaccagtctccgaccactgggctgttcccgacaaagacctgcgggggtgaccagaaggcgaagatccaggatagcctgtactgcgcagcaggagcctgggccctcgcgctggcctaccggcgtatcgacgatgacaagggcaggacccatgagctcgagcactccgcaattaaatgcatgcgaggtatcctgtattgttacatgcgccaggccgacaaagttcaacagttcaagcaggacccgcgccctacaacttgcctccattctgtgttcaacgtgcacaccggggacgagttgttgagctacgaggaatatgggcacctgcagatcaatgcggtgtccctttacctgctgtatctcgtcgaaatgataagcagcgggctgcagataatctataacaccgatgaagtgtcatttatccagaatctcgttttttgcgtggaaagggtgtatagagttccggactttggtgtgtgggaacggggctccaagtacaataacgggtcaacggagctacacagttcctctgtaggtctggccaaagcagccctcgaagccatcaacgggttcaacctctttggtaatcagggctgctcgtggtccgtaatttttgtggacctggatgctcacaaccgcaatcgccagacattgtgctcattgctgccccgggaatctagatcccataacaccgacgctgccctcctgccctgtatttcgtaccctgcatttgcattggatgatgaagtgttgttctcacagacactggacaaagttgtccgaaaactcaagggcaaatatgggttcaaacgctttttgcgagatgggtaccgcacaagcctcgaagaccctaaccggtgctactacaaacctgctgagattaagttgtttgatggaatcgagtgcgagttccccattttttttctttatatgatgatcgatggcgtattcagggggaatccaaagcaggtgcaggagtatcaggacttgctgaccccggtacttcatcatactacagaaggatatccagttgtgcctaaatactattatgttcctgccgatttcgtcgaatacgagaagaacaacccggggagccaaaagagattccctagtaactgcgggcgcgacggaaagcttttcttgtggggacaagcactttacattatcgcgaagctcctggccgatgaactcatcagcccgaaagatatagatccggtccagaggtatgttccactgaaggatcagcggaacgtgtccatgaggttcagtaaccaggggccgttggaaaatgacctcgtagtccacgtcgcgctcatcgccgaatctcaacgactccaagtgtttctcaatacgtacggtatccagacacagacgccgcaacaggtggagcctattcaaatctggccccagcaggaactggtcaaagcatatctacagctggggatcaatgaaaaactaggcctaagtgggcggccagacagaccaatcgggtgcctcgggacatccaaaatctatcgcatactcggcaagacggtggtctgttatcctatcatcttcgacctttccgacttttatatgtcccaggatgtattccttctgatcgatgacatcaagaacgcattgcaattcatcaaacagtattggaagatgcatggtcggcctctgttcctggtgctgatacgcgaagacaatatacggggttctaggttcaatcccattttagatatgttggccgcactgaagaagggcattatcggcggagtcaaggtgcacgtggatcggcttcaaactttgataagcggggccgtcgtcgagcagctggacttccttaggattagcgacacagaggaattaccagaatttaaaagcttcgaggaactggaaccgcctaaacatagcaaggtgaaacgacaaagttctaccccatccgcgccggagctcggccagcagcccgacgtaaatatctccgagtggaaggataaacctactcacgaaatcctgcagaagttgaatgactgcagttgtcttgcgagtcaagctattctcttgggaatcctgttgaaaagggaaggacccaacttcatcactaaggagggcaccgtcagcgaccacattgaacgagtatatcgcagagccggcagccagaaactttggctagccgtccgttacggcgcagcctttacacagaaattctcaagttcaatagccccacacataactaccttcctggttcacggtaaacaggtcaccctcggagcttttggacatgaggaggaggtgatctccaacccgctgagcccgcgcgtgattcaaaacattatatattacaagtgcaatactcatgacgaacgcgaggccgtgatccagcaggaactcgtgatccacattggctggataatttccaacaatcccgaactgttcagcggcatgttgaagattagaatcgggtggataattcacgccatggaatacgagctccaaataaggggtggcgacaagccagcactggatctataccagttatcgccctcggaggtcaagcaattgctactggatatcctccagccgcagcagaatgggcgttgttggttaaaccgccggcagattgatgggagcctgaaccggacccccacagggttctatgatagggtatggcagattctcgaacggacccccaatgggatcatcgtggcagggaagcatcttcctcagcagcctactctcagcgacatgacgatgtacgagatgaatttttcactgttggtggaggataccctaggcaatatcgatcagcctcagtataggcagattgttgtggaactactaatggttgtgtccattgtgctggagcggaacccagaacttgagtttcaggacaaagtggatttggacagactggtcaaagaagctttcaacgagttccagaaggatcagagtaggcttaaagagattgaaaagcaagacgatatgacatccttttacaacacacctcccctcggtaaaaggggcacctgcagttacctgacaaaagccgtgatgaacctcctcctggagggggaggtgaaacccaacaatgacgacccttgtttgatctct

SEQ ID NO: 6279 - DNA, 3279 bp, Artificial Sequence
  derived and/or modified sequence
atggctggcgccgcagggctcaccgccgaggtgagctggaaagtcctagagcggagagctagaactaagcgcagtggctccgtctacgagcccctcaagtcaatcaatttgccacggcctgacaatgagaccctctgggacaagctggatcactactaccgtatcgttaaatctacgctactgctgtaccagagccccacaacaggactctttccgaccaagacttgtggaggtgatcaaaaggcaaagattcaggatagcttatactgtgcagccggggcgtgggctcttgccctggcataccgtcgtatcgatgatgacaaaggccggactcacgagttggagcactccgccatcaaatgcatgcgcgggattctgtattgctacatgcgccaagctgacaaggttcaacagttcaagcaagatcctcggccaacgacatgcctgcactccgtctttaatgtgcatactggtgacgaattattgagttacgaggagtacggccaccttcagattaatgccgtttccctgtatttgctctacctggtagagatgatttcatcaggcctccagattatctataacacggatgaggtcagcttcattcagaatcttgtgttttgtgttgagagagtgtatagagtgcccgatttcggcgtttgggaaagaggcagcaaatacaataacggatcgacggagttgcattcaagcagcgttggtctcgctaaggccgcccttgaagccattaacgggtttaacctatttgggaatcaggggtgttcgtggtctgtcatatttgtcgatctcgatgcccacaatcggaaccggcaaacgctttgcagcctgctaccaagggagtcccggtcacacaacaccgacgcggcattgttaccctgtatcagttaccctgcttttgccctggacgatgaggttctcttcagccagacactcgataaggtggttcgcaaactcaaaggcaagtacggatttaagagatttctgagggacggttataggacttcgcttgaagaccctaatcgctgctattataagccggctgagataaagctgttcgatgggatcgaatgcgagttcccaatcttcttcctgtatatgatgattgatggcgttttcagagggaaccctaaacaggtgcaggagtaccaggatctgcttacgcccgtgctccaccataccaccgagggttatcccgtggttccaaagtactactacgttcccgccgacttcgttgaatacgagaaaaataacccagggagccaaaagaggttcccctccaattgcggccgcgatggcaagctgtttctgtggggtcaggctctgtatatcatagccaagttgctggctgatgagttgattagtcctaaggacattgaccccgttcaacgctacgtcccactgaaggaccagcggaacgtatccatgcgctttagtaatcagggccctctggaaaacgacttagtggtacacgtcgctcttattgccgaatcccaacggctccaagtttttctgaatacatatggcatccagactcagacgcctcaacaagtcgagcctattcaaatttggccgcagcaggaacttgtgaaagcatatctgcagctggggattaatgagaagctgggactgagcggaaggcctgatcgtcccatcgggtgtctggggactagcaagatctaccgcatcctgggcaagacagtggtttgctatccaatcattttcgatctttccgacttctatatgtcccaggatgtttttctgctaatcgatgatattaaaaacgcactgcagttcattaaacagtactggaagatgcacggacgccccctgttcttggtgctcatccgggaggacaacattaggggcagtcgattcaatccaatcttagatatgttagccgctcttaagaaaggcattattgggggcgtgaaggtgcacgtcgatcgactgcagacactcatcagcggagctgtagtggagcagctcgattttcttagaatcagcgacaccgaggagctgccagagttcaagagtttcgaagaactggagccgcccaagcattctaaagtgaaaaggcagagttcaaccccatccgccccggaactgggtcagcagccggacgtaaatatttctgaatggaaggataaacccacacatgagatcctccagaaactcaacgactgcagttgtctggcctcccaagcaatcctccttggcatcctgctgaagagagaaggacctaattttataacaaaagagggaacagtcagcgatcacattgaaagggtttacaggcgagccggctctcagaagttgtggctcgctgttcgttatggggccgcctttacacagaagttctcttcgtctattgcgcctcatattacgaccttcttggtgcacggaaaacaggtgaccttgggggcctttggtcacgaagaggaggtcatctccaacccattgagtccccgagtcatacagaacatcatctactacaagtgcaacacacacgacgaacgcgaggcagtgattcagcaagagcttgtcatacacatcggatggataatatccaataacccagagctgttctctggaatgctgaagataaggattgggtggattatccatgctatggaatacgaactgcagatccggggaggcgataagcccgcgttggatttgtaccagttgtctccctccgaggtcaagcagcttttgctagatatcctgcaaccgcaacagaatgggcgttgttggctgaaccgcaggcaaatagacggctccttgaatcggacacccacgggattctacgaccgcgtctggcagattctggaaagaacccccaatggaattattgttgcgggaaagcatctgcctcagcagcccacactatcagatatgaccatgtacgagatgaacttttccctcctggtggaagataccctcgggaacattgaccaaccccagtaccgccagatagtggttgagctcctgatggtggtgtcaatcgtgctcgaacgaaatccggaactcgagttccaggataaagtggacctggaccgattggtgaaggaggcttttaacgaatttcagaaagaccaatctaggctgaaggaaattgaaaagcaagacgacatgacatcattctataataccccacccctggggaaacggggcacttgctcatacttgacgaaagccgtaatgaaccttctcctggagggggaggtgaagccaaacaatgacgacccttgtctgatctca

SEQ ID NO: 6280 - DNA, 3279 bp, Artificial Sequence
  derived and/or modified sequence
atggccggcgctgccggacttactgccgaggtcagctggaaagttctcgaacgccgggcccggacaaagagatccgggagcgtgtacgaacctctcaaaagcatcaacctacctcgccccgataatgaaacactgtgggacaagttggaccattactataggattgtgaagagcactctcctcctataccaatctcccaccaccgggctgtttcccaccaagacctgcggaggggaccagaaagccaaaattcaggattcactgtattgtgccgccggagcatgggccctggctttggcttacaggcgaatcgacgatgataagggtaggacacatgagctcgagcattcggccataaagtgtatgcggggcattctgtactgttatatgcgacaggcggacaaagtgcaacaatttaaacaggaccccagacctaccacctgtcttcactcagtgttcaatgtgcataccggggatgagctgctgtcatatgaagagtacgggcatctgcaaattaatgctgtcagcctgtacctcctctacctggtcgagatgatatccagtggacttcaaatcatctacaatactgatgaagtgtcttttatacagaatctggtgttttgcgttgagagagtgtatcgcgtaccggacttcggggtgtgggagcggggaagcaagtataacaacggctcaactgaactccacagctcctcagtcggcctggccaaggctgccctcgaggccatcaacggtttcaatctgtttggaaatcaaggctgttcatggtcggtcatcttcgtggatttggacgcacacaacaggaataggcagaccctgtgcagtcttctcccacgggagagccgatcccataacacggacgccgcactgcttccgtgcatttcatatcctgcattcgccctcgacgatgaagttctcttcagccagaccctggacaaagtcgtgcgcaagctcaaaggaaagtacggcttcaaacgctttctgcgggacggatataggacgtcattggaggacccaaatcggtgttactacaaaccagccgaaatcaaattatttgatggaatcgagtgcgaatttccaatattttttctgtacatgatgatcgatggcgtctttagaggcaaccccaaacaggtacaggaatatcaagatcttctcaccccagtactccatcacactacagagggataccctgtggtacctaaatattactatgtaccagccgatttcgttgagtacgagaagaacaatccaggctcccagaagcgatttcctagtaactgtggccgggacggaaagctgtttctgtggggacaggcactctacatcatagccaagctgctagccgatgaattgattagtcccaaggatatcgaccccgtccagagatatgtcccgctgaaagaccaaagaaatgtgtcaatgcggtttagtaaccagggcccgctggagaatgatttggtcgtgcacgtcgcactgattgcagaatctcagcgactgcaggtcttcctaaacacttacggaattcagacacagaccccacaacaggtcgagcccattcagatttggccacagcaggagctggttaaggcttaccttcagttgggaatcaatgagaagttgggcttatctggcaggcctgatcgccccatcggctgcctcgggacatctaagatttataggatattggggaaaacagttgtgtgctacccaattatttttgatctgagtgacttttatatgagccaagatgtgttcctgctgatcgacgatatcaagaatgccctgcagttcatcaaacagtactggaaaatgcatggaaggcctttattcttggtgttgatacgcgaagacaatatccgcggcagccggtttaaccccatactcgacatgctggctgccctcaagaaaggaatcatcggtggagtgaaggtccatgtggatagactgcaaacactgatttctggcgccgtagtcgagcagctcgatttcctgagaatctcggacacagaggagctgccagaattcaaaagcttcgaagagcttgaaccccctaaacactcaaaggtcaagcgccagtcatctaccccatccgccccggagttagggcagcagcctgacgtgaacatttcagaatggaaggataagcctacccacgagattctacagaagctcaacgactgttcatgcctcgcatcccaggctatactgctgggcatcctgctcaagcgagaggggccaaacttcattactaaggagggcactgtgagcgaccatattgaaagagtatacaggagagccggctctcagaagctttggctcgcagttaggtacggtgctgccttcacacagaagttttcgagcagcattgctccacacatcaccaccttcctagtccacggaaagcaagtgaccctgggcgccttcggccacgaggaggaagttatatctaatcccctttctcctcgcgtcatccagaatatcatctactacaagtgcaatacccacgacgagcgagaagcagtaatccagcaggaacttgtgattcacattggatggatcatcagcaataaccccgaattgttcagcgggatgctgaagatccgcatcggatggatcatccatgccatggagtatgagctccagatccgcggcggcgataagcctgccctggatttatatcagctgtccccctccgaagtgaagcaactgttgctggacatcctccagccccaacagaacggacggtgttggctgaaccgccgccagatagatgggagtctgaaccggacaccaactgggttttatgaccgggtttggcagattctcgagcgaacccccaatggcattattgtggccggcaaacacctgccccagcagcccactctttctgatatgaccatgtatgaaatgaacttctccctgctggtggaggacacactcggcaatattgaccagccccagtatcgccagatcgtcgtggaattgctcatggtggtttctatcgtgctggaacggaacccagagctagagttccaagacaaggttgatctcgatcggctggtgaaagaagcattcaacgagtttcagaaggaccaatccagactgaaggagatagagaaacaggacgatatgacgtctttttataacacccccccgctgggtaaaaggggcacatgttcctacctgactaaggctgtaatgaaccttcttctcgagggggaagttaaacctaataacgatgatccttgccttataagt

SEQ ID NO: 6281 - DNA, 3279 bp, Artificial Sequence
  derived and/or modified sequence
atggccggagccgctggcctcaccgcggaggtgtcatggaaggtgctcgagagaagagcccgaacaaaaagaagcggctccgtctatgaacccctgaagagcattaaccttcctagacctgataatgaaactctgtgggacaagttggaccattactaccggattgtgaagtccacccttctgctctaccaaagccccactacagggctgtttcccaccaagacatgcggcggggatcagaaggctaaaattcaagattctctgtactgcgcggcgggggcttgggctctcgctctggcctacaggaggatcgacgacgacaagggaagaacccatgaactcgaacacagcgccataaagtgcatgcgtggcatcttgtactgctatatgagacaagcagataaagtgcagcaatttaagcaagatccacggcccacaacatgcctccactccgtcttcaacgtgcataccggcgatgagctcctgtcgtatgaagaatatgggcacctccagatcaacgccgtgagcctgtacctgctgtacttggttgaaatgatctcgtcaggccttcaaatcatttataataccgacgaagtctctttcattcagaacttagtcttctgcgtcgagagggtttacagggttcccgacttcggagtctgggagagaggaagcaaatacaataacggtagcactgagttgcatagttccagcgtaggcctcgcaaaggccgcactggaagccattaatggctttaacttgttcggaaatcagggatgctcatggtccgttatctttgtggacctggacgcccacaaccgcaaccgacagaccctgtgctcacttctcccccgcgaaagccgctctcataacacagatgctgctctgctgccatgcatctcttacccggcctttgcccttgatgacgaggttctcttctctcagacccttgacaaagtggtgaggaaactcaagggcaaatacggttttaaacgtttcctccgcgatggctacaggactagcctcgaagaccctaaccggtgttactacaagcctgcagagattaaactgttcgatgggatcgagtgcgagttccccatcttttttctgtatatgatgatcgatggggtgtttagaggaaatccaaagcaggtgcaagaatatcaggacctgctcacgcctgtgctgcatcacacaactgagggatacccagttgtgcctaagtactactacgtgcccgccgacttcgtcgaatacgagaagaataacccaggtagccaaaaaagattcccaagtaactgcggaagagatggcaagttgtttctctggggccaggccctctatattatagctaagctcctggccgatgagctcatttcacctaaggatatcgacccagttcaacggtatgtgccattgaaggatcaaaggaatgtttctatgaggttcagcaatcaaggccctcttgagaatgatctggtggtgcacgtcgcacttattgcagagtctcagcggctccaggtgttcctgaatacatatggaatacagacccagaccccacagcaagtggagccaatacaaatatggcctcagcaggagctcgtgaaagcttatctgcaattggggattaacgaaaagctgggcctgagcggacgacctgatcgccctattggttgcctcggcacaagtaaaatataccggatattaggcaaaacggtggtgtgttatcctatcatctttgatctgagcgacttttacatgagccaggacgtgttcctcttgatcgatgacatcaaaaatgccctgcaattcattaaacagtactggaagatgcacggaaggcccctgttcctcgtgctcataagggaggacaacatccgcggctctcgctttaacccgatccttgatatgctggctgctctgaaaaagggaatcatcggcggagtcaaggtgcacgttgaccggctgcagacccttatttcaggcgctgttgttgagcaattggattttttacggatcagtgacaccgaggagcttcctgaatttaaaagctttgaggagttggaacccccaaagcattctaaggtcaagagacaaagtagcacaccctccgcccccgaactcggccaacagcctgatgtgaacatttccgaatggaaggataagccaacccatgagatcttgcagaagcttaacgattgcagctgcctggcatcacaggcaatccttttaggaattttgctgaaaagagaagggcccaacttcattacaaaagagggaacggtcagtgaccatattgagagagtgtacaggcgtgccggtagccagaaactgtggcttgctgtgcgttacggcgcggcttttactcagaagttttccagttctattgcacctcacataaccacatttctcgtgcatgggaaacaggtgacgctcggagctttcggccatgaagaggaagtgataagtaacccgctgagccccagagtaattcaaaacattatctactataaatgcaatacacatgatgaacgcgaggcagtgattcagcaggaactggtcattcatattgggtggattatctctaacaaccctgaactgttttcaggcatgctgaaaatcaggatcggatggattatccatgcgatggaatacgagctgcagatccggggcggagataagccggcgctggacttataccagctgagtccttctgaggtgaaacagctcttgttggacatcctgcaaccccagcaaaacggcagatgttggctgaacagaaggcaaattgacggatcactcaacagaaccccgactggcttctacgatagagtgtggcaaatcttagagaggaccccaaacggtatcattgtcgccggcaaacatctccctcaacagccgacgttgagcgatatgaccatgtatgaaatgaattttagcctgctggtagaggacactcttggaaacatcgatcaacctcagtaccggcagatcgtggtggaattgctgatggtggtgagcatcgtccttgagcggaatccagagctggaattccaggataaagttgatctggaccgcctcgtgaaagaggcctttaatgagtttcagaaagaccagtctcgcctgaaagaaatcgaaaagcaggatgatatgacaagcttttataacactcctccattgggcaagagaggcacctgcagttacctcactaaagctgtgatgaaccttcttcttgaaggagaagtgaaaccgaataatgatgacccgtgtctcatcagt

SEQ ID NO: 6282 - DNA, 3279 bp, Artificial Sequence
  derived and/or modified sequence
atggctggtgcagcggggctgaccgcggaggtatcgtggaaggttctggaacgccgagcaaggacaaagcggagcggctctgtgtacgagcccctgaagtctattaatctgccccggcctgataatgagaccctctgggacaagctggaccattactataggatcgtcaaaagcacacttctgctctaccaatctccaacgaccggactgttccccacaaaaacctgcggcggagatcagaaggccaagatccaggacagtttgtactgtgcagctggagcatgggctttagcactcgcgtatcggaggatcgatgatgacaagggtcggactcacgaactggaacactctgcaattaaatgcatgcgcggaatcctttactgctatatgcgacaagcagacaaagtccagcagtttaaacaagaccctagacccactacatgcctccactccgtgtttaacgtacataccggcgatgagcttttgtcctacgaagagtatggccatctgcagatcaacgccgtttccctctatcttctgtatttagtagagatgatcagctccggtctacaaataatctataacacagacgaagtgagtttcatacagaacctcgtgttttgcgtggagcgcgtttatcgagtacccgattttggggtgtgggagaggggctccaagtacaataacgggtctacagaattgcactcctcctcagtgggcttagctaaagcagccttggaggctattaatggctttaatctttttggaaaccagggctgctcctggagcgttattttcgtggacctggatgcgcataaccggaaccgccagaccctttgttcacttctgccccgagagtcccgttcgcacaacaccgacgcagctctgctcccctgtatcagttaccccgccttcgccctcgacgacgaggtcttgttcagtcagactctggacaaagtggtacgcaagttgaaagggaaatatggtttcaagcgctttctgcgcgacggatatagaaccagcctcgaggaccccaaccggtgctattacaagcctgccgagatcaagctctttgatggtatcgagtgtgaattccctatctttttcctctatatgatgatcgatggcgtttttcgaggtaatccaaagcaagttcaagaataccaggatctgttgacacccgtgctacaccacaccaccgagggatacccagtggtgcccaaatattactacgttccggccgatttcgtcgagtatgaaaaaaataatcctggttcccagaagcgattcccttccaattgcggtcgggatgggaaattgtttctgtggggccaggcattgtacatcattgccaaactgctcgccgacgagctgatttcaccaaaagatatcgatccagtgcagcgatatgtaccactgaaagaccaacgaaatgtgtccatgcgcttctcaaatcaagggccactggagaatgacttagtggtgcatgtggccctgatcgcagagtcccagaggctccaggtgttcctgaatacatacggtatacagacccagaccccccagcaggtggagcctatccagatctggccccagcaggagctggttaaggcttacctgcaattgggcattaacgagaaactgggcctatccggacgccctgataggcccatcggctgtcttggcacctctaagatctaccggatcctggggaaaaccgttgtctgttatcccataatatttgacctgtctgacttttacatgagccaagatgtctttttactgatagacgatatcaaaaatgctttacagtttatcaagcagtactggaagatgcatggacggcctttgttcctggtcctgatcagggaggataatatccgcggctctaggtttaatccgatactggacatgcttgccgccctcaaaaagggcattataggaggagttaaagtgcacgtcgaccgccttcagactcttatttcaggagctgtcgtcgagcagcttgattttttgaggatctcggacaccgaagaactccccgagtttaaatcattcgaggagttagagccgcccaaacattctaaggtgaagcgacaatcaagcacgccgtccgcgccggaactcggccaacagccggacgtcaatatctcagagtggaaagacaagcccacacatgagatcctacagaagcttaatgactgctcctgtctcgcaagccaggcaattctgctggggatcctcttaaaacgggaaggccctaatttcatcaccaaagaggggaccgtatcggaccacattgagagagtctaccggagggctgggtcgcagaagctgtggctggccgtcagatatggtgcagcatttacgcagaagtttagctcctctatcgctccccacatcacgacattcctggtgcatggcaagcaggtgactttaggcgccttcggacatgaagaggaagtcatttctaacccattgtcacccagggtcattcagaacataatttattataaatgtaacacccatgatgaacgggaagcagttattcagcaggagctagtgatacacatcggctggattatcagtaataaccccgaactgttctcaggcatgctcaaaattcggataggatggatcattcacgcaatggagtacgagctacagattcggggcggagacaaacccgcgttggacctatatcaactgagcccgagtgaagtaaaacaactcctcttggatattttgcagccacagcagaacgggcggtgctggctgaatagacgacagattgatgggtcactgaatcgaacacctacgggcttttacgatcgggtgtggcaaatactggagagaaccccaaacggaattatcgtcgctgggaagcacctgccccagcagccgaccttgagtgacatgactatgtatgaaatgaatttctccttgctagtagaggacaccttaggcaatatcgatcagccgcagtaccggcagatcgtggtagaactgttgatggtggtttcgatcgtgctcgagaggaatcccgagctggaatttcaggacaaggtagatttggaccgcctggtcaaagaagccttcaatgagtttcagaaggaccaaagccggctgaaggaaatcgagaaacaggacgacatgaccagtttctataatacacctcccttggggaaacggggcacctgttcttatttgacaaaagccgtgatgaacttgcttctggagggcgaagtcaaacccaacaatgatgacccgtgtcttataagc

SEQ ID NO: 6283 - DNA, 3279 bp, Artificial Sequence
  derived and/or modified sequence
atggcaggagccgctggactgacagccgaagttagttggaaagtactagagagaagagcacgaacaaagcgctccggctccgtgtacgagccactgaagtcaatcaacctcccgcgaccggataacgagaccctgtgggacaagctggaccattattatcgaattgtgaaaagtactctgctcctgtatcaaagcccaacgacaggtttgtttcctactaaaacctgtgggggggatcaaaaggcaaagattcaggatagcctgtattgcgctgcaggagcatgggctcttgccttggcgtaccgacggatagatgatgataagggtaggacacacgaactggaacatagcgccatcaagtgcatgcggggtatcctatactgttatatgcggcaggcggacaaagtgcaacagtttaaacaggaccctaggcccactacttgtctccattccgtctttaatgttcataccggagatgaactgctaagttatgaagagtacggccacctgcaaataaacgctgtgagcttgtatctgctctatctagtggaaatgatttcatccggattacaaataatctataatacagacgaagtcagttttattcaaaatctagttttttgcgttgagcgagtctatcgcgtgccagatttcggggtttgggagcgggggagtaaatataataacggttcaacagagctccacagttcgtctgtagggttagccaaggcagcgctggaggcgattaacgggtttaatctgttcggcaaccaaggctgcagttggtcagttatcttcgtggatctggatgcccataaccggaatcggcagactctctgcagcttactaccccgcgagtccaggagccacaatactgatgcggccctcctcccctgtattagctatcccgcgttcgctcttgatgatgaggttctgttctctcaaacactcgataaggtggtccgcaaattgaagggtaagtacggcttcaaaaggttcctccgcgatgggtacagaacctccctggaggatcccaatcggtgttactataaacccgcagagattaagctcttcgacggaatagaatgtgagttcccaattttcttcctgtacatgatgatcgacggggtgttccgcggcaacccgaagcaggtccaggagtatcaggatctgcttacccctgtgttgcaccacacaacagagggctacccagtagtcccaaagtattactatgtgcctgctgattttgtcgagtatgaaaaaaacaatcctggcagccaaaaacgatttcctagcaactgcggtagagatggcaaactgttcctctggggccaagcactttatattatagctaagctgctggcggatgagctgattagtcccaaagatatagatcccgtgcagcggtacgtccccctcaaagatcaacggaacgtgtctatgagattctctaatcagggacccctggaaaatgaccttgtcgtccacgtggctctgattgcagagtcccagcgccttcaagtgtttctgaatacatatggtatccagacccagacccctcagcaggtcgaacccattcagatctggccccagcaagaattggtcaaggcctacctgcagcttggcattaacgagaaacttggcctctccgggcgacctgatcgccctattgggtgcttgggcaccagcaaaatctacaggatcctgggaaagacagtagtctgctatcctataatctttgatctcagtgatttttacatgtcacaggacgtattcctgcttattgacgacattaaaaatgccctgcagtttataaagcaatactggaagatgcacgggagacccctcttcctcgtccttattagggaggacaatattcggggatcacgattcaatccaatcctagatatgctggcggccctgaaaaaggggattatcggcggggtgaaagtgcatgttgacaggctccagacattgatcagcggcgcagttgtggagcagcttgattttctacgcattagcgacacagaagagctccctgagtttaagagctttgaggaactggaacccccaaaacattctaaggtcaagagacagtcgagtaccccctctgcacctgaactggggcaacagccagatgtgaacatcagtgaatggaaagacaaaccaacgcacgaaattctgcagaagctcaacgattgcagttgtttggcaagccaggcgattctgcttggtatcctgttgaagcgcgaggggccaaattttatcaccaaggaaggaactgttagtgatcacattgagcgggtctatcgcagagcaggctcccagaagctgtggttagctgtgaggtacggagctgcatttacacagaagtttagctcttcgattgctcctcatatcacgaccttcctagtgcacgggaagcaagttaccctgggcgctttcggacacgaggaggaagtgattagtaatcctctgtcccctagggtgatccagaacataatctattacaagtgtaacacccatgatgagcgggaggccgtaatccagcaggaactggttatccacatcggctggattatttcaaataatccagagctgttcagcggaatgttgaagattcggattggatggatcattcacgcaatggagtacgagcttcagattcggggtggagataaacccgccctagatctgtaccagctgtctccttcagaggtcaaacagttacttctcgacattttgcagccccagcaaaacgggcggtgttggctgaaccgccggcaaattgatggaagcctgaacaggacgcctactggtttctacgacagggtgtggcaaattttggaaagaacaccgaacgggatcatcgtagccggcaagcatctgccccagcaacccacactctcggacatgactatgtatgagatgaattttagtctgctagtggaggatacattggggaatattgatcaaccccagtacaggcagatagtggtggaacttctgatggtggtatctatcgtgctcgaaagaaacccagaactcgagttccaggataaagtcgacctcgacaggttggtcaaggaggccttcaacgaattccagaaagaccagagcagactgaaggaaatagagaagcaggatgacatgacatccttttataatactccacccctggggaagaggggaacgtgctcttacctgacaaaagccgtaatgaatctgctgctggagggtgaggttaagcccaacaatgatgatccgtgtctaattagt

SEQ ID NO: 6284 - DNA, 3279 bp, Artificial Sequence
  derived and/or modified sequence
atggcaggtgcagctgggctgaccgcagaggtcagctggaaggttcttgaacgccgcgcaagaaccaagcgcagcggatcggtgtacgagccactgaaatcaattaaccttccaagacccgataacgaaaccctttgggacaaactggaccactattaccgtattgtgaaatcgaccctgctcttgtaccaatccccaactactggactgtttcctacgaaaacttgtggaggcgaccagaaggcaaagattcaggactccttgtactgtgcagcaggagcatgggcccttgccttggcatacaggagaattgatgatgataaggggagaactcatgaacttgagcattccgccatcaagtgtatgcggggaatcctgtactgctacatgcgtcaggcagataaggtgcagcagttcaagcaggaccctaggcctactacttgtctgcattccgtgtttaatgtgcataccggagacgaattgcttagctacgaagagtacgggcatcttcagattaacgcggtgtccctgtacctgctctacctggtggagatgatttcgtcgggtctgcaaatcatttacaatactgatgaagtctcctttatccagaatctggtcttttgtgtggagcgcgtttatcgggtgcctgattttggcgtgtgggagagaggatcgaaatacaataacggatccaccgaactccactcgtcatcagtgggactcgctaaagcagcccttgaagcgattaacggtttcaatctttttggaaaccaaggttgctcgtggtcggtcattttcgtggacttggacgcccataaccgaaatcggcagacgctgtgctctcttttgcctcgggaaagccgctctcacaataccgacgcagcactcctgccatgtatttcatatcccgcttttgccctggacgatgaagtgcttttctcgcaaactcttgataaagtggttcgtaagctgaagggaaagtacggctttaaacgttttcttcgagatggatatcgcacttcccttgaggatcctaatagatgctactacaaaccagctgaaatcaagctgttcgatggtatcgagtgcgaattccccatcttctttctttacatgatgattgatggtgtttttagaggcaaccctaagcaggtgcaggaataccaagatctgttgaccccagtcctgcaccataccaccgagggttacccagtcgtccctaagtactactacgtcccagcagactttgtggagtacgagaagaacaatcctggctcccagaagcgctttccgtcgaactgcggtagagacgggaagctctttctttggggccaggccctgtacattattgcgaagctcttggcggatgaattgatttccccgaaggacatcgaccccgtgcaacgctacgtccccctcaaagatcagcgtaacgtgagcatgcgattttcgaaccaagggcctctggagaatgatcttgtcgtgcatgtggcactgattgcagaaagccagagactgcaggtgtttcttaacacctacggaattcagactcaaacccctcagcaggtggaaccaattcaaatttggccccaacaggaacttgtgaaagcatacctccagttgggtatcaacgaaaagctgggactctccggtcgcccggaccgcccaataggctgtttgggtaccagcaagatatatcgaattctggggaaaactgtcgtgtgctaccctatcatttttgatctttccgacttctacatgtcccaagacgtgtttctgctgatagatgatatcaagaatgcactgcaattcataaagcagtactggaaaatgcacggaaggccacttttcctggtgcttattcgcgaggataacatcaggggatcgagattcaatccgattcttgacatgctggccgcgctgaaaaagggcataataggaggtgtcaaggtgcatgtggacaggctgcaaaccctgatcagcggcgccgtcgtggaacaactggattttctgaggatttccgataccgaagaacttcctgaattcaaatcttttgaggaactggaacctcccaagcattctaaggtgaagcggcagagctcaaccccatcagcgcctgaactgggccagcaacccgatgtgaacatctccgagtggaaggataagccaactcatgaaattctgcagaagctcaacgattgcagctgtttggctagccaggccatactccttggtatcctcttgaagagggaggggcctaatttcatcactaaagaaggtaccgtttccgaccacattgagcgtgtctatagaagggcgggttcccagaaactttggcttgcagtgcgctacggggcggcatttacccaaaagttttcatcatccattgcaccacatataactacgtttctcgtgcacggaaagcaagtgactctgggtgccttcggacatgaagaagaagtgatttctaatcctctctctcctagagtgatccaaaacatcatttactacaagtgtaacactcatgatgagagggaagcagtcattcaacaggagcttgtgatccatatcggttggatcatttcaaacaacccagaattgttttccggaatgctgaaaatccgcatcggctggattatccacgcaatggagtacgaactgcaaattagaggtggcgacaaacctgcactcgatttgtaccaactttctccttcggaggtcaagcagctgctgctcgatatactgcaaccacaacaaaatggaagatgttggttgaatcggcggcaaattgatggttcgctgaaccggaccccaacgggtttttacgaccgggtctggcagatacttgaaaggactccaaacgggatcattgtcgccggaaaacacctccctcaacaaccaactctgtcagacatgaccatgtacgagatgaatttctcccttctcgtcgaagataccctgggtaacatcgatcagccacagtaccgccaaatcgtggtcgaacttctgatggtcgtgtccattgttcttgagagaaaccccgagctcgaatttcaggacaaggtggatcttgaccggcttgtgaaagaagccttcaatgagttccagaaagatcaaagccggctcaaagaaattgagaagcaggatgatatgacttccttttacaatacgccccctctgggtaaacggggtacctgttcgtacctgactaaggccgtgatgaaccttctgcttgaaggagaagtgaagccgaacaatgatgatccttgtctgatatcc

SEQ ID NO: 6285 - DNA, 3279 bp, Artificial Sequence
  derived and/or modified sequence
atggcgggtgcagccgggcttacggcggaagtgtcctggaaagtcctcgaacggagagcgaggactaagaggtcaggctcggtctatgagccgctgaagtcaatcaacctgcctcggcctgacaacgaaaccctctgggataagctggatcactactatcggatcgtgaaatcgactctcctgctgtaccagagcccaaccaccgggttgttcccgactaagacttgcggaggagatcagaaagccaagatccaggatagcctgtactgcgcagcaggtgcttgggccctggcgctcgcatacagacgcattgatgatgataaaggaagaacgcatgagcttgaacattcagcgattaagtgtatgcgcggaatcctctattgctacatgcggcaggctgataaggtccagcaattcaagcaagatccaagaccgaccacctgtctgcactccgtgtttaatgtgcataccggggacgaactgttgtcatacgaggagtacggtcacttgcagataaacgccgtgagcctgtacctgctgtacctggtggagatgatttcatcgggacttcaaatcatctacaataccgacgaagtgtccttcatccagaatctcgttttctgtgtggaaagagtgtacagagttcctgatttcggagtctgggagcggggctcgaaatacaataacggctcgaccgaattgcactcatcgagcgtgggattggcaaaggctgccctggaggcgatcaatggattcaatctgttcggcaatcagggttgctcatggtctgtaatcttcgtggacttggatgcgcataaccgcaaccggcagactctctgtagcctgctcccacgggaatccagaagccacaacactgacgcggccctcctcccgtgcatctcgtacccggcgtttgcactcgacgacgaagtgctgttctcgcaaactctcgacaaggtcgtccgcaagctgaagggaaaatacggatttaagcgcttccttcgggacggatacaggacctccctggaggatccgaacaggtgttactacaagccggcagaaatcaagctgtttgacggaatcgaatgcgaattcccgattttcttcctctacatgatgatcgatggagtgttcaggggcaacccaaagcaagtccaggagtaccaagatctgcttacgcctgtgctgcatcacaccacggaaggatacccggtagtgccgaagtactactacgtgccagccgacttcgtggaatacgaaaagaacaacccgggctcccagaaacgattcccatcaaactgcggacgcgacggaaagctgttcctgtggggccaggctctgtatatcatcgcgaagctcctcgctgacgaactgatctcgcctaaggacatcgatccagtccagcgctacgtgccactgaaggatcaacgcaacgtgtcaatgagattctccaatcaaggaccacttgaaaacgacttggtcgttcacgtggccttgatcgcggagtctcaaagactgcaggtgtttctcaacacctacgggatccagacccagaccccccaacaggtggagcccatccagatatggccccagcaggagctcgtcaaggcctacttgcaacttggaatcaacgagaaactgggcctctcgggacgtccggatcgtcctatcggatgcctcggcactagcaagatctaccgcatccttggaaagactgtcgtatgttaccctatcatcttcgacttgtcggacttctacatgtcgcaagatgtgttcctgctgatcgacgacatcaagaatgcactgcagtttatcaagcaatactggaagatgcatggcaggccgttgttcctggtcttgatccgggaagataacatacgcgggtcgcggttcaaccctatcctcgatatgctggccgcgctgaaaaagggtatcatcggcggagtgaaagtgcacgtggaccggctgcaaactctgatcagcggagcagtggtggaacagctcgattttctgagaatctctgacactgaagaattgccggaattcaagtcgttcgaagaactcgagccgccaaaacacagcaaggttaagaggcagtcgtccaccccctcggcccctgaactgggacagcaacctgacgtgaacatcagcgagtggaaggacaagcccactcacgaaatcctgcagaagctgaatgattgctcatgcctggcctcacaagctatcctcctgggcattctcctcaaacgtgaagggccgaatttcatcacgaaagaaggcaccgtgagtgaccatatagagcgggtgtaccggcgcgcaggaagccagaaactgtggctcgctgtgaggtacggagcagcgttcacccagaagttttcctccagcatcgcgcctcacatcactacttttctggttcacggcaagcaggtcactctgggggcattcggtcacgaggaggaagtcatctcgaaccctctgtcgccacgcgttattcagaacatcatctactacaaatgcaatacccacgatgagcgggaagccgtgattcaacaagaattggtcatccatatcggctggattatctccaacaacccggagctgtttagcggaatgttgaaaatccgcatcggatggatcatccacgcgatggagtacgaacttcagattcggggaggagacaagccagcactggacctttaccagctgtcaccaagcgaagtgaaacagctcctcctggatatcctgcaacctcaacaaaatggacggtgctggctgaaccggcgacagatcgacggatcactcaatcgcaccccgactggattctacgaccgcgtgtggcaaatccttgaaaggacgcctaatggaatcatcgtggcgggtaaacatctgcctcaacagccgaccctgtcggatatgaccatgtatgagatgaacttttcactcctggtggaggataccttggggaatatcgaccagccacagtaccggcaaattgtggtggagcttctcatggtcgtgtcgatcgtcttggaacgtaatccagagttggaatttcaggataaggttgacctggaccggctggtgaaagaggccttcaacgaattccagaaggaccaatcccggctcaaggagatcgagaagcaagacgacatgacgtcgttttacaatacgcccccgctcggtaagcgcggcacctgctcttacttgaccaaagccgtcatgaacctccttcttgagggggaagtgaagccgaataatgacgacccgtgcctgatctcc

SEQ ID NO: 6286 - DNA, 3279 bp, Artificial Sequence
  derived and/or modified sequence
atggcgggtgcggccggccttacagcagaggtgagctggaaagttttagaaagaagagccagaacaaaaagatcaggctccgtttatgagcctctgaagtctattaatttaccacgtccggacaatgaaactttgtgggacaaattggaccactattaccggattgtcaaaagtacgttgctgttgtatcaatccccgacaaccggcctgtttcctacaaaaacgtgtggcggagatcagaaggctaaaattcaggactctttatactgcgcggcaggggcgtgggcattggcactagcatatcggcgcattgatgacgataaagggagaactcacgaactggaacattcggcgattaaatgtatgagaggaatcttatattgctacatgcgccaggcggataaagttcagcaatttaaacaagatccgcgcccgacgacttgcctccattctgttttcaacgtccatactggagacgaacttctcagctatgaagagtacggacatctgcaaataaatgctgttagtttataccttctgtatttggttgagatgatttcgtccggactccaaattatttataacacagatgaagtgtcttttattcagaacttggtattttgcgtggagagagtctacagggtcccggactttggcgtatgggagcgtgggtcaaagtataacaacggttcaaccgaactgcatagctcaagtgtggggcttgcaaaagcggctttggaggcaataaacggatttaatctgttcggcaaccaaggctgttcatggtcagtaatctttgtcgaccttgatgcacataaccggaatcgtcagaccctttgcagcttattacctcgggagtcacggtcccacaatacggacgctgctctcttaccttgtatttcgtatcctgcatttgcgctggatgacgaggttttgttttcacagacactggacaaggttgtgcggaagctgaaaggcaaatacggctttaaacgattcttgcgggatggatatcgcacaagtttggaggacccaaatcggtgttattataaaccagcggaaatcaaactgtttgatggaattgaatgcgaatttcctatctttttcttatatatgatgatcgacggagtgtttagaggaaaccctaagcaggtccaggaatatcaagatctgctaacacctgtacttcatcacacgacagaagggtacccggtggtgccgaaatactattatgttcctgctgattttgtcgaatatgaaaagaataacccgggaagtcagaaacgatttccgagcaactgcgggcgcgacggaaagctgtttctttggggccaagctttatatattattgcaaaactcttagccgacgaactgatctcaccgaaagacatagacccggtccaaagatatgtacctcttaaagaccaacggaatgtctcgatgagatttagcaatcaaggtcccttggaaaacgatctagtcgtacatgtagcccttatcgcggagtctcagcgcctgcaagtctttttgaatacatatggaattcaaacacaaacgcctcagcaggtggaacctatccagatctggccgcaacaagaattggttaaagcatatcttcagctgggcataaacgagaaactcggattgtcgggtcgaccggatcggcctatcggttgcttgggcacatctaaaatttatcgcatattaggtaaaacggttgtgtgctatccgattatttttgatctttccgatttctatatgtcccaggatgtctttttactaattgatgatatcaagaatgctctgcaatttattaagcaatactggaagatgcacggtaggccgctctttttagtcttgattcgggaggataatatcagagggtcgcgctttaatccgatcctggatatgctcgcagcactgaaaaaaggcattattggcggtgtaaaggttcatgttgataggttgcaaacattaatctccggagcggttgttgaacagttggattttcttcgcatatccgatactgaggaattgccggagttcaaatcgttcgaagaacttgaaccgcctaagcactctaaggtcaaaaggcagtcctccacgccgtctgcccctgagctggggcagcagccggatgtgaatatcagcgaatggaaagacaaacctacacatgagattttgcagaaactcaatgattgttcatgcttagcctctcaggccattttattgggcatcctccttaaacgggaaggtccaaactttatcacaaaagagggaacggtctctgaccacattgaaagagtctaccggcgcgccggaagccagaaattgtggctggcagttcggtatggcgcagcctttacccagaaattctcctcttcaattgcgcctcacattacaacctttctggtgcacggaaaacaagtaacactgggagcctttgggcacgaggaggaagtgatttcaaatccgctttcacctagagtgattcagaatattatctattataaatgcaatacgcatgatgagagagaagccgtgattcaacaggagcttgtcattcatatcggatggatcatctcaaataaccctgagctgttttctggcatgctaaaaattcgtattggctggattatccatgcgatggaatacgaactgcagatccgaggcggcgataaaccagctttagacctgtatcaactttctccgtccgaggtaaaacaacttcttctggatatcctgcagccgcaacagaatgggagatgttggcttaataggcgccaaatcgatggctctttaaatagaacgccaactggcttctatgatcgtgtttggcaaatcctggaacgcacaccaaacggcataattgttgcaggaaaacatctgccacaacagccgactttgtctgatatgacaatgtacgaaatgaatttttcacttctcgtggaagatacattaggaaacatcgaccaaccgcagtacagacaaatcgttgtggagttgcttatggtcgttagcattgtattggagcgaaatcctgaactagaatttcaggacaaagtggatcttgatagacttgttaaagaagcgtttaatgaatttcagaaagaccagtcacggttgaaagagatcgagaagcaagatgatatgacgagtttctataatacgccgcctttggggaaacgtggtacgtgtagttaccttacaaaagcagttatgaacttgttactggaaggcgaagtaaaaccaaacaatgacgatccttgtctgatttct

SEQ ID NO: 6287 - DNA, 3279 bp, Artificial Sequence
  derived and/or modified sequence
atggcgggcgcggcaggtctaacggccgaggtgtcctggaaggtgttggagcgccgcgcccgtaccaaacgcagcggctctgtgtacgaacccctgaagtccattaacctgcctcggccagataatgagacactgtgggacaagctagatcattactatagaattgtaaagtctaccctgctcctgtatcagtctccaaccacaggcttatttcccaccaagacctgcggaggcgaccaaaaggcaaaaatccaagactcactgtactgcgccgctggggcttgggccctcgcactggcctaccgtagaattgacgacgacaagggaagaactcacgaactggaacattctgccatcaaatgtatgcgggggatcctgtactgctacatgcgccaggccgataaagtgcaacagttcaagcaggaccccaggccaacgacatgtcttcacagcgtgttcaatgtgcataccggagacgagctgctctcatatgaagaatatgggcatttgcagattaacgcggtttcactgtacctcctgtacctggttgagatgataagctctggccttcagatcatttataacaccgacgaggtgtccttcatccagaacctagtgttctgtgtcgagagggtgtatcgcgttcctgattttggggtgtgggaaagagggtcaaagtacaacaatggctcaactgagctacactcttcgtctgtggggctagccaaggccgcattagaggctattaatggctttaacctgttcgggaaccagggatgctcatggagcgtcatcttcgttgacctcgatgcccacaataggaaccgacagacactgtgctcccttctcccacgggagtcccgctctcacaacacggatgccgcgctgctgccttgtataagttatcctgccttcgccctagacgatgaggtcctcttctcccagacgctcgataaggtggtccggaagttgaagggaaaatacggattcaagagatttctgagggacggctacaggacttcccttgaggacccgaatcgctgttactataagcctgccgaaattaagttgttcgatggcatcgaatgcgagttccctatctttttcctctacatgatgattgacggcgtgtttcgaggaaatcccaagcaagtccaagaataccaggatctgttgacgcctgtgctacatcacacaacggaaggttaccccgtcgttccgaagtactactacgtaccagccgacttcgtggagtatgagaagaacaacccgggaagccagaaacgattcccctctaattgcggacgagatgggaagctctttctgtggggtcaggctctgtatatcattgctaagctgttggctgatgaactcatttcaccgaaggacatagacccagtccagcggtacgtgccgcttaaggaccaacggaacgtgtcaatgcgtttttctaaccaggggcctctggagaatgatctggtagtgcacgtagcgttgatcgcagaatcacagagattgcaggtgttcctgaacacatatggtatacagacccagaccccacagcaagtggaaccgatccagatttggccgcagcaggaattagtcaaagcttacctgcagcttggtataaatgaaaaactcggactaagtggcaggccagaccggcccataggatgcttgggaaccagtaagatctaccggattctaggcaaaaccgtcgtttgctacccgattatcttcgacttgtctgacttctacatgagccaggatgtgttcctcctgattgatgacattaagaacgctctccagttcattaaacagtactggaagatgcatggccgccccctcttcctcgtgctgatccgtgaggacaatataaggggctcaagattcaacccgattctcgatatgctggccgcactcaagaaaggaataatcggcggagtcaaagtgcatgttgaccgattgcagacacttatctccggtgcagtcgttgaacagttagacttcctccgaatcagcgataccgaggaactccctgaatttaagagttttgaagagcttgaaccccccaaacattccaaagtcaagaggcagtcctctacaccaagtgcccccgagctgggccagcagcccgatgtgaatatttcagagtggaaagacaaacctacccatgagattctccagaagctgaacgactgctcttgccttgccagccaggctattctcctgggtattcttctcaagcgcgagggcccaaactttatcacaaaggagggtacagtgagcgatcacatagagagagtgtaccgcagagctggcagccagaagctttggctggcggtgagatatggagccgcatttacccagaaatttagttcaagcatagcaccccacataaccacttttctcgttcatggtaagcaggttacactgggcgcgtttgggcatgaagaggaggttatttctaacccgctcagtccgcgtgtcattcagaatatcatctactacaagtgtaacacccacgacgaaagagaagctgttatacagcaggaacttgtcatacatatcgggtggatcattagtaacaacccagagctgttcagcggaatgctgaagattcgcatagggtggatcatacacgccatggagtacgaattacagatccgtggcggagacaaacccgcactggatctataccagctgtctcccagcgaagtcaaacagctgctgcttgatattctgcagccacagcaaaatggtcgctgctggctcaatcgtaggcagatcgacgggtcacttaaccgaacacccacagggttctatgatagagtatggcagatcttggagcgcacccccaacggcatcatagtagcaggcaagcacttgccgcagcaacccaccctgagtgacatgaccatgtacgaaatgaactttagtctactagtagaggacaccctcggcaacatcgaccaaccccagtaccgacagattgtggtggagctattaatggtggtgtcaattgtcctcgaacggaacccagaacttgaattccaggataaggttgaccttgaccgcctcgtgaaggaagcttttaatgaattccagaaggaccagtcccgcctgaaagaaattgaaaagcaggatgatatgacctccttctataatacccccccactcgggaaacgcggtacctgcagttatctgacaaaagccgttatgaatttgctgctggagggggaagtgaaacctaataatgacgacccttgtcttatcagc

SEQ ID NO: 6288 - DNA, 3279 bp, Artificial Sequence
  derived and/or modified sequence
atggcgggagctgcgggccttactgcagaagtgtcgtggaaggtgctcgagcgtcgggccaggacgaaacggtcgggaagcgtctacgaacctcttaagtcgattaaccttcccagaccagataacgaaaccctgtgggacaaacttgatcactactacagaattgtgaagagcactctgctcctgtaccagagccccaccacggggctgtttcctaccaagacctgtggaggcgaccagaaggccaaaatccaagactccctgtactgtgcagcaggggcatgggcgctggcgcttgcgtaccgccggattgatgacgataaaggacgcacccacgaactggagcatagcgcaattaagtgtatgagaggaattctttactgctacatgcggcaagctgataaagtgcagcaattcaaacaggatcctcgtcctactacctgtttgcactcagtctttaacgtgcacactggtgatgagctgctgtcatacgaggagtacggccatcttcagattaacgccgtgtccctgtacttgctgtacctggtcgaaatgatcagcagtggtctgcagatcatttacaacactgatgaggtgagctttatccagaatttggtcttttgtgtcgagcgggtgtaccgagtgcctgattttggagtgtgggaacgggggtctaaatacaacaatggtagcaccgaactgcactcatcctccgtcggtcttgccaaggcggcccttgaagcgattaatggatttaacctctttggtaatcaaggctgtagctggtcagtcatctttgtggacctcgacgcacataataggaaccggcagaccctgtgttcccttcttcctagagaatcccgatcccacaatactgatgcggcgttgctcccgtgtatttcctaccctgcctttgcgctggatgatgaagtccttttctctcagaccctggacaaggtggtccggaagctgaagggaaagtacgggtttaagcggtttcttagggacggttacagaacgagcttggaagatccaaaccggtgttactataaacctgcagagattaaacttttcgacggaattgaatgtgagtttcctatcttttttctctatatgatgatcgacggtgtgttccgcggcaatccaaagcaagtgcaagagtaccaagatcttctcactccagtgcttcatcacaccaccgaaggttaccccgtggtccctaagtactattacgtgcctgctgacttcgtggaatacgaaaagaacaatcctggatcacagaagagatttccatcgaactgtgggagagatggcaaacttttcctgtggggtcaggcactgtacatcatcgccaagttgctggcagacgaactgatatccccaaaggacatcgacccggtccaacgatacgtcccactgaaagatcaaagaaatgtgtctatgagattcagcaaccaaggcccactcgagaatgaccttgtggtgcacgtcgctcttattgcagaatctcaacgcttgcaggtctttctgaacacctatggaatccagacgcagactccccaacaggtggaaccaatccagatctggccccaacaggaacttgtgaaggcctacctgcaactcgggatcaacgaaaaacttggtctgtccggacgcccagatcgcccaatcggatgtcttggaacctccaagatctacagaattctcggaaagactgtggtgtgttatcccatcatattcgacctgtcggacttttacatgagtcaggatgtgtttcttcttatcgatgacattaagaacgcacttcagttcattaagcagtactggaagatgcatggcagacctttgtttttggtgctgatcagagaagataacattcggggttcccgctttaaccctattctggatatgctcgcagcactgaagaaaggtattatcggaggtgtcaaagtccatgtcgatagactgcagacgctgatatcgggcgcagtggtggagcagcttgacttcctgcgaatttccgatactgaggaacttccggaattcaaatccttcgaagaactggagcctccaaagcattcgaaggtgaaaagacaatcctcgactccctcggcaccagaacttggacagcagcctgatgtcaacatatccgagtggaaggacaagccaacccacgagatccttcaaaagctcaacgactgttcctgtcttgctagccaggcaattcttctcggaattcttttgaagcgagaaggtccaaacttcataaccaaagagggaaccgtgagcgatcatatcgagagagtctaccgtcgtgccggctcacaaaagctgtggctggccgtgaggtatggagcggctttcactcaaaagtttagcagctcaattgcacctcatatcaccactttccttgtgcatggtaagcaggtgactcttggtgcattcggtcatgaagaagaggtcatttccaacccactgtcgcccagagtgattcaaaacattatctactacaagtgcaatacccatgatgagagggaagcagtcattcaacaagaacttgtcatccacattggctggattatctcgaacaacccagaacttttttcgggaatgctcaagattaggatcggctggatcattcacgcaatggagtacgagctgcaaatcagaggtggcgataagcctgcactcgatctgtaccagctcagcccttcggaggtgaagcagctcttgctcgacatactgcaaccacaacaaaacgggaggtgctggctgaataggagacaaatcgacgggtccctgaatagaactcctaccggattttacgatagggtgtggcaaatactggaacgaaccccaaatgggattattgtggccggaaaacatctcccgcaacagcctactctttccgacatgaccatgtacgaaatgaacttctcgctgctggtggaggatactcttggaaatatcgaccaacctcaatacagacaaattgtggtggaactcctcatggtggtgagcatcgtgctggaaagaaatcctgagctcgaatttcaggacaaggtcgacctcgaccgactggtgaaggaggcctttaacgaattccagaaagaccaatcccggcttaaagaaatcgaaaagcaagatgatatgacctcgttctacaacaccccgcctctcggcaaacggggtacttgctcataccttacgaaggcagtcatgaatcttctgctcgaaggtgaagtgaagccaaacaatgacgatccttgcctgatttcc

SEQ ID NO: 6289 - DNA, 3279 bp, Artificial Sequence
  derived and/or modified sequence
atggcgggcgcggccggcctcaccgccgaggtgagttggaaagtcctggagcgtcgagcaagaaccaagaggtcaggttctgtgtatgagccactgaagagcatcaatcttcccaggcccgacaacgagacactttgggacaaattggaccattattaccggatcgttaagtccacattgctgctgtaccagagccccacgaccggcctgtttccgactaagacgtgtgggggagatcaaaaggctaaaattcaggactccctctactgcgccgccggcgcctgggcattggcactggcttaccgccgaattgatgacgacaaaggacgcacacacgaattggaacattctgcaatcaagtgtatgagaggcattttgtattgctacatgaggcaggccgacaaagtgcagcagtttaagcaggacccccgcccaacaacctgcctacacagcgtgttcaatgtgcacaccggggacgaactgctgtcttacgaggagtatggccacttgcagattaacgctgtgagcctgtacctattgtacctggtggaaatgatctcttccggcctgcaaatcatctataatacggatgaggtaagcttcattcagaacctggtgttttgcgtggagcgggtctaccgtgtgcccgacttcggcgtttgggagcgcggctctaagtataataacggtagtaccgagctgcattctagcagtgtcgggttggctaaggccgccctggaggctatcaatgggtttaacctcttcgggaaccaaggctgctcttggtccgtaattttcgtggatctggacgcacacaatagaaatcgccagacgctgtgttctttgttgcctcgtgaatccagaagccacaatactgacgctgcgctgctgccatgcattagttaccccgcattcgctctggatgatgaagtccttttttcccagacgctcgacaaagtcgtgcgcaaattgaaaggcaaatacgggttcaagcgtttcctacgggacggctacagaactagcctggaggatccaaacaggtgctactacaaacccgctgaaattaagctgttcgatggtatcgaatgtgaattccccatctttttcttgtacatgatgatagacggggtgttccgaggcaaccccaaacaagtgcaggagtaccaggacctcctgacaccagtgttgcatcacacaacagaaggctatccggtggtgccaaagtattactatgtccccgcagatttcgtggagtacgaaaaaaacaaccccggcagccaaaagcggttcccatctaattgcggaagagacgggaaattatttctgtggggacaggccttgtacatcattgcaaaactccttgcggacgaactgatttctcccaaggatatcgatcctgttcaacgctacgtgccattgaaagaccagcggaatgtgagcatgcgcttctcaaaccagggccctctggaaaatgatctggtcgtgcacgtggctcttatagctgaatcccagcgtctccaagtgttcctgaacacttacggaatccagacgcagaccccacagcaggttgagccaattcagatctggccacagcaagagttagtgaaagcctacttacagctcgggatcaacgagaagctggggttgagcggtcgtccagatcgcccaattgggtgcctgggaacgtcaaagatctacaggatcctcggcaaaacagtggtgtgttatcctataattttcgacctgagcgacttctatatgagccaggacgtgtttctgttgatcgatgacatcaaaaatgccttgcagttcattaaacaatactggaaaatgcatggtaggccccttttcctcgtgttgatccgcgaggacaacattcgaggaagccgcttcaacccaatccttgacatgctggctgcactcaagaaaggtattattgggggagtgaaagtgcatgtcgatagacttcagaccctcatctccggcgcggtggtagagcaactggactttctgcggatctctgacaccgaagagctgcccgagtttaagtccttcgaggaactcgaacctccgaagcactctaaggtcaagaggcaaagctcaactccatccgctcccgaactcgggcagcagccagatgtgaatatcagcgagtggaaggacaagccaacccatgagattctgcagaaactgaacgactgttcatgtctggcctcccaggccatcttgctcggaatactgttgaaacgagaggggcccaactttattacaaaagaaggaacggtttccgatcatatcgagcgggtctatcggagagctgggtctcagaagctttggctcgccgtcagatatggtgccgcctttacccaaaaattctcctcttcgattgctccgcatataacgacctttctagtgcatggcaagcaagtcaccctaggagcatttgggcatgaagaagaggtcataagtaatcctctgagcccaagagtaatccaaaacatcatctactacaaatgtaacacccacgacgagcgggaagcagtgattcagcaggagctcgtgattcatatcggctggattatctctaacaatccggaattattttctgggatgttgaagatcagaatcgggtggatcatccatgcaatggagtacgaactccaaattagaggaggagataagccggcccttgacctctatcaactctctccgagtgaggttaagcaactgcttctcgacatactgcaaccccagcagaacgggaggtgttggctgaatcgacggcagatcgacggctccctgaaccgtactcccacagggttttacgaccgcgtgtggcaaatcctggaacggactcccaatgggatcatcgtcgcaggtaaacacttaccacaacagccaaccttgtccgacatgaccatgtacgagatgaatttttcccttttagtggaggataccctcggcaacattgaccagccacagtatagacagatcgtggtggagctgctgatggttgtatctatagtcctggaaaggaacccagaactcgagttccaggataaagttgatctggaccgactagtgaaagaggcattcaatgagttccagaaagatcaatcgcgcttgaaggagattgaaaagcaagatgatatgaccagcttctataacaccccccccttgggaaaaagaggcacctgctcctacctaacaaaggcagtgatgaatcttctgctagagggcgaagtgaaacccaataacgacgatccttgcctgatttcc

SEQ ID NO: 6290 - DNA, 3279 bp, Artificial Sequence
  derived and/or modified sequence
atggcaggagcagccggtcttacggcagaagtctcatggaaggtcttggagagacgggcccgcacgaaaaggagtggttccgtgtacgaacccttgaaatcgattaacctgcctagacctgataatgaaacactgtgggacaaactggatcattattatcggattgtgaagtcaactctgttgctctaccaatcacctacgactggtctctttccaacaaagacgtgtggcggggatcagaaggccaagatccaggacagcctgtattgcgcagctggcgcatgggcactggcactggcatataggcggatagacgacgacaagggccgtacacatgagctggagcattctgcaattaaatgcatgagggggattctttattgctacatgcggcaggccgataaggtccagcagtttaagcaagaccctcggccaactacctgcctccattcagtgtttaacgtgcatactggcgatgagctgctgtcctacgaagagtatggacaccttcagatcaatgctgtctccctgtaccttctctatttggtggaaatgattagctcggggctgcagatcatatacaatactgacgaagtgtccttcattcaaaacttggttttttgtgtggaacgcgtttatcgagttcctgatttcggcgtgtgggaacgtggcagtaagtacaataacggtagcaccgaactgcactccagtagcgtgggtctcgccaaggccgccctcgaagccataaacggattcaacctgttcgggaaccaaggctgttcttggtccgtgatcttcgtcgacctggacgctcacaaccggaaccgccagaccctgtgctctctgctcccgagggagagcagatcccacaatacagacgcggccctcttaccatgtatatcataccccgcttttgccctggacgacgaggttctgttttctcagaccctggacaaagtagtacggaagctgaaaggcaagtacggatttaagcggttccttcgagacggatataggacgtcccttgaagatccaaatcggtgctactataagcctgctgaaataaagctgtttgatgggatcgaatgcgagttcccaatatttttcctttacatgatgattgacggagtcttccgggggaatcctaagcaggtccaggaataccaggacttgttgacgcctgtgctccatcatactacggaagggtacccagtcgttcctaagtactattatgtacccgctgacttcgtggaatacgagaaaaacaatccagggtcccagaagaggtttcccagcaactgtgggagggatgggaaactgtttttgtggggacaggcattgtatatcatcgccaagctcttagcggacgagttgatttcccccaaggatatcgatcctgtgcagaggtatgtgccactaaaggaccagcgtaacgtgtctatgcggttctcaaaccagggacctctcgagaacgatctggtggtgcatgtggccctcatcgctgagagtcagagattgcaggtatttctcaatacatacgggattcagacgcagactccccagcaggttgaaccgattcagatttggccccagcaagagctcgtaaaggcatacttgcagctcgggataaacgaaaagttggggctctcagggcgtcctgataggcccattggatgcctggggaccagcaagatttaccgtatcctgggcaagactgtggtttgttatcctatcatttttgatctttccgacttctacatgtcccaggatgtgttccttcttatcgatgatattaaaaacgccttgcagtttatcaagcagtattggaaaatgcacggaaggccactgtttctcgtactcataagagaagacaacatcagaggctccagatttaatcctatcctcgacatgctcgccgccctcaaaaagggcataattggcggcgtgaaggtgcatgtggaccgcctccaaaccttgatctcaggggcggtagtggagcagcttgactttttgcgcatttctgacaccgaggagctgccagagttcaagtcgtttgaagagttggagcccccaaagcattccaaggtcaagaggcagtcttcgactcccagcgcccctgagcttgggcagcagccagacgtaaatattagtgaatggaaagataagccaacacacgagatccttcaaaagctgaatgactgcagttgtcttgcttctcaagccatccttctgggcattctgctgaaacgggagggcccaaacttcataaccaaagaagggacagtctcagaccacatcgagcgggtgtatagacgggccgggtcacaaaaactctggttggccgtccgatatggggccgcatttacccagaaatttagttcctcaattgcgcctcacatcaccacgtttcttgtccatggaaagcaggtcaccctgggcgctttcggccacgaggaggaagtcataagcaaccccctatccccccgagtcattcaaaatatcatatattacaaatgtaatacgcacgacgagagagaagccgtgatccagcaggagcttgtaattcacatcggatggataatttctaataatccggagctattttctggcatgctgaagattagaatcggatggattatccatgcaatggagtacgaactgcagatacggggaggagacaagcccgccctggatctctatcaattgtcaccatccgaagtcaagcagttgctactggatatccttcaacctcagcaaaatgggcggtgttggctgaatcgaaggcaaattgacggcagtctgaatcgtacccctaccggcttttatgaccgggtgtggcaaatccttgaaaggactcccaatggaatcatcgtggccggtaagcacctgccacagcagcccaccctgtctgatatgaccatgtatgagatgaatttttccctgctggtggaggatacgctgggaaatattgatcagccacaatacaggcagattgtagtggaactactgatggttgtttcgattgttctggaacgtaatccggagttagagtttcaggacaaagttgacctggatcggttagtgaaggaagcttttaacgagttccaaaaggaccagtctcgattgaaagagatagagaagcaggacgacatgacctccttttacaatactccaccactggggaaaaggggcacgtgctcctacctgacaaaagctgtgatgaacctgcttctcgagggagaggtaaaacccaacaatgacgatccctgcctaatctca

SEQ ID NO: 6291 - DNA, 3279 bp, Artificial Sequence
  derived and/or modified sequence
atggccggcgcggccgggttgaccgctgaagtatcttggaaggttctggagagacgcgctcgcacaaagcgaagtggttcggtgtacgaacctctcaagtccattaatttgcctcgtcctgataacgagaccttgtgggacaaactggatcactattacagaattgtaaaaagcacacttctgctgtaccagtcccccacgactggcctcttcccaactaagacctgtgggggcgatcagaaagccaagatacaagattcactgtactgcgctgccggggcatgggccctggcattggcctatagaagaatcgatgacgataagggcaggacacacgagttggaacactccgctatcaaatgtatgcggggaatattatactgctacatgcgacaggccgataaggtacagcaattcaagcaagatccaagacctacgacctgtctgcactcagtgttcaacgttcacactggtgacgagcttctctcctacgaggagtacggacatctccagatcaacgcagtgtcactgtatctcctgtacctggttgagatgattagctccggactgcagataatctataacacagatgaggtctcgttcatccaaaacctggttttctgcgtggagagggtttaccgcgttcctgattttggagtttgggagcgaggaagtaaatacaataacgggagtaccgaactgcacagttcctctgttggacttgctaaagccgccctggaggcgatcaatggattcaacctcttcgggaatcaggggtgtagctggtctgtgattttcgtggacctggacgctcataatagaaacagacagaccttgtgttcgctgttaccgagggaatctcggtcccacaataccgacgccgcattgctcccctgcatctcataccccgcgtttgctctggacgacgaagtattgttcagtcagacgttggataaggtggtgcgtaagctcaaagggaagtatggttttaagcgatttctcagagacggctacaggaccagtctcgaggaccccaatcgttgctattataaaccagctgagattaagctcttcgacggtatagagtgtgaattccctattttcttcttgtacatgatgatagatggggtatttcgcggaaaccccaaacaagtgcaagaataccaagacttgcttactccggtcctccatcataccaccgaagggtatccagtcgttccaaaatattattacgtcccagcggacttcgttgagtacgagaagaacaacccaggtagccagaagaggttcccttcaaattgtgggcgtgacggcaaactgtttctttggggacaggctctgtatattatcgccaaactgctggctgacgagttaatcagccctaaggatatcgaccccgttcagcggtacgtgcctctgaaggatcagcgcaatgtgtcgatgcgcttcagcaaccaggggcctctagagaatgatctggttgtgcatgtcgccttgattgcagaatcacagcggctccaggttttcttgaatacttatggcatccagacacagactccgcagcaggtggaacccatccagatctggccacagcaggaattggtcaaagcatatctgcagctaggcattaacgagaagctgggcttgagcggacgcccagacaggccaatcggttgtttgggcacatctaaaatctacagaattttgggcaagaccgtagtgtgctatccaattattttcgatctgagcgacttttacatgagtcaagacgtgttcctcctgatcgacgatattaagaacgccctgcaatttatcaagcaatactggaagatgcatgggaggcctctgtttttggtgctgatcagggaagacaacatccgaggctcccgtttcaaccccattctcgacatgctcgcagccctcaagaagggtatcatcggtggagtaaaagtgcacgtcgatcggctgcagaccctaatatccggagcagtcgtggagcagctggactttcttcgtatatctgatactgaggagctccccgaattcaaatcatttgaagaattggagccaccaaaacacagcaaagtcaaaaggcagtctagcactccatcagctccagagctcggccagcaacccgatgtgaacatttctgaatggaaagacaagcctactcacgaaattctccagaagctgaatgactgttcatgtttggcatcccaggctattctccttggaatattgctgaaaagagagggccccaactttattactaaggaaggcacagtttctgatcatattgagcgggtgtaccgtagagcggggtcacagaaactatggctggcggtcaggtacggcgctgcttttacgcagaagttctcctctagtattgccccacacatcaccactttcttggtgcacggcaagcaagtgaccctgggcgctttcggacatgaggaggaggtcatcagtaacccccttagcccccgggtgattcagaatattatctattataagtgtaacactcacgacgagcgtgaggcggttattcagcaggagcttgtcattcacatcgggtggattattagcaacaatccagaacttttttctggaatgcttaaaataagaattggatggattatccacgcgatggagtatgagctgcaaatccgcggcggagacaagcctgccctcgacctgtatcagttgtcaccatctgaagtaaagcagttgttgctcgatattctgcagcctcagcagaacgggcgctgctggctgaaccggcgccagattgacggtagtctgaaccgaactccaactggcttctacgatagagtctggcagattctggagaggacgcctaatggtatcatcgtggccggtaagcacctgccccaacagccgactctctcagacatgactatgtacgagatgaacttcagtctcctcgtcgaagataccctggggaacatagaccagcctcagtacaggcagatagtggttgaacttctaatggtggtttctatcgttctggagcgcaatccagagttagagttccaggacaaggtggacctggatagattggtgaaggaagccttcaacgagtttcaaaaggaccagagtagattgaaagagatcgagaaacaggatgacatgacctccttctacaacaccccacctctaggtaaacgcgggacctgttcatacctgacaaaggctgtcatgaacctcctgctggaaggtgaggtgaaaccaaataacgacgacccatgcctgatctct

SEQ ID NO: 6292 - DNA, 3279 bp, Artificial Sequence
  derived and/or modified sequence
atggccggggccgccgggttgacagccgaagtgtcttggaaagtactggagagacgggcgaggactaagagaagtggcagcgtttacgaacccctgaagtccattaacctacctcgcccagataatgagactctctgggacaaactcgatcactactaccgaatagtgaagagcacattgctcctgtaccagagccccacgaccgggctgttccccaccaaaacctgcggcggggaccagaaggcgaaaatccaggacagcctgtattgtgccgccggcgcatgggctctcgccttggcataccggcggattgatgatgacaagggcagaacacacgagttagagcactccgccattaagtgcatgaggggcatactgtattgttatatgaggcaggctgataaagtccagcagtttaagcaggacccgcgccccactacatgtctgcattctgtctttaatgtgcacacgggggacgagctactgtcatatgaagagtatggtcatctgcagatcaacgccgtgtccctgtatctcctctatcttgtggagatgatcagttctggcctgcaaatcatctacaacactgatgaggtctctttcattcagaatctggtgttctgtgtagaacgagtttatagagtgccggactttggcgtgtgggagagaggtagtaagtacaataacgggtctacagagttacacagctcgtccgtggggttggctaaagctgctttggaggctataaatggttttaacctattcggaaaccagggttgctcctggtccgtgattttcgtcgatctcgacgcgcataaccgcaataggcagacactgtgctccctcctgccccgcgagagcagatcccataataccgatgcagcgctactgccttgtatttcttatcctgccttcgccttagatgacgaagttctgttctcccaaacactggataaggtggtgcgtaaacttaagggaaaatacggcttcaaacggttcctccgggacgggtatagaacatctcttgaggatcctaacaggtgctactacaaaccggcggagatcaagctttttgacggcatagagtgtgagtttcccatcttcttcctgtatatgatgattgatggagtgtttcgcgggaacccaaaacaagtgcaggagtaccaggatttgctgacccccgtcctgcaccacactactgagggatacccggtggtgccaaagtactactatgtaccagctgattttgtggagtacgagaaaaacaatcccggctcccagaagcgattcccttctaattgcggccgcgacggaaagctctttctgtggggacaggcactgtatatcatagcaaaactcctcgccgacgagctgatctctcccaaagacatcgaccccgtccagcgttacgtgccgcttaaagatcagcgcaacgtcagcatgcgattttccaatcagggccccctcgaaaatgacctagtcgtgcatgttgcccttatcgctgagagccagcggctgcaggtctttttgaacacatacggcatacagacgcaaacgcctcaacaggtggagcccattcagatctggcctcagcaggaacttgtcaaagcttatctgcaactgggcataaatgagaagctcggcctcagtggccggccggaccggcctattgggtgtctgggcacctccaaaatttatcggattttgggtaaaacggtggtatgctatccaattatctttgatctgagtgacttctacatgagccaggacgtgttcctccttattgatgacataaaaaatgccttgcagtttattaagcagtactggaaaatgcatggccgtccactgtttctcgtgctcattagagaggataatatacggggatcacgatttaatcctatcttggacatgctggccgcattaaagaagggtattattggaggggtcaaagtgcatgtggacaggcttcagactcttataagcggagccgtggtcgagcagcttgattttctaagaatctccgacacagaagagctccccgaattcaagtcttttgaggaattagagccaccaaaacatagtaaagtgaagcggcagtcctctacgccctcagctcccgagttagggcagcagcctgatgtgaacattagcgagtggaaagacaaaccgacgcacgaaatcctgcaaaagctaaacgattgctcttgtcttgcctcccaagctatcttgctgggaatcctcctgaagcgcgagggaccgaatttcatcactaaagaaggtaccgtctctgaccatatcgaaagggtgtataggagagcgggtagtcagaagctgtggctagcagtgagatatggcgccgctttcacgcagaagttctcatcaagtatcgcccctcatataacaacatttctggtgcatggtaaacaagtaacactgggggcatttgggcacgaggaagaagtcatctccaaccccctatctccccgggtcatccaaaatatcatatattataagtgtaacacgcacgatgagagagaggccgttatccagcaagaactcgtgatccacatcggctggatcatctcaaataacccggagctgttcagtgggatgctgaagattagaataggctggatcatccatgccatggagtacgaactacagattcgcgggggcgacaaacccgctcttgacctgtaccagctgagcccaagtgaggtgaagcagctcctgttggacatcctgcagccacagcagaatggccggtgctggctgaatcggcgtcagatcgatggcagtttaaaccgcacgcctacaggtttttacgaccgggtctggcagatactggagcgaactccgaacggtattatcgtggctggaaagcacctgcctcagcagcccactctttccgatatgacaatgtatgaaatgaatttcagcttgctcgtggaggatactttgggaaacattgaccagccgcagtaccggcaaatcgttgtggaactcctcatggtggtttcgatcgtgctcgagcgtaatccagagctggagtttcaggataaggtggacttggaccgcttggtgaaagaggcttttaatgaatttcagaaggatcagagtaggcttaaggagatcgaaaagcaggacgatatgacctccttttataatactccacctctggggaaacgagggacatgtagctaccttactaaggctgtgatgaatttactcttggagggagaagttaaaccaaataatgatgatccttgcctgatcagt

SEQ ID NO: 6293 - DNA, 3279 bp, Artificial Sequence
  derived and/or modified sequence
atggcaggcgcagccggactcacagccgaggtgtcgtggaaggtgctcgagcggcgagcacggacgaaacgatccggctcagtatatgaacctctcaagtcaatcaacttaccaaggcctgataacgaaaccctgtgggataagttagatcattactaccgaattgtgaaatcaaccctgttgctgtatcaaagccccacaacaggcctgtttccaactaaaacctgcggaggtgaccagaaggcaaagattcaagattctctctactgcgcagccggcgcctgggccctggcactggcgtatcggcgaattgacgacgacaaaggcagaacgcacgagctcgaacactcagcgattaagtgcatgagaggaatactatattgctatatgcggcaggccgataaagtgcagcaatttaagcaagatcccagaccgacgacgtgcctgcactctgtctttaatgtacacaccggcgacgaactgctgtcatatgaggaatatgggcacctccagataaatgccgtgtctctgtatctgctatatctcgtggagatgattagctccggactccagattatctacaacactgacgaggtgtcctttatccagaatttagtgttctgcgttgaacgggtctacagggttccggactttggggtgtgggagaggggcagcaagtataataatgggagtaccgaactacattcttcctcggtcggattagccaaagccgccctggaggccatcaacggtttcaacttgttcggtaaccagggatgctcttggagtgtgatttttgttgaccttgatgcacacaacaggaataggcagactctctgtagcctgctgccaagggaaagcagaagccacaatacggatgccgcactgctgccctgtatcagttacccagcatttgcactcgacgatgaggtgcttttcagtcagaccttagataaggtggtccgcaaactcaagggcaagtatggctttaaaaggttcctgcgagacggctataggacaagcctcgaggacccaaacaggtgctactacaaacctgcagagattaagttgttcgatggcattgagtgcgagtttcctatatttttcctttacatgatgatcgatggcgtgttccggggaaatcctaagcaggttcaggagtaccaggatctcctgacccctgtgcttcatcacactaccgaggggtacccagttgtgcccaagtactattatgtccctgcggacttcgttgagtacgaaaaaaataatccaggtagccagaaacggttccctagcaactgcggacgggatggcaaactgttcctgtggggacaggccttatatattatcgccaaattactcgctgacgaattgatctctcccaaggacatcgatcccgtgcagaggtatgtgccccttaaggatcaaaggaatgtttccatgcgtttctccaatcaaggccctcttgagaatgaccttgtggtccatgtggcattgatcgcagagtcccagagactgcaggtattcctgaatacatacgggatccaaactcagactccacagcaggttgaacctatccagatatggccccagcaggaactggtgaaggcctacctgcaactgggtataaacgaaaaactggggctgtccgggcggcctgacagaccaattggctgcctaggcactagcaagatctatcgaatcttgggcaagaccgtagtttgctacccgatcatcttcgacttgagcgacttttacatgtctcaagacgttttcctgttgatcgacgacatcaagaacgccttacaattcatcaaacagtattggaaaatgcatggccggccactcttccttgtcttgatcagagaggataatattcggggatctcggtttaacccaattctagatatgctagccgccctgaagaagggaatcattggcggggtgaaggtccatgtcgatcgcctgcagactctgatttcaggcgcagtagtggagcagttggacttcctgcgaatctcagatactgaggagctgccagaatttaaaagttttgaagaactggagccccctaaacatagtaaagtgaagcgccagtcatccacgccctcagctccggagctagggcagcagccagacgtgaatatttcagagtggaaggataaacccactcacgaaatcttacagaaactcaacgattgctcttgtctcgccagccaggccattcttctgggaattctgctcaagcgagagggacctaattttatcactaaggaaggaacagtgtcagaccatatcgaaagagtgtatcggcgcgctgggtcccagaaattatggctcgcagtgaggtacggcgccgcattcacacagaaattttcgagtagtatcgctccacacattactaccttcctggtccacggtaaacaagtgaccctgggtgcattcggccacgaagaagaggtgattagcaaccctctgtctccacgagtgatccagaatataatctactataagtgcaatacgcacgatgaacgtgaggctgtgatccaacaagaactggtcatccacattgggtggatcatctccaacaatccagagttgttttcaggaatgctgaaaattagaatcgggtggatcatacacgctatggaatatgagctgcaaatacgaggcggggacaagcctgcactcgacctgtaccaacttagtcctagcgaagttaagcagttactccttgatatcctgcagcctcagcagaatggccgatgttggctcaatcgtcgccaaatagacggatccctaaatcggaccccaaccgggttctacgacagagtctggcagatattagagagaacacctaacggaatcatcgtagccggaaagcatctaccacagcaacccacgcttagcgatatgactatgtatgagatgaactttagcctgcttgtcgaagataccctgggcaacatcgatcagccccaataccgccagatagtggtcgaactgctgatggtagtgagtattgtgctcgagcggaaccctgaactcgagttccaggacaaggtcgacctcgatcggctcgttaaagaggcgtttaacgagtttcagaaagatcagtctaggctcaaggagattgagaagcaagacgacatgactagcttttataacacacccccactcggcaagcgcgggacatgctcctaccttacaaaagctgtgatgaatctactgctcgagggagaagtaaagcctaacaatgacgatccatgtcttatctca

SEQ ID NO: 6294 - DNA, 3279 bp, Artificial Sequence
  derived and/or modified sequence
atggctggtgccgcggggctgactgccgaagtctcgtggaaggtgctggaaaggagggctcggacgaaacggtcaggaagtgtgtacgaaccactcaagtcaatcaatttgccgcggccggacaacgaaaccctgtgggacaaactcgaccactactacagaattgtaaagtctaccctcctgctctaccagtccccaacgaccggattgttcccgactaagacttgcggaggtgaccaaaaggcgaagatccaggatagtctctactgcgccgcaggggcatgggctctggctctggcatacaggcggattgatgacgacaaaggacggactcatgaactcgaacactccgccatcaagtgcatgagagggatcttgtactgctacatgagacaggccgacaaggtccaacagttcaagcaggacccaaggccgaccacttgtctgcacagcgtgtttaacgtccacacgggagatgaactgctgtcgtacgaggaatacggacacctgcaaatcaacgcagtctctctgtatctgctgtacctcgtcgaaatgatctcgagcggactccaaatcatatacaacaccgacgaggtcagcttcatccagaatctggtcttttgtgtggaacgagtctaccgcgtgcctgacttcggggtctgggagagaggctccaagtacaacaacggatccaccgagctgcattcgagcagcgtggggctggcgaaggccgctctggaagctatcaatggattcaatctgttcggcaatcagggatgctcgtggtcagtgatctttgtggacctcgatgcccacaaccgaaaccggcagaccctgtgctcgctgctgccgagagaaagcagaagccataataccgacgccgccctgctgccatgtatttcctacccagccttcgcactggatgatgaagtgcttttctcacagacgctggacaaagtggtgaggaagctgaaggggaaatacgggttcaaacggttcctcagagacggctacagaacttccctggaggacccaaataggtgctactacaagccagcagaaatcaagctcttcgatggaatcgaatgcgagttcccaatcttcttcctctatatgatgatcgatggagtgtttaggggaaaccccaaacaagtgcaggaataccaagacctcctgacccctgtgcttcaccatactaccgagggatacccagtcgtgccgaagtactactacgtgcctgcagatttcgtcgaatatgagaagaacaatccaggatcgcagaagagattcccgtcgaactgtggacgcgatggaaagctctttttgtggggccaagcactttacatcatcgccaagctgctggcagacgagttgatttccccaaaagacatcgacccggtacaacggtacgtgcccctgaaagaccagcggaatgtgtccatgcggttctccaaccaaggacctctggagaatgatctcgtggtgcatgtggcgctgatcgcggaatcccagagactgcaagtgttccttaatacttacggaatccagacccaaaccccacagcaggtggaacccatccagatttggcctcagcaggagcttgttaaggcgtacttgcagcttggaatcaacgagaagctcgggctttccgggcgccccgaccggccaattggctgcctcggaacttcgaagatctacaggatcctgggaaaaaccgtggtctgctacccaatcatcttcgacctgtctgacttctatatgagccaggacgtgttcctgcttatcgatgatatcaaaaacgctctgcagttcatcaagcagtactggaagatgcacggacgcccgctgttccttgtgctgatcagggaagataacatccgagggtcgcggttcaatcctattctggacatgctcgccgccctgaaaaagggaatcatcggcggcgtgaaggtgcacgtggaccgtcttcaaacgctgatctccggtgccgtcgtcgaacaactggacttcctcagaatctccgatacggaggaactgccggaattcaagtcattcgaggaactggaaccgcccaagcatagcaaagtcaagcgccaaagctcgactccttccgccccggagctgggtcagcagccggacgtgaacatatccgaatggaaggataaaccgactcacgagattctgcaaaagctgaacgactgttcgtgcctggcctcgcaagcaatcttgctcggaatcctgctgaagagagaggggccgaatttcatcaccaaagagggtactgtctcggaccacatcgagcgggtctatcgccgcgcggggagccagaagctctggctggccgtgcggtacggggcagcttttacgcagaagttttccagtagcattgcccctcacatcactacctttcttgtgcacggaaaacaggtcacgctcggcgcatttggccatgaagaagaggtgatcagcaaccctttgtcccctcgggtcatccaaaacatcatctactacaagtgcaacactcacgatgaacgcgaagccgtcattcaacaggagctggtcatccacatcggatggatcatctccaacaatcctgaactgttctcgggtatgctgaagatccgcattggatggattatccatgctatggaatacgagctgcagatcagaggcggcgacaaacctgcgttggacttgtaccagctcagcccgtcagaagtgaaacaattgcttctggatatcctgcaaccacaacaaaacgggcggtgctggcttaatcggcgccagattgatggatcactgaatcggaccccaaccgggttttatgatcgcgtgtggcagatcctcgaacgtactccgaacggaatcatcgtggcggggaagcatctgccgcaacagccgactttgagcgatatgaccatgtacgagatgaatttttcgctgctggttgaggacaccctcggaaacattgatcagccccagtaccggcaaattgtggtggagctgttgatggtggtgagcatcgtcctcgagagaaacccggagttggaatttcaagataaggtagatctcgaccggctggtgaaggaagccttcaacgagttccagaaggaccagtcccgcctgaaggagatcgaaaaacaggacgacatgaccagcttctacaacaccccgccgcttggaaagcgcggaacctgctcataccttaccaaggctgtgatgaatttgctcctcgagggggaggtgaagccgaacaacgatgacccgtgcctgatctca

SEQ ID NO: 6295 - DNA, 3279 bp, Artificial Sequence
  derived and/or modified sequence
atggcgggagcagccggactgaccgcagaggtgagctggaaggtcctcgagcgccgcgcacgcaccaaacggtccgggagcgtttatgaacctctgaagtccattaacctgcctagacccgataatgaaactctctgggataaacttgatcactactaccggatcgttaagtcgaccctgttgctttaccaatcccctaccactggtcttttcccgaccaaaacttgtggaggcgatcaaaaggctaaaatccaagactcgctttactgtgctgccggggcatgggcactggcgcttgcctaccggagaatagacgacgataagggccggactcatgaattggaacattcggcgattaagtgtatgaggggcattctgtactgctatatgagacaagcagataaggtacaacagtttaagcaagatcccagacccaccacttgccttcactcagtgttcaacgtgcatacgggtgacgagttgctttcgtacgaggaatatgggcatctgcagattaacgccgtgtcgctgtacctgctgtacctcgtggaaatgataagctctggccttcagattatctataacaccgacgaagtgtcattcatacaaaacctggtgttttgcgtggagcgcgtgtacagagtgcctgattttggggtgtgggaaaggggctcaaagtataacaacggttcgactgaacttcatagttcgtcggtcggtctggcaaaagcggcactggaggccattaacggattcaatctgtttggaaatcaggggtgcagctggtcggtgatctttgtggatctcgacgcgcacaatagaaatagacaaaccctgtgtagcttgctccctcgcgaatcccgtagccataataccgacgcagcactcctgccttgtatttcataccctgcatttgcgctcgatgatgaagtcctcttttcccagactctggataaggttgtgagaaagctgaagggaaagtacggatttaagcgatttctcagagacggatacaggacttccctggaggaccctaaccggtgctactacaagccggccgagataaaacttttcgatggcattgagtgtgaatttccaattttctttctgtacatgatgatcgatggagtgtttcgcggtaatcctaagcaagtgcaggaataccaagatctgctcacccctgtcctccatcataccacggaaggatacccagtggtgccgaagtactactatgtcccggcggatttcgtggagtacgaaaagaacaaccccggatcgcaaaagcggttccctagcaattgcggacgggatggcaagctgtttctttggggtcaagcactttacataattgcaaagctgcttgcagatgaacttatttcgccgaaggatatagatcctgttcagaggtacgtgccgctgaaagaccaacggaacgtgtcgatgaggttttcgaaccagggccccttggagaacgaccttgttgtccacgtggcgctgatcgcggaatcacagagactgcaggtgtttctgaacacctacggaattcaaactcaaacgccacaacaagtcgaacctatccaaatctggccgcagcaagagctcgtgaaggcatacctgcagctcggtatcaacgaaaagctcggactgagcggcagacccgaccgtcccataggatgtttgggaaccagcaagatctacaggattctggggaaaaccgtggtttgttaccccatcatttttgatctctcggacttctatatgtcccaagacgtctttctccttatagatgatatcaagaatgccctgcagtttatcaaacagtactggaagatgcatggaaggccactctttctggtccttatcagagaggacaatatccgcggatcgagattcaatcctattctggacatgcttgctgcattgaagaaaggaataatcggtggcgtgaaggtgcatgtggaccgactgcagacccttatctccggggcagtggtggagcagttggattttctgagaatttccgatactgaggaacttccagagttcaaatccttcgaagaactcgaaccacctaaacattccaaagttaagcgccaaagctcgaccccttctgcacccgaactggggcagcagccagatgtcaatatcagcgaatggaaggacaagccaactcacgaaattctccaaaagttgaacgactgttcgtgccttgcatcgcaagcaattctcttgggtatcctgctgaagagagagggtccaaactttatcactaaggaggggaccgtctccgatcacatcgaaagggtgtacaggcgtgctggaagccaaaaactgtggctggcggtgaggtacggagccgcttttacccagaagttctcgtcaagcattgccccacacattactactttcctggtgcatggcaaacaggtgactcttggggcattcgggcatgaggaggaagtgatttcaaaccctctgtcacccagggtaatccaaaacataatctattacaaatgtaacactcatgatgaaagagaggcggtgatccagcaggagcttgtcatccatattggttggatcatttcaaacaatccagagctgttttccggtatgctgaaaattcggattggttggattattcacgcaatggagtacgaacttcagatcaggggcggtgataaacccgcgcttgatctttaccagctttcaccatcggaagtcaagcagctccttcttgatattctgcaaccacaacagaatggaagatgttggctcaataggaggcagatcgacggatctctgaatcgcacgcccaccggattctacgacagagtctggcaaatccttgaacgcacccctaacgggataatagtcgccggtaaacacctgccacaacaaccaactctttccgatatgaccatgtacgagatgaatttctccctgcttgtggaggacacccttggaaacattgatcaaccacaataccgccaaattgtcgtcgaactgcttatggtagtcagtatcgtgctggagcgaaacccggagctcgaatttcaggataaagtggacctcgatagacttgtgaaggaagcatttaacgagtttcagaaggaccaatcaaggcttaaagaaatcgaaaagcaggatgatatgacctcgttttacaatactccaccgcttggaaaacggggtacctgtagctacctgacgaaagcagtcatgaatcttctgctcgaaggagaagtgaagcctaacaacgacgacccttgtcttatctcc

SEQ ID NO: 6296 - DNA, 3279 bp, Artificial Sequence
  derived and/or modified sequence
atggcgggagcggcaggactgacggcagaagtgtcttggaaggtcttggaacggcgggcgcgcactaagcgctcaggcagcgtttacgagccgctgaagagcatcaatctccctcggccggacaatgaaaccctctgggacaaactggatcactactacagaatcgtaaaatccacgcttcttttgtaccaaagcccgactactgggctgttcccaactaaaacttgtgggggagatcagaaagccaagatccaggactccctgtattgcgccgccggagcttgggcactcgcactggcttaccgcaggattgacgatgataaggggaggactcacgagctcgagcatagcgccataaagtgcatgcgcggcatcttgtactgttacatgcggcaagctgacaaggtgcagcaattcaagcaggaccctcgcccgactacgtgcctgcactcagtctttaacgtgcataccggagatgagctgctttcctatgaagaatacggacacctccagatcaacgcagtctccctttacctgctgtacctcgtggagatgatctcaagcggtctgcaaatcatttacaataccgacgaggtgagctttatccagaatctggtgttttgcgtcgaacgcgtgtaccgggtcccggattttggagtgtgggaacgcggatctaaatacaataatgggtcaaccgaactgcactcaagctcggtcgggttggccaaggccgccctggaggctatcaacggattcaacttgttcggcaatcagggctgctcatggtcggtgatctttgtggacctggatgcccataacagaaaccggcaaaccctctgttccctcctgccgagggagtcccgctctcacaacactgacgcggcccttctcccctgcatatcctacccagccttcgcgctggacgatgaagtcctgttctcccagaccctggacaaagttgtccgaaaactgaagggcaagtacggattcaaacgctttttgcgggacgggtaccggacttcgctggaggacccgaaccgctgctactacaagccagcagagatcaagctgttcgacgggatcgagtgtgaattccctatcttctttctgtacatgatgatcgacggagtgtttcgtgggaaccctaagcaggtgcaagagtaccaagatctcctcactcctgtcctgcaccataccaccgaggggtacccggtggtgcctaagtactactacgtccccgctgacttcgtggaatatgaaaagaataatccgggctcccaaaagagattcccgtcaaactgtggtagggacggtaaattgttcctgtggggacaggccttgtacattattgccaagctcctcgccgatgagcttatttccccgaaggatatcgatcccgttcaacggtacgtcccactcaaagaccagcggaacgtgtcgatgcgcttttcgaaccaaggccctctcgaaaacgacctggtggtgcacgtggctctcatcgccgagtcacagaggctccaagtattcctgaatacttacggaatccagactcagaccccgcaacaagtcgaacctatccaaatctggccgcagcaggaactggtgaaggcttacctgcagctgggcatcaatgaaaagttgggtctgtcgggacgcccggacagaccgatcggatgcctgggaactagcaagatctacagaattttgggaaaaactgtcgtttgctacccgattatcttcgacctctccgacttctacatgtcgcaggatgtgttcctgcttatcgatgacatcaagaacgctctgcagttcatcaagcagtactggaaaatgcatgggaggcctctgttcctggtgttgatccgggaggacaatatcagaggaagtcggttcaatcctattctcgacatgctggctgccctgaagaagggcatcattggaggtgtcaaagtgcacgtggaccggctgcagactcttatttctggtgcggtcgttgaacaactggacttcctccggatctctgataccgaagagctgccggaattcaaatcattcgaagaactcgaacctccaaagcactccaaggtgaagcgccagagcagcaccccgagcgccccagaactcgggcagcagccagatgtgaatatctcagaatggaaggataaacccactcatgagattctccaaaagctgaacgattgcagctgtctcgcgtctcaggcaatcttgctcggcatcctgcttaagcgggaaggaccaaatttcatcaccaaggaaggcaccgtttcggaccacatcgaaagagtgtatagacgagccggttcccagaaactctggctggcggtccggtacggagccgcatttactcagaagttttcaagctcaatcgccccacacatcactaccttcctggtgcatggaaagcaggtaactctgggcgcatttggacatgaggaagaagttatctcgaacccactgagcccgcgagtcattcagaacatcatctattacaagtgcaacactcacgacgagcgagaagcagtgatacaacaagaactggtgatccatatcggatggataatctccaacaatcctgaactgttttccggaatgcttaagatcaggatagggtggatcatccacgcgatggaatacgagctgcagatacgcggaggagacaagccagcactcgacctgtaccaattgagcccgtcagaagtgaagcaactgctgctggacatcctccagccgcagcagaacggaagatgttggctgaaccgtcgtcagatcgacgggtcgctcaacaggaccccgacgggattctacgaccgcgtgtggcaaatcctggagcggaccccaaatgggatcatcgtggccggcaagcatctcccgcagcaaccgaccctgtccgacatgacgatgtacgagatgaacttctcgctgttggtggaggatactctgggaaacatcgatcaaccacagtatcgccagatcgtggtggagctcctgatggtcgtctcgatcgtccttgaacgcaatcccgagctggagttccaggataaggtggatcttgatcggctcgtgaaggaggccttcaacgagttccagaaagaccagtccaggctgaaggagatcgagaagcaggacgatatgactagcttctacaatacgccaccccttggaaaacgcggcacctgctcgtacctgaccaaagcggtcatgaacctgctgttggaaggtgaggtgaagccgaacaacgatgacccatgcttgatcagc

SEQ ID NO: 6297 - DNA, 3279 bp, Artificial Sequence
  derived and/or modified sequence
atggctggcgcagcagggttgaccgctgaagtctcttggaaggtgctcgaacgcagggctcgtactaaacgcagcgggtcggtatatgagccactgaagtcgattaacctcccccgaccggataatgagactctttgggacaagcttgatcattattacagaatcgtcaaatccacccttctgttgtatcaatctcctaccaccggactttttccaacgaaaacctgtggtggtgatcaaaaggccaagattcaagattccctgtattgcgctgccggcgcttgggccctggcgctggcgtaccggcgtatagatgacgacaaagggaggacgcatgaattagaacactctgccatcaagtgtatgcgcggtatcctctattgttatatgcggcaggctgataaggtgcagcagtttaagcaggaccctagaccaacaacctgcctgcacagcgtctttaacgtacatacgggcgacgagttactcagctacgaagagtacggccatcttcagatcaatgccgtgtccctctacttgttatatctcgtggagatgatctcgagcggactgcagatcatctataatacggatgaagtgagcttcatccagaatctggttttttgcgtggaaagggtataccgggtgcccgatttcggcgtttgggaacgtggcagcaagtacaacaacggcagcaccgagctgcactcaagctcagttgggttagccaaagccgccttggaggccataaatgggtttaacctctttggaaatcagggttgttcctggtctgttatcttcgttgacctagacgctcacaaccgaaataggcagactctttgctccctcctaccaagggagtcccggtcccacaacactgatgcagccctgcttccctgcatcagctatcctgccttcgcgttagacgacgaagtgctattctctcaaaccctggacaaggtggtgagaaaactcaagggaaagtacggtttcaaacgctttctgcgggatgggtaccggaccagcctcgaagaccccaatcgctgttactacaagcccgcagaaatcaaactctttgatggcatagagtgcgagtttcccatatttttcctctacatgatgatagatggagtttttcgggggaatcctaaacaggttcaagagtatcaggatctgcttaccccagtgttacatcacactaccgagggatatcctgtggtcccaaagtactattacgtgccggcggactttgtagaatatgagaagaacaatcctggttcacaaaagcggttcccgtccaactgcgggagagacggaaaactgtttctgtggggccaggctctgtatatcatagccaagctgttggcagacgaacttatttctccaaaagacatcgacccagtgcagaggtatgtacctctgaaggatcagcgcaacgtgtccatgcgcttcagtaaccaggggcccctggagaacgatcttgtggtccatgttgctctaatcgcggagagtcagcgattacaagttttcctgaacacctatggtattcagactcagactccccagcaggtggagccgatacagatctggccacagcaggaacttgttaaagcctatctgcagctgggtatcaacgagaagctgggtctgtcggggagaccagacaggcctataggctgtctgggcacatcaaagatctatcggatactcgggaaaacagtggtgtgctacccaatcatcttcgacctgtctgacttctacatgagccaagacgtgtttttgctgattgatgatattaaaaatgcactgcagtttataaagcagtactggaaaatgcacggacgacccctgttcctggttttgatcagggaggacaacatccggggaagtcgatttaatcctattctagatatgctggctgcgcttaagaaggggataataggcggggtgaaggtgcatgtggaccgcttgcagacactgatttctggagcagtggtcgaacagcttgacttcctgcgcattagcgatactgaggaacttcccgagtttaagagctttgaggagttggaaccgcccaagcactctaaggttaaacggcagagctctacaccttcagcccccgagcttggtcagcagcccgatgtcaacatttccgagtggaaggacaaacctacacacgagatacttcagaagctgaatgattgcagctgcctggcctcccaagcaatcttattgggcatattgctcaaacgcgaaggccctaacttcattaccaaggaaggcacggtgtcagaccacatcgagcgagtctacagacgtgctggaagccaaaagctctggctggctgttaggtacggtgctgcatttacccagaagttctcgtcaagcatagccccacatataaccacattcctcgtccatggtaagcaggtgacactgggagcctttggacatgaagaagaagtgatctccaatccgctgtccccacgggtcatccagaatatcatatactataaatgcaacacccacgacgagcgggaggccgttattcagcaagagttggtcattcacattggatggatcatcagtaacaaccccgagctgttctcaggaatgctcaagatccgtatagggtggattatacacgcaatggagtacgaactgcagatacggggcggggataagcccgccctcgatttgtatcagctgtctccatccgaagtgaagcaactgctgctcgacatattgcagccccagcagaatgggaggtgttggctcaatcgcaggcagatcgacggttccctgaatcgtacccctacgggtttctacgaccgtgtttggcagattctggaacggacaccaaatggcatcatcgtggcaggaaaacatctgcctcagcagcccaccctctccgatatgacaatgtacgagatgaatttcagcctgctggtggaagacacgttaggaaacatcgaccagccccagtatcggcagattgtggtcgagttgctcatggttgtttctattgtgctggagagaaatcctgaattggagtttcaagacaaggtggatctggaccgcctggtgaaggaggcctttaacgagtttcagaaggatcagagccgtctcaaggaaatcgagaaacaggacgacatgacctcattttataatacgccccccctggggaaaagagggacctgctcatacttaacaaaggctgtgatgaatctcctgctcgagggtgaggtgaagcctaataatgatgacccgtgcctaatctct

SEQ ID NO: 6298 - DNA, 3279 bp, Artificial Sequence
  derived and/or modified sequence
atggctggggccgccggcttgacggcggaagtgtcttggaaagtcctggagagacgggcccgcaccaaaagatctggatccgtgtacgaacccctcaagtcaatcaatctgccgcgccccgacaatgagactctctgggacaaactggatcattactacagaatcgtgaagtcgactctgctgctgtaccagtccccgaccaccggactcttcccgacgaaaacttgcggaggtgaccaaaaagcgaagatccaagattccctgtactgcgccgccggcgcctgggcactggcccttgcctacagaaggatagacgatgacaagggcagaacccatgagcttgagcactcggcgatcaagtgcatgcggggaatcctgtactgctacatgcgccaggctgacaaagtccaacagttcaaacaagacccgcgaccgactacgtgccttcatagcgtgtttaatgtgcataccggcgatgaactgctctcttacgaagagtacgggcacctgcagatcaatgccgtgtccctgtatcttctctatctggtggaaatgatctcatcgggattgcagatcatttacaacactgacgaggtgtcattcatccagaacctcgtgttctgcgtcgaacgggtgtatagagtgcctgactttggagtgtgggagcgggggagcaagtacaacaatggtagcaccgagctgcactcctcctcagtggggctcgcaaaggctgcattggaagccatcaacggattcaatctgttcggaaaccaaggctgttcttggtccgtgatctttgtcgacctggacgctcataaccgcaaccggcagactctgtgttcgctgctgccgcgcgagagcagaagccacaacaccgatgcagcactgctcccgtgcatcagttacccggcctttgcactggacgacgaggttctgttctcccaaaccctcgacaaggttgtccgcaagctgaaaggaaaatacggattcaagcggtttctgcgggacggttatcggacctccctggaggatccaaatagatgctactacaagccggcagaaatcaaattgttcgacggcattgagtgcgagtttcccatcttcttcctgtacatgatgatcgacggggtgtttcggggaaacccgaagcaggtgcaggaataccaggacctgctgactcctgtcctgcaccataccactgagggatacccagtcgtgccaaagtattactacgtgccagcagacttcgtggaatacgaaaagaacaacccgggatcgcaaaagcgcttcccttctaactgcggaagagatggaaagctgttcctgtggggacaggccctgtacataatcgccaaactgcttgccgacgagcttatctcaccgaaggatatcgacccggtgcaaaggtacgtcccactcaaagaccagcgcaatgtgtcgatgcgcttctccaatcagggcccgctcgagaatgacctggtggtccacgtggccttgatcgcagaatcgcagagactgcaagtgttcctcaacacttacggcatccagactcagacgccccagcaggtcgagcctattcaaatctggccgcaacaagaactggtcaaggcgtacctgcaactgggaatcaacgaaaagctgggcctgagcggacgaccggacagaccaatcggatgtctcggcacttcgaagatctacagaattctgggaaagaccgtggtgtgttatcccatcatcttcgacctgtcagatttctacatgtcacaagatgtgttcctgcttatcgacgatatcaagaatgctctccaattcattaagcagtactggaagatgcatggacggcctttgttcctggtccttatccgagaggataacatcaggggatcgcgcttcaatccaatcctggatatgctggccgctcttaagaaggggattatcggaggggtgaaggtgcatgtggatagactccaaaccctgatctctggcgcggtggtggaacagctcgacttcctgaggatctcagataccgaggagctgccagaattcaaatcgttcgaggaattggagccgccgaaacactccaaggtgaagaggcaatcaagcactccctcggcgcctgagctgggacagcagcctgatgtcaatatctccgaatggaaggacaagccaactcacgaaattctccagaagctgaacgattgttcctgcctggcttcacaggcaatcctgctggggatactgttgaaacgggaaggtcctaacttcataactaaggaaggaacggtgtcggaccacatcgagcgcgtgtacagaagagccggttcacaaaagctgtggctggctgtccgctatggagccgcgtttacccagaagtttagctcaagcatcgccccacatatcactacctttcttgtgcacggtaaacaagtgactctgggcgcgtttggacatgaagaagaggtcatctcgaaccccctttcccctagggtgattcagaatatcatctactacaaatgcaacactcatgacgaaagagaagccgttatccagcaggagcttgtgatccacatcggatggattatctccaacaacccagagctgttctccggcatgcttaagatccggatcggttggatcatccacgcaatggaatacgaactgcagatccgcggaggtgacaagccggcgctggacctgtaccagctctccccgtcagaagtgaagcagctcctgttggacatcctgcaaccgcaacagaatggacggtgctggttgaaccggagacagatcgatggctccctgaatagaacccccaccggattctacgacagggtgtggcagatcctcgaacgcacgccgaatggcatcatcgtggctggcaaacacctgccgcagcagcctaccctgtctgatatgacgatgtacgaaatgaatttcagcctcctggtggaggataccctggggaacatcgaccagccgcaataccgccagatcgtggtggagctcctgatggtggtttcaattgtgctggaacggaaccctgagcttgaatttcaagataaggtggacctcgaccgcctggtgaaggaggctttcaacgagtttcaaaaggatcaaagccggctgaaggaaattgaaaagcaggatgacatgacctcgttctacaacacccctccgttggggaagcgcggaacttgcagctacctgactaaagccgtgatgaatctgctcttggagggagaagtgaagccgaacaacgatgacccatgcctgatctct

SEQ ID NO: 6299 - DNA, 3279 bp, Artificial Sequence
  derived and/or modified sequence
atggcaggagcagcgggacttaccgcagaggtgtcatggaaagtgcttgaacggcgggcaagaactaagagatcagggtcggtgtacgagcctctcaaatccattaacctcccaagaccagataacgaaaccctttgggataaactggatcactactaccgtatcgtgaagtcgactctcctgctctaccaaagccctaccacgggactctttcctaccaaaacctgcggcggcgaccaaaaagcaaagatacaggattcactttactgtgcagcaggagcgtgggccctcgccctggcgtaccggcggattgacgatgataagggcagaacccacgaacttgaacattccgccatcaaatgtatgagaggcattctctactgttatatgagacaggcggacaaggtgcaacagtttaagcaggatcctaggccaaccacctgtctccattcagtgttcaacgtccataccggcgacgagttgctgtcgtacgaggaatacggtcatctgcagataaacgcggtgtccctttaccttctgtacctggtcgaaatgatatcgtcaggacttcaaatcatttacaacactgatgaagtcagcttcattcagaatcttgtcttttgtgtcgaaagggtgtatcgggtgcctgatttcggcgtctgggagcgggggtcaaagtacaataacggcagcactgagctgcattcttcctcggtgggacttgcaaaggcagcgcttgaggcaattaacgggtttaacctttttggaaatcagggatgttcatggtccgttatctttgtggatcttgatgcacataatcggaataggcaaactctgtgttccctgctccccagagagagccgttcgcacaataccgacgcagccctgctgccatgtatttcgtacccagcctttgcacttgatgacgaggtgcttttctcacaaaccctcgacaaggtggtgagaaaactgaaagggaagtacggattcaagcgattcctgcgggatggatatcggacctcactggaggaccccaaccgttgctactacaagccagctgagattaaactgtttgacggcatcgagtgcgaattcccaatcttctttctctacatgatgattgacggggtctttcgtggaaatccaaaacaagttcaagaataccaggaccttctcaccccagtgctccaccacaccactgaaggatacccagtcgtgcccaagtactactacgtgcccgcggactttgtggaatacgaaaagaacaatcctggatcccagaagcgctttccatctaattgtggacgtgatggaaaactttttctgtggggacaggctctttacatcatcgcaaaactgctcgctgacgaactcatttcccccaaggacattgacccagtgcaaagatacgtcccccttaaggatcagagaaacgtgagcatgcgattttcaaatcagggtcctctggaaaatgatctcgtcgtccacgtggcccttattgccgagtcgcaacgactgcaggtgttcctcaatacttacggcatacaaacgcaaactccacaacaggtcgaaccaatccagatatggccgcagcaggaattggttaaagcatacctccaacttggaattaacgaaaagttggggttgtcgggaaggcctgatcggcctatcggttgccttggtacttctaagatctaccgaatactgggtaagactgtcgtgtgctaccctatcatatttgatctttccgacttctacatgtcacaagatgtctttcttctgattgatgatatcaagaatgccctgcaattcattaagcagtattggaaaatgcacggacggccactttttcttgtgcttatacgggaagataacatcagaggttcgcgctttaatccaatcctcgacatgcttgcagctctcaaaaagggaataatcggcggtgtgaaggtccatgtggatcgccttcaaacgctcatttcgggggcagtggtcgaacaactggattttctcaggatttcagatactgaggaattgccggaattcaagtcgttcgaagaactcgaacctccaaagcatagcaaggtgaaaagacaatctagcactccttcagctcccgaactgggtcagcaaccggacgtaaacatttctgaatggaaggacaagccaacccatgaaattctgcaaaagctgaatgattgttcctgtcttgcgtcgcaagcaattctgcttggtattctcctcaagagggaagggccaaacttcatcacgaaagagggaactgtttccgatcatattgaacgagtgtaccgcagggccggttcgcagaagctgtggcttgcagtgcgatacggagcggcctttactcagaagtttagctcatcgatcgctccacatatcaccacttttcttgtgcatggtaaacaagttactctcggtgctttcggacatgaagaagaggtgatctcgaacccactgtcgcctcgggttattcaaaacatcatttactacaagtgcaatactcatgacgaacgtgaagccgtgattcagcaagagctcgttatccatatcgggtggataatctcgaataaccctgaactcttttctggcatgctgaaaattcggattgggtggataattcacgcaatggaatacgagttgcaaatccgaggtggcgataagccagcactcgatctgtaccaactttctccatccgaagtgaagcagctcctgctggatattcttcagcctcagcaaaacggacgatgttggctgaaccgcagacaaatcgacggttcccttaaccggaccccgactggattctatgaccgcgtgtggcagatccttgagcgaactccaaacggaattatcgtcgcaggtaagcacctcccgcagcagcctaccctgagcgacatgactatgtacgagatgaacttttcgcttctggtagaggataccctggggaacatcgatcaacctcaatacagacagatagtggttgaactgctgatggtcgtatcaatcgtgctcgaacgcaatccagagttggagttccaggataaggtggatctcgatagacttgtcaaagaggcatttaacgagtttcaaaaagatcaatcgaggcttaaggaaatcgaaaagcaagacgacatgacgtcattttacaacacgcccccgctgggcaagcgcgggacttgcagctatctgaccaaggccgtcatgaaccttctgctggagggcgaagtgaagcctaacaacgatgatccatgtcttatttcc

SEQ ID NO: 6300 - DNA, 3279 bp, Artificial Sequence
  derived and/or modified sequence
atggccggagcagccggattaacggcagaggtgtcttggaaggtccttgaaagaagggctcgaactaaacggtccggctcagtctacgagccgcttaagtccatcaacctcccccgacctgataacgaaactctgtgggataagctagaccactattacaggattgttaaaagcacactgctcctctaccaaagccctaccacgggcctgtttcccaccaaaacatgcggcggcgatcagaaagctaagatccaggactccctgtactgcgcagccggggcatgggcccttgcactcgcttaccgcagaattgacgatgacaagggtcgtactcatgaacttgaacacagcgccattaaatgcatgaggggaattttatactgttacatgcggcaggctgataaagtgcagcagttcaaacaggacccaaggcctactacgtgtctccactcggtgttcaacgtgcacacgggagatgaactgttgtcatatgaggagtacgggcacctgcagataaacgccgtatctctgtatcttttgtatctcgtggagatgatcagtagtgggctccaaatcatttacaacaccgacgaggtgtctttcatccagaatttggtcttctgtgtagaaagggtgtaccgggtgcccgactttggcgtgtgggaacgcggatcaaaatacaataacggctcaactgaactgcacagttcatccgtagggctggcaaaagccgccttggaagctataaacggcttcaacctgttcggtaaccagggttgttcatggagcgtgatttttgtggacctcgatgcgcataataggaaccgtcagaccctttgctccttgctgcccagagagagccgttcacataatactgacgctgccctcctgccttgcatctcatacccagcctttgccctggacgacgaagttctctttagtcagactttagataaagtagtgagaaaactcaagggcaagtatggcttcaagcgctttctacgcgacggttacagaacctccctcgaggatcctaacaggtgttactacaaacccgcagagataaagttgttcgatggcatagagtgcgagtttcctatcttctttctttatatgatgatagatggggtgttccgtggtaatccaaagcaggtgcaggaatatcaagacctcctgacccccgtcctccaccatacaacagagggctatccggttgttcccaaatattattacgtgcccgcggattttgttgaatatgaaaaaaataacccgggttcacaaaagcgcttcccgtcaaactgcgggcgcgatggcaaactctttctttggggacaggcactctatattatcgcaaaactcctggctgatgaactgatatctcctaaagacatcgatccggtacaacggtacgtgccgctgaaagaccagcgcaacgtttcgatgcgtttctccaatcaggggcctttggaaaacgacctggtggtccacgtagctttaatcgctgagagccagcgattgcaagtgttcttaaatacatatggtatacagacgcagacacctcagcaggtcgaaccgatacagatctggccccagcaggagctggtcaaggcgtatctgcagttgggaattaatgagaaattgggattgtctggccgcccggacagacctatcggctgccttggaacaagcaagatctaccgaattcttggcaaaacagtcgtgtgttaccccataatctttgacctgagcgatttttacatgtcacaggacgtgttccttctgatcgatgacatcaaaaacgctttacagttcatcaagcagtactggaagatgcacgggaggcccctgtttcttgtactgattagagaggacaacatcagaggttcccggttcaatcccattctggatatgctagccgcactaaagaaggggatcatcggtggcgttaaagttcatgttgaccgtcttcagaccctgatcagcggagctgtcgtggaacagctcgatttcctgagaatcagtgacaccgaggagttgccggaatttaaaagttttgaagagcttgagccccctaagcactccaaagtgaagcgccaatcaagcactccctcggcccctgagttgggacagcagccagacgtgaatatatccgaatggaaggacaagccgacccatgaaatcttacagaagctgaacgactgctcttgcctggcatctcaagccatactgctcggtatactgctgaaacgggaagggcccaactttattacaaaagagggtactgtgagcgaccacatcgagagggtctaccgcagagccggaagtcaaaagctgtggctggctgtaagatacggggcggcctttacacagaagttcagcagcagtattgctcctcatattacaactttcttggtgcacggcaagcaggtgaccttgggagccttcggacatgaggaagaggtgatatctaatccgttgagccctcgtgttattcagaacatcatttattataagtgtaatacgcatgatgaacgcgaggccgtcattcagcaggaactcgtcattcacatagggtggattatctcaaataatcctgaattattcagcgggatgctgaagatccggataggctggatcattcatgcgatggaatacgagttgcaaatccggggcggtgataagcctgccttggatctgtaccagcttagccccagcgaggtgaagcaattgttactggacatactgcagccccagcagaatggcaggtgctggctaaaccgtcgacagattgacgggagtctcaacaggacgcccaccggattttatgatagagtgtggcagattctagaaaggactcctaatgggatcattgttgccggaaagcacctcccgcagcagccaaccctgagcgatatgacaatgtatgagatgaacttttcccttttggtggaggacacgcttggcaacatcgatcagcctcagtatcgacagattgtggtcgaactcctcatggtggtctcaattgtcctggaacgcaatcctgaacttgaattccaagataaggtggatttggatcgcctggtgaaagaggctttcaacgaatttcagaaggatcagtcccgcctaaaggaaatcgagaagcaggacgatatgacatccttttacaataccccacctttgggaaaacgaggaacttgttcatatttgactaaggccgtaatgaacttattgctggaaggagaagtgaagcccaacaatgacgatccttgcctgatttct

SEQ ID NO: 6301 - DNA, 3279 bp, Artificial Sequence
  derived and/or modified sequence
atggcaggagcagccggactgactgcggaagtgtcgtggaaggtgctggagagaagagctagaaccaagcggtccggatcggtgtacgaacccctcaaatccataaaccttccaagacccgataacgaaaccctttgggataagctggatcattactaccgtattgtgaaatcgaccctcctcctttaccaatcgccaaccaccggtctgttccccaccaaaacgtgtggaggagatcaaaaggctaagattcaagactcactgtactgtgccgcaggtgcatgggcgctggcccttgcctatcggcgaatagatgatgataagggtaggacccatgagcttgaacattctgcaattaagtgtatgagaggtatcctctactgctacatgcgacaggccgacaaggtgcaacagtttaagcaagaccctagacctactacctgccttcattccgtgttcaacgtgcatacgggagacgagctgctgagctacgaagaatacggacaccttcagatcaacgccgtctccctttacttgctgtacctcgtggaaatgatcagctcggggcttcagataatctacaacaccgatgaagtgtcgtttattcaaaatcttgtgttttgcgtggagcgggtctaccgcgtgccagacttcggtgtgtgggagaggggttcgaagtacaacaatggatcgaccgaactccactcaagctctgtcggactggcaaaagcagccctcgaggcgatcaacggatttaaccttttcggaaatcagggctgctcctggtccgtgatttttgtggacttggacgcccataatcggaacagacagactctctgttcccttcttccacgggaatctcgttcgcataatactgacgcagccctcctcccatgcattagctaccctgccttcgcactggatgatgaggtgctgttttcgcaaacccttgacaaggtcgtccggaaacttaagggaaagtacgggttcaagagattcctgcgtgatggataccggacctcattggaggatccaaacagatgttactataagccagcggaaatcaagctgtttgatgggattgaatgtgagtttcccatctttttcctctacatgatgattgacggtgtctttaggggcaaccctaaacaagtgcaggaataccaagacctcttgacccctgtgttgcatcacaccaccgaaggatacccagtggtccccaaatactactacgtgccagcagattttgtggaatacgaaaagaacaaccctggatctcaaaagcgctttccttcgaactgtggccgcgatggcaagctgttcttgtggggacaggctctgtacatcattgcgaagttgcttgcagacgaactgatttcaccaaaggatattgaccctgtgcagcggtacgtgccacttaaagaccaaagaaatgtcagcatgcgcttctccaatcaaggcccactggagaacgatctggtggttcatgtcgctctgatcgcagaatcccaacggcttcaggtgtttctgaatacctacgggatacaaacccagacgccacaacaggtggaaccaatccaaatctggccccagcaagaacttgtgaaggcatatcttcagctgggcattaatgagaagttgggactctccggacgcccagacaggcctatcggatgccttggaacctcaaaaatctaccggatactggggaaaacggtggtctgttatccaatcatttttgacctctcagacttttacatgagccaggacgtatttctcttgattgatgacatcaagaacgcgctgcagtttatcaaacagtactggaagatgcacggtaggcctcttttcctcgtccttattagagaggataacatcagggggtcccgatttaaccctattcttgatatgctggcagcattgaaaaagggtatcatcggaggcgtcaaagtgcacgtggacaggcttcaaactctgatctcaggcgccgtggtcgaacagctggactttcttagaatttccgataccgaagaactgccagaattcaagtccttcgaagaacttgagcctcctaagcactcgaaggtgaaacggcaaagctcgactccatctgcccctgaactcggacaacaacctgatgtgaacatctcagaatggaaggataagcctacccacgaaattcttcagaagctgaacgattgttcctgtctggcatcccaagcaatactccttggtattctgctcaagcgggaaggccctaacttcattactaaggagggcactgtgtcagaccacatcgaacgcgtctacagacgggcggggtcgcagaagctctggctggccgtccgctacggcgcagcattcacgcaaaagtttagttcctcgattgcgccgcatattaccacctttctcgttcatggcaagcaggtgacgttgggagcattcggacatgaggaagaagtgatcagcaatccacttagccctcgcgtgatccagaacatcatttactacaagtgtaatacccatgatgaaagagaggcagtgatccagcaggaactggtcattcacatcggttggattatcagcaacaaccccgaacttttttcaggaatgctgaagattagaatcggatggatcatccatgcgatggagtacgaacttcaaatcagaggaggggacaagccggccctggatttgtaccaactgtcacctagcgaagtgaagcaacttctgctggatattctccaacctcaacaaaacgggcgttgctggctcaatcgtagacaaattgacggttcgcttaatagaaccccaactggcttttacgatcgcgtgtggcagattctggaaaggacgccaaatggtatcattgtggcagggaagcatcttcctcaacagcctacgctttccgatatgaccatgtacgagatgaacttttctcttttggtcgaagatacccttggaaacatcgatcagcctcaatacagacaaatcgtggtggaactcctgatggtcgtcagcattgtcctggagagaaacccagagcttgaattccaagacaaggtcgacctcgatcgcctggtgaaagaagccttcaatgagttccaaaaggatcaatcgcgccttaaggaaattgaaaaacaggatgatatgaccagtttttacaacactccacctctcggcaagaggggtacgtgttcgtacctcaccaaggcagtgatgaacttgttgctcgagggcgaagtcaagccgaacaacgatgatccatgtctgatttcc

SEQ ID NO: 6302 - DNA, 3279 bp, Artificial Sequence
  derived and/or modified sequence
atggctggagccgcgggactcactgccgaagtgtcctggaaggtcctggaacggagagcaagaaccaaacgttcaggctccgtgtacgaaccgctgaagtcgatcaacctgccgcgccccgataacgagactctctgggacaagctggaccactactaccgcattgtcaagagcaccctgttgctctaccagtccccgaccaccggtctgtttccgaccaaaacttgcggaggcgaccaaaaggccaagatccaggactcactgtattgtgcagcgggcgcgtgggctctggccctggcttacaggcgcattgatgatgacaagggacgcacccatgagcttgagcattccgccatcaaatgcatgcgaggtatcttgtattgctacatgagacaggcagacaaagtccagcagttcaagcaagacccgcgcccgaccacctgccttcactcggtgttcaatgtgcataccggagatgaactgcttagctacgaagaatacgggcatttgcagatcaatgctgtgtccttgtacctgctctacctggtcgaaatgatttcctctggcttgcagatcatctataacaccgatgaggtttcgttcatccagaacctggttttctgcgtggagcgggtctaccgcgtgccggatttcggagtgtgggagcgcggtagcaagtacaacaatggatcaaccgaactgcactcgagctccgtgggcttggccaaggcggcactcgaagctatcaacggattcaacctgttcggcaatcaaggatgctcgtggtccgtcatctttgtcgaccttgacgcccataaccggaacagacagaccctttgctcgctcctcccgagagaatcgcgcagccacaataccgacgccgccctgctgccttgcatttcgtacccagccttcgctcttgatgatgaagtgctcttttcgcagactctcgacaaggtggttaggaaactcaaggggaagtacggctttaagaggttcttgcgggacggttaccgcacttccctggaggacccaaaccggtgttactacaaaccagccgaaatcaagttgttcgacgggatcgagtgcgagttccccatcttctttctgtacatgatgatcgatggggtgttccggggaaatcctaagcaggtccaggagtatcaggatctgctcaccccagtgcttcaccataccactgaaggctaccccgtggtgccgaagtactactacgtgcccgcggatttcgtggaatacgaaaagaacaatcccggctcccagaagcggttcccgtcgaattgcggccgggatggaaaattgttcctgtggggacaggcactgtacatcatcgccaagctgctggccgacgagcttatttcgccgaaggatatcgatccagtgcagagatacgtgccgctgaaggatcagaggaacgtgtcgatgaggttttcgaatcaggggcctctggaaaatgacctggtggtccatgtggcccttattgcggaatcccagcggctgcaagtgttcttgaacacttacggaatccagacccagaccccgcagcaagtggaaccgattcagatttggccgcagcaggagctcgtgaaggcatacctccagctgggaattaacgaaaaactcgggctttcgggccgcccggatcgccctattgggtgtcttggaacctcgaagatttacagaatcctcggaaagactgtggtctgctatccaattatctttgacctgtccgatttctacatgtcacaggatgtctttctcctcattgatgacatcaagaatgccctgcagttcatcaaacagtactggaaaatgcatggcaggccactgttcctggtcctgatccgcgaggacaacatccgcggatccaggtttaacccgatcctggatatgctggccgcactgaagaaaggcatcatcggaggggtcaaggtgcacgtggaccggttgcagaccctgatctccggagcagtggtggaacaactggacttccttcgcatctccgacacggaagaactcccggaattcaagtcattcgaagaactcgaaccgccgaagcattcgaaggtcaagcgccaatcctcaaccccgagcgctccggaactgggtcagcagccggatgttaacataagcgaatggaaggataaaccgacccacgaaatcctccagaagctcaacgattgctcatgtctggccagccaggcaatcctgctgggaatcctcttgaagcgcgagggaccgaatttcattactaaggaaggcactgtctcggaccatatcgagcgcgtgtaccgcagagcggggtcacagaagctctggttggccgtgagatacggagcagccttcactcagaagttcagctcaagcatcgcaccgcacatcactactttcctggtccacggaaaacaggtgacgctgggggccttcggacatgaagaggaggtcatctccaaccccttgtcaccacgcgtgatccaaaacatcatttactacaagtgcaacacccacgatgaacgggaagcggtgatccaacaggaactcgtgatacatattggctggatcatctccaacaatccggaactgttttcaggaatgttgaagatccgcatcggctggatcattcacgctatggaatacgaactgcagatccggggaggtgataagcctgcgctcgacctgtaccagctgtcgccgagtgaagtgaagcaattgctcctggacatcctccaacctcagcaaaacggccggtgctggctgaatagacgccagattgatggatcgctgaatagaactccaaccggattctacgaccgcgtgtggcaaatcctggaaagaacccctaacggcattatcgtggctggcaagcacctgccgcagcaaccgacgctctccgacatgacgatgtacgagatgaatttctccctcctggtggaagatactttgggaaatatcgatcagcctcagtacaggcagattgtggttgagctccttatggtggtgagcatcgtgctggagaggaaccccgagctggagttccaggacaaggtggacctggaccggcttgtgaaggaggcatttaacgaattccagaaagaccagagccggttgaaggaaatcgaaaagcaggacgatatgaccagcttctacaacactcctccgctgggaaaacgcggtacttgctcatatttgaccaaggcggtcatgaacctgctgctcgaaggagaagtgaaacctaacaatgatgatccgtgcctgatctcc

SEQ ID NO: 6303 - DNA, 3279 bp, Artificial Sequence
  derived and/or modified sequence
atggccggggccgccggactgaccgcggaagtgtcgtggaaagtactggaacggagagcgcggaccaaacgatcgggatcggtgtacgagccactcaaatccatcaatcttcctagaccggacaatgagacgctctgggacaagctcgaccattactaccgcatagtgaagtcgactctgctgctgtaccagagcccgaccactggactgtttccaactaagacttgcggtggcgaccagaaagcaaagatccaggactcgttgtactgcgctgcgggcgcatgggccctggccctcgcgtaccggcgcatcgacgacgacaagggcaggacccacgagctggaacacagcgcgatcaagtgcatgcgcggaatcctctactgctacatgcgccaggcggataaagtgcagcaattcaagcaagatccacggccaaccacttgcttgcactctgtgttcaacgttcacaccggagatgaactcctgagctacgaggagtacggacatctccagattaacgccgtctctctgtatctgctctaccttgtggagatgatctcttctggtttgcaaatcatctataacaccgatgaggtgagctttattcagaacctcgtcttttgtgtggaacgggtgtaccgggtgccggacttcggcgtttgggaacggggaagcaagtacaataatggaagcaccgaactgcattcatcgtcggttggacttgccaaggcagccctggaggccatcaacggtttcaacctgttcgggaaccagggttgtagttggtccgtgattttcgtggacctggatgctcataatcgtaaccggcagactttgtgcagcctgctgccgcgggagagccggtcacacaatactgatgccgcgctcctgccatgcatcagctaccctgcattcgcactggacgatgaggtgctgttcagccaaactttggataaggttgtgagaaagctcaaggggaagtacggctttaaacgcttcctcagggatggatatcggacctccttggaggaccccaaccggtgttactacaaacctgcggagatcaagctgttcgacggcatcgagtgcgagtttccaatcttcttcttgtatatgatgatcgacggcgtgttccggggcaacccgaagcaggtgcaggaataccaagatctcctgaccccagtcctgcaccacaccaccgaaggatacccggtagtcccgaagtactactacgtgcccgctgacttcgtggagtacgaaaagaataacccagggtcgcaaaagcggtttccttccaactgcggacgcgatggtaaactgtttctctggggccaggcgctgtacatcattgccaagctgctggcagatgaactcatctccccgaaggacatcgaccctgtgcaacgctacgtcccactgaaggaccagcgcaatgtgtcgatgcgttttagcaatcagggccccctggagaacgatctcgttgtgcacgtggcgcttattgcagagagccaacggcttcaggtatttctgaacacttacggcatccagactcaaacgcctcagcaggtggagcccatccagatctggccacaacaggaactggtcaaggcctacctgcagctcggaatcaacgaaaaactgggcttgtccgggaggccggacagaccaatcggatgcctgggaacgagcaagatttaccgcattttgggaaagacggtggtgtgctacccgattatcttcgacctctcggatttctatatgtcacaggatgtattcctgttgatcgacgacatcaagaatgccctgcagttcattaaacagtactggaaaatgcacgggcggccactctttttggtcctcatcagggaggacaacatccgcggttcccgcttcaatccgatcctggatatgctcgccgcgttgaagaagggtatcattggaggagtgaaagtgcacgtggacagactgcaaaccctgatcagcggcgccgtggtcgaacaacttgactttctgaggatctccgacactgaggagttgcccgagttcaaatcgttcgaagaactcgaaccacctaagcatagcaaggttaaacggcaatcctcgactccttcggccccggagctcggacaacaaccagatgtgaacatttctgaatggaaggataagcctacccatgaaattctgcagaagctcaacgattgttcctgtctggcttcgcaagcgatcttgctggggatcctgctgaaacgggaaggaccgaacttcatcaccaaagagggaactgtgagcgaccacatagagcgggtgtaccgccgagcaggcagtcaaaaactgtggcttgccgtccggtacggtgccgccttcacccagaaattctcttcatcaattgccccccacatcaccaccttcctggtccacggtaagcaggtgactctgggggccttcggacatgaagaggaagtcatctccaacccgctttcccctcgcgtgattcagaatatcatctactacaagtgcaacacgcatgacgaacgggaagccgtcatccagcaagaactggtgatccatatcggctggatcatctccaacaacccagagctcttctccggtatgttgaagatcagaatcggatggattatccacgccatggaatacgagctgcaaatccgcggcggagacaaaccagcccttgacctgtaccagctgtcaccgtcagaggtgaagcagctgctgctggacatcctccagccccagcagaacggacggtgttggctgaataggcgccaaatcgacggatcgctgaaccgcaccccaactggattctacgatcgagtgtggcaaatcctggaaagaactcctaacgggatcatcgtcgcgggaaagcatttgcctcaacagccgaccctgtcagatatgacgatgtacgaaatgaatttctcgctgctcgttgaagataccctcggaaacatcgatcaaccgcagtaccggcagatcgtggtggagctgctgatggtcgtgtcgatcgtgctcgaacgaaatcccgagctggaatttcaggataaggtcgacctcgatcggctggtgaaggaggcattcaatgaattccaaaaggatcaatcacgactcaaagaaatcgaaaagcaggatgacatgaccagcttctataacactccgccgctcggaaagagaggtacttgctcgtacctcaccaaagctgtcatgaatctgctgctggaaggagaagtcaagccgaacaacgacgatccctgcctcatttca

SEQ ID NO: 6304 - DNA, 3279 bp, Artificial Sequence
  derived and/or modified sequence
atggcaggggcggcaggacttactgccgaagtctcgtggaaagtgctcgaacgcagagcccgcactaagagatccggcagcgtctacgaacccctcaaatcaattaacctcccccgcccggacaacgaaaccctctgggataaacttgaccattactacagaatcgtgaagtcgactttgctgctgtaccagagcccaactaccggcctgttcccaactaagacttgtggcggggaccagaaagcgaagattcaggactcgctgtactgcgcagctggcgcatgggccctggcgctggcctacagaaggatcgatgacgacaagggacgaacccacgaacttgagcacagcgcaattaagtgcatgcggggcatcctctactgctacatgcgtcaggcagacaaggtgcagcaattcaaacaagaccccaggccaaccacgtgcctgcattcggtgttcaacgtgcacactggcgacgagcttttgtcgtacgaggaatacggacatctgcagattaatgctgtctccctgtacctcctgtaccttgttgaaatgatctcttccggcctccagattatctacaatacggacgaagtctcgttcatccaaaacctggtcttttgcgtcgaacgcgtgtatcgtgtgccggatttcggcgtgtgggagaggggctcgaagtacaacaacggatccactgaactgcactcgtcaagcgtcggactggctaaggcggccttggaggctatcaatgggtttaatcttttcggaaaccagggatgttcctggtccgtgatcttcgtcgacctcgatgcccataaccgtaaccggcagaccctctgctcccttcttccacgcgagagccgatcacataacaccgatgccgcactgctgccttgcatctcctaccctgcctttgccctcgacgacgaagtgctcttcagccaaaccctggataaggtggtgagaaagctcaagggcaagtacggattcaagcggttcctcagagacgggtaccgcacctcactggaggatccgaatagatgctactacaaaccggcggagatcaagctgttcgatgggatcgaatgcgaattccctatcttctttttgtatatgatgatcgacggggtgttccgcggcaatccgaaacaagtccaggaatatcaagacttgctgactccggtcctgcaccacaccacggaaggctacccggtggtgccaaaatactactacgtgccggctgacttcgtggaatatgaaaagaacaacccgggaagccaaaagcggttcccatccaattgtgggcgggatggtaagctgtttttgtggggtcaggccctctatatcatagcgaagctgcttgctgatgaactcatcagcccgaaggacatcgaccctgtccaacgatacgtcccgttgaaagaccagagaaacgtgtcgatgcgcttttcaaatcagggaccactcgaaaacgacctcgtcgtgcacgtggctctgattgccgaatcacagcggttgcaggtctttctgaatacctacggtatccagactcagaccccccaacaagtcgaacccatccagatctggccgcagcaggaactggtgaaagcctacctgcagcttgggattaacgagaagctggggttgagcggtagaccagacaggccaattggctgcttgggcacctccaagatttacagaattctcggaaagaccgtcgtgtgttacccaatcatctttgatctgtctgatttctacatgagccaggacgtctttctgctcatcgacgacatcaagaacgcgctgcagttcatcaagcagtactggaagatgcatggcagacctctgttcctcgtgctcatcagagaggataacatcagaggatcgagattcaatccgatcctggatatgctggccgcccttaagaagggaataatcggaggcgtgaaggtgcatgtggaccggctgcagactctcatctccggagcagtggtcgagcagctggacttcttgcgcatctcagatactgaagagctgccggaattcaagtcatttgaggagctcgaacctcctaagcactcgaaggtgaagcgccagtccagcaccccgtctgcccctgagctgggacagcagcccgacgtcaacatctcagagtggaaagataaaccgactcatgagatcctccagaaactcaacgactgctcatgccttgcatcccaggccatccttctgggaatcctcctgaagcgcgaaggaccaaacttcatcacgaaagaaggaactgtgtcggatcacatcgagcgcgtgtacaggcgggcaggctcgcaaaagctctggctggcagtgcgctacggcgcagcctttactcagaagttttcaagctccattgccccccacatcactacgttcctggtgcatggaaagcaggtgactttgggagctttcggacacgaggaggaggtcatttccaatccactgtcgccgcgcgtgatccagaatatcatatactacaagtgtaacacccatgacgaacgggaggccgtgatccagcaagagctggtcatccacatcggctggatcatcagcaacaatccagaactttttagcgggatgcttaagatccggatcggttggatcattcatgcgatggaatatgagctgcaaatccgcggtggagacaaaccggcacttgacctctaccaactgtccccatccgaggtgaagcaactgctgctcgatatcctgcaacctcaacagaacgggcggtgttggttgaaccggcggcaaatcgatggctccttgaacagaaccccgacgggattttacgatagagtctggcagatcttggagcggaccccgaacggcatcatcgtggcaggtaaacacctcccccagcagccgactctgagcgacatgaccatgtacgagatgaacttctcgctcttggtcgaagatactctgggaaatatcgaccagccgcagtacaggcagattgttgtggagctcctcatggtggtgagcatcgtgctggagcggaatccggaacttgaattccaggataaagtggacctggacagattggtgaaggaggcgtttaatgagtttcagaaagatcaatctcgactgaaagaaatcgagaagcaagacgatatgacttccttttacaatactcccccactgggaaagcgcggtacctgctcgtatctcaccaaagccgtgatgaacctcctgctggagggtgaagtcaaaccgaataatgacgatccgtgcttgatcagc

SEQ ID NO: 6305 - DNA, 3279 bp, Artificial Sequence
  derived and/or modified sequence
atggccggggccgccgggctaacagcagaagtcagttggaaagtgctggaaaggcgagctagaacaaaacgttctggatcagtgtacgaaccattaaagtccatcaatcttcctaggcccgataacgaaacattgtgggataagctggatcattactatagaatagtcaaatctacattactcctatatcagagtccaacaactggactttttcctactaaaacttgcgggggagaccagaaggctaagatacaggattcactgtactgcgccgccggggcctgggctttggcccttgcatatcgccggatcgatgatgataaagggagaactcatgaacttgaacattccgctataaaatgtatgcgaggaatactttattgctacatgcgccaggccgataaggtgcagcagtttaaacaagatcctcggccaacgacatgtctgcactctgtgttcaacgtgcacacaggggatgaactgctttcctatgaagaatatgggcacttacagataaacgcggtctctctttatcttctctatctcgtagaaatgataagttctggactccagataatctataacactgacgaggtctctttcatccagaatctggtgttttgcgtcgaaagagtatatcgggtcccagacttcggggtatgggaaagaggatctaaatataacaatgggtcgacagaactccatagttcttccgtagggctcgccaaggctgctctcgaagctataaatggatttaacttgttcggaaatcaggggtgttcctggtcggtgatctttgtcgatctggacgcacacaacagaaaccggcagacactgtgctctctgcttccacgcgaatcccggtcccataatacagatgctgccctgctcccttgtatttcatatccggcctttgcgctagacgatgaagtgctatttagtcagactctggataaagtggtgcgaaagctcaaagggaagtatgggttcaaacggttcctgcgggatggataccggacttctcttgaggatcccaataggtgctattataagcccgcggagatcaagcttttcgatggaatcgagtgtgaattcccaatctttttcctttacatgatgatagacggagtctttaggggaaaccccaaacaggtacaggaatatcaggatttactcacaccagttctgcatcatacaacagaggggtatcccgttgttccaaaatactactatgtccctgccgactttgtagaatatgagaagaataaccctgggtctcagaaacgcttcccatcaaactgcggaagagatgggaagctcttcctttggggacaggcactctatataatcgctaaactcctggcagatgaactaatatcccctaaggatatagatcctgttcagcgatatgtgccactaaaagatcagaggaacgtgagtatgcggttctcaaaccaggggccattggaaaacgatctggtggttcacgtggctctcatcgcagaatcccagcggcttcaggtctttctaaatacttatggaatccagacacaaacgccacagcaggtggaacccatacagatctggccccagcaggaactcgtgaaagcttatctacagcttggaataaatgaaaaacttgggctctccgggagaccagatcgacctataggatgcctgggaacttcaaaaatctaccggatactggggaaaactgtggtttgttatcccatcatttttgacctgtccgatttctacatgtcacaggatgtgtttcttctgatagacgatatcaaaaacgccctacagtttatcaagcagtactggaagatgcatgggcggccattgtttttggtgctaatacgcgaagataatattaggggatcaaggttcaatcctatcctagatatgctggcagcgctaaaaaaagggataataggaggggttaaggtgcatgttgaccggcttcagactctcatatccggggccgtggtggaacagctggattttctcaggatctccgatacagaagagctgcccgagtttaagtcatttgaagaactggaaccccccaaacattccaaagtaaaaagacagtcttctacaccctctgctcctgaactggggcaacaaccagatgtgaacatctccgaatggaaggacaaacccactcacgaaatacttcagaaacttaatgattgctcttgcctcgcaagtcaggcaatcctcttgggaatactcttgaaacgggagggacccaactttatcacaaaagaaggaacagtttcagatcacatagaacgggtatacagacgggctggatctcagaaactctggctggcagtgaggtacggggcagcttttacacagaagttttcttcttccatagccccacacatcactactttcctcgtccatgggaagcaggtcactctcggggccttcggacacgaggaagaggtcatttcaaatcctctaagtcctagagtgatccagaatatcatctactataaatgcaatactcatgatgaacgggaggccgtcatacaacaggagctagttatacatatcggatggataatatcaaataatccagaattattctcaggaatgttaaaaattcggatcggatggataatacacgcaatggaatatgagttacagattagaggaggggacaaaccagctttggacctctaccagctctccccatctgaggtcaaacagctactcctagatatcctgcagccacagcagaatggacgctgctggctaaatcgccgacagatagatggatccctcaacagaactccaacagggttttacgatcgcgtctggcagatattagaaaggactcccaacggaattatagttgccggaaaacatctcccccagcagcccacattatctgacatgacaatgtatgaaatgaacttctcgctacttgtagaagacactctggggaatatcgatcagccacagtacaggcagatcgtggtagagcttctgatggtggtgtctatcgtcctggaaagaaacccagaactagagtttcaggataaagtggacctagataggcttgttaaagaagccttcaacgaattccagaaagatcagtcacggctgaaggaaatagaaaaacaggatgatatgacttctttttataacacaccgcctctggggaaaaggggaacttgtagttatctgacaaaagccgttatgaacttactcctggagggggaagtaaaacccaataacgatgatccatgtttaatctcc

SEQ ID NO: 6306 - DNA, 3279 bp, Artificial Sequence
  derived and/or modified sequence
atggctggcgctgccggcctcaccgcagaggtgtcctggaaggtcttagaacgcagggcccgaaccaaacggtccggctccgtttatgagcctctcaagtctatcaatctgccacgaccagacaatgaaacactgtgggacaagctggatcattactatagaattgtgaaatccacactactgctctaccagtccccaaccaccgggttattccctaccaaaacctgcggtggcgatcagaaagctaagatccaggactctctgtattgtgcagccggtgcctgggctctcgctctggcctatcgcagaatcgatgacgacaagggtcgcacccacgaattggaacattccgccataaaatgcatgcggggcatactctattgttatatgaggcaggctgataaggttcagcagttcaagcaagatcctcgtccaaccacatgcttacatagcgtgtttaatgtccatactggggacgagctcctgagctacgaggaatatggacatctgcagataaatgccgtcagtttgtacctgctctatctggtggagatgataagcagcgggctgcagattatatataatacagacgaggtctcatttatccagaatctggttttttgcgtagaacgggtgtaccgggtgcctgattttggcgtttgggagcgcggatctaagtataataatggttcaacagagctgcatagctcctctgtcggcctggcaaaggcagccctggaggcaatcaatgggtttaatctgtttggcaatcagggctgtagttggagtgtgatattcgtcgacctggatgctcataatagaaacagacaaacattatgttccctcctgccccgtgaaagtcgatcccataacaccgatgctgcactgcttccctgtatcagctatcctgccttcgctctggacgacgaggtgttgttctctcagactctggacaaggttgtgcggaagctgaaaggtaaatatggatttaagaggttcttacgtgatgggtatcgaaccagcttggaagaccctaacagatgctattacaaaccagccgaaatcaaactgtttgacggaatagaatgcgaattcccaatcttcttcctgtatatgatgatcgacggggtgttcagggggaaccccaagcaagtgcaagagtatcaggaccttttaacaccagtgcttcaccatactactgaaggctatccagtcgtgccaaagtattactatgtgcccgcagacttcgtggaatacgagaaaaataacccagggtctcagaaaagattcccttctaattgtggaagagatggaaagcttttcctgtggggtcaggctctctacatcatcgccaaacttctggccgatgaacttatttcaccaaaagacattgaccccgtgcagcgatacgtccccctgaaggaccaacgaaacgtttctatgcgattcagcaaccagggcccactggaaaacgacctggttgttcatgtggccctgattgccgaatcccagcggctgcaggtgttcttaaacacttacggaatccagactcagacaccacagcaggtggagccaatacagatctggcctcagcaggaactcgttaaggcttaccttcagctcgggatcaatgaaaaactgggcctctccggacggcctgaccgccccataggctgtctgggcaccagtaaaatctaccgaattctgggcaaaaccgttgtgtgttaccctatcatctttgacctgtctgatttttatatgtctcaggacgtttttctgctgattgacgatatcaaaaacgctctgcagtttattaagcaatattggaagatgcatggcaggcccctgttcctggttttgatacgcgaggacaacatcaggggcagtagatttaatcccattttagatatgctggccgctctgaagaaaggcatcattgggggtgtgaaagtgcacgtcgaccggttgcagacactgattagcggcgccgttgtagagcagctggacttcctgcggattagtgacactgaggaactgccagaattcaagagttttgaggagcttgagcctccaaaacactccaaggtgaaacggcaatccagcactcctagcgcaccagaactaggacagcagcctgacgtgaacataagcgagtggaaggataaacccacccacgagattctccagaaattaaacgattgttcctgtctagcctcccaggctattctgctggggattctgttaaaacgagaaggacctaacttcattaccaaagaggggaccgtttctgatcacatagagagggtgtatcgccgcgctggcagtcaaaaactgtggctagctgtgaggtatggcgccgcctttactcagaagttctcctctagcatagctcctcacattaccacattcctggtgcatggcaagcaggtaaccctgggtgcattcggccatgaagaagaagtcatttccaaccctctgtcccccagagtgatacagaacatcatttactacaaatgtaacacccatgacgaacgagaggctgtgatccagcaggagctagttattcatatcggatggataatatctaacaatcccgagctgttctccgggatgctgaaaatcaggatcggctggattatacatgccatggaatatgagctgcaaatcaggggtggagataaaccagccttagacctgtaccagctgagccctagcgaagttaagcagctacttctggacatcctgcagccccagcaaaatgggcggtgctggctgaacaggagacaaattgatggcagcttaaatcgtacccctactggattttacgaccgagtctggcagatactggaacgaaccccaaacgggattatcgtcgcaggcaaacatttgcctcagcagcccacactgtccgatatgacaatgtacgagatgaatttttccctgctggtcgaagatactctcggcaatatcgaccagcctcagtataggcagattgttgtggaattgctcatggtagtctctatcgttctcgagcgtaacccagagctggaattccaggacaaggttgacctagaccggctggtgaaggaagccttcaatgagttccaaaaagatcagtcccggctaaaggagatagagaagcaagacgacatgaccagcttctacaatacacctccactgggcaagcggggcacatgttcatatttaaccaaggctgtgatgaacttactgctggaaggagaagtgaagcctaacaacgatgatccttgcctgatatct

SEQ ID NO: 6307 - DNA, 3279 bp, Artificial Sequence
  derived and/or modified sequence
atggccggtgccgctggcctgactgccgaagtgagctggaaggtcctggagaggagagcacgtaccaagagatcaggctcagtgtatgaacctctgaaatcaatcaatctgccacggcctgacaacgagaccttgtgggataaactggatcactattataggatcgtgaaatctacactgctgctgtatcaatcccccaccaccggattgtttcctactaagacttgcggcggggaccaaaaggcaaaaattcaggactcactttactgtgcggcaggtgcatgggctttggcccttgcctaccgtcgaatcgatgatgacaagggcagaacacatgagctagagcactccgcaattaagtgcatgcgcggaatcctatattgttacatgcgacaagccgataaggtccagcagtttaaacaagatccgcggcccactacctgccttcactctgttttcaatgtgcatactggcgacgaactgctcagctacgaagagtacgggcaccttcaaatcaatgccgtgtctctctacctgctgtatttggtcgagatgatctcttcgggcctgcaaattatttataacaccgacgaagtgagcttcatccaaaatctggtgttttgtgtggagcgcgtctatagagtacccgatttcggagtatgggagcgaggctctaaatataataacggatcgacagaacttcactctagtagtgtcggcttagctaaagctgccctcgaggctatcaatggtttcaaccttttcggtaaccagggatgctcttggagcgtgatcttcgttgacctggacgcccacaacagaaaccgccagaccctctgttcactcttgcctcgggaatcccgcagccataataccgatgcagcgctgctcccctgcatctcataccccgccttcgcactcgacgacgaggtgctgttttcgcagactctcgataaagtcgtccgcaagctgaagggaaagtacgggtttaaaagattccttagagacggttacagaacctcgttagaagacccaaataggtgctattacaagcctgccgagatcaagctgtttgacggcattgagtgcgagtttcccatcttcttcctgtacatgatgatagacggagtcttccgaggaaacccaaagcaggtgcaggagtatcaggatctgcttacacctgtgttacaccacaccactgagggttatccagtggttcccaagtattattacgttcctgccgatttcgtcgagtatgagaagaataatcccggcagccagaagaggttccctagcaactgcgggagggacggaaagctgttcctgtggggacaggcactgtacataattgctaagctgctcgctgatgaactaatcagtcctaaggacattgatcccgtgcagcgatatgtgcccctgaaagatcagcggaatgtgtccatgagatttagcaatcagggccctttggaaaatgatcttgtcgtgcacgtcgctttgatagccgaatcccagcggctgcaggtgtttctgaatacctacggcattcagactcaaaccccccagcaggttgagccgattcagatctggcctcagcaagaattggtcaaagcctatcttcagctaggaatcaatgaaaagctgggactgagtggccgcccagatagacccatcggctgcttgggcacatcaaagatctaccggatcctgggcaagactgtggtgtgctatcccattatctttgacttgtctgacttttatatgtctcaggacgtgtttctcctaattgatgacataaagaatgccttgcagttcatcaaacagtattggaagatgcacggccggcctctctttcttgtgcttattcgggaggataatatcagaggcagtcggtttaaccctatcctggatatgctagccgccttaaaaaaaggcattatcggcggcgtcaaggtccacgtggacagattacaaacactgattagtggcgccgtggtggagcagctggacttcctgcgtatttccgacactgaagagctaccggaatttaagagtttcgaggagcttgagccacctaagcacagcaaagtgaagaggcagtcgagtacccccagtgcgcccgaactgggccagcagcctgatgtaaacattagtgaatggaaggacaagccgacacacgagatactccaaaaactgaatgattgctcatgcctggcctcccaggccatcctgctaggaattctcctgaaacgcgaaggaccaaattttatcacaaaagaaggcacggtctcagatcatatcgagcgcgtctatagacgggctgggtcccagaagctatggctagccgttcggtatggcgctgcctttactcagaagttttcttcatccatcgccccccacatcactacatttctcgtgcacggtaagcaggtgaccctcggcgcgttcggccacgaagaggaggtgattagcaaccctctgagtccccgagtaatacaaaatataatatactataagtgcaatactcacgacgaacgggaggctgtgatacaacaagaactagttatacacattggctggatcatctcgaataacccggagcttttcagtgggatgctgaagattagaatcggctggatcatccacgctatggagtatgagttacagattcgaggcggagataaacctgccctcgacctgtatcaactgtcaccttcagaggtgaagcagctgttactcgatattttacagcctcagcagaatggtagatgctggctaaacaggcggcagattgacggtagcctcaaccgcacacctacaggattttacgatcgggtctggcagatcctcgagcggacacccaatggcattattgtggctggcaaacaccttccacagcaaccaaccctctctgacatgacaatgtacgagatgaacttttctctcttagtcgaggacacactggggaatatcgatcaacctcagtatagacagatcgtagtggaattgttgatggttgtgtctatagttttggagaggaacccggagctcgagttccaggataaggtggatctggatcgattagttaaagaggcttttaacgagtttcagaaagaccagtcgcgactgaaggagatcgagaagcaggacgatatgacctccttctacaacaccccacccctgggaaagagaggaacctgctcttaccttaccaaggcagtgatgaatctgcttctggaaggtgaggtaaaaccaaacaatgatgatccctgtctgatctcg

SEQ ID NO: 6308 - DNA, 3279 bp, Artificial Sequence
  derived and/or modified sequence
atggcaggagcggccggccttaccgcagaagtgagctggaaagtgctcgagcgccgcgccagaaccaagcgctccggtagcgtgtacgaaccccttaagtccattaatctccctcggccagacaatgaaactctttgggataagctggatcactactaccggatcgtcaagtccaccctccttctgtaccagtcgcctacgactggactcttccctactaaaacctgcggaggggaccagaaagccaagattcaggattccctctactgcgctgcgggggcttgggccctggccctcgcgtacagaagaatcgatgatgataaagggcgcactcacgaattggaacattctgccatcaaatgcatgagaggtatcctgtactgctacatgagacaggcggataaggtgcagcagttcaagcaggatcccagaccgaccacctgcctgcattccgtctttaacgtgcacaccggggacgaactgctttcctacgaggaatacggacacctccagatcaacgccgtgtccctctacctgctgtacctcgtcgagatgatctcatcggggctgcagatcatctacaatactgacgaagtgtcattcatccagaatttggttttctgtgtggagcgggtctacagagtcccagacttcggagtctgggaacggggcagcaagtacaataatggatccactgaactgcacagcagctccgtgggactggccaaagcggcccttgaagccatcaacggattcaacctgttcggaaaccaggggtgttcctggtctgtgatcttcgtggacctcgacgcccataacaggaatcgccagacgctgtgctcactcctgccaagagagtcaaggtcccataacactgatgcggccctccttccgtgcatctcatacccggccttcgcactggatgacgaagtgctgttttcgcagactttggataaggtggtgaggaaactgaagggtaagtacggattcaagcggttcctgagagacggttaccggacctcactggaggatcctaaccggtgctactacaagccggccgagatcaagctgttcgacggtattgaatgtgaatttcctatcttttttctgtacatgatgatcgacggagtgttccgcggaaacccgaagcaggtccaagaataccaagacctgctgacgccggtgctccaccacaccactgaaggataccctgtcgtgcctaaatactattacgttccggccgacttcgtggaatacgagaagaacaacccgggatcacaaaagcgctttccctccaactgcggaagggacggcaaactctttttgtgggggcaggccctttacatcatcgccaagctccttgcggatgaactcatctcgccgaaggatattgaccctgttcagcgctacgtcccacttaaggaccaaaggaacgtgtcaatgcgcttctccaaccagggcccgctcgaaaatgatcttgtggtgcatgtcgccctcattgccgaaagccaacggctgcaagtgttcctgaatacgtacggtatccagacgcagactccgcagcaagtcgaacctatccagatctggccgcaacaggagctcgtgaaagcgtacctgcaactgggcattaatgagaagctcggactctccggtcgcccagaccgcccgatcggatgtctgggcacctcgaagatctaccggatcctcggcaagaccgtggtgtgctaccccattatcttcgacctgtcggacttctacatgtcccaagatgtgttcctgctgatcgacgacatcaaaaacgccctgcagttcatcaagcagtactggaagatgcatggaaggcctctgttcctcgtcctcatccgagaggataacatcagagggtcccgctttaatccgattttggatatgctggccgcgcttaagaagggaatcatcgggggcgtcaaagtgcatgtcgatcggctgcaaaccctgatatcgggcgcggtggtggaacagctcgactttttgcgcatctcagataccgaggaactccctgaattcaaatccttcgaagaactcgaaccgcccaagcactcgaaagtgaagcggcaatcctccacgccatcagcgccggagctgggtcaacagcctgacgtgaacatcagcgaatggaaggacaagcctacccacgaaatcctccagaagttgaatgattgctcttgcttggcctcgcaagcgattcttctcggaattcttctcaagagggaaggacctaacttcatcacgaaggagggaaccgtgtcggatcacatcgagcgagtctaccgccgcgctggttcgcaaaagttgtggctcgccgtgcgctatggagccgctttcacccaaaagttctcgtcctcgatcgccccgcacatcactaccttcttggtgcacggaaagcaggtgacgctgggggcattcggccatgaagaagaggtgatcagcaatccgctgtctccaagggtgatccaaaacatcatctactataagtgcaatacccacgatgagcgggaagccgtgatccagcaggagcttgtcatccacataggctggattatctcaaacaatccggaactgtttagcggaatgctgaaaattcgtatcggctggatcatccatgcaatggaatacgagctgcagatccggggcggagacaagccggcccttgacctgtaccagctgagcccatcggaggtcaaacagctgctgctggacatcctgcagccacagcaaaatggaagatgttggctcaaccgcagacaaatcgatggatccctcaaccggacgccgactggtttttacgatcgcgtctggcaaatccttgagcgcacgccgaatgggatcatcgtggcaggcaagcacctgcctcagcagccgaccctgtccgatatgacgatgtacgaaatgaacttttcgctgctggtcgaggacaccctggggaacatcgaccagccgcagtaccgccaaattgtcgtggagctgctgatggtggtgtcgatagtgctggagaggaacccggaactggagttccaagacaaggtggacctggaccggcttgtgaaagaagcgtttaacgagttccaaaaagaccaaagccgactcaaagagatcgaaaagcaagatgacatgacttccttttacaacactcccccactgggaaagcgaggaacctgctcatacttgactaaagcggtgatgaacctgctgttggaaggagaggtgaaacccaataacgatgatccctgcctgatttcc

SEQ ID NO: 6309 - DNA, 3279 bp, Artificial Sequence
  derived and/or modified sequence
atggctggtgcggcaggccttactgctgaggtgtcatggaaagtgctggaaaggagagcacgcactaaaagatccggctcggtttacgaaccactcaaatcaatcaatttgcccagaccggataacgaaacactttgggataagctcgaccattactaccgaatcgtgaaatctacactgctcctgtaccaatccccaactacagggctcttcccaaccaagacttgcgggggggaccaaaaagccaagattcaggatagtttatattgcgccgccggggcgtgggctctagccctggcctaccgtcggattgacgacgataaaggcaggacacatgagctcgagcacagtgcaatcaagtgcatgagggggatcctgtactgctacatgaggcaggcagataaggtccagcagttcaagcaagaccctcggcccacgacttgcctgcacagcgtcttcaacgtgcacaccggggatgaattgcttagctacgaggaatatggacatttgcagattaatgcagtatccctgtatcttttgtacctggtcgaaatgatctcatcagggctgcaaattatttacaatacggacgaggtcagcttcatccagaacttggtcttctgcgtagagcgagtgtatagagtccccgattttggagtctgggagaggggctcgaaatataacaacggctccaccgaactacatagtagcagtgtgggcctggccaaggctgctctggaggcgataaacggcttcaacctgtttggaaaccagggttgcagctggagcgtgatctttgtagacctagatgcacacaatagaaacaggcaaacactatgcagcttgctgcccagagaatcacgttctcataacacagacgcggcattgcttccctgcatctcgtaccctgcctttgccctcgatgacgaagttcttttcagccagactctggataaggtggtcagaaagctcaagggcaaatacggattcaagcgtttcctgcgggacggatatcggacttctctcgaagatcccaataggtgttactataagcctgccgagatcaaactgtttgacggcattgagtgtgaatttcctatctttttcttgtatatgatgatcgacggtgtcttcagaggtaaccccaagcaggtgcaggaataccaggacctcctgaccccagtcctgcatcacaccaccgaaggctatccagtggtccccaaatattattacgtaccagcagacttcgtcgaatacgaaaagaataacccaggctctcagaagagatttccctcaaactgcggccgcgatgggaagctgtttctctggggtcaggctctgtacattatcgccaagctacttgcggacgaattaatatccccaaaggatatcgatcctgtccagcgatacgtccccctcaaggaccagagaaatgtgtccatgaggttttctaatcaggggcccctggaaaacgacctggtggttcacgttgccctgatcgccgaatctcagagactgcaagtgtttctgaatacatatggaatccagacgcagacgccacagcaggtggagcccatacaaatatggccgcagcaggagctggtcaaggcctacctccagctgggcattaatgagaagttgggactgtcagggagacctgacaggcccatcgggtgcctgggtacttcaaaaatctataggattttaggcaaaacagtggtgtgctaccccatcatattcgacctctctgacttttacatgtcccaagacgtgtttctccttattgacgatatcaagaacgcattacagtttattaaacagtactggaagatgcatggacggccgttgtttctggtattaatccgggaggacaatattcggggatcgagattcaacccaatcttagatatgttggccgccctgaagaagggtattatcggaggtgtgaaagtgcacgtcgacaggctccaaaccctcatatccggcgcagtggtggagcagttggacttcctcaggatcagtgacactgaagagctgcccgagttcaagagttttgaagagctggagccaccaaagcactctaaggtgaagcgtcaaagtagcactccatccgcccctgagttgggtcagcagccagacgtcaacatctctgagtggaaggataagccaacccacgaaattctccagaagcttaatgactgttcctgtctggccagtcaggctattttactgggaatattgctaaagcgagaagggcctaattttatcacaaaagagggtaccgtatcagaccacattgagcgcgtgtaccgcagggccggttcccagaagttgtggctcgcggttagatatggagccgcctttacacaaaagttttcatctagtattgctccacacataaccacgtttcttgtgcacggtaagcaagtaacactgggcgctttcgggcatgaggaggaagtcatctctaatcccctcagtccccgggtgatccaaaacatcatctattataaatgtaacacccacgatgagagagaagccgtgatccagcaggaattggtaatccatatcggctggatcatatccaataacccggagctgttttccggtatgcttaagatccggattggatggatcatccatgcaatggaatacgaacttcagattagagggggcgataaaccagcgttagatctataccagttatctccaagcgaagtgaagcagctgctgttagacatcctgcagccgcagcagaatggccggtgctggttgaaccgcagacagattgacgggtctctcaaccgtacccctaccggtttttatgaccgagtctggcagattctggagcggacccctaatgggattatcgtcgctggtaaacaccttccacagcagcctaccctgagcgacatgactatgtacgaaatgaacttttccctgctcgtcgaggacaccctgggcaatatcgatcagcctcaatatagacagattgtggtcgagctccttatggtggtctcaatagtgctggaacggaatcccgaattagagtttcaagataaagtggatctggacaggctcgtaaaggaggcttttaacgagtttcagaaagaccagagccggctaaaagagattgagaaacaggacgacatgacctctttttacaatacaccacccctggggaagagaggtacatgttcatacctcaccaaggcagtcatgaacctcttgctcgagggtgaagtgaagccaaataacgatgatccctgcctgatatca

SEQ ID NO: 6310 - DNA, 3279 bp, Artificial Sequence
  derived and/or modified sequence
atggcaggggctgcagggctaaccgcagaggtgtcctggaaggtcttggaacggcgcgcgaggaccaaaagatctggaagcgtttatgagcccctcaaatccattaatttgccccgtccagataacgaaacgctgtgggacaagctagaccactattaccggattgtgaaatccacgttgctgttgtaccaatccccgacaaccgggctattccctactaaaacctgcgggggagatcaaaaggctaagattcaggactccctgtactgtgccgcaggagcgtgggctttagcccttgcctacaggcgcatagatgacgataaggggagaacccacgagctcgaacactctgccatcaagtgtatgcggggcattctctattgttacatgcgtcaagctgataaggtgcagcagttcaagcaggaccccaggcccacaacctgcctccactctgtttttaatgtgcatacgggagatgaactgttgagctatgaggaatacggtcatctgcagatcaacgctgtttcactttaccttttatacctcgtcgaaatgatatcctctggattgcagatcatctacaatactgatgaggtcagctttatccagaatctggtgttctgtgtcgagcgagtatacagagtcccagatttcggagtgtgggagcgaggttcaaagtacaacaatggatccacagagctccactcttcctctgtaggccttgccaaagccgccctggaggccattaacggattcaacctatttggaaaccagggatgtagttggtcggtgattttcgtggacctggatgcacataaccgcaacagacagacactgtgttccctcctcccaagggaatctcggtctcacaataccgatgcagccctattaccctgcatcagttaccccgctttcgcactggacgacgaggtgctgttttctcagacgctcgacaaggtggtaaggaaactcaaaggcaagtatggattcaagcgtttcttgcgggacggctaccgaacatctcttgaggacccaaatcggtgctactataagccagccgagatcaaactgttcgacggcatcgaatgcgagttcccaatattctttctctacatgatgatcgacggagtattcagggggaaccccaagcaggttcaggagtaccaggacttgctgaccccagtgcttcaccacaccactgagggctaccccgttgtgccgaagtactactacgtccctgccgatttcgtcgagtacgagaagaataatccaggcagtcagaaacggttcccgtctaactgcggccgggacggaaaactgtttctctggggccaagctctctacatcatagcgaagctgctggcggacgaactgatctctccgaaggacatcgatcctgttcagcggtacgtgccattgaaagaccagcgcaatgttagtatgcggtttagtaatcagggcccactagagaatgaccttgtggtacacgtggctctaatcgccgaaagtcagaggctgcaagtgtttttgaacacatatggcatccaaacccaaacgccgcagcaggtggagccaatacagatttggcctcagcaggagctggtgaaggcatatttgcaactaggaattaacgaaaaacttggtctctctggaagacctgaccggccaatcgggtgcctcgggacgtctaaaatctataggatcctagggaaaactgttgtgtgctaccccatcatattcgatctgtctgacttctatatgtctcaggacgtttttcttttgatcgacgatatcaaaaatgctctgcagttcattaaacagtattggaagatgcacggcaggccactgttcctcgtacttatcagggaggataatattcgggggagtcgtttcaatcccattcttgacatgttagcagcattgaaaaaaggtattataggaggagtgaaagtgcatgtcgatcggttgcagacactcatatctggcgcggttgtagaacagcttgactttttaagaatcagcgacacggaggaattacccgaatttaagtctttcgaggagctggagccccccaagcacagcaaggtgaagaggcaaagttctaccccatcagcccccgagctgggccagcagcctgacgtgaacatcagcgagtggaaggataagcccacccatgagattctccagaagctgaatgactgttcctgcctggccagccaggccattttgctgggtattctgctgaagcgggaaggtcccaacttcatcaccaaagagggtacggtgagtgaccatattgagagggtatatcgccgcgcaggcagtcagaaactgtggctggccgttcggtatggcgccgccttcactcaaaagttctcctccagcatcgctcctcatattactacctttctggtgcacggaaagcaggtgaccctcggggccttcggacacgaggaagaagtgatctctaacccacttagtccaagggttatccagaatattatctattacaagtgtaatacccacgacgagagggaggccgtgattcagcaagagcttgtcatacatatcggttggatcatcagcaacaatcccgagcttttttccgggatgctgaagatcagaattggctggatcatacatgccatggagtatgagctccagattagaggtggcgataagccagctctcgatctctaccagcttagtccgtccgaggttaaacaactgcttctcgatatactacagccccagcaaaatggacggtgctggctaaataggagacaaattgatggatcacttaatagaaccccgactgggttctatgatcgggtgtggcagattctcgaaagaacacccaatgggattatcgtggccgggaagcatctcccacaacagcccacattgagtgacatgacgatgtacgaaatgaatttcagcctactggtagaggatacactggggaatatcgatcagccgcagtacaggcagatagtggtggaactactcatggtggtgtcaatcgtgctggaacggaaccccgaactcgagttccaggacaaagtggacctggaccgcttggtgaaggaagcattcaacgaatttcagaaggaccagtcccggctcaaggagatcgagaagcaggacgatatgacgtcgttttataatacccccccacttggaaagcgaggaacctgctcctatctgaccaaagcagtgatgaacttactactcgaaggcgaagtaaagcccaataacgatgacccctgtctcatttca

SEQ ID NO: 6311 - DNA, 3279 bp, Artificial Sequence
  derived and/or modified sequence
atggcaggagctgctggcctcactgccgaggtctcctggaaggtcctggagcgtcgtgccagaactaagagatctggcagtgtttacgaaccccttaaaagcataaacctccccaggcctgacaacgagactttgtgggacaagctggaccactattacaggatcgttaaaagtactctgctgctgtaccagtcccctacaactggtctgtttccaaccaaaacatgcggcggcgaccaaaaggctaaaatccaagacagtttgtactgcgctgctggtgcatgggctttggccctggcataccgtaggattgatgacgacaagggccgcacccacgagctggaacactccgctatcaaatgcatgaggggtatcctgtactgttacatgagacaggctgataaggttcagcaattcaagcaggatccccgtccaacaacatgtttgcattcagtgtttaacgttcataccggcgacgaactcctgagctacgaagagtacggacaccttcaaataaacgctgtgtctttgtatctcctgtacctggtggaaatgatctcttctggcctgcagattatttataataccgacgaggttagctttatacagaacctcgtcttttgtgtggaaagagtgtacagggtgccagacttcggcgtttgggaaaggggcagcaaatataataacggttcaacagaactgcacagcagctctgtcggattggccaaggctgctctcgaagctatcaacggcttcaatttgtttggcaaccaaggttgctcctggagcgttatattcgtcgacctggacgcccacaaccgtaacaggcagaccctgtgttccctcctgcccagagagagccgtagccataacaccgacgctgccttgctgccttgcatctcatatccagccttcgcactggacgacgaggttctcttttcacagaccctcgacaaggtcgtgcgtaagctcaaaggaaagtacggtttcaaacgtttcttgcgcgacggttaccgcacctccctggaagaccctaaccgttgctattacaaacccgcagaaatcaagctgtttgatggcattgaatgcgaattcccaatcttcttcctgtatatgatgattgacggcgtctttagaggaaaccccaagcaggtgcaagaataccaggatctgcttacacctgtgctgcaccatactaccgagggatacccagtagtacctaaatattactatgtgccagctgacttcgtcgagtacgagaagaataatccaggctctcaaaaaaggtttccaagcaactgcggcagggacggcaaactcttcttgtggggacaggctctctatatcatcgccaaactcctggccgatgaacttatttccccaaaagacatcgaccctgtacagaggtatgtcccactgaaagaccaacgcaacgtgtccatgcgtttctcaaaccaaggtccacttgaaaacgatctggtcgtccacgttgcccttattgctgaatcccaacgtctgcaagtgttcctgaacacatatggaatccaaacccagactccccagcaggtggaacccatccaaatctggcctcagcaggaactcgttaaggcatatctgcagctgggaatcaatgagaaactgggtctctctggcagaccagatcgtccaatcggttgtctgggaacctctaagatctatcgtatactcggaaagaccgtggtgtgctaccctattatattcgacctgagcgacttctatatgtcccaggacgtcttcctgctcattgatgatatcaagaatgccctccagttcattaagcagtactggaagatgcacggccgtcccctcttcctcgtactcatccgtgaagataacataaggggttccaggttcaatcccatacttgatatgctggcagccttgaagaaaggaatcatcggcggcgtgaaagtgcatgtggaccgcttgcaaactttgatatctggtgccgtcgtagaacagctggacttcctgcgcatctcagacaccgaggagctgccagaattcaagtccttcgaagaactggaacctcccaagcacagcaaagtgaagcgtcagtcctccacaccctcagcccccgaattgggtcagcagcccgatgtgaatatcagtgagtggaaggacaaaccaactcatgagattcttcagaaactgaacgactgtagctgcctggcaagtcaagcaatcctgcttggtatcttgctgaaacgtgagggacctaattttatcaccaaagagggaaccgtctcagaccacatcgagcgtgtgtaccgtcgtgccggctcccagaagctgtggctcgcagtgcgctacggcgcagctttcacccagaagttctcctcctctatcgcaccacacatcaccacctttttggtgcacggtaagcaagtgacactcggtgcttttggtcacgaggaagaagtgatctcaaaccctttgtctcccagggttatccagaacattatctactacaaatgcaacactcacgatgagcgtgaggccgtcatccaacaagagctggttatccacatcggatggatcatttctaataaccctgaactcttctctggaatgctgaagataagaatcggctggatcatacatgctatggagtacgagttgcaaattagaggaggcgacaaacccgcactcgacttgtatcaactgagccccagtgaggtaaaacagctgctcctcgacatcctgcaacctcagcagaacggcaggtgctggcttaacagaagacagatcgacggatccctgaaccgtactcctacaggattttacgatcgcgtctggcaaatcttggaacgtacccctaatggcatcatcgtggctggtaagcacctgcctcagcagccaaccttgtctgacatgaccatgtacgaaatgaacttttctctcctggtggaggataccttgggtaacatcgatcagcctcagtataggcagatcgtagtggagctgttgatggtcgtgtctatagttctggagagaaatcccgaactcgaattccaggacaaggttgatctcgatcgcctcgttaaggaagccttcaacgagttccaaaaggatcagtcccgtttgaaggaaatcgagaagcaggatgacatgacatccttctacaacaccccacctctgggcaagagaggcacatgctcctacctgaccaaggccgttatgaacctccttctggagggtgaggtgaagcctaacaacgatgacccttgtctgatcagt

SEQ ID NO: 6312 - DNA, 3279 bp, Artificial Sequence
  derived and/or modified sequence
atggccggagctgctggactcactgcggaggtcagttggaaggttctggaaagaagggccaggactaagagatccggatccgtttacgaaccactgaagtccatcaatctcccacgccccgacaatgaaacattgtgggacaagcttgaccactactacaggatcgtgaagtcaacactgctgctgtaccagagccctaccaccggccttttcccaactaaaacatgcggaggcgaccagaaagcgaaaattcaagacagtctctactgcgctgctggtgcctgggcactcgcgcttgcatataggagaattgatgacgacaagggcaggacgcacgaactggaacactccgcaataaagtgcatgaggggaattctgtactgttacatgcgccaagcggacaaggttcagcagttcaaacaggacccaaggcccacaacctgtcttcactcagtcttcaacgtgcacaccggagatgagcttctttcctacgaggagtacggccacctgcagataaatgccgtgtctctctacctcctgtatctggtggaaatgataagctcaggtctgcagatcatatataacacagatgaggtatccttcatccagaatctcgtattttgcgttgagagggtgtaccgcgtaccagatttcggtgtctgggaaagaggtagcaagtataataatggatcaactgagttgcactcatcttctgtcggtctcgctaaggctgcgcttgaggcgattaacggcttcaacctcttcggtaaccagggatgctcctggtctgtgattttcgtggacttggacgcccacaacagaaataggcagacgctgtgttccttgctcccgcgcgagtccagaagtcataatactgatgcagccttgctgccatgtatctcataccctgcctttgctcttgatgacgaagtgctgttctcccagactttggataaggtagtgagaaagttgaaaggcaaatacggtttcaagaggttcttgagagacggctatagaaccagtctcgaggacccaaatcgctgctactataagcctgcagaaatcaagttgttcgacggcatcgagtgtgagtttcctatcttcttcctttacatgatgatcgacggcgtctttagaggcaacccgaaacaagtgcaggaatatcaggatctgttgaccccagtgttgcaccacacaaccgagggatacccggttgtgcccaaatattattacgtaccagctgatttcgtggagtatgaaaaaaacaaccctggtagtcaaaaaagattcccttcaaactgcggaagggacggcaagctttttctctggggccaagcgctttacattatcgccaagctgctggccgacgaactcatctctcccaaggacatagaccctgttcagcgctacgttccactgaaggatcagagaaacgtgagcatgagattctcaaaccagggtccacttgagaacgacttggtggtgcacgtggccctgatagccgagtctcagcgcctccaagtcttcctgaatacgtacggcatccaaacccaaaccccccaacaggtagaaccaatccagatctggccgcagcaagaactggttaaggcatacctgcagcttggtataaatgaaaagctgggcctgagcggtaggccggacagaccaataggatgtttgggtacgagcaagatatatagaattttgggaaaaacagtcgtatgttaccccatcatcttcgacttgtcagacttctacatgtctcaagacgtgtttttgttgatcgatgacataaagaacgcgctgcaatttatcaagcagtactggaagatgcacggtaggcctcttttcctcgtgcttatcagggaagataacattaggggctcccgcttcaatcccattctggatatgcttgccgcactgaagaagggcatcatcggcggcgtgaaagtgcacgttgatagactgcagacactgattagtggagctgttgtggagcagctcgacttcttgagaattagcgacacagaggagcttcccgagttcaagtcatttgaggaactcgaaccgccgaaacattctaaagttaaaagacaatcctctactccgagcgcgcccgaactgggtcagcagccggacgtgaacatatctgagtggaaggataagcctactcacgaaatcttgcagaaactcaatgactgcagttgccttgcgtcccaggctatcctcctcggcatcctcctcaaaagggaaggtcctaacttcatcactaaagagggtaccgtgtctgaccatattgaaagggtgtatagaagggccggtagtcaaaagttgtggctggctgtcaggtacggcgcagctttcacccagaaatttagctcatccattgctccgcacatcacgactttcctcgtgcacggcaaacaagttaccctgggagctttcggtcacgaggaggaagtcatcagtaatccactgtcaccccgcgtcatacagaacattatttactacaaatgcaacacacacgacgaaagagaggcagttatccagcaggagcttgtcatccacataggttggatcatctccaataacccagaactgttcagtggtatgctgaagatcaggattggctggattatccacgctatggaatacgaactgcaaattcgcggaggagacaagcctgctcttgacctctatcagttgtccccttcagaagttaagcagctcctccttgatatcctgcagccacagcagaacggtaggtgctggctgaaccgcagacaaatcgacggatcactgaacagaacacccacaggattctatgacagggtctggcaaattcttgagcgcacacccaatggtattatcgtcgcgggtaagcacctcccgcagcaacccacccttagcgatatgacaatgtacgagatgaacttcagtctcctggttgaggatacactgggaaacatagatcaaccgcagtataggcaaatcgtggtcgaacttttgatggtcgtgtcaatcgtgctggaaagaaacccggagctcgaatttcaggacaaggtagatctggataggttggtcaaggaggccttcaatgaatttcaaaaagaccagtctaggctcaaagagattgagaagcaagacgacatgacttcattctataataccccaccgcttggaaagcgcggtacctgctcatacctgaccaaggcggtgatgaacttgctgctcgaaggcgaggtcaagcctaacaacgacgatccttgtctgatcagt

SEQ ID NO: 6313 - DNA, 3279 bp, Artificial Sequence
  derived and/or modified sequence
atggcgggcgcagctggcttgacagctgaggtgagctggaaggtactggagcgccgggcacgcacaaagcgatctgggagtgtgtatgagccattgaaaagtatcaacctgccgaggcccgacaatgaaactctctgggacaagctcgatcattattatagaattgtaaaatccactcttctgctctaccaaagccctacgacaggactctttcccaccaagacctgcggcggcgaccaaaaggctaaaatacaggattccctctactgcgctgctggtgcttgggcgctggctctcgcatatcgccgcattgacgacgacaaaggaagaacgcacgagcttgagcacagcgcgatcaagtgtatgcggggcatcttgtattgttacatgcgccaggccgacaaggtgcagcagtttaaacaggaccctagacccacaacctgccttcattccgtgttcaacgttcacaccggtgatgaattgctgagctacgaagaatacgggcacctgcagataaacgccgtgtccctctatctgctctatcttgttgagatgatctcctcagggctccaaataatatataataccgatgaggtttcctttattcagaatctcgtcttttgtgtggaacgggtttaccgagtgcctgactttggcgtgtgggaacgaggcagtaagtacaataacggttccaccgaactgcacagtagctctgtaggtctggccaaggccgccctggaggccattaacgggtttaatctgttcgggaaccagggttgctcctggagcgtgattttcgtggatctggacgctcacaatagaaaccgccaaaccctgtgttccttgctcccccgcgaaagtaggtcacacaacacagatgccgcccttttgccatgcataagttacccagcattcgcactggatgatgaggtactttttagtcagactctcgataaggtggtccgcaaactgaagggcaaatacggctttaaaagattcctgcgggatggttatcgaacttctctggaggatccaaacaggtgctactataaaccagctgagataaagctgttcgacgggatcgagtgcgagttcccgattttctttctgtacatgatgatcgatggtgtgttccggggaaaccccaaacaggtccaggagtatcaggacttgctcactccagtgctgcaccacactactgagggataccctgtagtcccgaaatactactacgtcccggccgactttgttgagtacgaaaagaacaaccccggtagccagaagcgctttcctagcaactgtggcagagacggaaaactcttcttgtggggacaggctttgtatatcattgccaagctgctcgctgacgaacttatctcaccgaaggacatcgatcccgtgcagcggtatgtgccgctgaaggaccagagaaacgtgagcatgagattcagtaatcagggacctctcgagaacgacctcgtggttcatgttgctctgatagccgagtcccagcggctgcaagtcttcctcaacacatatgggatacagacccagaccccgcagcaggtagagccaatccagatttggcctcagcaggaattggtgaaagcttacctgcagcttggcatcaacgaaaagctcggcctgagcggtaggcccgatcggcccattggctgtctgggcacttccaaaatctatcgaatcctcgggaagacagttgtgtgttacccgattatttttgacctttccgacttctatatgtcacaagacgtcttcctgttgattgatgacattaagaacgcgcttcaattcatcaagcagtattggaagatgcatgggaggcccttgtttctcgtgctgattcgcgaggacaacattcggggcagcaggttcaatccaatcctggacatgctggccgcattgaagaaggggatcatcggcggagttaaggtacacgtggaccggttgcagactctcatctcaggagcagtagtcgagcagttggacttcttgaggattagtgacacagaagagcttcccgaattcaagtccttcgaggaattggagccccccaagcattctaaggtcaaacgccagtcaagcacgcccagtgctcccgagcttggacagcagcctgatgttaatatcagtgaatggaaggacaagcctactcacgagatcctgcagaaactgaatgactgctcttgcctcgcaagtcaggccattctgctcggcattctgcttaagagagagggacctaactttattacaaaggaaggaacagttagcgatcacatcgagcgagtgtaccggagggcaggttcccagaagctgtggcttgccgtgaggtacggagccgcctttacacagaagttctccagcagcatcgcgcctcacatcaccaccttcctggtgcatggcaagcaggtgactctgggtgcgtttggtcatgaggaagaggttatctctaatcctctcagtccccgagttatccagaacatcatttattataagtgtaacacacacgacgagcgagaagctgtgattcagcaagaattggtcattcacatcggctggattatcagcaataacccagaactcttcagcgggatgctgaagattagaatcggttggattatccatgctatggagtatgagttgcagatcaggggtggggacaaacctgcactggacctgtatcaattgtcccccagtgaagtgaaacagctgctcctggatatcctgcaaccccaacagaatggaagatgttggctgaataggcggcaaatcgacggttccctgaacagaacccccaccgggttctatgatagggtctggcagatcctggaacgcacaccaaatgggatcattgtggcgggcaagcatctgccccaacagcctactctgtctgacatgacaatgtacgaaatgaatttctcactgctggttgaggacactttgggcaatattgaccagccccagtaccgacaaatagtggttgagctgcttatggtggtaagcatcgtgctggaaaggaaccccgagttggaattccaggataaggtggatctggataggcttgttaaggaggcgttcaatgagttccagaaggaccagagcagactgaaagaaatcgaaaaacaagacgatatgactagcttttacaacacgccccctctcggcaagcgcggtacctgtagctaccttacaaaagctgtgatgaacctccttcttgaaggagaggtgaagcctaacaacgacgatccgtgcttgatatca

SEQ ID NO: 6314 - DNA, 3279 bp, Artificial Sequence
  derived and/or modified sequence
atggccggtgctgcagggctcaccgccgaggtgtcgtggaaggtcctggaacgccgcgctcgtaccaagaggtctggaagcgtgtacgagcctctgaaatccatcaaccttccacggcctgacaacgaaactctgtgggacaaactcgatcactactacagaattgtgaagagcacccttctgctgtaccagagccctaccacaggtttgtttcctacaaagacctgcggaggtgatcagaaagccaagattcaagactcactctactgcgctgcaggagcttgggccctggccctggcgtaccgccgcattgacgacgacaagggccgtacccacgagctcgagcattcggcaataaagtgtatgaggggaattttgtattgttacatgcgccaagcagataaggttcagcagttcaaacaggaccctaggccaacaacctgcctgcacagcgtgtttaacgtgcataccggagatgagcttctcagttatgaagaatacggacatctccaaatcaatgccgtctcgctctatctgctgtatttggtcgaaatgatctcaagtggtttgcagatcatctacaacacggatgaagtgagcttcatccaaaatcttgtgttctgtgtggaacgggtatacagagttccggattttggcgtgtgggaacgcggatctaagtataataacggtagcaccgaacttcattcctcaagcgtcggattggcaaaggctgctttggaagcaatcaatggctttaatctttttggtaaccagggatgtagctggagtgtaatcttcgtcgatctggacgctcataaccggaacagacagaccctctgctccctgctgccccgggagtcccgtagtcacaacaccgacgctgcattgctgccctgcatctcataccccgctttcgccctggacgacgaggttctgttttcacagaccctggataaagttgtcagaaagctcaagggtaaatatggatttaagagatttctgcgggatggatataggaccagccttgaagaccccaaccggtgttactacaagccagctgaaatcaaactttttgatggaattgaatgtgagttccccatcttctttctgtacatgatgatcgatggcgtcttcagaggcaaccctaaacaggtgcaagaataccaagatttgctgacccccgtgcttcatcatacaaccgagggctaccctgttgtgcctaagtactactacgtacccgcagattttgtggaatacgagaagaacaatcccggttctcagaaaagatttccctctaactgcggtagggacgggaaactgttcttgtggggtcaggcgctgtacatcatagccaaacttctggctgacgagcttatctcccctaaggacatcgaccccgtgcagcgctacgtgcctctgaaagatcaacggaacgtgtcaatgaggtttagcaaccagggccccctggagaatgacctggtcgtccacgtagcattgattgcagaatcccaaaggctccaggtgttccttaacacctacggaatccagacacagacaccgcaacaggtggagcctatacagatctggccccagcaggagctggtcaaagcttacctgcaacttggaatcaacgaaaaactgggtctgagtggcaggcccgacaggcccatcgggtgcctggggacttccaaaatttatcggatcctgggcaaaacagttgtctgttatccaatcatctttgacctgagcgatttttacatgtcccaagacgtattcctgctaatagacgatatcaaaaacgcccttcagtttattaaacagtattggaagatgcatggaaggccacttttcctggtcttgattcgggaagataacattagggggtcgaggtttaacccgatcctggatatgctcgctgccttaaagaagggaatcattggcggagtgaaagtccacgtggataggcttcagactctgatcagcggagcagttgtcgaacagttagactttcttcgcatctccgataccgaggaattgccagaattcaaaagctttgaagagctggaaccccccaaacacagcaaggtgaaaagacagtcaagtacaccaagcgcacccgagctgggccagcagcctgatgtcaatatctctgaatggaaggataaacctacacacgagatcttgcagaagcttaacgactgctcatgccttgcttcccaggccatccttttgggcatccttctgaagcgcgagggacccaacttcataaccaaggaggggaccgtttccgaccacattgaacgtgtctacaggagggccgggtcccagaagctgtggttggcggtccgctatggagccgcattcacccagaaattcagcagtagcatcgcccctcatattaccacctttctcgtgcatggaaaacaagtcactctgggagctttcggacacgaggaggaggtgatctcaaaccccctgagcccgagggtgatacagaatatcatttactacaaatgcaacacccacgacgagcgcgaggccgtgatccaacaggaacttgtcattcacatcggctggattatcagcaacaatccagaactctttagcgggatgttgaagatcagaatcggttggatcatccatgcaatggagtacgaacttcaaatcaggggtggcgataagccagcattggacctctaccagctgtccccttccgaggtcaagcagctgctgctcgatatccttcaaccacaacagaacggaagatgctggttgaaccgccgccaaattgatggaagcctgaacagaaccccaactggattttatgaccgcgtttggcagatccttgagagaactcccaacggcataatcgtggcaggaaagcatctgccacagcaaccaactctgtccgacatgaccatgtacgaaatgaatttttctcttctggtcgaggacactctcggcaacatcgaccaaccacagtatagacaaatcgtcgtggaactgctgatggttgtgagcatagtacttgagcgcaacccggaattagagttccaggacaaggtggacctcgatagactggttaaggaagcttttaacgagttccagaaggatcagtctcgtttgaaggaaatcgagaagcaggacgatatgacaagcttctataacacgcccccactcggcaagcgcggaacatgttcttaccttacgaaagcagtgatgaatctgctcctcgaaggtgaggtgaagccgaacaacgatgacccatgccttatcagc

SEQ ID NO: 6315 - DNA, 3279 bp, Artificial Sequence
  derived and/or modified sequence
atggcaggcgcagcagggctcaccgcagaagtctcatggaaagtgctggagcgccgcgcaagaaccaagagatcaggatcagtgtatgaaccactgaagtccataaatctgccaagaccagacaacgaaaccctgtgggataaacttgatcattactaccggattgtcaagtccactcttcttctttaccagtcgcctaccaccggactttttccaacgaaaacctgtggaggtgaccaaaaagcgaaaatacaggatagcttgtactgcgcagcaggggcatgggcgcttgcattggcatacagaagaattgatgatgacaaggggcggacccatgaactcgaacactcggcgatcaagtgtatgagaggaattttgtactgttatatgaggcaggcagataaagtccagcagtttaagcaagatcctagacccaccacttgtctccactcagtgtttaacgtgcataccggagatgagcttctctcctacgaagaatacggacatcttcagattaacgccgtgagcctgtacctcctgtacctggtggaaatgatctcctctggcttgcagattatctacaacactgatgaagtgtcgttcattcagaacctggtgttttgtgtcgagcgggtgtatagggtgcctgacttcggcgtgtgggagagaggctccaagtacaataatgggtccacggaacttcattcgtcgtccgtcggactggcgaaggccgcactcgaagcaattaacggcttcaacctctttggtaaccaggggtgctcatggagcgtcatcttcgtagatctcgatgcacataatcggaacaggcagactctctgcagccttcttccacgcgaatcgcgatcacataacaccgatgcagcacttctcccatgtatctcctacccagcatttgcgctggacgacgaagtgctgttttcccaaacccttgacaaggtggttagaaaacttaaaggaaagtacggatttaagagattcctgcgggacgggtacagaacctcgcttgaggaccctaatcgctgttactacaaacctgcggaaatcaaacttttcgatggaatcgaatgtgaatttcctatcttttttctgtacatgatgatcgatggagtctttcgtggcaaccctaagcaggtgcaggaataccaggacctgctgactccggtgcttcatcatactacggagggctacccagtcgtgcccaagtactactacgtcccggcagattttgtggagtacgagaagaataatccaggcagccagaagcggttcccgtcgaactgcgggcgggatggcaagctgttcctgtgggggcaagcattgtacatcatagctaaacttcttgccgacgagctcatttcacctaaagatattgacccggtccagcgatacgtcccacttaaggatcaaaggaatgtgtcaatgcgattttccaaccagggtccacttgaaaacgatctggtggtgcacgtggcgcttattgcagagtcgcagcgcttgcaagtctttctcaacacctacggtattcagacccaaactccgcaacaggtggagcccattcagatctggcctcaacaggagctcgtgaaagcctaccttcaactgggaattaacgaaaaacttggactgtccggacgccctgatagacctatcggatgccttggaacctccaagatttaccgtattctcggtaaaactgtggtgtgttaccccatcatcttcgatctgtcagatttctacatgtcacaagacgtctttctccttatcgatgacatcaaaaatgcacttcaattcataaagcagtactggaagatgcatgggcggcctctgtttctcgtgctcatcagggaagataacattcgtggatcgcgcttcaatccgattcttgatatgcttgcagccctcaagaagggaatcattgggggtgtgaaggtccacgtggatagactgcagacccttatttcaggcgccgtcgtggaacagctggattttctgcgaatttctgacactgaggaattgccagaattcaagagctttgaagagctcgaaccaccgaagcattccaaggtgaagaggcaatcttcaactccttccgcgccagagctgggccaacagcctgatgtcaacatctcggagtggaaggataagccaactcacgaaattctgcaaaagttgaacgattgttcgtgtctcgcctcgcaagcaattcttctgggaattctcctgaagagagagggtccaaatttcatcactaaggagggtaccgtgagtgatcatatagaacgtgtgtaccgccgtgcaggaagccaaaagctctggctggctgtccggtacggagcagcttttactcaaaagttttcatcgtccattgcgccgcacattaccacctttctggtccacggtaagcaggtcaccctgggcgctttcggtcatgaagaagaggtgatatcgaatcctctctcgccacgtgtgatccaaaacataatctactacaaatgtaacacccatgatgagcgggaagccgtgatccagcaagaacttgtcattcatattggctggattatctccaacaatcctgaactgttctcagggatgctgaagatacggatcggatggatcatccatgccatggagtacgaactgcaaattaggggtggagataagccagcgctggatctttaccaactgtcaccctccgaggtgaagcaactcctgctcgacatcctgcaaccacagcaaaacggtagatgctggctgaaccgtagacagatagacggatcgcttaacagaacccccaccggcttctacgatcgagtctggcagatactggaacggaccccaaatggaattatcgtggctggtaaacatcttccacagcaaccaaccctgtccgatatgaccatgtacgaaatgaacttttcgctcctcgttgaggatacccttggaaacatcgaccagccacaatacagacaaatagtggttgaactgctgatggtggtcagtatcgtgctggaaagaaaccctgaacttgaatttcaagataaggtggacttggatcgtcttgtgaaggaggcatttaacgaatttcaaaaggaccaatctcgcctgaaggagatagaaaagcaggatgatatgacctcgttttacaacaccccgccccttggtaagcgaggaacctgcagctaccttactaaggctgtcatgaaccttcttctggagggtgaagttaagccgaataatgacgacccttgtctgatttct

SEQ ID NO: 6316 - DNA, 3279 bp, Artificial Sequence
  derived and/or modified sequence
atggcgggcgcggccggcctcaccgcggaagtcagctggaaagtgctcgaacgccgcgcaagaaccaaaaggtcgggcagcgtgtacgagccactcaaatcaatcaacctgccacggccggataatgagacgctgtgggataaactcgaccactactaccgcattgtgaagtccacgctgctgctctaccaatcccctactactggacttttcccgaccaaaacttgcggaggagatcagaaggctaagatccaggatagcctctactgtgccgccggagcctgggccctggcgctggcctaccgcagaatcgatgacgacaaagggagaacccatgaactcgaacatagcgcgatcaagtgcatgcgcgggatcctgtactgctacatgcgccaagctgataaggtgcaacagttcaagcaagatcctcgcccaactacttgcctccattcggtgtttaacgttcacacgggcgacgaactcctgagctacgaagagtacggacacctccaaatcaatgccgtgtccctctacctgctgtacttggtggagatgatctcgtccggactgcagatcatctacaacacggatgaagtttccttcatccagaacctcgtgttctgcgtggagagagtgtaccgggtccctgatttcggcgtgtgggagcgcggatcgaaatacaataatggtagcactgagctccattcctcaagcgtggggctggctaaagctgcgctggaggccatcaatggattcaacttgttcggaaatcagggctgctcgtggtcagtcatcttcgtggacttggatgcccataaccggaatcgccaaaccctgtgctccctgctgccacgggaatcacggtcacacaatactgatgctgcgctcctgccgtgcatctcctacccggcgtttgcactcgacgacgaggtgctgttctcccaaactttggataaagtggtgagaaagctgaagggaaagtacgggttcaaacggtttcttcgggacggttacagaacctcattggaggaccccaaccgctgctattacaagcctgccgaaatcaagctgtttgatggcattgaatgcgaattcccgatcttcttcctgtacatgatgatcgatggggtgttccggggcaaccccaaacaggtgcaggaataccaggacctcctcacccctgtcctgcaccacactaccgaaggttaccctgtcgtgccgaagtactactacgtgcccgccgatttcgttgaatatgaaaagaataacccggggtcacagaagcgctttccctcgaactgcgggcgggatggaaaacttttcttgtggggccaagccctttacatcatcgccaaactgcttgccgacgagctgatctcccccaaggacatcgaccctgtccagcgctacgtgcctctcaaggaccaacgcaacgtctcgatgcggttctcgaaccaaggcccgctcgagaatgacctggtggttcacgtggcgttgatcgctgagtcgcagcggctgcaagtgttcctcaatacctatggtatccagacccagactccacagcaggtggaaccaatccagatctggcctcagcaagaactggtgaaggcgtacctgcagctgggcataaacgagaaactcggcctgtccggacgcccggacaggccaattggatgtctcggaacttccaagatttaccggattctgggaaagactgtcgtgtgctaccccatcatctttgacctctccgatttctacatgtcgcaggatgtttttcttcttatagacgatatcaagaacgcccttcagtttatcaagcagtactggaaaatgcacggaaggccgctctttttggtcctcattcgcgaagataacattagaggctcaaggttcaatcctatcctggacatgttggccgccctcaaaaaaggaattatcggaggtgttaaagtgcacgtggataggttgcaaactctcatctctggtgcagtcgtggaacaattggatttcctccgcatctcagatactgaggagctcccggagtttaagtcatttgaggaactcgagccaccgaaacattcaaaggtcaagaggcagtcatcgacgccttccgctccggaactcggacaacagccggatgtcaacatcagcgaatggaaggacaagcccactcatgagatccttcaaaaactcaacgactgcagctgtctggcgtcccaagccatcctcctcggaatcttgcttaaacgcgagggaccgaacttcatcacgaaggaagggaccgtgtctgaccatattgaacgagtctaccgccgcgcgggatcccagaaactgtggctcgctgtgcggtacggtgcagccttcactcagaaattcagcagctccatcgcgccgcatatcacgaccttcctggtccacggaaagcaggtcaccttgggggctttcggtcacgaagaagaagtgatctcgaacccactgagcccccgggttatccagaacattatctattacaagtgtaacacccacgacgaaagggaggcggtgatccaacaggagctggtcatccatattggatggattatctccaataacccggagctgttttctggaatgctgaagatcaggatcggctggatcatccatgcgatggaatacgaactgcagatccggggaggtgacaagccggccctggacctgtaccaactgtccccatcggaggtcaaacaacttctgctcgacatcctgcagccgcagcaaaacggccggtgctggctgaatcggcggcagatcgacggaagcctgaatcgcactccgaccggattctacgatcgggtgtggcagattctggagcggactccaaacggaatcatcgtggcgggcaagcatctgccacaacaaccaaccctgagcgacatgaccatgtatgagatgaatttctcgttgctcgtcgaagataccctgggcaatatagaccagccgcaataccggcaaatcgtggtggaactgctgatggtcgtctcgatcgtcctcgaaagaaatccagagttggagtttcaggacaaggtggatctcgatcggctggtcaaggaggccttcaacgaattccaaaaggatcagtcgagactgaaggagatcgagaagcaggatgacatgacctcgttctacaacactccaccgctggggaagcgcggaacttgcagctacctgacgaaggcggtcatgaacctcctccttgaaggggaggtcaagccaaacaacgacgatccgtgtctgatttcg

SEQ ID NO: 6317 - DNA, 3279 bp, Artificial Sequence
  derived and/or modified sequence
atggctggagctgcgggtttgactgccgaggtctcgtggaaagtgctggagcgccgcgcccgcaccaagcgttcgggatctgtttacgagcctttaaagtcaattaacctgccgcgccccgacaatgaaacattgtgggataaattggatcattactaccgaattgtcaagtcgactcttttgctttaccaatcacctactacgggccttttcccgaccaagacctgtggcggggatcaaaaggccaaaattcaagattcactttattgtgccgccggagcctgggcactcgccctcgcctatagacgcatcgatgacgataagggccgcacgcacgagttggaacattcggctattaagtgcatgaggggtatcctctactgttacatgcgacaggcagataaggtgcagcaattcaaacaggacccgagacccacaacgtgcctgcactcggtctttaacgtacacaccggtgatgaacttctgagctacgaggaatatggacatctccaaattaatgcagtttcgttatatctcttgtaccttgttgaaatgatttcaagcggcttgcaaatcatctataatacagacgaagttagtttcatccagaacctggtcttttgtgttgagcgggtttatcgcgtgccagattttggagtttgggagcgcggatcaaagtacaataacggctccaccgagctccactcatcctcggtgggtctggctaaagcggcattggaagcgatcaatggatttaatctgttcggcaaccaagggtgctcctggagtgttattttcgtcgaccttgacgcacataaccgtaaccggcagacactttgcagcttgctgcccagagagagtcgttcacataacacagatgcggcgctgttgccttgtatcagctatccggccttcgctttggatgacgaagtcctattttcgcagacattggataaggtggttaggaaattgaaagggaaatatggctttaaacggtttctccgggacggttaccgtacgtctcttgaagacccgaaccgttgttactacaagcctgctgaaatcaaactgttcgatggcatcgagtgcgaatttcccatatttttcctctatatgatgattgatggagtgtttagaggtaaccccaagcaagtgcaagaataccaggacttacttaccccggtcctacatcatacaacggaggggtacccggttgtgcctaagtactactatgttcccgcggatttcgtcgagtatgaaaagaataacccggggtcccagaagagatttccttctaactgtggtcgtgatggtaagctattcctgtggggtcaggcactgtatattatagccaagctccttgctgatgagttgatttcgccaaaggacattgaccctgtacaacgttacgtcccattgaaggaccaacggaatgtgtctatgcgtttcagtaaccagggtccactcgaaaacgaccttgtggttcacgtcgcactcattgccgaatctcaacgtctgcaggtttttttgaacacatatggaatccaaacacaaacccctcagcaagtggagcccattcaaatctggcctcaacaggagctggtaaaggcttacctgcagcttgggatcaatgaaaagcttgggctctcaggtcgtcccgaccgtccaatcggttgcctgggtacaagcaagatttatcgaattctcgggaagacagtcgtctgttatccaattattttcgacctgtcagatttttacatgtcccaggacgtttttctgttgattgacgacatcaagaacgccttgcagttcataaagcaatattggaagatgcatgggagaccccttttcctcgtgttgatccgagaggataatatcagagggtcacgttttaacccgatcctcgacatgctcgcggccttgaaaaagggcatcatcggtggggtcaaggtacatgttgaccggttgcaaactctgatatcaggcgccgtcgtcgagcaacttgattttctacgcatttccgacacggaagaactcccagagttcaagtcgttcgaagaattggagccgcctaagcattctaaggtcaagcgtcaatccagtacaccgtcggctcctgagttggggcaacagccagatgtgaacatctccgagtggaaggataaacctacccacgaaatcctccagaagctaaatgattgctcgtgtctagcttcgcaagcgattctcctcggtatccttctcaagcgagagggtcctaatttcatcaccaaagagggcaccgtctccgatcatatcgaaagggtttatcgtcgggctggaagccaaaagctgtggttggctgttcgttacggagcagccttcacgcaaaaattctccagtagcatcgcgcctcacatcacaactttcctagtacatggaaagcaggtgacactcggcgctttcggccatgaagaagaggtcatctcaaatcctttgtctcctagggtaatccagaacatcatttactacaagtgcaacacacatgatgaacgcgaggcggtgatccaacaggagctcgtaatccatatcggatggatcatctctaacaatcctgaactgttcagtgggatgctcaagattcggatcggctggattatccatgccatggagtacgaacttcaaattcgcggcggggacaagcctgccttggatctttatcaattgagtccatcagaggtgaagcagctattgcttgatatcttgcaaccacagcaaaacggacgttgttggttgaatagacgtcaaatcgatggctccctgaaccgtacacccacgggtttttacgatcgcgtctggcaaatactagagcggacacctaacggcataatcgtggctggcaagcatttaccgcagcagcctaccctctccgatatgactatgtacgagatgaacttttctctcctcgtcgaggacactctggggaatatcgatcaaccacagtatcgacaaattgttgtggagcttcttatggtcgtttcaattgtgctcgagcggaacccggagctggaattccaagataaggttgacctagatcgacttgttaaggaagcgttcaacgaattccagaaggaccaatcgcgacttaaggaaattgagaaacaagatgatatgacgtccttctacaatacaccacccctcggtaaaagaggcacttgcagttatttaacgaaggcggtcatgaatctacttttggagggtgaggtgaaaccgaataacgatgatccatgtctgatctct

SEQ ID NO: 6318 - DNA, 3279 bp, Artificial Sequence
  derived and/or modified sequence
atggcaggtgccgcaggtctgactgcagaagtcagctggaaggtgctggagagacgggcacggaccaaaagaagcggctcagtgtacgaaccccttaagagcattaacttgcctaggccagacaatgaaaccctgtgggacaaactcgatcattactaccgcattgtgaagtccacccttctgctttatcaatcacctaccaccgggttgtttccaaccaagacctgtggtggcgaccaaaaggccaaaattcaggattcgctgtactgtgcagccggggcatgggcccttgcccttgcttacagacggattgatgatgacaaagggcggactcatgaacttgagcattcagcgattaagtgtatgagaggtatcctgtactgctacatgagacaagcagataaagtccagcagtttaagcaggaccctcgaccaactacgtgcctgcactccgtctttaacgtgcataccggagatgaactgttgtcgtatgaagaatacggccatcttcaaatcaacgctgtgtcactctacctgctgtaccttgtggaaatgatcagctccggtctgcaaatcatttacaacaccgacgaagtctcattcattcagaaccttgtgttctgcgtcgagagggtctacagagtccctgatttcggcgtctgggagagggggtccaaatacaacaacggtagcaccgaactccattccagctctgtgggactggccaaggcagcgcttgaggcgattaatgggttcaacctgtttggtaatcagggatgttcttggtcggtgatttttgtggatctggatgcccataacaggaatagacaaactctctgtagcctccttccgcgcgagtcaaggtcccacaacaccgatgcggcactgttgccttgcatttcctaccctgcatttgcgttggacgacgaagtgctgttttctcagaccctcgataaggtggtccgaaaactgaaaggaaagtacggctttaagagattcctgagagatggataccgtacttcgctggaagatccaaatcgctgttactacaaacccgcagagataaaactctttgatggtatcgaatgcgagtttcctatctttttcttgtatatgatgatagatggggtgtttcgcggtaaccctaagcaggtccaagaataccaggatctcttgacgcctgtgttgcatcataccactgaggggtaccctgtcgtgcccaagtattactacgtaccggccgactttgtcgaatacgagaagaacaatccaggttctcaaaaaagattcccgtcgaattgcgggcgagatggcaaactctttctctggggacaggcactgtacattatcgcaaaacttctggcagacgagctgatctccccaaaagatattgatccagtgcaacgctacgtgccacttaaggaccaaaggaatgtctccatgcgctttagcaatcagggtccactggagaacgacctcgtggttcatgtggctcttattgcagaatcgcagcggctgcaggtgtttctcaacacgtacggaatacagactcagacgcctcaacaggtcgaacccattcagatttggccccaacaagagcttgtgaaggcatatctgcaactgggcataaatgaaaagctcggactgtcgggacgtcctgacaggcctatcggatgccttggtacttcgaagatttaccggattcttggaaagacggtcgtatgttaccccatcatctttgatttgagcgatttctacatgtcgcaagatgtgttcctcctgatcgacgacattaagaacgcactgcagttcattaaacaatactggaaaatgcacggtagacccctgtttctcgttttgatccgtgaggacaacattagagggtccagattcaacccgatcctcgatatgctcgcagcgttgaagaagggaataatcggaggggtgaaggtgcatgttgataggttgcagaccctgatctcaggtgccgtagtggaacaacttgattttcttcgtatttctgataccgaagaattgcctgagtttaagtcatttgaagagcttgagcctcctaaacactccaaggtgaagcggcaaagctcgactccatcagcacctgaactcgggcaacagccagacgtcaacatctcagaatggaaggataaaccgactcacgaaattctccaaaagctgaatgattgctcgtgtcttgcaagccaggcaatactgcttggtattcttctcaagcgggaaggacctaacttcatcaccaaagagggaaccgtttcagatcatatcgaacgtgtgtaccgaagggccggctcacaaaagttgtggctggccgtgcgctacggggccgcatttactcaaaagttcagcagctcgatcgcacctcacatcactaccttccttgtgcatggtaaacaggtcacccttggtgcatttggacacgaagaagaagtgatctcaaacccactttctcctcgggtgatacagaacattatctattacaagtgtaatacccacgatgaacgcgaagctgtgattcaacaagaactcgtgattcatatcggctggatcatttcgaataaccctgaactgttttcggggatgctcaagatccgaataggatggatcattcatgcaatggaatacgaacttcaaatacgtggaggagacaagcctgcgctggatctgtaccaactctcgccctcagaggtcaaacagcttcttttggatattctgcaaccccaacaaaacggaagatgttggctgaaccgccgtcagattgacggatcgctgaatcgtaccccaactggattttacgatcgtgtgtggcagatcctggagagaacccctaacggcattattgttgccggtaagcacttgccacagcagccaactctctctgacatgactatgtacgaaatgaacttctcgttgcttgtggaggataccctcggaaacatagaccagcctcaatacagacaaatcgtcgtggaactgctgatggtcgtgagcattgtgctggagcggaatccggaacttgaattccaggataaggtggacctggatcgcctcgtgaaggaggcgtttaacgaatttcaaaaggatcaaagccggctgaaggaaattgagaagcaagacgacatgacttccttctacaatacgccccctctgggaaagcgaggcacgtgttcgtaccttactaaggccgtcatgaaccttcttcttgaaggtgaggtgaagccaaacaatgacgacccttgtttgatctct

SEQ ID NO: 6319 - DNA, 3279 bp, Artificial Sequence
  derived and/or modified sequence
atggccggagcagctggtcttaccgcagaagtgagctggaaggtgctcgaacgccgtgcgcggacgaagcgatcaggttccgtctatgagcctctgaaatccattaatctgccacgaccagataacgagactctttgggataagttggatcactactacagaattgtcaaatccactctccttctttatcaatcgccaaccaccggcctctttccaaccaagacttgtggcggcgaccaaaaggcaaagatccaagactcgctgtactgtgccgcgggcgcctgggcactcgcgctggcataccggcgtattgatgacgataaggggcggacgcacgaacttgaacactcagcaatcaagtgtatgagagggatcttgtactgctacatgagacaggctgacaaggttcagcaattcaagcaagatccgcgccccactacgtgtctgcactccgtgtttaacgtgcacaccggagatgaacttctgtcgtacgaagaatacggtcaccttcagatcaacgcagtttcgctgtacctcctctatctcgtggagatgatttcttcaggactccaaatcatctacaatactgatgaagtcagcttcatacagaacctggtgttctgtgtggaacgcgtctaccgcgtgccagattttggggtgtgggagcggggcagcaagtataacaatggatcgaccgagctgcattcatcaagcgtggggctcgcaaaggcggcacttgaagcgattaacggattcaacctctttggtaatcaaggatgttcatggtcagtgatcttcgtcgatctggacgcacataatcgaaaccgtcagactctctgcagccttctcccccgcgaaagcagatcccataacaccgacgcagcactgcttccatgcatctcgtatcccgcatttgcccttgacgatgaagtgctgttttcgcaaactctggacaaggtcgtcagaaaactcaagggaaaatacggattcaaaagatttttgcgcgacggctaccgcacctccctggaagatcccaatcgatgttactacaagccggcggagataaagctgtttgatgggattgagtgcgagtttccaatattctttctgtatatgatgattgacggggtgtttcggggtaaccctaagcaagtccaggaataccaagatctgcttaccccagtgctgcatcatacgaccgaaggttacccggttgtccctaagtactactacgtaccagcagattttgtcgaatacgagaagaataatcctgggtcacaaaaacgatttccgagcaattgcggtagggacggaaaacttttcctttgggggcaagcactctacatcatagcgaagttgttggcagacgaactgatttcaccaaaggacattgatccagtgcagcgctacgtgccactgaaagaccaaaggaacgtgtcgatgcggtttagcaatcaaggaccgctggaaaatgatctcgtggtccacgtggcactcattgcggagtcgcagcgtctccaagtgtttcttaacacctacggaattcaaactcaaaccccacagcaagtcgaacccatacagatctggcctcaacaggagctggtgaaggcgtacctgcagttgggaataaacgagaagctcggcctctcgggtcgccctgatagaccaatcggatgtcttggaacttcaaagatctaccgtatcttgggcaaaactgtggtgtgttacccgatcattttcgacctttccgatttctacatgtcgcaggacgttttcctgctcatcgatgatatcaaaaacgccctgcagttcataaagcaatactggaagatgcatggacgacctctttttctggtgctgattagagaagataacatcagggggtcacgttttaaccccatactggacatgctggccgcactgaagaaagggatcattggaggcgtgaaggtccatgtggataggctccagactcttatctcaggagcagtggtggagcaattggattttcttaggattagcgataccgaagaacttccggagtttaagagcttcgaagaactcgaaccacccaaacatagcaaggtgaaaagacagtcatcgactccttcggccccagagctgggccagcagcctgacgtcaacatttccgaatggaaggataaacctacgcatgagattttgcaaaaacttaacgattgtagctgccttgcgagccaggctattctgctgggtatactcttgaaacgtgaaggcccgaatttcataactaaagaaggaaccgtgtccgatcatatcgagcgagtctaccggcgcgctggctcgcaaaagttgtggcttgcggtgcggtacggggccgctttcacccaaaagtttagcagcagcatagccccacacattaccacctttctggtgcacggaaagcaggtgactcttggtgcttttgggcatgaggaggaggtcatctcaaacccacttagcccacgcgtaattcagaacattatctactacaagtgcaatacccatgacgaaagagaagcagtgatccagcaggaactggtaatccacatcggctggattatctccaacaaccctgagctgttttcgggtatgctgaaaattcgaatcggctggataattcatgccatggaatacgaactccaaatcaggggaggtgacaagccagcccttgacctctaccaactttccccttcggaggtgaaacaactgcttcttgacatacttcaaccccagcaaaatggacggtgttggctcaatcggcggcaaattgacggttcgttgaatcgaacgccaactggattttacgatcgtgtgtggcagatcctggaaagaacccctaacggcattattgttgccgggaagcatttgcctcagcagcctaccctttcggatatgaccatgtatgaaatgaacttctcgctcctggtggaagataccctgggcaacatcgaccaacctcaataccgtcagattgtggttgagttgttgatggtcgtgtcaattgtcctggagagaaaccccgaactggaatttcaggataaggtggacctggaccgcctggttaaagaagcattcaatgaatttcaaaaggatcaaagccgccttaaggagatagagaagcaggatgatatgacttccttctataacaccccacccctcgggaagagaggaacgtgttcataccttactaaggccgtcatgaatttgcttctcgagggagaagtgaagcctaacaacgatgacccttgcctcattagt

SEQ ID NO: 6320 - DNA, 3279 bp, Artificial Sequence
  derived and/or modified sequence
atggcaggagccgctggtctgacggccgaagtctcctggaaggttttggagcggagggcaagaacaaagcgcagtggctccgtgtatgagcccctcaagagcataaaccttccaagacccgataatgagactctctgggataaactcgatcactattaccgtatcgtgaagtcgacattgttgctgtaccaatcccccacgactggcctgttccccacaaagacttgcggaggggatcagaaagccaagatacaggactccttgtattgcgcagccggagcctgggctcttgcactggcttatcggcgcatagacgatgacaagggcaggacccatgaactcgaacacagtgctatcaagtgcatgcgtggcatcctgtattgctatatgcggcaggctgacaaagtccagcagtttaaacaagatcccagaccaacaacctgtctgcattctgtttttaatgtgcacaccggggatgaattactctcgtatgaggaatatggccacctccagatcaacgctgtgtcgctgtacctgctgtatctggtcgagatgatctcatcaggacttcagattatatataatactgacgaggtttcatttatccaaaatctggtgttttgcgtggaacgcgtttatcgcgttccagatttcggcgtgtgggagcggggctcaaagtataacaatggatccacagagctacacagttccagtgtaggactagctaaggccgccttggaagccatcaatgggttcaatctgttcggcaatcaggggtgcagttggagtgtaatatttgtcgatctggatgcacacaatcggaacaggcagaccctttgttccctcctaccgcgggagagtagaagccacaatacggatgcggcacttctgccctgcatttcctatcctgcttttgccctggacgacgaagttcttttttctcaaaccttggataaggtagtgcgcaagctgaaagggaaatatggctttaaacgctttctgcgagatggatatcggacctccttggaggacccaaatcgctgctattacaaacctgccgagataaaactgttcgatgggattgaatgcgaatttcccattttctttttgtatatgatgatcgatggcgtgtttcgtggtaatcctaaacaggtccaggagtaccaagatcttttaactcccgtcctacaccacaccactgagggctaccctgtcgtgccgaaatactactatgtacctgccgatttcgtcgagtatgagaagaacaaccccgggtctcagaagaggttcccatcaaattgtggccgtgacggaaaactgttcctgtgggggcaggctttgtacattatagctaaactcctagccgatgaattgatttcacctaaagacattgatccagtccagcgatacgttcccctcaaggaccagcgcaacgtgtcaatgcggttcagtaaccaaggccccctggaaaatgacctcgtggtacacgtggccttgattgcagagtcccaacgcctccaggtttttcttaatacctacggtattcagacccagaccccccaacaggtggagccaatacaaatctggccgcagcaagagttggtcaaagcatacctgcagctgggcataaacgagaagttgggcctgagtggacgaccagatagacctattgggtgccttgggacttccaagatttacaggatcctgggtaagacggtggtttgttatccaatcatattcgacctttccgacttttacatgtctcaggacgtatttttgcttatcgatgacattaagaatgctttgcagtttatcaaacaatactggaagatgcatggtcgaccgttgtttctggtcctcatccgggaagacaatatacgtggcagcaggtttaaccctattctggacatgctggctgcactgaagaagggcattatcggcggagtcaaggtccatgttgaccgtttgcagaccctgattagcggggcggtggtggaacaattggattttctaagaattagtgataccgaagagctgccagagtttaagagcttcgaagagctcgaacctcccaaacacagcaaagtgaagcgccagagttccacccctagtgcgcccgagttaggacagcagccggacgtcaacatctccgagtggaaagacaagccgacacatgagattctccagaaactcaacgattgcagttgcctggcctcccaggcaatcctcctcgggattctgttaaagcgcgagggacccaattttatcacaaaggaggggacagtcagtgatcacattgagcgagtctaccgacgcgccggcagccaaaagctgtggctagccgttcgctatggagccgcctttactcagaagttttcgtcttccattgctcctcacatcactacctttttagtgcacggcaaacaggtcacacttggcgcttttggacatgaagaagaggtgatttctaaccccctatctccccgggtgatccagaatatcatttactacaagtgcaatacgcatgatgaacgcgaggcggttatccagcaggaactggtgattcatatcggatggatcatcagtaataatcctgaactattttcaggaatgctgaagatacggatagggtggattatccatgccatggagtacgaactgcagatcaggggcggcgacaaacccgccttagatctttatcagctgagcccttcagaggtgaagcagctcctgctggacattctgcagccccagcagaacggtagatgttggctaaatcgcagacagatcgacggctcactcaatcggacaccgacaggcttttacgatagagtgtggcaaatcctggagaggaccccaaatgggatcattgttgcaggcaagcacctgcctcagcagcctacactctccgacatgactatgtacgagatgaatttctccttactggttgaagacacactcggcaacattgatcaaccccaatataggcagatcgtggtcgaattattgatggttgtgtcaatagtgctcgagcggaatccagaacttgaatttcaggacaaagtggacctcgaccggcttgttaaggaggcatttaacgaattccagaaggatcagtcacgtctgaaagagatagagaagcaggacgacatgacaagtttctacaacaccccacctctgggtaagagaggcacttgctcttatcttacaaaggcagtgatgaatctgcttctggagggtgaagtaaaacctaacaatgatgacccctgcctaatttca

SEQ ID NO: 6321 - DNA, 3279 bp, Artificial Sequence
  derived and/or modified sequence
atggcgggcgccgcaggcctgaccgccgaggtgtcgtggaaggtgctcgaacgcagggcacgcactaagcgctccggatcagtgtacgagcctctcaagtccattaatctgcctcgcccggacaacgagacgttgtgggacaagctggaccattactaccggattgtcaagtcgacgctgctgctgtaccaaagcccgaccaccggactctttccaactaagacctgtggcggcgatcagaaggcaaagatccaggattccttgtactgcgcagctggagcctgggcgctcgccctggcctacagacgcatcgacgacgataaagggcgcacccacgaactcgagcacagcgcgatcaagtgcatgagagggatcctgtactgctacatgcgccaagctgacaaagtccaacaattcaagcaagatccgcgtcctaccacttgcctgcattcagtgttcaacgtccatactggagatgagctgctctcctacgaggaatacggccacctgcaaatcaatgcggttagcctctacttgttgtacctggtggaaatgatctcctcgggcctgcagatcatttacaatactgacgaggtgtcgttcatccaaaacctggtgttctgcgtggaaagagtgtaccgggtgcccgattttggagtctgggagagaggttcgaagtacaacaacggctctaccgaacttcactcctcctcggtgggactggctaaggctgcactggaggccatcaatggatttaacctgttcggaaatcagggctgttcatggtcggttatcttcgtggatctggacgcgcataaccggaataggcagaccctgtgtagcttgctcccgcgcgagtcccgctcgcacaacaccgacgcggcgttgctcccatgcatctcatacccggcgttcgcccttgacgacgaagttctcttttcccagactctcgataaggttgttcggaagttgaagggtaaatacggattcaagcgctttctgcgcgacggttacagaacctcactggaggacccaaacagatgctactacaagccggctgagattaagctgtttgacggaatcgaatgcgaattccctatcttcttcctgtacatgatgatcgatggtgtgttccgcgggaatccgaagcaggtgcaagagtatcaggacctgctgacgccggtgctgcaccacacgaccgaaggatacccggtggtgcccaaatactactacgtgcccgctgacttcgtggaatacgaaaagaataatccagggtcccagaagagattcccttcaaactgcggccgcgatggaaagctctttttgtggggacaggcactctacatcatcgctaagctcctggcggatgagctgatctccccaaaggatatcgatccagtgcagcgctacgtgccgctgaaggaccaacggaacgtctcaatgaggttcagcaatcaaggtcccctggaaaatgacctcgtggtgcacgtggcactcatcgccgaatcccaaaggctgcaggtattcctcaacacctatgggatccaaacccagaccccccagcaggtcgagcctatccagatttggccacagcaggaactcgttaaagcgtatctccagctgggtatcaacgaaaaactgggactctcgggacgtccagaccgaccgatcggctgtctgggaacctccaagatctaccgcatcctcggaaagaccgtggtgtgctatccgatcatcttcgacctgagcgacttctatatgtcgcaggacgtgttcctcctcatcgatgatatcaagaacgcgctccagttcattaaacagtactggaagatgcacgggaggccgttgtttctggtgcttatccgggaagataacatccgcggtagtcgtttcaacccgattctggatatgctggcagccttgaagaagggcatcatcggcggcgtcaaggtccatgtggacagactgcagactctgatctcaggagccgtggtggaacagctggattttctgcggatctcagacaccgaagaactccccgagtttaagagctttgaggagctcgaaccgccgaagcactcaaaggtgaagcgccaaagcagcaccccgtctgccccggagctcgggcagcagccggacgtgaatatcagcgagtggaaggataaaccgacccacgagattcttcagaagctcaacgactgctcctgcctcgccagccaagctatactgctcggtatcttgctgaagcgggaaggacccaacttcataacgaaggaggggaccgtctcagaccacatcgaacgggtgtacaggagggccggaagccagaagctgtggctcgccgtccggtatggcgcagccttcacccagaagttcagcagctcgattgccccgcacatcactaccttcctggtccatggaaagcaagtgaccctcggagccttcggacacgaagaggaggtcatctcgaatccgctctccccgcgcgtcatccaaaacatcatctactacaagtgtaacacccacgacgagagagaggccgtcatccaacaagaactggttattcacatcggttggattatcagcaacaaccctgagcttttctcgggaatgctcaagatcaggattggttggatcatccatgccatggaatacgagctccagatcagagggggtgacaagcctgcgctcgacctgtaccagctgagcccaagcgaggtgaaacagctgcttctggacatcctccagccgcaacaaaacgggaggtgttggcttaaccggagacagattgacggatcgttgaataggaccccaactgggttctacgatcgggtgtggcagatcctcgagcgcacgccaaatggaatcatcgtggccggcaagcatcttcctcaacagccgaccctgtcggacatgactatgtacgaaatgaacttctccttgctcgtggaagatactttgggcaatatcgaccagcctcagtaccggcaaattgtcgtcgaacttcttatggtggtgtcgatcgtgctcgaacggaaccccgagcttgaatttcaggataaggtcgacttggaccgcctggtcaaggaagccttcaacgaattccagaaggatcagtcgaggctgaaggaaatcgagaagcaggatgacatgactagcttttacaacactcctccactgggaaagcgcggcacctgctcttacctgactaaggcggtgatgaaccttctgctcgagggcgaagtgaagccgaacaacgatgacccgtgcctcatcagc

SEQ ID NO: 6322 - DNA, 3279 bp, Artificial Sequence
  derived and/or modified sequence
atggctggggcggccggtctcacagctgaggtcagctggaaagtgctggaacgccgggccaggaccaagcgcagcgggtctgtgtacgagccgctgaagtcaattaaccttccaagaccggataacgaaacactttgggataaactcgatcattactacaggattgtgaaatccacgcttttgctgtaccagtctcccaccacgggactctttccgacgaagacctgcggaggagatcagaaggctaagatccaggactcactctactgcgccgccggcgcttgggcccttgccctggcctacagacggatcgacgatgataaaggtcggacgcacgagcttgagcactctgcgatcaagtgtatgagaggaatcctttattgctacatgagacaggcggataaagttcagcaatttaagcaggacccacggcccaccacctgcctgcacagcgtattcaacgtgcataccggtgatgaactgctgtcctacgaggagtacggtcatcttcagattaacgcagtctccctttacttgctttaccttgtggagatgatttcttctggcttgcaaatcatatataacaccgacgaagtgagcttcatccagaacctggtgttctgtgtggagcgggtgtacagagtgccagactttggcgtctgggagcggggctcaaagtataataacgggtcaaccgaactgcacagttcctcagtggggttggccaaggctgctctcgaggcaatcaatgggtttaatctcttcggtaaccaggggtgttcttggtccgtgatatttgttgacctcgacgcacataataggaatcggcaaaccctttgtagtttgctgccaagagaaagcaggtctcataatacggatgcggctctcctcccatgcatttcttatccagcgttcgcgttggacgatgaagtcctgttctcccagaccttggacaaggtggtccgcaaactgaaggggaagtacggtttcaagcgattccttcgcgacggctacaggacctcccttgaggaccccaacaggtgttattacaagcccgcagaaattaagctctttgatggcattgagtgcgaatttcctatattctttctctacatgatgatagacggagtcttccgcggaaatcccaagcaggtgcaggagtaccaggatctgttgactccggtcttgcatcacacaaccgaagggtacccagttgtgcccaagtactactacgtgcctgctgactttgtggagtatgaaaagaacaatccaggctcccagaaaagattccctagtaattgcggcagagatggaaaactgttcctgtggggccaggccttgtatattattgctaaactgctggctgacgaactcatctctcctaaggacatcgatcctgtccagagatacgtaccgctgaaggatcaaaggaatgtaagcatgcgattttctaaccagggaccattggaaaacgatctcgtggtccatgttgcccttatcgccgaaagccagagactccaggtttttctgaacacttacgggattcagactcaaacgcctcagcaggtcgagcctatacaaatttggccacaacaagagctggtgaaggcctatctgcagctggggatcaacgaaaagctgggactgagcggaaggccagatcgacccatcggctgcctcggcaccagcaagatatatcggattctgggaaaaacagtggtttgctaccctataatcttcgacctgtctgatttctatatgtcacaagatgtctttctcctcattgacgacatcaagaacgccctccagtttataaaacagtactggaaaatgcacggtcgcccactgtttctcgtcctgatccgcgaggacaatatcagagggagccggtttaacccaatattggacatgctggccgctttgaaaaagggtatcataggcggtgttaaggtccatgtggatcgacttcagaccctgatctctggagctgtggtagagcagctcgatttcctgcgcatctccgacaccgaggaactgcccgaattcaagtccttcgaagagctcgaaccacccaagcactcaaaagttaagcgccagagctctacgcccagcgccccagagcttggtcaacagcctgatgtgaatataagcgagtggaaagacaaacccacccacgaaatccttcaaaagttgaatgactgctcttgtctggcttcccaggcgatcctccttgggattctccttaagcgagagggaccaaatttcataaccaaagagggaactgtgagcgatcacatcgagcgcgtctatcgccgggccggttctcagaagctgtggctggcagttcgctatggggcggccttcactcaaaagttctcatccagtatagctccccacattactactttcctggtgcatggcaagcaggttacactgggcgcattcgggcacgaggaggaagttatttctaacccgctttcccctagagtcatccagaatatcatctactacaaatgcaatacccacgatgagcgagaggcagtgatacaacaggagctggtgatacacatcggctggataatcagcaataatccagagctgttctctgggatgcttaagattcgcatcggctggattatacatgccatggagtacgaacttcaaattcgcggaggagacaagcctgcactggatctgtatcagttgagcccctctgaagtaaagcagctcctgctcgatatactgcagccccagcagaatggcagatgctggctcaataggaggcagatagatggcagtctcaaccggacccctactggcttctatgaccgcgtgtggcagatcctggagaggactcctaacgggattattgtggctggcaagcatctgccacagcagcccaccctgtctgacatgactatgtatgaaatgaatttcagcctgctcgtggaagacactctcggaaacatcgatcagccacagtataggcagatcgttgtcgagctgttgatggttgttagcattgtgctcgagaggaacccagagctggaatttcaggataaagtggacctggatcgattggtgaaggaggcctttaacgagtttcagaaagatcaaagccggctgaaggagattgaaaagcaggacgatatgacgagcttttataatactccacctctgggcaagaggggaacgtgttcctacctgactaaggctgtgatgaacctgctgctcgagggcgaggtaaagcccaataatgacgacccttgtcttatctcc

SEQ ID NO: 6323 - DNA, 3279 bp, Artificial Sequence
  derived and/or modified sequence
atggctggtgctgctggattaacagctgaagtttcttggaaagttcttgaaagaagagcaagaactaaaagatctggttcagtttatgaacctttaaaatctattaatttacctagacctgataacgaaacattatgggataaacttgatcattattatagaattgttaaatctactttattgttataccaaagtcctactacaggattattcccaactaaaacttgtggaggagaccaaaaagctaaaattcaagattcattatattgtgctgcaggagcatgggctcttgctttagcatacagaagaattgatgatgataaaggtcgtactcatgaattagaacattcagctatcaaatgtatgagaggaattctttattgttatatgagacaagccgataaagtacaacaattcaaacaagatcctagaccaactacatgtttgcattctgtttttaatgtacatacaggagatgaacttttatcatatgaagaatatggacatttacaaataaatgctgtttcactttatttattatatttagttgaaatgattagtagtggattacaaataatttataatactgatgaagtctcgtttattcaaaacttagttttctgtgttgagcgtgtgtatagagtaccagattttggagtttgggaaagaggatctaagtataataatggaagtactgaacttcatagttcaagtgttggattagcaaaagcagcacttgaagcaattaatggatttaatttattcggaaatcaaggatgttcatggtcggtaattttcgtagatttagatgctcataatagaaatagacaaacattatgtagtttattgccacgagaatcaagatcacataatactgatgctgctttacttccatgtatttcatatccagcatttgctcttgatgatgaagttcttttttcacaaacgctagataaagttgtaagaaaattgaaaggaaaatatggatttaaaagatttttgagagatggatataggacatcacttgaagatccaaatagatgttattataaaccagcagaaattaaattatttgatggaattgagtgtgaatttccaattttttttctatatatgatgatcgatggagtgtttcgtgggaatccaaagcaagttcaagaataccaagacttacttacaccagttttacatcatacaactgaaggatatccagttgttccaaaatattattatgttcctgcagatttcgttgaatatgaaaaaaacaatccaggatctcaaaaaagattcccttcaaattgcggaagagatggaaaattatttttatggggacaagctctttatattatagcaaaacttttagcagatgaacttatttcaccaaaagatattgatcctgtccaaagatatgttccacttaaggatcaacgtaatgtttcaatgaggttttcaaatcaaggaccattagaaaatgatcttgttgttcatgttgcattaattgcagaatctcaacgtttacaagtttttttaaatacttatggaattcaaactcaaacaccacaacaagttgaaccaattcagatttggccacaacaagaacttgttaaagcttatcttcaattaggtattaatgagaaacttggacttagtggaagaccagatcgaccaattggttgtcttggaacatcaaaaatttatagaatattaggaaaaacagttgtttgttatcctattatatttgatctttctgatttttatatgtcacaagatgttttcttattaattgatgatatcaaaaatgctttacaatttattaaacaatattggaaaatgcatggaagaccattatttcttgttttaataagagaagataatattagaggaagtagatttaatccaatccttgatatgttagcagctcttaagaagggaattataggtggtgtaaaagtccatgtagatagattacaaactttaattagtggagctgttgttgaacaattagatttcttaagaatatctgatacagaagaattaccagaatttaaaagttttgaagaattggaaccaccaaaacattcaaaagttaaaagacaatctagtacaccttctgcaccagaattggggcaacaaccagatgttaatatttctgagtggaaagacaaaccaacgcatgaaattttacaaaaattaaatgattgttcttgtttagcatcacaagctattttacttggtattttactcaaaagagaaggaccaaattttattactaaagaaggtactgtttcagatcatattgaaagagtctatagaagggctggatctcaaaaattatggttagctgttagatatggagcagctttcacacaaaagttttctagttcaattgctccacatattacaacctttttagtccacggtaaacaagttactttaggagcctttggacatgaagaagaagttatttcaaatccattgagtccaagggttattcaaaatattatttattataaatgtaatacacacgatgaaagagaagcagttattcaacaagaattagttattcatattggatggattattagtaataatccagaattattttcaggaatgcttaaaattcgtattggttggattatacatgcaatggaatatgaacttcaaatacgtggaggagataaaccagctttagacttatatcaattatcaccaagtgaagtaaagcaattattattagatatactacaaccacaacaaaatggacgatgttggttaaatcgtagacaaattgacggatcacttaatagaacaccaactggattttatgaccgtgtttggcaaattttagaaagaacaccaaatggaattattgttgctggaaaacatttaccacaacaaccaacattatcagacatgaccatgtatgaaatgaattttagtttattggttgaagatactttaggaaacatagatcaaccacaatatcgtcaaattgttgttgagttacttatggtggtttcaattgttcttgaaagaaatcctgaacttgaatttcaagacaaagtggatttagaccgtttagttaaggaagcttttaatgagtttcaaaaagatcaatcacgtcttaaagagattgaaaaacaagatgatatgacttctttttataatacccctcctcttggaaaaagaggtacatgttcatatttaactaaagcagttatgaatcttttattagaaggagaagttaaaccaaataatgatgatccatgtttaatttca

SEQ ID NO: 6324 - DNA, 3279 bp, Artificial Sequence
  derived and/or modified sequence
atggcaggtgcagctgggctgacggccgaagtctcctggaaggtgctcgagcgccgggccaggactaaaaggtcaggatcagtctacgaaccgctgaagtcaatcaatctcccgcgcccggacaatgaaacgctgtgggataagctcgaccattactatagaatcgtgaagtcaaccctgctgctctaccagtccccgactaccggactgttccctaccaaaacctgcggaggtgaccagaaagccaagatccaagattcgctctattgcgcggccggagcgtgggcgctggctttggcatacagacgcattgatgacgataaggggcggacccatgaactggagcacagcgcgattaagtgcatgcggggtatcctgtactgctatatgagacaggcggataaggtccaacaattcaagcaagatccgcgccctaccacctgcttgcactcggtgttcaacgtgcacaccggagatgagctcctcagctacgaagaatacggacatctccagatcaacgccgtgtcgttgtaccttctgtacctggtcgagatgatctcctcggggctgcagattatctacaacactgacgaagtgtcgttcattcagaacctggtgttctgcgtggaacgagtgtacagagtgccggactttggagtttgggaacggggttcgaagtacaataatggatcgactgagctgcacagtagctcggtgggcctggctaaagcagctctcgaggcgatcaatggcttcaatctgttcggcaaccagggatgctcctggtcggtgatttttgtggatttggacgcccataaccggaacagacaaacgttgtgctcactgctgcctcgtgaatccagaagccataacaccgatgcagcactgttgccttgtatcagctacccggcttttgccctggacgacgaagtgctgttctcccagacccttgacaaggtggtgcgcaagctgaagggcaaatacggctttaagcgcttcctccgcgacggatacagaacgtccttggaagatccgaaccgctgctactacaagccggcagaaatcaagttgttcgatggaatcgagtgcgagttcccgatctttttcctgtatatgatgatcgacggagtgttcagaggaaatccgaagcaggtgcaagaataccaggacctgctcaccccagtgctccaccacactactgaaggatacccggtcgtcccaaagtactactacgttcctgccgattttgtcgaatacgaaaagaataacccgggatcccaaaagcggttcccgagcaactgtggtcgggacggcaaattgttcctttggggccaagcactctacatcatcgcgaaactgctggccgacgagttgattagccccaaggacatcgatcccgtgcaacgctacgtcccgctgaaggaccagcgcaatgtgtcaatgagattttcaaaccaaggaccactggaaaatgaccttgtcgttcatgttgctctgattgctgagagccaaaggctccaggtctttctcaacacttacggcatccagacccaaacccctcagcaggtcgagcctatccagatctggccgcaacaggagttggtgaaggcgtacttgcagttgggaatcaatgagaaacttggcctttcaggacggcccgatcggccaatcgggtgtctgggcacctcaaagatctatcgcattctgggcaaaaccgtggtttgctaccctatcatcttcgacttgtccgacttttacatgtcgcaagacgtgttcctgctgatagacgacatcaaaaacgccctgcagtttatcaaacagtactggaagatgcatgggcgtccactgttccttgttttgatccgcgaggataacatcagaggatcccgctttaaccctatccttgatatgcttgcagctctgaagaaggggatcatcgggggagtgaaggtgcatgtagaccggctgcagaccctgatctccggcgcagtggtggagcagttggatttcctccggatctccgatactgaagagttgccggaattcaagtcgttcgaagagttggaaccaccgaagcactccaaggtgaagcggcagtccagcactccctcagccccagaattgggccagcaaccagatgtgaatatctccgagtggaaagataagccaactcatgaaatcctgcagaagctgaatgactgtagctgccttgcctcccaggcaatccttttggggatcctgctgaagcgagaaggaccaaacttcattactaaggagggaactgtgtctgaccacatcgaaagagtctacaggcgcgccgggtcacagaaactgtggctcgcggtgaggtacggagctgcattcactcagaaattcagctccagtatcgcaccgcatatcacgacctttctcgtgcatggtaagcaggtcactctgggggctttcggacacgaggaggaagtcatttcgaatccgctgtcgccgcgcgtcatccagaacataatctactacaaatgcaacacgcatgatgaacgggaagcagtgatccagcaggagctcgtgatccatatcggatggatcatctcgaacaacccggagctgttctccggtatgctcaagatcagaatcggttggatcatccacgcaatggaatacgaactgcaaatccggggtggcgacaagcccgctctcgacctgtaccagctcagtccatcggaagtcaagcagctcttgctcgacatcctgcagccgcagcaaaatgggagatgttggctcaatcggaggcaaatcgacggctctcttaaccggacccctactggcttttacgaccgcgtctggcagattctggagcgtaccccgaatggtatcatcgtcgccggaaagcacctcccgcaacagccgactttgtccgatatgaccatgtacgagatgaacttctcgctcctcgtcgaggatactcttggcaatatcgaccagccacaataccgccagattgtcgtcgaactcctcatggtggtgtcaatcgtgctggaacggaacccagaacttgaatttcaggacaaagtcgacctggatcgcctggtcaaagaagcattcaacgaatttcagaaagatcagtcgcgcctgaaagaaatcgaaaagcaggatgatatgacctcattctacaacacgccgccattgggaaagcgcggcacctgctcgtacttgaccaaggccgtgatgaatcttctgctcgaaggagaggtcaagcctaacaacgatgacccctgcctcatttcg

SEQ ID NO: 6325 - DNA, 3279 bp, Artificial Sequence
  derived and/or modified sequence
atggccggcgctgccggcctgaccgccgaagtgtcatggaaggtcctcgagagaagggcaagaaccaagcggtccggtagtgtgtatgagcccctgaaatccattaacttaccccgaccagataatgagaccctgtgggacaaactggaccattactatcgaatagttaagtcaaccctgctgttgtaccagtctcctacaaccggcttatttcccaccaagacctgtggaggtgatcaaaaagccaagatccaggacagcctgtattgtgccgcaggagcttgggccctcgcgctggcttaccgacggatcgatgatgacaagggccggactcacgagcttgaacatagcgccatcaagtgtatgcgagggatcctttactgttatatgcggcaggcagataaggtgcagcagttcaagcaggacccaagacccacgacgtgtctccatagcgtgtttaacgtacatactggggacgagcttctcagctacgaagaatacggccacttgcaaattaacgccgtgtctctgtacctgttgtacctggtggaaatgatttctagtggcctccagatcatatataacaccgatgaagtgagttttattcaaaatctggtattttgcgttgaacgtgtgtatcgggttcctgattttggagtgtgggaacgcggatccaagtataacaatggcagtaccgagctgcattcctccagtgttggtttggccaaagcagccctcgaagctataaacggctttaacttatttggaaatcagggctgtagttggtcggttatcttcgttgacttggatgcccacaatagaaaccgccaaaccctgtgcagcctgcttccccgcgagtcacgtagccacaacaccgatgctgccctgttaccctgtatttcctatcccgcctttgcactcgatgacgaggtgttgttctctcagacgcttgataaagtggtacgcaaactcaagggcaagtatggattcaaacgttttttgcgcgacggataccgtacctccctggaggatcccaacagatgctactacaaacccgcggagattaaattgtttgacgggatcgaatgcgagttccctattttttttctctacatgatgatcgacggggtgtttcgcggaaacccaaagcaagttcaggaatatcaggatctgcttacccccgttctccaccacaccactgaagggtatcctgtggttccgaagtactactatgtccccgctgactttgtggagtacgagaagaacaatcctggttctcagaaacggttcccatctaactgtggtagagatgggaaattgttcctttgggggcaggccctttacatcatcgcaaaactcctggccgatgagctcatatctcccaaagatatagacccagtacagcggtacgtgccgctgaaggaccagagaaacgtgtctatgcggttttctaatcagggaccgctcgaaaacgatttggttgtgcatgtggcgctgattgctgagtctcagcgactgcaggtgtttttgaatacgtatggcattcaaacccagaccccacagcaggtcgagcccattcagatctggcctcagcaggaactagtgaaggcttatctccagctgggaataaacgagaagctgggtctctctggacgtccagataggcccatcggctgcctcgggacctccaagatttaccggatcctgggaaagacagtggtgtgctatccaatcatcttcgatctttctgacttttatatgtcacaggacgtgttcttgctgattgatgatattaagaacgccctgcagttcattaagcagtactggaagatgcatgggaggcccttgtttttggtgcttatcagggaagataacatcaggggaagtaggttcaatcctatactggatatgctggctgccctgaagaaaggaattataggtggagttaaagtgcatgtcgataggctgcagactcttatctctggggctgtggtcgagcagcttgattttctcagaatctcagatacggaagagctgcctgagttcaaatcttttgaggagctagaacctcccaaacactctaaagtaaagcgccagagctccaccccttcagccccggaactagggcagcagccagatgtgaatatcagcgaatggaaagacaaacctacccacgaaatcttgcagaaactgaacgattgttcctgtctggcttctcaggcgatactgctgggcatactgctcaagagggaaggccctaacttcattactaaggagggtaccgttagtgatcacattgagagagtgtatcgtagggcaggatcccagaaactgtggctagccgtgcgctatggcgccgcttttactcagaagttctcatcaagtattgcccctcacataactacctttctggtacatggcaagcaagtgacactgggggcattcggccacgaggaagaggtaatttctaatccattgtccccaagggttatccagaacatcatttactacaaatgtaatacacacgacgagagggaagccgtgatccaacaggagctggtgattcacatcgggtggataattagcaacaacccggagctgttttctggcatgctgaaaattagaatcgggtggatcatccacgcgatggagtacgagctgcagatccgggggggagataagcccgccctggacctttaccagctcagccctagtgaggttaaacaactgcttcttgacatccttcaaccccagcagaatggacggtgctggctcaacagaagacagattgatgggtctctgaatagaacaccaacaggcttttacgaccgggtttggcagatcctagagcgcacgcctaacggcataatcgttgcaggaaaacatcttccacagcaacccaccctgtcagacatgaccatgtacgaaatgaatttctccttactcgtcgaggatactttaggcaacatcgatcagccacagtaccgccaaatcgtcgtggagctgctaatggtggtgtccatagtattggagcgcaaccctgagctagagttccaggacaaggtggatttggacaggcttgttaaagaggccttcaatgaattccaaaaggaccagtcccgtcttaaagaaattgagaaacaggacgacatgaccagcttctacaatactccacctttgggaaagcgcgggacttgctcatacctgactaaggctgtaatgaacttacttctggagggcgaggtgaagcctaacaatgatgatccctgtctgatcagc

SEQ ID NO: 6326 - DNA, 3279 bp, Artificial Sequence
  derived and/or modified sequence
atggccggcgccgctgggttgaccgctgaggtctcgtggaaggtcctggaacgtcgcgccagaaccaagcgcagcggctcggtgtacgaaccgctaaaaagtatcaaccttccccgtcccgataatgaaactctgtgggataagttggaccattattatcgtatagtgaagagcactctcctgctttaccagagcccaacgacgggcctattccctaccaagacatgcggcggcgatcagaaagcaaagattcaggacagcctgtactgcgccgccggcgcttgggccctagctctcgcctaccgtcgcatcgacgatgacaaaggccggactcacgaactggagcacagtgccatcaagtgcatgcggggtatcctgtattgttatatgaggcaggcagacaaggtgcagcagttcaagcaagaccctcgccccaccacttgcctgcacagcgtcttcaatgttcacacaggtgatgagcttctgtcttacgaggagtacggccacctccaaatcaacgctgtgtccttgtacctgctgtacctcgttgaaatgatttcctccggtctacagataatatacaacacggacgaggtttctttcatccagaacctggtcttctgtgttgagcgtgtgtaccgagtgccggatttcggagtctgggagcggggctcgaagtacaacaatggcagcaccgagcttcacagctcgtccgttggtttagccaaggcggcccttgaagccattaacggcttcaacttgtttggcaatcagggctgcagctggagcgtcattttcgttgatctagacgcgcacaacagaaataggcaaacactgtgttctctgctgcctagagaatcccgatctcacaacacggatgcagcgctgctgccatgcatcagttacccagcttttgccttggacgacgaagttttgttctcgcagactctcgacaaggtggtgcggaagttgaaggggaagtacggattcaagcgattcctgcgagatgggtatcgcacgtctctggaggaccccaaccgctgctattataagccggccgagatcaagctgttcgacggcatagagtgcgagttcccgatcttctttctctatatgatgattgatggtgtgttccgcgggaacccgaagcaggtgcaagagtaccaggacttgctcactccggtactgcatcacactacggagggttatccagtggtccctaagtactactatgtccccgccgatttcgtggagtacgaaaagaacaacccgggctcgcagaagcgcttcccttcgaactgcggccgtgatggcaagctgttcctgtggggtcaggccctgtacatcatagctaagctgctggccgacgaactgatatcccccaaggacatcgatccggtgcaacggtatgtccctctgaaggatcagcggaatgtcagcatgcgattctcaaatcaaggccccttggagaatgatctggtcgtccatgtcgctctgatagcagagtcacaacggctacaggtattcctcaacacatatggtatccagacccaaacgccacagcaggtggagccaattcagatctggccccagcaggaattagtaaaggcctatttacagttgggaattaatgagaagctgggcctgtctggtcgcccggacaggcccatcggttgccttggaacgtctaaaatatatcggattctgggcaagacggtagtgtgttaccctatcatctttgatttgagcgacttctatatgtcccaggatgtgttcctgttgatcgatgatattaagaatgctctgcagtttatcaaacaatactggaagatgcacggcagaccactgttcctggtattaatccgggaggataacatccgcggctctcgtttcaatccaatactggatatgctggctgctctgaaaaaaggcattatcggcggtgtgaaagtgcacgtggaccggcttcaaacgttgatctcaggcgcagtggttgagcagttggacttcctgcgtatcagtgacaccgaggagctgcccgaattcaagtcattcgaggagctggagcccccgaaacattccaaagtgaagcgccagtccagcactccaagcgcccccgagctgggacagcagcctgacgtgaacataagcgagtggaaggacaaacccacgcacgagatcctgcagaagctgaacgactgctcgtgcctcgcgagccaggccatcctgctgggaatcctcctcaagagggaggggcccaatttcattactaaggagggtacagtgtcagatcacattgaacgcgtgtaccgccgcgccggtagccagaaactgtggctcgcggtgaggtacggtgctgcgttcacgcagaagttctcctcgtccatcgccccccacattactacgttccttgtgcacggtaaacaggtgacactgggtgcgttcggacacgaagaagaggtgattagtaatccgctatcccctcgcgtgattcagaatatcatttactataagtgcaatacccacgacgagagggaggccgtaatccagcaggagttggtcattcacattgggtggataatttccaataacccagagctcttttccggaatgcttaagatcagaataggctggatcatccacgccatggaatacgagcttcaaatccgcgggggcgacaagccggctctggacctgtaccaactgtcgccttcggaggtaaagcaacttctgctggatatcctccagccgcagcagaacggccgttgttggttgaatcgtcgacaaattgatggctcattgaaccgtaccccgacgggtttttatgaccgagtctggcagatcttggagcgcacaccgaatggtatcattgtagccggaaaacatttgccacagcagcctactctcagcgacatgaccatgtacgagatgaacttctctctgctggttgaggacaccctaggcaacatagaccaaccacagtatcgccagatcgtcgtggagttattgatggtggtgtcaatcgttctggagcgcaaccccgagctggagttccaggataaggtcgatctagatcgtcttgtgaaggaggccttcaacgagttccagaaggatcagtcccggctcaaggagatcgagaagcaggatgatatgacgtccttctataacaccccgccgttgggaaagcgtggcacttgcagctacttgaccaaggccgtcatgaacttactcctggagggagaagtgaagcctaataatgacgatccctgcttaatctcg

SEQ ID NO: 6327 - DNA, 3279 bp, Artificial Sequence
  derived and/or modified sequence
atggcaggcgcagccggacttacggcggaggtgtcctggaaggtcttggaaaggcgtgcaaggaccaagagatcggggtccgtgtacgagccacttaagtctataaacctgccacgccctgataacgaaaccttgtgggacaaactcgaccattactaccggattgtgaagagcaccctcttgctgtaccagtcccctaccactgggctcttcccaaccaaaacttgtggaggggatcaaaaagcaaagatccaagactcgttgtactgtgcggccggcgcctgggccctggcacttgcatacagaaggatagatgatgacaagggcaggacccatgaactggaacattccgctatcaagtgtatgagaggaatcttgtattgctacatgcgccaggcagataaggtccagcagttcaagcaggacccgcgacctaccacctgcctgcattccgtgtttaatgtgcacaccggagacgagcttctttcgtacgaagaatacggacaccttcagattaacgcagtctctctttacctgttgtacctggtcgaaatgatctcgtcagggctccagatcatttacaacactgatgaagtgtccttcatccaaaacctggtcttttgcgtagaacgggtgtaccgcgtgcccgattttggcgtgtgggagagaggaagcaagtacaacaatgggtcgaccgagctgcactcgtcatccgtgggactggcgaaggcagcactcgaggccataaacggatttaacttgtttgggaaccagggatgtagttggagcgtcatttttgtggacctcgacgcacataacagaaacaggcaaactctttgctccctcttgccaagagagagccgttcgcataatactgatgcggcgttgctcccttgtatttcatacccagcattcgcccttgacgatgaagtgctttttagccagactctcgataaagtggtcagaaaactcaagggtaagtacggattcaaaagattcctgcgggacggttatcggacttcacttgaggatccaaaccggtgttactacaaacctgcagagataaaactttttgatggtattgaatgtgaatttcccattttcttcctgtacatgatgatcgatggagtgttccgaggtaaccccaagcaggttcaagagtaccaggatctgctgacccctgtgcttcatcataccactgaggggtatcccgtggtccctaaatactactacgtgccagcagacttcgtggaatacgagaaaaacaacccgggatctcagaagagatttccctccaactgtgggcgggatggaaagctgttcctttggggccaagcactctacattatagctaaacttctggccgatgaactcattagcccaaaggacatcgatccggtgcagcggtacgtcccacttaaggaccagagaaatgtgtcgatgcgctttagcaaccagggtccacttgaaaacgatcttgtcgttcatgtggcgctgatcgcagagtcccaacgacttcaggtgtttctgaacacttacggcatccaaactcaaactccacaacaagtcgaaccaattcaaatatggcctcagcaggaacttgtcaaggcgtacctgcagcttggaattaacgaaaaacttggtctgtccggacgaccggatcggcctattggatgtcttggaactagcaagatctaccgcatcctcggcaagaccgtggtgtgttatcctatcatatttgatctgtccgatttctacatgagccaagacgtctttttgttgattgatgacattaagaatgctcttcagttcattaagcagtactggaagatgcatggacgacccctgtttctggtgcttattcgtgaggacaacatcagaggtagcaggtttaacccaattcttgacatgctggccgcactgaaaaagggcattattggcggagtgaaggtgcatgttgatagactccaaaccctgatttcaggagcggtggtggaacaactcgactttcttcgcatatcggataccgaagaactgccagagtttaagagtttcgaagaacttgagccacctaagcattcaaaggtgaagcgacaatcatcaacgccctcggcaccagaactgggccagcaaccggatgtgaacatctccgaatggaaagacaaacctacccatgaaattctgcaaaaactcaatgattgcagctgtttggcatcgcaagcaattctgcttggaatcctgctcaaacgtgaggggcctaacttcatcactaaggaagggaccgtctcggatcatattgagagggtgtacagacgcgcaggatcgcagaaactttggctggcggtgagatatggtgctgcgttcacgcaaaagttttcttcgagcatagcccctcacatcacgacgttcctggtgcacggcaagcaggtcaccctgggcgcatttggccacgaagaggaagttatttccaacccactctcccctcgcgtgattcaaaacatcatttactacaaatgcaacactcacgatgagcgagaagcagtaatacaacaggaactggtgatccacatcggttggatcatctcgaacaaccctgaacttttttccggtatgttgaagattcggattggatggattatccatgctatggagtacgaactgcaaatcaggggaggtgacaagccggcactggacctctaccaactttcgcccagcgaagtgaagcaactgttgctggatattctgcagccacaacagaatggccggtgttggcttaaccggcggcaaattgacggcagccttaataggacgccaaccggattttacgaccgagtgtggcaaatcctcgaacgtaccccaaacggtataatcgtcgccggcaagcaccttcctcaacagccaactttgagcgacatgaccatgtacgaaatgaacttttccctgcttgtggaggatactctgggtaacattgaccaacctcaatacaggcagattgtggtcgaattgctcatggtcgtcagtatcgtgctcgaacgaaatccagaacttgagtttcaagataaagtggatctggaccggctggtgaaagaagcgtttaatgaatttcagaaagatcaatctaggcttaaggagattgaaaaacaggacgatatgacgtcgttctacaatactcccccactgggaaagaggggaacttgctcctaccttaccaaagctgtgatgaaccttctgctggaaggagaagtgaagccaaacaacgatgatccttgccttatttct

SEQ ID NO: 6328 - DNA, 3279 bp, Artificial Sequence
  derived and/or modified sequence
atggccggcgccgcgggactgaccgcagaggtgtcctggaaggtcctggaacggcgggcgcggactaaacgctccggatccgtgtacgagccgctgaagtcaatcaacctgccacgccccgataacgagactctctgggacaaacttgatcactactaccgcatcgtgaagtcgaccctgttgctgtaccagtccccgaccactggactgttcccgactaagacttgcggaggagatcaaaaagccaaaatccaggactcgctttattgcgcggcaggtgcctgggcgctggcccttgcgtaccgccggatcgacgacgacaaaggacgaacgcatgagctggaacattcagccatcaagtgcatgagaggaatcctgtactgctacatgagacaggctgataaagtgcagcaattcaagcaggatccacggcctaccacttgcctgcactcggtctttaatgtgcatactggcgatgaattgttgtcctacgaagaatacggacatctgcaaatcaacgccgtgagcctgtatctgctctacctggtggaaatgatctcctcaggactccagatcatctacaacaccgacgaggtgtccttcatccagaatctcgtgttctgtgtggagagggtgtacagggtgcctgacttcggagtgtgggaacgaggttcaaagtacaacaacggttcgaccgaactccactcgtcgtccgtgggtcttgccaaggccgcgctggaagcgattaacggcttcaacctgttcggaaatcagggatgttcctggtcggtgattttcgtggacctcgacgcccacaaccgcaaccgccaaacgctctgttcccttctgccgagggaaagtagatcgcacaacactgacgcggcgctcctcccgtgcatttcatacccggctttcgctttggacgatgaagtcctcttctcgcagactctggacaaggtggttcggaagctcaaggggaaatacgggtttaaacgctttctccgggacgggtacagaacgtcgttggaagatcccaaccgctgctactacaagcccgcggagattaaactcttcgacggcatcgaatgcgagtttcccatcttctttctctacatgatgatcgacggcgtgttccgtggtaatccgaagcaggtccaggaatatcaagaccttctgactccggtgctgcatcataccactgagggataccccgtggtgccgaagtactactatgtgcccgcggatttcgtggaatacgagaagaataacccaggatcacagaaacgattcccaagcaattgtggaagagatggcaagttgttcctctggggtcaggccctctacatcatcgctaagctgctggctgacgaactgatctcgccgaaggatatcgacccggtgcagagatacgtgccactgaaggatcagagaaacgtatcaatgcggttctccaaccagggccccctggagaacgaccttgtggtgcacgtggctctgatcgccgagagccaacggctgcaggtctttttgaatacttacggaattcaaactcagactccgcaacaggtggagcccatccaaatctggcctcagcaagaactcgtcaaggcttacctccagctcggcatcaacgagaagctcgggctgagcggacggccggatcgtccgatcggctgcctgggcacttcgaaaatctaccgcattctgggcaaaactgtcgtctgctacccgatcatcttcgatctgagcgacttttacatgtcccaggacgttttcctcctgatcgatgacatcaagaacgcactgcaattcatcaagcaatactggaaaatgcacggacggcctctgttcctggtgctgattagggaggacaacatccgcggctcgcggttcaacccgattctggacatgctggcagcactcaaaaagggaatcatcggtggggtcaaggtgcacgtggaccgcctgcaaaccttgatcagcggagccgtggtggaacagctggatttcctccgaatcagcgacactgaggagcttcctgaattcaagtcattcgaggaactcgagccaccgaagcactcgaaagtgaagcgccagtcctcgactccctcagccccagagcttggccagcagccggacgtgaacattagcgaatggaaggataaaccaactcacgagatcctgcaaaagttgaacgactgctcgtgcctggccagccaggctatcctgctcggcatactgctcaagagagagggcccgaactttatcacgaaggaaggaactgtgagcgatcacatcgagagagtctaccgccgcgccggatctcaaaagctgtggctggctgtgagatacggggcggccttcacccagaaattctcttcatccattgcaccgcacatcaccacgtttctggtgcacggaaaacaagtgaccctgggagcatttgggcatgaggaagaggtgatctcgaacccactgtcgccgcgcgtaatccaaaacatcatctactacaagtgcaacactcacgacgaacgcgaggctgtgatccaacaggaactcgtaatccacatcggatggatcatttcgaataatccagaactgttctccggaatgctgaagattcgcatcggttggatcatccacgccatggagtacgagctgcagatacgcggcggagataagccggcactggatctctaccagttgtcaccaagcgaagtcaaacagttgctgttggacatcctgcagccgcagcagaatggccgctgttggctcaataggagacagatagatggctccctcaaccgcacccccaccgggttctacgaccgggtgtggcaaattctcgagaggaccccgaacggaataatcgtggccgggaaacatctcccacagcagccgactctgtccgacatgacgatgtatgagatgaacttcagccttctcgtcgaggatactctgggaaacatcgaccaacctcaataccggcaaatcgtggtggaactgctgatggtggtgtccatcgtgctggagagaaacccggaactggagttccaggacaaggtcgacttggaccggctcgtgaaggaggccttcaacgaattccaaaaggaccagtcccggctgaaggagatcgaaaagcaggatgatatgacctccttctacaacaccccgccgttggggaaacggggcacttgctcctacctgacgaaggcagtcatgaacctgctcctcgagggagaggtcaaaccaaacaacgatgatccatgtctgatctca

SEQ ID NO: 6329 - DNA, 3279 bp, Artificial Sequence
  derived and/or modified sequence
atggccggggccgcaggcctcaccgccgaagtctcatggaaggtgttagagcgcagagcaaggaccaaacgctctggctctgtctatgagcctcttaagtctatcaacctacccaggcctgacaatgagacactgtgggacaagctggaccactactatcgtatcgtcaaatcaaccctcctcttatatcagtctcccactactggtttgtttcctacaaaaacttgtggaggcgaccaaaaggccaagatccaagattctctttattgtgctgctggggcgtgggcgctggccctggcctaccgacggatcgatgatgataagggacggacccatgagctcgaacactccgccatcaaatgcatgagaggtatcctttactgttatatgcgtcaggccgacaaagtgcagcagttcaagcaagatcccagacctacaacatgtctgcactcggtgttcaatgtgcatacaggagacgagcttctgtcatatgaagagtatgggcatctccagattaatgctgtttctttgtaccttctgtatctggtggaaatgatctccagcggcctacagataatctacaacacggatgaagtgagcttcatccagaacctggtgttttgtgtcgaaagagtctacagggtgccagatttcggcgtttgggaacggggatccaaatataacaatgggtccacagaactgcactcctcttctgtgggcttagctaaagctgccctggaggccatcaacggattcaatctgtttggcaaccagggatgctcttggtcagtgatcttcgtcgatcttgacgctcataacaggaaccggcagaccctgtgttccttactccctcgcgaatctaggagccacaacaccgacgcagcccttctgccatgtatatcatatccagctttcgccctggatgacgaggttctcttctcacagacgctggataaggtcgtccgcaagctgaagggcaagtatggttttaaaagatttctaagagacgggtatcggactagcctggaagatcccaataggtgttactacaaacccgctgagattaagttatttgatggaatcgaatgtgagttccccatcttcttcctctatatgatgatcgacggagtgttccgcgggaaccctaagcaggtgcaagagtatcaggatctgcttactccggttctgcaccatactaccgaaggctaccccgtggtgccgaaatattactacgttcccgccgatttcgtcgaatacgagaagaacaatcccggatcccaaaagcgctttccctccaactgcggcagagacggcaagttgtttctctgggggcaggctttgtatatcatcgccaaactgctcgccgacgaactaattagccctaaggatattgacccagtgcagagatatgtgcccctaaaagatcagagaaacgttagtatgaggttttccaatcagggacctttggagaacgatttggtggtgcacgtggcccttatcgcagagtctcagcgcctgcaggtgttcctcaatacatatgggatccaaactcaaaccccccagcaggtagagcctattcagatctggcctcaacaagagcttgtgaaagcttacctgcagctaggaattaacgagaagctcgggctgtcaggacgccctgatcggcccattgggtgtctagggacttccaaaatctatagaatcctcggtaaaaccgtcgtgtgttatcctataatctttgaccttagcgatttttacatgtctcaggacgtgttccttctgatcgatgatatcaagaatgcccttcaattcattaagcaatattggaaaatgcatggccgacccctgttcttggtgttgattagggaggataacatccggggatcgagattcaaccccatcttagatatgttggccgccttgaaaaagggcataataggtggggtgaaggtacacgtagatagactgcagacgctgatatccggcgctgtagtggaacagctggatttcctgaggatctccgacacagaggagctgccagagtttaagagtttcgaggagctggaaccccctaaacatagcaaggtgaaaagacagtcttccacccctagcgcacccgagctgggccagcagcctgacgtaaacatcagcgaatggaaagacaaacctacacacgaaatcctgcagaagctgaacgattgctcctgtttggcctctcaggctatcctgcttgggatcctgttaaagagagaaggcccgaattttattaccaaagagggcacagtgagtgatcacattgagagagtgtaccgacgggcggggtcacagaaactgtggctcgcggtccgctatggggctgcgttcacccagaagttcagcagcagcatagccccgcacattactaccttcttggtgcatggaaagcaggttacactcggcgctttcggccatgaagaagaggtgatatcaaatcccctgtccccccgcgtaatccagaatataatctactataagtgcaacacgcatgacgagcgcgaagcagttattcaacaggagttggttatccacattggttggataatcagcaataatcctgaactgttttctggaatgctgaagatccggatcgggtggatcattcatgccatggaatatgagctgcagattcgcggaggcgataaacctgctcttgatctgtatcagctgtcaccaagtgaagtgaaacagcttctcctagatattctccagccacagcagaacggcaggtgctggctaaacagacggcaaatagacggctccctgaatagaacccccactgggttttacgacagggtgtggcagatcctcgagcgtacccccaatggaatcattgtggcaggaaagcaccttccccagcaacccactctcagcgatatgaccatgtacgagatgaacttctcactgctggtggaggacactcttggaaatatcgatcagccccagtaccgtcaaatcgtcgtggagctgctcatggtagtgagcattgtgttagaaaggaaccccgagctggagttccaggacaaggttgatctggatcggctcgtcaaagaagccttcaatgagtttcagaaggatcaaagccgcttgaaggaaatagagaaacaagatgatatgacaagcttttacaacacaccaccccttggcaaacgcggcacttgtagttacctaacaaaagcggtgatgaacctcctgctcgaaggggaggtgaagcccaacaatgacgacccttgcttgatcagt

SEQ ID NO: 6330 - DNA, 3279 bp, Artificial Sequence
  derived and/or modified sequence
atggccggggcggcaggtctgaccgccgaagtctcatggaaagtgcttgagcgtagggcaagaacgaagagatcgggcagcgtgtacgaacccctcaagagcatcaatctccctaggcctgacaacgaaaccttgtgggataaactcgatcactactacaggatcgtgaagtccaccctgctgctttaccaaagccctaccacgggattgtttcccaccaaaacctgtggtggtgaccaaaaagcaaagatacaggattccctttactgtgcagcaggagcctgggccctggccctggcttataggagaattgacgacgataagggcagaactcatgaactcgaacattcggcaatcaagtgtatgaggggcatactgtactgttacatgagacaagccgataaggttcaacagtttaagcaggatcctcgcccgacgacctgcctccattccgtgtttaacgttcacactggagatgagcttctttcttacgaggaatacggacatctgcaaatcaacgccgtgtccctttaccttctctacctggtggaaatgatctcgtcaggacttcagataatctacaacactgacgaagtgtccttcatccagaatcttgtcttttgtgtcgaacgcgtgtacagggtgccggatttcggagtgtgggaacggggatccaagtacaacaatggtagcactgaactgcactcatcgtcagtgggtcttgccaaggcagccctcgaggcaattaacggtttcaatctttttggtaaccaaggttgctcctggtcagtgatattcgtcgatttggatgcacataaccgtaaccgccaaaccctttgttctcttctgccaagagaatcccgctcccacaataccgatgcagctctccttccatgtatttcctacccggcgtttgcacttgacgatgaggtgctgttttcccagactctggacaaagttgtcaggaagttgaaaggaaagtacgggttcaagcgcttcttgagggatggttaccgtacctcgctggaggacccaaatcgatgctactacaagccagcggagattaaactgtttgatggcatagaatgtgagttccccattttctttttgtacatgatgatcgacggtgtgtttaggggtaatcctaaacaggtccaagaataccaagatctgctgacccccgtgctccatcataccacggaaggctaccctgtcgtcccaaagtactactacgtccctgccgattttgtggagtacgagaagaataatcctgggtcgcaaaagcggttcccaagcaattgcggaagagacggaaaactgtttttgtgggggcaggcactgtacatcattgcaaaacttctggccgacgaattgatttcgcctaaggatatcgatccagtgcaacgatacgtgcctctgaaagatcagagaaacgtgagcatgaggtttagcaatcaaggacctcttgaaaatgacctcgtcgtgcatgtcgcattgatcgcagagtcacaaagactccaggtttttctgaatacgtatggtatacagactcagacgccccagcaagtggagcccattcaaatatggccacaacaagaattggtgaaggcgtatctgcaacttgggattaacgaaaaactgggtttgtcaggtcgtcctgacagaccaattgggtgtctcggaacctcgaagatatacagaatcctgggtaagacggtggtgtgttaccctatcatttttgacctgtcagatttctacatgtcccaggacgtgttccttcttatcgacgatatcaagaatgcccttcaattcatcaaacaatactggaagatgcacggacggccgctctttttggtgcttattcgagaggataacattcgaggttcacgttttaacccgatactggatatgctcgcagcacttaagaagggaatcattggcggtgtgaaagtgcatgtggatcgcctccaaaccctgatttcgggagcagtcgttgaacaactcgattttcttagaatttcagataccgaagaactgcccgagtttaagagctttgaggaactggaaccacctaagcattcgaaggtcaaacggcaatcgtcgactccatcggcccccgaactcggacaacagccagatgtgaacatttcggaatggaaggataagccgacccacgagatactgcagaaactcaacgattgctcgtgtcttgcatcccaagccatactccttgggatcctgctgaaacgtgaaggacctaactttatcacgaaggaagggactgtgtctgaccatatagaaagagtttaccgcagagcaggatcgcagaagctctggcttgcggtgagatacggtgctgcgttcacccaaaagttctcttcatcgatcgctcctcacatcactacctttctggtgcatggaaagcaggtgaccctgggtgcatttggccatgaagaggaagtcattagcaatcctctctcgccgcgtgtcatccagaatatcatctattacaagtgcaacactcatgacgaacgcgaagcagttattcaacaagaactcgtgatacatattggttggataatctccaataacccggaactgttttccggcatgcttaagattcgcatcggctggatcatacacgcaatggagtacgagcttcagatacggggaggcgacaagccagctctggatctgtaccaactctcaccttcagaagtgaagcaacttctcctcgacattctgcaaccacaacaaaacggcaggtgttggctcaaccgcagacaaattgatggctccctcaacagaacccctactgggttttacgatagagtgtggcagattctcgaacgcactccaaacggaatcattgtcgcaggcaagcaccttccacagcaaccgactttgtccgatatgaccatgtacgagatgaacttttccttgctcgtcgaggacacgctggggaatattgatcagccacagtaccgccagatagtggtcgagctgctgatggtggtgtccatcgtgcttgaaagaaaccccgaactggagtttcaagataaagtcgacctggatcggcttgtcaaggaagcattcaacgagtttcagaaagatcagtcgagactgaaggaaattgaaaagcaggacgacatgactagcttctacaacacccctcccctcgggaagagagggacttgtagctacctgactaaggccgtgatgaaccttcttcttgaaggagaggtgaagcctaacaacgatgatccttgcctgatcagc

SEQ ID NO: 6331 - DNA, 3279 bp, Artificial Sequence
  derived and/or modified sequence
atggcaggtgcagcgggccttacggcagaagtgtcgtggaaagtgctggagcgccgggctcgcacgaagcggtcaggctcggtgtacgaaccgttgaagtccatcaatctgccgcggcctgacaacgaaaccctctgggataagctggaccactactaccgcatcgtcaagtcgaccctgctgctgtaccaatccccgaccaccggcttgtttccgactaagacctgcggaggagatcagaaagcaaaaatccaggacagcttgtactgcgcagccggtgcttgggctctcgcgctcgcgtaccgccgcattgatgacgacaagggccgcacgcacgaactcgaacacagcgccatcaagtgtatgcgcggaatcctctattgctacatgcggcaggctgacaaggtgcagcagtttaagcaggatcctcggccgaccacttgcctgcatagcgtgtttaatgtgcacactggggacgaactgcttagttacgaggagtacggacatttgcagatcaatgcagtctccctctacctcctgtatctggtggagatgatttctagcggactgcagatcatctacaatactgacgaagtgtccttcatccaaaacctggtgttctgcgtggaaagagtgtacagggtgccggacttcggagtgtgggaacgtggctcaaagtacaacaacggatcaaccgagcttcacagctcttcggtgggactggccaaagcggcgctcgaggcgatcaacggtttcaacctcttcggcaatcagggatgttcatggtcagtcatcttcgtggacctcgacgcccataaccgcaatcgacagaccctgtgctccctcctgccgcgtgagagtcggtcacacaacactgatgctgcgcttctgccctgcatcagctaccctgcgtttgccctggatgacgaggtcttgttctcacaaactctcgataaggttgtgcgcaaactcaaggggaagtacggcttcaagagattccttcgggatggataccgcacgtcccttgaggatcctaatcggtgttactacaagccggcagagattaagctcttcgacggaatcgagtgcgagttcccaatcttcttcctgtacatgatgatcgatggagtgttccggggaaacccgaagcaagttcaagagtaccaagatctgctgactccggtgctgcaccataccactgaaggatacccggtcgtcccgaagtactactacgtgcctgcagacttcgtagaatacgaaaagaataaccctggatcccagaagcgcttcccttcaaactgcggaagagacggaaagctgtttctgtgggggcaggccctgtacattatcgccaaactgctggctgacgaacttatctctcccaaagatatcgatccggtccagcggtatgtgcctctgaaggaccagaggaacgtcagcatgcggttttctaaccagggtcccctggaaaatgacctcgtggttcacgtggcgctgatcgccgaatcgcaaagactccaggtgttcctcaatacttatggaatccaaacccagactccgcagcaggtcgagcccatccagatttggccacaacaggaactggtgaaggcctacctccagctgggaatcaatgagaagctgggtctgagtggcaggcctgacaggcccataggttgcctgggcacttccaagatctaccggatcctcggcaaaaccgtggtctgctacccgatcattttcgatctctcggacttttacatgtcccaggacgtctttctgctgatcgacgatatcaaaaacgccctccagttcatcaagcaatactggaagatgcacggcagaccactcttcttggtgctgatcagagaggacaacatccgagggagcagatttaacccaatcctcgacatgctggccgcgctcaaaaagggaatcatcggtggcgtcaaggtgcacgtcgaccgcctgcaaacccttatctcgggagcggtggtggaacagctggatttcctgcgcatctccgacacggaggagctgccggagtttaagtcattcgaagagctggaaccgccgaagcattcgaaggtcaagcgacagagctcgaccccttctgctcccgagctggggcaacaacctgacgtgaacatttccgaatggaaggataagccgactcatgagatcctgcaaaaactgaatgactgttcatgcctggcctcgcaggcaatcctgctggggattctgcttaagagagagggaccgaacttcattaccaaagagggtaccgtttctgaccacattgagcgcgtgtatcgacgggcggggtcccagaagttgtggttggcagtccgctacggtgcggcctttacccagaaattcagctctagcatcgctccacatatcaccacgttcctggttcatggaaaacaagtgactctgggcgccttcggccacgaggaagaggtgatctccaaccccctgtccccgcgggtcatacagaacattatctactacaagtgcaacactcacgacgaacgcgaagcggtgattcagcaagagttggtcatccacatcggatggatcatttccaacaacccggaacttttttcgggaatgctcaaaatccgcatcggctggatcatccacgccatggagtacgaactccagatcagagggggagataagccggctctggatctgtatcaattgtccccgagcgaagtgaagcaacttttgctcgacatcctgcaacctcaacagaatggccggtgctggctgaaccgccggcaaatcgatggatcactgaatcgcactccgacgggcttttacgaccgggtctggcaaatcttggaacgcacccctaacggcatcatcgtcgcgggaaagcacctccctcagcagcctaccctttcggacatgaccatgtacgaaatgaactttagtctgcttgtcgaagataccctgggaaacattgaccaaccgcagtataggcagattgtcgtcgagctcctgatggtggtgagcatcgtgctggaaaggaatcccgagctcgaattccaagataaggtggacctcgatcgccttgtgaaagaggccttcaacgagttccaaaaagaccagagcagattgaaagaaatcgagaagcaagacgacatgacctccttttacaacactccgcctctcggaaagcgcggaacgtgctcgtacctcactaaggctgtcatgaatctgctgctggagggagaggtcaagccgaacaatgatgacccatgccttatcagc

SEQ ID NO: 6332 - DNA, 3279 bp, Artificial Sequence
  derived and/or modified sequence
atggcaggtgcagccgggctgacggctgaagttagctggaaggtcctggagcgccgggcccgaaccaagcgttccggcagcgtgtacgagccactgaaatccatcaacctcccccgtcctgataacgaaactctgtgggataaacttgatcactattatagaatagtaaaatccacactgctcctgtatcagtcccctacaaccggcctctttcctacaaagacctgtgggggcgatcagaaagccaagatccaggactcactctattgcgcagccggagcctgggccttggcattagcctataggcggattgatgatgacaaagggcgtacacatgaactcgagcattcggcaatcaagtgtatgagaggcattctgtactgttacatgagacaagctgacaaagtgcagcaattcaagcaagaccctcgaccaacaacctgtttgcacagtgttttcaacgtgcacactggagacgaactgctctcttacgaggagtatgggcacctacagattaacgcagtctctctgtacctcctgtacttggtggaaatgattagttctgggctccaaatcatctataacaccgatgaggtctcattcattcagaaccttgtcttctgcgtcgaaagggtctacagagtgcctgattttggggtgtgggaacgcggatccaaatacaacaacggctcaaccgagctccactcaagctctgtgggattggccaaagccgctctagaagccattaacggtttcaacctgtttggtaatcagggatgttcttggtcagtgatatttgtagacttagatgcccataatcggaatagacagactctgtgttcattactgccccgagaaagtaggagccataatacggatgctgcactactaccttgcatctcctaccccgcatttgctttggatgacgaggtcttgttttcccaaacgttggacaaggttgtacgtaagctgaagggcaagtacggttttaaacgatttctgagggatggatacagaacctccttggaggaccccaacaggtgttattacaaaccggctgaaatcaagctgttcgacggaattgaatgcgaattcccaatcttttttctgtacatgatgatcgatggcgtcttccgcggcaatccaaagcaggtgcaggagtatcaagacctcctcacccctgtactacatcatacaaccgaagggtatcctgtggttccgaaatattactacgtacctgctgattttgtcgagtacgagaagaacaaccccggctcacagaaacggtttccaagcaattgtggaagagatgggaagctgtttctgtggggtcaagcactgtatatcatcgccaagctgttggctgatgagctgatcagcccgaaagatatcgaccctgtccagagatatgtccctcttaaggatcaaagaaacgtatctatgaggtttagcaatcagggcccactggaaaacgacttggtggtgcatgtggctcttatcgcggagtctcagaggttacaggtgttccttaatacatacggaatacagactcagacaccccagcaggtggagcccattcagatctggcctcaacaggaactcgtgaaggcatacctccagctgggcatcaacgaaaaattaggattgtccggcagacccgaccgacctatcggttgtttgggcactagtaaaatttaccgtatacttgggaaaaccgtagtgtgttacccaattatctttgacctgagcgacttctacatgagtcaagacgtttttctgctgatcgatgatataaagaacgcactccagtttataaagcagtattggaagatgcacggtagacctctgtttctggtgttaatccgcgaagacaacattagagggtccagattcaacccaatactcgacatgctcgcagctctgaagaagggaataatcggaggggtcaaagttcacgtggacagactacaaacactgatctccggcgccgtagtggaacagctcgacttcctgaggatttctgacactgaagaactcccagagttcaagtctttcgaagaactggaaccaccgaaacactccaaagtgaaaagacagtccagtacgcccagtgcgccagaacttggccagcaaccagatgtgaacattagcgagtggaaggacaaaccaacccatgaaattcttcagaagctaaacgattgttcctgcttggcctcccaggccattctcctcggtatcctcctgaagagggagggcccgaattttataacaaaggaggggacagtctctgaccacatagagagagtgtaccggcgggctggatcgcagaagctctggctggccgttcggtacggagccgcgtttacacagaaattttcttcatctattgccccccacatcaccacatttctggtacatgggaaacaagtgaccttgggggccttcggacatgaagaggaggttatcagcaaccccctgagtccccgagtgattcagaacatcatctactataagtgtaatacgcacgacgaaagggaagccgtcatccagcaagaactcgttatacacattggatggattatttcaaacaatcctgagctgttttccggaatgctgaagatccgaatcggctggataatccacgcaatggaatacgaactgcaaatcagaggaggtgataagcctgccttggatctgtatcagctttccccatcagaggtcaagcagcttcttctagacatattgcagccacaacagaatggtcgatgctggctcaacaggcgacagatcgatggaagtcttaaccgaaccccaacaggattctacgaccgagtgtggcagatcctggagagaacacctaatggcattatcgtggccggcaagcacctgccacagcagcctactctgtcggacatgacaatgtatgagatgaacttcagcctgttagtggaagacactttaggaaacatcgaccagcctcagtatcggcagatcgtggtcgaactgctcatggtggtgtcaatagtgctggaaaggaaccccgagttagaatttcaggataaggttgacctggatcgattggtgaaagaggcatttaatgagtttcaaaaagaccagagccgtctgaaggaaattgaaaagcaggacgacatgaccagcttttataacactccgcctctcggtaagcgagggacctgcagttacctcacaaaggccgtgatgaatcttctgctcgagggcgaggtgaaacctaataacgatgatccatgtcttatctca

SEQ ID NO: 6333 - DNA, 3279 bp, Artificial Sequence
  derived and/or modified sequence
atggccggcgcggcaggcttaactgcggaggtgtcatggaaggtgctcgagaggagggcaagaacaaaaaggtctggtagcgtatacgagccactgaagagcatcaatctcccaaggccagacaacgaaacactgtgggataaacttgaccactactaccgcatcgtaaaaagcaccctgttgttatatcagagccccaccaccggcctatttcccactaagacttgtggcggagaccagaaggctaaaattcaggacagtctgtactgcgcagctggcgcatgggcgctggcccttgcttatagaaggattgacgatgataaaggccggacccatgagctggaacatagcgccatcaaatgtatgagaggcatactctattgttacatgcgtcaggcagacaaggtccagcagttcaagcaggacccacgccccactacctgtctccactcagtgttcaatgtgcacacgggtgatgaactcttgtcctacgaggagtacgggcatctgcaaatcaacgccgtctctctctatctcctgtacctggtggagatgatctccagcgggctccagatcatttacaatactgacgaggtgtcattcatccagaatctcgtcttctgcgtggaacgcgtttacagggtgccagactttggagtctgggagcgcggtagtaaatataacaatggttccaccgagctgcactctagctcagtaggacttgccaaggcggccctggaggccatcaacggatttaacctgtttgggaaccaggggtgcagctggtccgtgatatttgtggacctggacgctcacaatcgcaatagacaaaccctatgttctcttcttccccgggagtctcgctcacacaacactgacgcggcactgttgccatgcatcagctaccctgcctttgccctcgatgatgaggtgctgttctcccaaactctggacaaggtcgtaagaaaactgaagggaaagtatggttttaagcggtttcttcgcgacgggtacagaaccagtctcgaggacccgaatcgatgttactacaaacccgcagaaataaaattgttcgatgggatcgaatgtgagtttccaatatttttcctctatatgatgattgacggggtattccggggcaatcccaagcaggtccaggaataccaggatcttctcacacctgtgctgcaccatacaacagagggatatcctgtggtacctaagtattactacgtgccagcggatttcgtagaatacgagaagaataaccccggcagccaaaagcgctttccatccaattgcggacgggatggtaaactcttcctctgggggcaggccctctacattatcgctaagttacttgccgacgagctgatcagcccaaaggacattgaccctgtccagagatatgtgccgcttaaagaccagaggaacgtatccatgcgtttttcaaatcaggggccacttgaaaacgacctcgtggtgcacgtagcattgatcgccgagagtcaacgactccaggtattcctcaacacctatgggattcagacacagacaccacagcaggtggagcctatacagatctggccacaacaggagctggtgaaagcttatctgcagctcggcatcaatgaaaagcttggattgtcgggacggccggacaggcctataggctgcctcggcacaagtaaaatctatcgaattctgggcaaaacggtcgtgtgctacccgataatcttcgatcttagtgatttctatatgagccaggatgtatttctgctgatcgacgacatcaagaatgctctccaattcataaagcaatattggaagatgcatggcaggcctttgttcttagtcctgatacgtgaagataatatccgagggagccggttcaaccctatcttagacatgctagctgcattgaagaaaggaatcatagggggggtcaaagtacacgtggatcggctacagactctcatttctggggccgtcgtcgagcagttagatttccttcgcatctcggacaccgaagagctacctgagttcaagagttttgaggagttagagccgcctaagcacagtaaggtgaaaagacagtcgtctacacccagtgcgcctgaacttggtcagcaacctgacgtgaatatcagcgagtggaaggacaaacctacccacgaaattctgcagaaactgaatgattgctcctgcttggcctcacaggccatcctcctcggcattctgctaaaacgggaaggacctaattttataacaaaagaaggaaccgtgtcggaccacatagagagagtttatcggcgggcaggctcacagaaactgtggctcgccgtgaggtatggcgctgcctttactcagaaattctcatcctctattgctccacatataactacttttcttgtccacgggaagcaggttactctcggcgcattcggacacgaagaagaagtcatttcaaaccccctgagcccacgcgtgatccagaacataatttactataagtgcaatacccacgacgagagagaagccgttatccaacaggagctggttatccacatcggttggataataagcaataatcctgagctgttctcgggaatgctgaaaattcgcattggttggataattcatgccatggagtatgaactccaaatcagaggtggcgataagccagcgctggacctgtaccagctctctcctagcgaggtcaaacagcttctactggatattctacagccacaacagaatggaaggtgttggcttaatcgaaggcagatagatggcagcttaaatcggactcctacaggcttctacgacagagtgtggcagatactagagagaaccccaaacgggataatcgtcgctgggaaacatcttcctcaacagccgactctgtccgatatgactatgtacgaaatgaacttcagtctgctagttgaagacaccctgggcaatatcgatcagccccagtatcggcagatcgtcgtggaactactcatggtcgtgagtatagtgctggagaggaaccctgagcttgagtttcaggacaaggtggatctggaccgtctagtcaaggaggcttttaacgaatttcagaaagaccagtctcgtctgaaagaaatcgagaaacaggacgacatgacctcattctataatactccacccctcggtaagcgcggaacctgttcttatttgacaaaagcggtgatgaacctgcttctagagggagaggtgaagcctaataatgatgacccgtgtttgattagt

SEQ ID NO: 6334 - DNA, 3279 bp, Artificial Sequence
  derived and/or modified sequence
atggccggagcagccggtctgaccgcagaggtgtcatggaaagtgctggagcggcgagccagaactaagcgcagcggatcggtgtatgagccgcttaagtccatcaacctcccgcggccggacaatgagacgctgtgggataaacttgaccattactataggatcgttaagtctaccctccttctgtaccaatctcctaccactgggctgttcccgaccaagacctgtggcggtgatcagaaggccaaaatccaggacagcttgtactgcgcagcaggagcgtgggccctcgccctcgcctaccgcaggatcgatgatgacaagggaagaacccacgaattggaacattcagccatcaaatgtatgcggggaatcctgtactgctacatgcgccaggccgataaagtccaacagttcaagcaagacccgcgacctactacctgtctgcactccgtctttaacgtccacactggcgatgagttgctgagctacgaagaatacggacatctgcagattaatgccgtttcgctgtaccttttgtacctcgtggagatgatctcaagcggactccaaatcatctacaatacggacgaggtttcgttcatccaaaaccttgtgttctgcgtggagcgggtgtaccgggtgccggattttggcgtgtgggagcgcggctccaagtacaataatggaagcacggagctgcactcatcctcggtcgggctggctaaggccgccctggaggcgatcaatgggtttaacctgttcggtaaccagggatgctcatggtcggttatctttgtcgacctggacgcgcacaacagaaataggcagaccctgtgcagcttgctcccgagggaatctcgcagccacaacaccgacgcggcactcttgccatgcatctcgtacccggcgttcgctctcgatgacgaggtcctttttagccaaactctcgacaaggtggtgcggaagctcaaaggaaagtacggtttcaagagattcctccgggacggataccgcaccagcctggaggacccgaaccgttgttactacaaacccgctgaaatcaagctgtttgatggcatcgagtgcgagttcccaattttcttcctgtatatgatgatcgacggagtgtttaggggaaatccgaagcaagtgcaggaataccaagacctgctgactccggtgctccatcacaccaccgaaggttacccggtggtcccaaagtactactacgtcccggctgatttcgtggagtatgagaaaaacaacccgggaagccagaagcgctttccttccaactgtggaagggacggaaagctgtttctgtggggccaggctctgtacatcattgctaaactgcttgcggatgaattgatctcaccgaaggacatcgacccggtgcagcggtacgtgcctttgaaggaccagcggaatgtgtcgatgcgattctcgaaccaggggccactggagaacgatctggtggtccacgtggccttgatcgccgaaagccaacggctgcaagttttcctgaatacttacggtatccagacccaaacccctcaacaggtcgaaccgattcagatctggcctcaacaagaattggttaaagcctaccttcaactcggaatcaatgagaaactcggcctttcaggacggccggaccggccaattggctgcctgggtaccagcaagatctaccgaattctgggaaagactgtggtgtgctacccgatcatcttcgacctgtcggatttctacatgtcccaagacgtgttcctcctgatcgatgacatcaaaaatgcgttgcagttcattaagcagtactggaagatgcatggtaggccgctttttctcgtcctgattcgagaagataacattaggggctcgagattcaacccgatcctggacatgctcgctgcactcaagaagggaatcattgggggagtcaaggtgcacgtcgacagacttcaaactctgatctccggagccgtggtggagcagctcgacttcctccgcatttccgatactgaagaattgccggagttcaaatccttcgaagagttggaaccaccaaaacattcgaaggtgaaacgacagtcgtcgactccgagcgcgccggaactcggccagcaaccggacgtgaacatcagtgagtggaaggacaagcctacccacgaaatcctccagaagctcaacgactgcagctgcctggccagccaggctatcctccttggaattcttcttaaacgcgaaggaccgaatttcatcacgaaggaaggaaccgtgtcagatcacatcgaacgggtgtatcgccgcgctggatcccaaaagttgtggctcgcagtgcgctacggtgcagcgtttacccagaagttcagctcctcaatcgccccgcatatcaccaccttcttggtccatggaaagcaggtgactctgggagcatttggacacgaagaagaggtcattagcaacccgctgtctccacgcgtcatccagaatatcatctactataagtgcaatactcacgacgaacgggaggcagtcattcagcaagagttggtgattcacatcggatggattatctctaacaatccggaactgttctctggcatgctgaaaatccgcatcgggtggatcatccatgccatggagtacgagttgcaaattcgcggcggggataaaccggcactggacctgtaccaactgtcgccgtccgaagtcaagcaactgctcttggacatcttgcagccgcaacaaaacggacgctgctggctgaataggcgccaaatcgatggaagcctcaacagaaccccaactggattctacgaccgcgtgtggcaaatcctggagagaactcctaatggaatcatcgtggcaggaaaacacctcccccaacagccaactctgagcgacatgaccatgtacgaaatgaatttctcgctcctggtcgaagataccctcggaaacatcgaccagccacaataccggcagatagtcgtggagttgctgatggtcgtgtcaatcgtgctggaacgcaacccagaactggagtttcaggacaaggtggacctggatcgcctcgtaaaagaagcgttcaatgagttccaaaaggatcagtcccggctcaaagaaatcgagaaacaagacgacatgacgtcattttacaacactcccccactgggcaaaagaggcacttgctcttatctgactaaggctgtgatgaacctcctgctggaaggcgaagtgaagcctaataacgacgatccctgcctgatcagc

SEQ ID NO: 6335 - DNA, 3279 bp, Artificial Sequence
  derived and/or modified sequence
atggcaggcgctgcgggcctcactgccgaagtgagctggaaggtgctagagaggagagccaggacgaaaagatctggctccgtttacgagccccttaaaagtattaacctgccacgaccagacaacgagactttatgggacaagctggaccactactacagaatagtgaaaagcacgctgctgttgtatcagtcccccaccacgggcttgttcccaaccaaaacttgcgggggtgaccagaaggctaaaattcaagacagcctgtattgcgctgccggcgcatgggctttggccctggcctacagacgcatcgacgatgataaaggcagaacccacgagttagagcattctgccatcaaatgcatgaggggcattctgtactgttatatgcgacaggccgataaagttcaacaatttaaacaggatccgcgacctaccacctgtctccactccgtgtttaacgtccatacaggggacgagcttctttcatacgaggagtacgggcacctgcaaatcaatgccgtatcactatacttgttgtatcttgttgagatgatttcttccggtcttcagattatttataatactgatgaggtcagtttcatccagaatctggttttttgtgttgaaagagtgtatagggtgccagactttggtgtttgggagcgaggtagcaaatataataacggcagtactgaattgcattcttccagcgtcggcctcgctaaggcagctctggaagccattaatggctttaacctcttcgggaaccagggctgtagctggtcagtgatattcgttgacctagacgcgcacaaccgcaaccgtcaaacactttgctctttgttgccgcgagaatcacgctctcataacacggacgcagcgcttcttccttgtatcagctaccctgcattcgcactcgacgatgaggttttgttctcccagacactggataaggtggtgagaaagctgaaaggcaagtacggttttaaaagattcctgcgtgacggatataggaccagccttgaggatccgaatcgatgctattacaagcctgccgagatcaagctttttgacggtatcgaatgtgagttccctatcttcttcctttatatgatgatcgatggggtgtttcgaggtaaccccaagcaagtccaggagtaccaggatctgctgacgcctgtgctacaccatacaactgagggataccccgtggtccccaaatactattacgtgccagccgactttgtcgagtatgaaaaaaataaccccggttcccagaagaggttcccatcgaattgcggtagagacgggaaactgttcctgtgggggcaggcactctacataatcgcaaaactactggcagatgaattaatcagtcccaaagatatcgaccctgttcaaagatatgtgcctctcaaggaccagagaaatgtgtccatgcgcttctcgaaccaggggccattggaaaacgacctggtagtacatgtcgcattgatcgcggagtcccagcgactgcaagtcttcctgaatacatatgggatccagactcaaactccacagcaagtggaaccgatccagatatggccacagcaggaacttgttaaagcctatctgcagcttggcattaacgagaaactcggcctgtctggacgccccgatcgacccattgggtgcctgggtacctccaagatataccggatactgggaaagactgtggtgtgttatcctattatattcgatttgtccgacttctatatgtcacaggacgtgtttctccttatcgatgacataaagaatgccttgcagtttatcaagcagtattggaagatgcacggcaggccgctgttcctcgtgctgatcagggaagacaatatccgtggcagccgatttaatccaatcctggacatgctggcagcattaaagaagggaatcataggaggggtgaaagtacacgtcgaccgtctccagactctgatatccggcgctgtagtagagcaacttgactttttaagaatttccgatacggaagaattgcccgagttcaaatccttcgaggagctggaaccgcccaagcatagcaaagtgaagcgccagtctagtacaccatcagcgcccgagctggggcagcagcctgacgtcaacatcagcgaatggaaagacaaacccactcacgagatcttgcagaagctaaatgactgctcatgtctagcctctcaggcaatcctcctggggatacttctgaagagagagggcccaaactttattaccaaggaaggaactgtgagcgaccacattgagagggtctatagacgggccggctcccaaaaattgtggctggctgtgagatacggggccgcgttcacacagaagttctcctctagcatcgccccacatatcacaacctttcttgttcatgggaagcaggtgaccctgggggccttcggccacgaagaagaagtgatttccaacccgcttagcccgagggtcattcagaatatcatctactacaagtgtaatactcatgatgaaagggaggccgtgatacaacaggaactggttatccacattggctggatcataagcaataatcccgagcttttttccggtatgctcaaaatccgcattggatggatcatccatgctatggagtacgaacttcaaattcgaggcggagacaagcccgctctggacctgtaccaactgtcgccttcagaggtcaagcagctgctgctcgatattctgcagccacagcaaaacggtcgttgttggctaaacaggcgtcagattgacgggtcccttaacagaaccccaaccggcttctatgaccgcgtttggcagattttagaacgtaccccaaacggaattatagtggccgggaagcacctgccacaacagcccacactgtccgacatgactatgtacgaaatgaatttctccctactggtggaggacaccttgggcaacatcgatcaacctcagtaccgccagatcgtggttgaactccttatggtggtatcaatcgtgctggagaggaatcccgaactggaattccaggataaggtggacctggacagactcgttaaagaggcttttaatgagttccagaaagatcaaagcaggctgaaggaaatcgagaagcaagatgatatgacttcattctacaatacccctcctctgggcaaaaggggcacttgctcttacctaaccaaggctgttatgaatctcttgctggaaggagaagtcaagccaaacaatgacgatccctgcttgatatca

SEQ ID NO: 6336 - DNA, 3279 bp, Artificial Sequence
  derived and/or modified sequence
atggccggggctgccgggcttacagctgaggtgtcctggaaggtgcttgagcgcagggcccgcacaaaaaggtccggcagtgtctacgagccccttaaatccatcaacctgcccaggccagataacgagacactgtgggacaagctcgatcattactaccgaattgtaaaatcaacattgcttctgtaccaatcacccactaccggattgttccctacaaagacttgcggaggcgaccagaaagcaaaaattcaagatagtctctactgcgcagccggcgcttgggcccttgccctggcgtatcggaggattgacgatgacaagggccggactcacgagctggagcactcagccattaaatgcatgaggggcatactgtactgctatatgagacaggctgacaaggtacagcagttcaagcaagacccccgccctaccacttgcttgcactccgtctttaacgtgcacactggcgacgagctcttgtcttatgaagagtatgggcatctccagatcaatgccgtgtccctctatctgctgtatctcgtggagatgatcagcagcgggctccagatcatatataatacggacgaagtgagctttattcaaaatctggtcttctgcgtcgaacgcgtttatcgggtacctgacttcggcgtgtgggagcggggctctaagtacaacaacggcagtaccgagcttcacagttccagtgtgggacttgccaaggccgctctggaagccatcaacggattcaacctgtttgggaatcaaggctgtagttggtctgtcatcttcgtcgaccttgatgcccataatcggaatagacagacactgtgttctttgctccctagagaatcacgatcacataacactgacgccgctctgctcccgtgcatatcctaccctgcttttgcactcgacgatgaggtgctgtttagtcaaactctggacaaagtggttcgcaaacttaaggggaagtatggcttcaagcgctttttgagggacgggtaccgaacatcattggaggacccaaatcggtgttactacaagcctgccgaaatcaaactctttgatggcatcgagtgcgaattccccatcttcttcctgtatatgatgattgacggcgtgtttcgcggaaatcctaaacaggtgcaagagtatcaagaccttctcaccccagtcctccatcacacgacggaagggtaccccgtggtacccaagtactactatgtcccagccgattttgttgagtacgagaagaacaaccctgggtctcagaagcggttcccttctaactgcggtagagatgggaagctctttctgtgggggcaggccctttatatcatagctaagctgctggccgacgagctgattagtccgaaagacattgatcctgtgcagcggtacgttccgctgaaagaccagcggaatgtctccatgaggttttccaatcaaggccccctggaaaatgacctggtggtacatgttgcacttatcgcagagagccagagactgcaggtcttcctgaacacctatggcattcagacgcaaacgcctcagcaggttgaacccattcagatctggccgcaacaggaattggtgaaggcctacctgcaactgggcattaacgaaaagctgggattgtcaggtcgcccggatagaccaatcgggtgcctgggcacttctaaaatataccggatccttggaaagaccgtggtgtgttaccccattattttcgatctttccgatttttatatgtcccaagacgtgtttctcctgattgatgatataaagaatgcgctgcaattcatcaagcagtactggaaaatgcacggtaggcccctgttcctggtgctcattagggaggacaacataagaggttcacgcttcaacccaatcctggatatgctcgccgccctcaagaagggcatcattgggggagtgaaggtgcacgtggatcgccttcagacacttatcagcggggcagttgtggaacagctcgacttcctgaggataagcgacacagaagagttgccggagtttaaaagtttcgaggaactggagcccccgaagcactctaaggtgaagagacagtcttctactcctagcgcgccagagctgggacagcagcctgacgtaaatattagcgagtggaaggataaacccactcatgagattctccagaagctcaacgactgcagttgtctggccagtcaggctatcctgctcggcatattgctgaagagggaagggcctaattttatcaccaaggaaggtacagtgagcgaccatatcgaacgggtgtacagacgggccgggtcccagaaattgtggctggccgtgagatacggcgctgccttcacccagaagttttctagttccatcgctccacacataacaacttttttggtgcacggaaagcaagtgacactgggcgcatttggacacgaggaagaggtcatttccaaccccctgtccccacgcgtgatacaaaacatcatatactacaaatgcaatacacatgatgagcgcgaggctgtgattcaacaggagctggtaatccacatagggtggatcattagcaataacccagagcttttcagtggcatgctgaagatccgaatcggatggattatacatgctatggagtacgagctccagattcggggcggagacaagcccgcgctggacctgtaccagctttctccttctgaggttaagcaactgctgcttgatattctgcaaccccagcagaatggaaggtgttggctcaaccggaggcagattgatggctctctgaatcggacgccgacaggcttctatgaccgcgtatggcagattctggagcgaacacctaacggcatcattgtcgcagggaagcacctcccccagcagccaacactgagcgacatgacgatgtatgagatgaacttcagtctgctggttgaggatactttgggaaatatagaccagccccaatatcgacagattgtggttgaactcctcatggtggtatctattgtgttggagcggaacccagaacttgagttccaagataaggtggacctggaccgactggtcaaagaggctttcaacgagttccagaaggatcagagccgccttaaggagatcgagaaacaggatgacatgacttctttctataatactcctcccctgggaaaacgaggcacatgttcctatctgactaaggccgttatgaacctgctcctggagggcgaagtcaagcccaacaatgatgacccatgcctgatcagt

SEQ ID NO: 6337 - DNA, 3279 bp, Artificial Sequence
  derived and/or modified sequence
atggctggggccgcgggactcactgctgaggtatcatggaaagttctcgagcgtcgcgcgcggactaagaggagtgggtcggtctacgagccactgaagtcaatcaacctgccgaggcctgataacgaaactctctgggacaaactcgaccattactaccggatcgtgaagtcgaccctgcttctctaccagtccccgaccacgggcttgtttccgaccaagacctgtggcggcgatcaaaaagccaagattcaggactcactctactgcgcggcaggggcctgggccctggcgctcgcataccgtcgcatcgacgacgacaagggacgcactcacgagcttgaacattcggccatcaagtgcatgcggggaatcctgtactgctatatgcgacaggccgataaggtccagcaattcaagcaggacccaagaccgacgacgtgcttgcactcagtgtttaacgtccacactggagacgagttgttgtcctacgaagagtacgggcacctgcagattaatgcggtgtcactctacctgctctatcttgtggaaatgatatcgtcaggcctccagatcatctacaacaccgatgaagtgtcattcatccagaatctggtcttttgtgttgagagggtctaccgagtccccgacttcggcgtctgggaacggggatcaaagtacaataacggatcgactgaactgcactcttcatcggtgggactggcaaaggccgctctggaagctatcaacggattcaacttgttcggcaatcagggatgttcctggtcggtgatcttcgtggacctggatgcgcacaaccggaaccgccagactctgtgctcacttctcccgagggaatcccgatcgcacaacactgacgcagctctcctgccgtgtatctcgtaccctgcgttcgccttggatgacgaagtactgttctcacaaacccttgataaagtggtgcgcaagctcaagggtaagtatggtttcaaaagattcctgagggacggctaccggacgtcgctggaggatccgaatcgctgctactacaaaccggccgaaatcaagctgttcgatggtatcgagtgtgagtttccaatctttttcttgtacatgatgatcgacggcgtattcagaggaaacccgaagcaggtgcaagaataccaagacctcctgactccagtccttcatcatactacggaaggataccctgtggtgccaaagtattactacgtgcctgctgacttcgtcgaatatgaaaagaataacccaggcagccaaaagaggttcccttcgaattgcggccgcgacgggaagctgttcctctggggacaggccctttacatcattgctaaattgttggctgacgaactgatcagcccgaaggacattgacccagttcagcggtacgtccctctgaaggaccaacgcaacgtgtcgatgcgctttagtaaccaaggaccactcgaaaatgacctggtcgtccacgtggcccttatcgcggaaagccagcggctgcaggtctttcttaacacctacgggatacagactcagaccccccagcaagtggagccaattcagatctggccgcaacaagaactcgtgaaggcatacctgcaactcggcatcaacgaaaaacttggactgtccggtcggccggaccgacccatcggctgtcttggaacttccaagatttaccgaatcttgggaaaaaccgtggtgtgctacccaatcatcttcgacctgtccgatttctacatgtcccaagatgttttcctgctgatcgacgacatcaaaaacgcgttgcaattcatcaagcagtactggaagatgcatggacggcctctcttcctggtcctgatccgcgaggacaatatcaggggctcgcgcttcaacccgattctggacatgctcgcagcactgaagaagggaatcatcggaggggtgaaggtgcacgtcgatcggctgcaaactctcatcagcggtgccgttgtggagcaattggacttcctgcgcatctccgacactgaggaacttcctgaattcaaatccttcgaagaactcgagccgccgaagcatagcaaggtgaaacgacagagctccaccccctcggcaccagaactgggccagcagccggacgttaacatttccgaatggaaggacaagccgactcatgagatactgcaaaaacttaatgattgctcctgtctggccagccaggcaatactgctcgggattctgctcaagagagagggaccgaatttcatcaccaaggaaggaactgtgtctgatcatatcgaacgcgtgtaccgccgcgctggtagccagaaactctggttggcggtgcggtacggagccgcgtttactcagaagttttcttcgagcatcgccccgcacatcaccacctttctggttcacggcaaacaggtgaccttgggcgctttcggacacgaggaagaggtgatcagcaatccgttgtccccgcgcgtgatccagaacattatctactacaagtgcaatacccatgacgaaagagaagccgtgatccaacaggaattggtgattcacatcgggtggatcatctcgaacaaccccgaactgttctccggaatgttgaaaattcggattggctggatcatccacgccatggagtacgagctccaaatccggggaggggataaaccggccctggacttgtaccagctctcgccctcagaggtgaaacagctgctgctggatatcctgcagcctcaacagaacggacgctgctggctcaaccggcgccagatagatgggagtctgaatcgcacgccgaccggtttctatgatcgtgtctggcagattctcgaacgcacccccaatggcatcatcgtggcgggaaagcatttgccgcagcagccaaccctgtcggatatgactatgtacgagatgaacttctccctgctggtggaagataccctcggaaacatcgaccagccgcaataccggcaaattgtggtcgaactcttgatggtcgtgtccatcgtgctggagcggaacccagagctggaatttcaggataaggtcgatctcgatcgcctggtgaaggaggcgttcaacgaattccagaaggatcaatccagactgaaggagatcgagaagcaggacgacatgacttcgttttacaacacccctccactgggaaagcggggaacctgcagctacctcaccaaagcagtgatgaatctgctgctcgaaggagaggtgaaacctaataacgatgacccgtgcctgatctca

SEQ ID NO: 6338 - DNA, 3279 bp, Artificial Sequence
  derived and/or modified sequence
atggcaggagcagctggtcttacggcagaggtttcttggaaagtgctagaaagacgtgcccgtactaaacgttctggttctgtttatgaaccacttaagtctataaacttgccaagaccagataatgaaactctatgggacaagctcgatcattactaccgtatcgtgaaatcaactcttctgctgtaccaatcaccaacaaccggactcttcccgaccaagacttgtggaggagatcagaaagcaaaaatccaggacagtctctattgtgcagctggagcatgggcactggcccttgcatatcgcagaatcgacgatgataaaggcagaacacacgagctggaacattcagctatcaaatgcatgcgagggatcttatactgttacatgagacaagccgacaaagttcaacaattcaagcaggatcctcggccgactacctgtctacattcagtgtttaatgtccatacaggggacgaacttttgagctacgaggagtatggacatctgcaaataaatgctgtctcgctttatttgctctaccttgtcgaaatgattagtagtggacttcagattatttataatacagacgaagtctctttcatccaaaatcttgtcttctgcgtagaacgagtttatagagttccagattttggggtttgggaacgaggatcaaaatataacaacggaagtacagaactccattcatcctcggttggactagctaaggcagctttggaggcaataaacggatttaatctttttggaaatcaaggatgcagctggtccgtaatttttgtggatttagatgcgcacaataggaatagacaaacattgtgctcgcttcttccaagggaatctcgctcccataatactgacgcagcactccttccatgcatatcttatccggcttttgctcttgacgatgaagtacttttttcacaaacactggataaggtggtccgtaagctaaagggaaagtacggatttaaaaggtttcttcgtgatggttaccgaacatctctcgaagaccctaaccgatgctactataaaccagctgagattaaattgttcgatggaattgagtgtgaatttcctatcttttttctttacatgatgatcgatggagtctttcgcggaaatccaaagcaagttcaggaataccaagatctactaacgccagtattgcatcatactacagagggatacccggtggtgccgaagtactattatgtaccggcggatttcgtagaatatgagaaaaataatccgggatcgcaaaaacgttttccatcgaactgtggacgagatggcaagctctttttgtggggacaagcactgtatataattgcaaaattgttagctgatgagttaatctcgccaaaagatattgacccggtacagaggtatgtgcctctgaaagatcagagaaatgtttccatgcgattcagcaatcaaggaccattggagaacgacctcgttgttcacgtagccctcatcgctgagtcacaacgattgcaagttttccttaacacctatggaatccaaacgcaaactccacagcaagtcgaaccgattcagatttggccacaacaagaacttgttaaagcgtatttgcaattgggaatcaatgaaaagctgggactatcaggacgtccagacagaccaattggttgccttggcacctcaaagatttatcgaattctcggtaaaacagtggtttgttatccaattatctttgatttgtcagatttttatatgtctcaggacgtcttccttctgattgatgatattaaaaatgccttgcagttcataaaacaatactggaaaatgcacggacgtcccctgttccttgtgttgattagagaggacaacatcaggggatcgagatttaatccaatcttagatatgttagccgcactgaaaaagggtattataggtggagtcaaagtgcatgtagaccgcttgcaaactttgatttcaggagcagtagtcgaacagctcgacttccttcgcatatctgataccgaggaattaccagaattcaaatcttttgaagaattggaacccccaaaacattcaaaagtgaaacgtcagtcgtcgaccccatcagcaccagagttaggacaacagccagatgttaatatctctgaatggaaggataaaccaacacatgaaatcctgcaaaaacttaatgattgcagttgtcttgcatcacaagctattttgttgggaatactcttgaaacgagagggaccaaattttatcactaaggaaggaacggtatcagatcatattgaaagggtttaccgtcgagctggatctcaaaagctatggctcgctgtaaggtatggcgcagcttttacgcaaaagttttcttcatctattgcgccacatattacgactttcttggtccatggaaagcaggtcactttgggagcgttcggtcacgaagaagaagttatatcgaaccctctatccccacgagtgatacagaatatcatctattataaatgtaatacccacgatgagcgtgaggccgttattcaacaggaactcgtcattcatatcggttggatcatttccaataatccagaactattctcgggtatgttgaaaattcgaataggatggattatccatgcaatggaatatgaactacagattagaggaggagataaaccggcactcgacctttatcaactctctccgtccgaagttaagcaactgcttcttgatatcctgcagccacagcagaacggaaggtgttggctcaatcggagacaaattgatggctcccttaatcgaactccaactggattttatgacagagtgtggcaaattttagaacgtactccgaatggaataatagtagccggaaaacatttgcctcagcaaccaactttgtcagatatgactatgtacgaaatgaatttttcattgcttgttgaagatacattgggaaatatcgaccaacctcaatacagacaaattgtggtagaactattaatggttgtctcaatagttttggaacgtaatcctgaactggaatttcaagacaaggtggatcttgatagacttgtaaaagaagcctttaatgaatttcaaaaggatcagtctcgcctaaaggaaatcgaaaaacaggatgatatgactagcttctacaatacacctccattgggaaaaagaggtacatgcagctaccttacgaaggcagttatgaatctcctcctagaaggagaggttaagccaaacaacgatgatccgtgtctaatttct

SEQ ID NO: 6339 - DNA, 3279 bp, Artificial Sequence
  derived and/or modified sequence
atggccggggctgcgggactgaccgcagaggtaagttggaaagtcctggaacggagggccaggaccaagcgctccggatctgtctatgagcccctcaaatcaatcaatctacccagaccagataacgagactctgtgggataaactagaccactactatcggattgttaagtccacgctgctcctgtaccagtcaccgacgacagggctatttccaaccaagacgtgcgggggagaccaaaaggccaaaatccaggatagtctatactgtgctgcgggcgcctgggctctggctctcgcatataggcggattgacgatgacaaaggtaggacccacgaattggagcattctgccatcaaatgtatgcggggcatcctgtactgctatatgaggcaggccgacaaagtgcaacagttcaagcaggacccgagaccaacaacatgcctgcactcagtctttaatgtgcacactggagacgagctgttgtcttatgaggaatatggacaccttcagatcaacgccgtatctctctacctgctttatctggtcgagatgatttcttcaggtctgcagattatctataacactgacgaagtgagttttatccagaatctcgtcttctgcgtggagcgggtatatcgggtgcccgactttggcgtgtgggagcggggaagcaaatacaacaatggaagtacagagttgcacagttccagcgtaggtcttgcaaaagctgcacttgaagctattaacggcttcaatttgttcggcaaccagggatgctcatggagtgtaattttcgtggaccttgacgcgcacaaccgcaacagacagacactctgcagcctgcttccccgtgagagcagatctcacaacactgacgccgccttgctcccgtgcatatcatacccggccttcgctcttgatgatgaggttttattctcccagacgctggacaaggttgtccgtaaattaaagggcaagtatggatttaaacggttcctgagagatggctataggacctctctcgaagacccaaatcggtgctactataagccagcggagattaaactttttgatgggatcgagtgtgagttcccaatatttttcctttatatgatgattgatggggtgtttaggggaaatcctaaacaggtgcaggaataccaagatctgctcacccctgtgctgcaccacaccacagaggggtacccggtagtcccaaagtactattatgtccctgctgatttcgttgaatacgagaagaataatccgggcagtcagaaacggttccccagcaattgtggtagggatgggaagctattcctgtgggggcaggccctgtatattatcgcaaagctgcttgcagatgaattaatctctcccaaggacatcgaccccgtccagcggtacgtgcctctgaaggaccagcgaaacgtgtccatgcggtttagtaatcagggaccgctggagaatgacctggtggtgcatgtagccctcatcgccgagagtcagcggttgcaggtctttctaaatacttacggtatacagacacagacccctcagcaggttgaaccgatccaaatttggccccaacaagaactcgtcaaagcctatttacagctggggatcaatgaaaagcttggtttgtccgggcggcccgatcggcctatagggtgcctcggtacctctaaaatctaccgcatcctgggcaagaccgtggtttgttacccaataatttttgatctttctgacttctacatgagtcaggacgtgttcctgctgatagacgatattaaaaacgcactgcagttcattaagcagtattggaagatgcatggccggcctctgttcctcgtcctgataagagaagacaacatccgaggctctagattcaatcccattctggacatgctggcagcgttgaaaaagggcattatcgggggtgtgaaagtacacgtcgaccgcttacaaaccctaataagcggggccgtggttgaacaactcgatttcttgagaattagcgacactgaagaactgcctgagtttaagagtttcgaagagctcgagccacccaagcacagcaaagtgaaaaggcagtcatcaacaccttccgcccccgagcttgggcagcagcctgacgtcaacatcagtgagtggaaagataagccgacccatgaaatactgcagaagctgaacgattgttcttgtctggccagtcaggccattctcctcgggatcctgctgaaaagggaaggcccaaactttatcaccaaagaaggcaccgtctctgatcatattgagagggtttacagacgagcgggcagccagaaactttggctagcagtacgctacggagccgccttcacacagaaattcagctcatccatcgcccctcatatcaccacattcctggttcacgggaagcaagtgacgctgggagcttttgggcatgaggaagaagtgatttccaaccccctgagtccccgcgtgattcaaaatatcatttactacaagtgtaacacccacgacgagagggaagcagtgatccagcaggagctggtgatccacattggctggattatctccaataacccggaactcttctcaggaatgctgaagattaggattggctggattatccacgccatggaatacgagctccagatcagaggaggtgataaaccagctctggatctctaccagctgagtccgtccgaggtgaagcagctactgctcgatattctccagccccagcagaatgggagatgctggctcaatagacgccagattgatggcagccttaaccgtacaccaaccgggttctacgaccgcgtgtggcaaatccttgagcgcacccctaacgggatcattgtggcaggcaagcatctgcctcaacagccaaccctgagcgatatgaccatgtatgagatgaatttctccttactagtggaggataccctgggaaatatagaccagccacagtaccgccaaattgtggtggaactgctaatggtggtatctattgtcttggagcgcaaccccgagctggagttccaggataaagtcgacctagaccgcctcgttaaggaagcattcaacgaatttcagaaagatcagtctaggctcaaagagatcgagaagcaagatgatatgacgagcttctataataccccccctttgggaaaaaggggcacttgttcctacttgaccaaggcagtcatgaatctgctccttgaaggggaagtgaagcccaacaatgatgatccttgcctcatctct

SEQ ID NO: 6340 - DNA, 3279 bp, Artificial Sequence
  derived and/or modified sequence
atggctggcgccgccggtttaaccgcagaagtcagttggaaagttctggaacggcgcgctcgcactaaacgatccggctctgtgtatgagccattgaagagcatcaacctgccgaggcccgacaatgagaccctctgggacaaactagatcactattaccggattgtaaagagtaccctcctgctttatcagagcccgacaactggattatttcccacaaagacctgcggtggcgatcaaaaggcaaaaatccaggactctctgtactgcgcagcgggagcttgggcactggccctcgcgtatcgccgtatagatgacgataagggaaggacgcatgagcttgagcattcagccatcaaatgtatgcgggggattctctattgctacatgcgacaggccgataaggtgcagcagttcaagcaggatcccaggcctacaacatgcctgcatagcgttttcaacgtccatactggtgatgagctcttaagctacgaagagtatggccacctgcagataaacgccgtgagtctgtatctcctctatctggttgagatgatctctagcgggctccagatcatttataacaccgatgaggtgagcttcattcagaacctcgtgttttgcgtcgaaagggtgtaccgcgtacctgactttggagtgtgggagcgtgggtctaaatataacaacggaagcacagagctccactctagcagtgtcggcctcgctaaggctgccttggaggccattaatggcttcaacttgttcggtaaccaagggtgttcttggtccgtcatattcgtggacctagatgcccacaatcgtaatcgacagaccttgtgctctctgctgcctcgggagtctagaagtcacaataccgacgccgcactgctgccgtgcattagttatcctgcttttgccctggatgacgaagtactcttttctcaaaccctcgacaaagtcgtacgcaagttgaaagggaagtacggattcaaacgctttttacgcgacggctacagaacatctctggaggatccgaaccggtgttactacaaacccgcggagatcaaactgtttgacgggattgagtgcgaatttcctattttcttcctctacatgatgattgacggcgtgtttcgcggaaatcctaagcaggttcaagagtatcaggacctgctgacccctgtgctgcaccataccacggagggctaccctgtggtacctaagtactattatgtacccgcagatttcgtcgaatacgagaagaataaccccggctctcagaaacgctttccatccaattgcggcagggacggtaagctatttctgtgggggcaggcactctacattattgccaagttgctggcagacgaactcatttcgccgaaagatatagatcccgtccagagatacgtcccgttgaaggatcaaaggaatgtatcaatgaggttcagcaatcaggggccgctggagaatgatctggtggtgcatgttgcactcatcgcagagtcacagagactgcaagtgttcctgaacacttacgggattcagacccagactccgcagcaagtagaacccattcaaatatggccccagcaagagctggtgaaagcgtatctgcagctggggatcaatgaaaaacttggactatctgggcgcccggaccgccctatcgggtgcctggggaccagtaagatctacaggattctcggtaagacagtcgtctgctaccctataatcttcgacctgagcgacttttacatgtcccaggacgtcttcctcctcatagatgacattaaaaacgctctccaattcatcaagcagtattggaagatgcacggtagacctctttttttagtgctgatcagagaggacaatatcagaggtagccgctttaaccctattctcgatatgctggctgccctgaaaaagggtatcattggaggagtgaaggttcatgtcgatcggctccagactctgatcagcggcgcagtcgtagagcagctggatttcttgcgcattagcgataccgaggagctcccagagttcaagtcattcgaggaactcgagcctccaaagcatagcaaggtgaagcgacaatcttcaaccccatcagctccggaattgggtcagcagcctgatgtcaacatatccgagtggaaggacaaacccacacatgagattctccaaaaactgaatgattgcagttgtcttgcgagccaggccattctgcttgggatcctgcttaagcgggaaggccccaatttcattaccaaggaagggactgtgagtgatcacattgaacgcgtgtatcgtcgcgccggatctcagaagttgtggttagcagtgcgttatggggccgcctttacccagaaattttcctcttcaatcgccccgcatatcacaacattccttgtgcatggcaagcaagtaactctcggcgctttcggccacgaggaagaagtgatttcaaaccccttgtctccacgcgttattcagaacatcatctactacaagtgcaatacccatgatgagagagaagccgtcatccagcaagagctggtcatacacatcgggtggatcatctctaacaatcctgaattgttcagtgggatgctgaagatcagaataggatggattattcatgcgatggagtacgagctccagatccgcgggggtgataagcctgcgctggacctgtaccagttgtccccctccgaggtgaaacagctgctccttgacattctgcagccccagcagaacggcaggtgctggttgaatcgtaggcaaatcgatggctcccttaacagaacccccaccggcttctacgaccgcgtgtggcaaattcttgagcgtacgcctaacggcattatcgtggcgggcaagcacctcccacagcaacccaccctttcagatatgacaatgtatgagatgaatttctcccttttggtagaagacacactggggaacattgaccagcctcagtatcgccagatcgtggtggaactgctcatggtggtgagtatcgtgctcgaaaggaatccagagctggaatttcaagacaaggttgatcttgaccgtcttgttaaggaagcatttaacgaatttcagaaggaccaatcgcggttgaaggagattgagaagcaggacgatatgacgagtttttataacacccccccccttggcaagcgtgggacctgctcatacctaaccaaggcggtgatgaatttgttgctcgaaggggaagtgaaaccaaacaacgacgatccttgcctaatcagt

SEQ ID NO: 6341 - DNA, 3279 bp, Artificial Sequence
  derived and/or modified sequence
atggcaggagcagcggggctgactgccgaagtgtcgtggaaagtcctggaaaggcgcgcacggaccaaaaggtcgggatccgtctacgagcctctgaagtcgataaatctgcctcgcccagataatgagactttgtgggataagctcgaccattactacagaattgtgaagtccactcttctgctctaccaatcgcctactaccggtttgttcccaactaagacttgcgggggtgatcagaaggcaaagattcaggacagcctgtactgtgcagctggggcttgggcattggccctggcctacaggcgaattgacgatgataaaggtagaactcacgagcttgaacactcggcaatcaagtgcatgcgggggatcctttactgttacatgcgccaagcggataaggtgcagcagtttaagcaagatcccagacctaccacgtgtctgcattccgtgtttaacgtccataccggagatgagctgctctcctacgaagaatacggtcatctccagataaatgccgtgtcgctttaccttctgtaccttgtggaaatgataagctcgggactgcagattatctataacaccgatgaagtgtcgtttattcaaaacctggtgttttgtgtggaacgggtctatcgcgtgcccgatttcggcgtctgggagagaggttcaaaatacaacaatggaagtaccgagttgcatagctcaagcgtgggactcgcaaaggccgccctggaagccattaacggctttaacttgtttggaaatcaagggtgttcgtggtcggtcatttttgtggatttggacgcacacaatagaaatcggcaaaccctttgttcacttcttcctcgagaaagccgttcgcacaatactgacgcagccttgctgccatgtatatcatacccagcattcgcgcttgatgatgaggtcctcttctcccaaactcttgataaagtagtgcggaaattgaagggaaagtacggtttcaaacgatttcttcgggatggatacagaacgtcgctggaggatcccaacagatgttactacaagcctgcagaaatcaagctctttgatggtattgaatgcgagtttcctatcttcttcctttacatgatgattgatggcgtgtttcgaggaaaccccaagcaggtgcaggaataccaggatctgcttaccccagtgctgcatcacaccacggaagggtacccagtggtgcccaagtactattatgtgcctgccgatttcgtggagtacgaaaagaataatccaggttcgcaaaagagatttccgtccaactgtggaagagatggcaaattgtttctttggggacaggcactttacattatcgctaaacttctggcagatgaactgatctcgcctaaggatatagaccctgtccaaagatacgtccccctgaaagatcaaagaaacgtaagtatgaggttctcgaaccagggcccactcgaaaatgatttggtcgtgcatgtggctctgattgcagaaagccagcgccttcaagtctttctcaacacctatggtatacagacccagacccctcagcaggtcgaaccaattcaaatatggcctcaacaagaacttgttaaagcgtacctccagctcggcataaacgagaagctcggattgtccggcagaccagatcgaccaattggttgcctgggtacgagcaagatttacaggatcctgggtaagacggtcgtgtgctacccaatcatttttgacctcagtgacttttacatgtcccaagacgtttttctgctcattgacgacatcaagaatgcgttgcaattcatcaaacaatactggaaaatgcatggccgccccctcttcctggtcctcatacgtgaagataacatcagaggttccagattcaaccctattctggacatgctggcagcgcttaagaaaggaatcatagggggcgtgaaggtgcatgtggatcgtctgcaaactcttattagcggggcagtcgtcgaacaactcgattttcttcggatctccgatactgaagaactgccagagttcaaatccttcgaggagcttgagcctcctaagcactctaaggtgaaacgccagagctccactccgtcagcacctgaacttggacaacaacctgatgtgaacattagcgaatggaaagataagccaacccatgaaatccttcaaaagttgaacgattgcagctgccttgcatcccaagctattctcctcggcattctgctgaagagggagggtccgaactttatcactaaagaaggtacggtgtccgatcacattgagagagtgtaccggagggcagggagccaaaagctctggttggcagtacgttacggagccgcctttactcagaagttttcgtcgtcaattgcaccgcatattaccacttttcttgtgcacggtaagcaggtgaccttgggagcgtttggacatgaagaagaagttatttccaatcccctctccccacgtgtcattcaaaacatcatatactacaagtgtaacacccacgatgagcgcgaggccgtcattcaacaagagcttgtgattcatattggttggatcatctcaaacaaccctgaactttttagcggaatgctgaagatacgaatcggatggattattcatgcaatggaatatgaactgcagatcagaggtggagacaagcccgcactggatctttaccaactgtcgcctagcgaagtcaaacaactgctccttgacatcttgcagccacaacaaaatggaaggtgttggctcaatcgcagacagatcgatggatcactgaatcggaccccaactgggttttatgaccgcgtgtggcagatcctcgagaggacccctaatggaattatcgtggcagggaagcatcttccccaacaaccgacgctcagtgatatgactatgtacgaaatgaacttctctttgctggttgaggacaccctgggtaacatcgaccagccgcagtaccggcagattgtcgtggaactgttgatggtagtctcgattgtgctggagcggaaccccgagctcgaattccaagacaaggtggaccttgacaggctcgtgaaggaggccttcaacgaatttcagaaggaccagtcccgtctgaaggagattgaaaagcaagacgacatgacctcgttttacaacactccgccactgggcaaacgaggtacctgttcttacctgaccaaagcggtgatgaacctcctgctggaaggagaagtgaaacccaacaatgacgacccttgccttatcagc

SEQ ID NO: 6342 - DNA, 3279 bp, Artificial Sequence
  derived and/or modified sequence
atggccggtgccgctgggctcactgcagaagtgtcgtggaaagtgcttgagcgtagagcacgaaccaaaagatcggggagcgtgtacgagccacttaagagtatcaatctgcctagacctgataacgagactctgtgggataaacttgatcactactaccggatcgtgaagtcaaccctgctcctttaccaatctccaacgactggtctgttcccgaccaagacttgtggaggggatcagaaggcaaagattcaagactcactttactgtgcagcaggagcttgggcactggcattggcctatcgacggattgatgacgataagggtcgcactcatgagctcgaacattccgcaatcaagtgtatgaggggaatcctttactgctacatgcgtcaggcagataaagtgcaacagtttaaacaagatcctcgtccaactacgtgtctgcactccgtgtttaacgtccatactggcgatgagctgctttcctacgaagaatatggccacctgcagataaatgcagtgtctttgtaccttttgtatcttgtggaaatgatctcgtcgggactgcagattatctacaacaccgacgaggtgagcttcatacaaaacctcgtgttttgtgtggaacgcgtgtatcgcgtgcctgattttggagtttgggagagaggttcaaagtacaacaacgggtcgacggaacttcactcgtcaagcgttggcctggccaaggcggccctcgaagctattaacggattcaacttgtttggtaaccaaggttgtagctggtcagtgatctttgtggatctcgatgcacataacagaaatagacagaccctttgttcacttcttcccagagaatcaagatcccataacaccgatgcagcactccttccttgcatctcctaccctgcctttgcgctggatgacgaagtccttttctcacagaccctggataaagtggtgcgcaaattgaagggcaaatatggattcaagcgattcctgcgagatggttaccgtaccagccttgaagatccaaacagatgctactacaaacccgcagaaatcaaactttttgatggaattgaatgcgaatttcccattttcttcctgtacatgatgatcgatggggtctttcgtggaaatccaaaacaggtgcaggagtaccaggaccttttgaccccagtcctgcaccacactactgaaggatacccagtggtgcccaagtactactacgtgcctgcggattttgtggagtacgagaagaataacccaggatcacagaagagattcccatccaattgtggaagagatggaaaactttttctttggggtcaggcgctgtacatcattgccaagctgctggcagatgagctgatctcaccaaaggatatagatcctgtgcaacgatacgtgcctcttaaggaccaaagaaacgtctcaatgcgcttttccaaccaagggccactcgagaacgacctggtggtgcatgtcgctctcattgctgaatcccaaagattgcaggttttcctcaatacctacggtatccaaacgcaaacccctcaacaagtggagccgatccaaatttggccgcaacaggagcttgtcaaggcgtatctgcaactcggaattaacgagaaacttggtctttcaggaaggcccgataggccgattggctgtttgggaaccagcaagatctacagaattttgggcaagaccgtggtttgttacccaattatcttcgatctgtccgatttctacatgtcccaggacgtgtttctccttatcgatgatatcaagaacgccctgcagtttatcaagcaatattggaagatgcacggccggcctcttttccttgtccttattcgagaggataacatccggggatcgaggtttaatcctatcctggatatgttggccgctcttaagaaaggaatcataggaggagtgaaggtgcatgtcgatagacttcagaccctgatctcaggcgcagtggtggaacaacttgattttcttcgtatttccgacaccgaggaactgcctgagtttaagtccttcgaggagttggagcctcctaagcatagcaaggtgaagagacaatcctcgaccccttcagccccagaactcgggcagcaacccgacgtcaacatctccgaatggaaagataagcccacccatgaaattctgcaaaaacttaacgattgcagctgcttggcatcccaggcaattctcctcgggattttgctgaaaagagaaggacctaacttcattactaaggaagggactgtgtcggatcatatagaacgcgtgtacaggagagcgggctcccaaaagctctggcttgccgtgcggtacggagcagcatttactcaaaagtttagctcgtcaattgcccctcacattacgacttttctcgtgcatggcaagcaggtgacgctgggggcctttggccatgaggaagaggtgattagcaatcctctttcgccaagagtcattcagaatatcatttactacaaatgtaacacccacgatgaacgtgaggcagttatccaacaggaactggtgatccatattggctggatcatatccaataaccctgagctcttttcgggaatgttgaagatccggattggctggattattcatgcaatggagtacgagctgcaaattaggggaggagataagcctgcgctggatctttaccaactttcgccatcagaagttaaacagctgctcctcgatatccttcagccacagcaaaatggccgatgttggcttaaccgcaggcaaattgacggttcgcttaatagaactccaaccggtttctacgacagagtatggcagattctggaaagaactcctaacgggattattgtcgctggaaaacatctgcctcaacagcctaccctgtcggatatgactatgtacgagatgaatttctccctgctggtcgaggataccctggggaatattgaccaacctcagtacagacaaatcgtggttgagcttctgatggtggtgtccatagtgctggaaagaaatcccgagctggaatttcaggataaggtggatctggaccggcttgtgaaggaggcgtttaacgaattccagaaggaccaatcccggctgaaggaaattgaaaagcaggatgatatgacttcattctacaatactccacctcttggtaagaggggaacctgttcctaccttactaaggctgtgatgaacctcctgcttgagggtgaagtcaagccgaacaacgatgatccgtgcctgatatca

SEQ ID NO: 6343 - DNA, 3279 bp, Artificial Sequence
  derived and/or modified sequence
atggcaggcgccgcggggctgaccgccgaggtgtcatggaaagtcctcgagcggagagccaggactaagcgctcaggttcagtctacgaaccacttaagtccatcaacctgcccaggcccgataatgaaacgctctgggacaagctcgaccattattacagaatcgtcaaaagcaccctgctgctgtatcagtcaccaaccaccggactgttccctaccaagacctgcggtggagatcagaaagcaaagatccaagactcactgtactgcgcggctggcgcttgggccctcgccctcgcttacaggcggatcgacgatgataagggacgcacccacgaactggaacatagcgcgatcaagtgcatgcgaggaatcctgtactgctacatgcggcaagccgacaaggtgcagcagttcaaacaagacccgcgcccaaccacttgtctgcactccgtgtttaacgtgcacactggagacgagcttctcagctacgaggaatatggacatctccagatcaacgccgtgtcactgtacctgctgtacttggttgaaatgatctcctcgggcttgcaaattatctacaacactgatgaagtctcgttcatccagaatctggtgttctgcgtcgagcgcgtctaccgcgtgccagacttcggcgtgtgggagcggggctcaaagtacaataacggctcgacggaactccattcctcgtccgttgggctggcaaaggctgcactcgaggccattaacggattcaacctcttcggaaatcaaggatgctcgtggtccgtgattttcgtggacctggatgcccacaataggaaccgccagaccttgtgctcacttctgccgcgggaatcgcgctcgcacaacaccgacgcggccttgcttccgtgtatcagctaccctgcgttcgcgctggatgacgaggtgctgttttcgcaaaccctggacaaggtcgtgcgcaaactgaagggaaagtacgggttcaagcgcttcttgcgggatgggtacagaacctccctggaggacccgaaccggtgctactacaagccagcagagatcaagttgttcgacggcattgaatgcgaattccctatcttctttctgtacatgatgatcgatggcgtgttccgcggtaatcccaaacaggtgcaagaatatcaggatctcctgactccagtgctccatcatactactgaagggtacccggtcgtccctaagtactactacgtgcctgccgacttcgtggagtacgagaaaaacaatcccggtagccagaagagatttccgtcgaactgcggacgggatggaaaactcttcttgtggggacaggccctttacatcatcgcgaaactcctggcagatgaacttatctccccgaaggacattgacccggtgcaacgctacgtgccactgaaggaccaacggaatgtctccatgcgatttagcaaccagggtccgctggaaaacgacctggtcgtccacgtagcccttatagctgaaagccagcgcctgcaggtgttcctcaacacctacggcatccaaacgcagactcctcagcaagtcgagccgattcagatctggccgcaacaggaacttgtcaaagcatacttgcagctcggcattaacgagaagctgggactgtccggaaggcctgacagaccgatcggctgcctcggaacttcgaagatctaccgcatccttggaaaaactgtcgtctgttacccgatcatcttcgacctcagcgacttctacatgtcacaagacgttttcctgttgatcgacgacatcaagaacgccctgcagttcatcaagcagtactggaaaatgcacggacgcccactgttcctcgttctgatccgtgaggacaatatcagaggatcgaggttcaaccctatcctcgacatgcttgccgcccttaagaagggaatcattggaggtgtgaaggtgcatgtggatcgcttgcaaacgctgatctccggagcggtggtggaacagctggattttctgcggatctcggacactgaggaactgccggaattcaagagcttcgaggagctggaaccgcccaagcattcgaaggtgaaacgccaatcgtcaactccgtctgcgccagagctcggacagcagcctgacgtgaacatctccgaatggaaagataagccgacgcacgaaatcctgcagaagctcaacgactgtagctgcttggcgtcgcaggccatcctgttgggaatcctgctgaagcgcgaaggcccgaactttattactaaagaaggaaccgtgagcgaccacatagagagagtgtatcggagagcgggctcgcaaaagctgtggctggcggtgcggtacggggctgccttcactcagaaattttcgtccagcatcgcaccacacattaccactttcctggtgcacggcaagcaggtgaccctgggcgctttcggacacgaggaagaggtcatcagcaacccgctcagtccgagagtcattcagaatatcatctactataagtgtaacacccacgatgagcgagaagccgttatccagcaggaactcgtgatccatattggatggatcattagcaataatcccgagctcttctccggaatgctgaagatccgcatcggatggattatccatgctatggaatacgagcttcagatccgcggtggggacaagcccgcactcgacctgtaccaactgtcgccgtccgaagtgaagcaactcctgctcgatatcctgcaaccacaacagaacgggagatgctggctgaacaggagacaaatcgatggttccctgaatcggactccaaccgggttttacgatagagtgtggcagatcctggaacgtaccccaaatggcatcatcgtggcagggaagcacctcccgcagcagccaaccctgtcagatatgaccatgtacgaaatgaacttctctctgctcgtggaagatactttgggaaacatcgatcaacctcaataccggcagattgtcgtggaactcctgatggtggtcagcatcgtgctggaacggaatccggagctcgagtttcaagataaggtggaccttgatcggctcgtgaaagaggctttcaatgagtttcagaaagaccagtctcggttgaaggaaatcgaaaagcaggatgacatgacgtccttttacaatactccaccgctgggaaagcgcggtacttgttcctacctgaccaaagccgtgatgaatctgttgctcgagggagaggtcaaacccaacaacgacgacccttgcctcatctca

SEQ ID NO: 6344 - DNA, 3279 bp, Artificial Sequence
  derived and/or modified sequence
atggcgggcgccgctgggttgacggcggaggtgagctggaaagtgctcgaacgccgcgcacgcacaaagagatctggttcggtctacgagcctctgaaatccattaatctcccacgtccagacaacgaaaccctgtgggataagctggaccactactatcgcattgttaagagcactttgctgttatatcaaagccctaccacgggtcttttcccgaccaagacatgcgggggtgaccaaaaggccaagattcaagattccttgtactgcgccgccggtgcgtgggcactagcactggcctatcgtagaattgacgacgacaagggtcgcacccacgagctagagcacagcgccatcaaatgtatgagggggattttgtactgctacatgcgacaagcggataaagttcagcagttcaagcaggacccgcgtccaaccacgtgtctccattcagttttcaatgtccataccggtgatgaactgttgagttatgaggaatacgggcacctacagatcaatgcagtcagcttgtacctcttgtacctggtggagatgatcagctcaggtctgcagatcatctataacactgacgaggtgtctttcattcaaaatttggtgttctgtgttgagcgcgtgtatcgcgttcctgacttcggcgtgtgggaaagaggatccaagtataataacggcagcacagagttacattcaagcagcgtcggtttagcgaaagcggcattagaagcgatcaacggttttaacctgttcggtaatcagggctgttcatggtccgttatcttcgtggacctggatgcgcataaccgaaacagacagactctgtgtagcttactgccacgcgagtccagatctcataacaccgacgcggctttgctgccatgcattagctacccagcgtttgcgctggatgacgaggtcctgttttcccagaccctggataaagtcgtgcgtaagttgaaggggaaatatggctttaagcgttttctgcgcgatggttatcgcaccagcctggaggatcctaaccgttgttactataagcctgcggagatcaagttatttgacggtattgagtgtgaatttcctatctttttcctgtatatgatgattgatggcgtttttaggggtaatcctaaacaggtgcaagagtaccaggatttgctgaccccagttctgcaccacactacggagggctatccggtggtgccaaaatattattacgtgccagcggacttcgtagaatatgaaaagaataacccgggaagtcaaaagcgttttcctagcaattgtggtcgcgatggtaagctctttctatgggggcaggcactatacatcatagccaaattgttggcggatgaattgatttccccaaaggatattgacccggtgcagcgttatgtcccactcaaagaccagcgcaatgtgagtatgcgattcagcaatcagggtccactcgagaatgatctagtcgtccatgttgctctgattgctgaaagccagcgcctgcaggtgttcttgaacacttacggtatccagacccaaactccgcagcaagtggagcctatccagatctggccacagcaggagctggttaaggcgtacctccagctgggaatcaacgaaaagctgggcctgagcggtcgtcccgaccgcccaataggttgcctgggaacctctaagatatatcgaatactgggcaagactgtggtgtgttacccgataatcttcgacctgagcgacttttacatgtcccaagatgtgtttctgctgatcgatgacatcaagaatgctttgcagtttattaagcagtactggaagatgcacggccggcctttgtttttggtgctaatccgtgaggacaacattcgaggtagccgcttcaatccaatcctcgacatgctcgccgcactgaagaaaggaatcatcggcggagttaaggtccacgtcgatcgtctgcaaacactcattagcggcgcggtggtggaacaactggacttcctgcgcatctcagataccgaagagctgccggagtttaaatccttcgaggaactggaaccaccaaaacactcgaaggtgaagcgccagagctccacaccgagcgccccggaactcggtcaacaaccagacgttaacatttcagaatggaaggataaaccgacgcacgagattctgcagaagctgaacgactgttcctgtctggcctcccaggctatcctgctggggatcttactcaaacgcgagggaccgaacttcattacgaaagagggaactgtttcagatcacatcgagcgcgtctacagacgtgcgggcagccagaaactgtggctggccgtgcgttacggggcagccttcacccagaaatttagcagctccattgcgccacacattactacctttttagttcacggtaaacaggtgacccttggtgcttttggccacgaggaggaagtgattagcaatccactgtcccctcgcgtgatccaaaatatcatttactacaaatgcaacactcatgacgaacgggaggccgtgattcagcaagaactggtcatccacattggttggatcatttctaataatcctgaactcttttccggtatgttgaagatccgcatcggttggatcatccacgccatggaatatgagttacaaatccgcggtggtgacaaaccggctctggatctgtatcaactgagcccttctgaagtgaaacaactcctgctggatatactgcaaccgcagcaaaatggccgctgctggcttaaccgccgtcagattgacgggagcctgaatcgcacgccgacgggattctacgatcgagtgtggcaaattctggagcgcactcctaatggaattatcgtagcgggcaagcacctgccacaacagcctacgttgtctgacatgacaatgtatgagatgaacttctctcttttggtcgaggatactttaggtaacatagatcaaccacagtaccgacaaattgtggtggagcttctgatggttgtttctatcgttctggaaaggaatccagaattagaattccaggacaaggtggacctggatcgcctggttaaagaggcatttaacgagtttcaaaaggaccagagccgtctgaaggagattgaaaagcaagacgacatgacatctttctacaatactccgccattagggaagcgcggtacgtgctcatacctgactaaggccgttatgaacctgctgttagagggcgaggtaaaacctaacaatgacgacccttgtctgatcagt

SEQ ID NO: 6345 - DNA, 3279 bp, Artificial Sequence
  derived and/or modified sequence
atggcaggagccgctgggctgaccgccgaggtctcatggaaagtcttggagcgccgagcccgcacaaaacggtccggctccgtctacgaaccactgaagtccatcaacctgcccaggcctgataatgaaactctatgggacaaactggatcactactacagaatagttaagtcgactctcctgctctatcagagccctaccaccgggttgttccccacaaaaacatgtgggggggatcagaaagcgaaaatacaggatagcttgtattgcgctgcgggcgcatgggccctcgccctggcctacaggcgcattgacgatgataagggtcgtacacatgagctggagcactctgccataaaatgtatgcggggaattctgtactgctacatgcggcaagcggacaaggtacaacaatttaaacaggacccccggcctactacctgtctacacagtgtctttaacgtgcatacaggagacgagcttctttcctacgaggaatatggccacttgcagattaatgctgtttccctgtatctgctgtatctggtggaaatgatcagtagtggattacagatcatctacaatactgacgaggtgagctttatacagaacctggtgttctgtgtcgagcgagtgtatcgggtgcctgatttcggcgtgtgggaacgcggcagtaaatacaacaatggatccaccgaactgcactcatcctctgtggggctcgccaaggccgctttggaagctatcaacggctttaacctttttgggaatcaggggtgctcgtggtccgtcatcttcgtcgacctggacgcacacaatcggaacaggcagacactgtgctcgctgctaccgcgggagtcgagaagccacaataccgatgcggcgctcctcccctgtatttcttacccagcctttgctctggacgatgaagtcctcttctcgcagaccctggacaaagtggtccggaaactgaagggtaagtacgggttcaaacggtttttacgcgatggctatagaactagcctggaggacccaaatcgctgttattacaaaccagctgaaatcaagctgttcgacggaatcgagtgcgaatttcccatttttttcttatacatgatgatcgacggggttttcaggggaaatccgaaacaggtccaggaataccaagaccttctgaccccggtgctgcaccatactaccgaagggtatccagtggtgccaaaatactattacgtacccgcagattttgttgagtacgagaagaataatccgggctcccagaaaagattcccatccaattgtggccgggacggaaagttgttcttgtggggtcaagcactttacattatagcaaagctcttggccgatgagctcattagccctaaagatattgaccccgtccagcgctacgtgcccctgaaggaccagagaaatgtgtcgatgcggttctccaaccagggccctctcgaaaacgacctggtcgttcacgtcgctctgatcgcggaaagccagcggctgcaggtcttccttaacacatatggaatccagacgcaaactccgcagcaagtcgaaccaatccaaatctggccacagcaggagctcgtgaaagcctacctgcagttaggtatcaatgaaaagctgggcctgagcggcaggcccgaccggcccataggctgcctgggtactagcaagatctatcgaatcctggggaagaccgttgtgtgctaccccataatattcgatttgagcgatttttatatgtcccaggatgtgttcctgctgattgatgacatcaaaaacgcactgcagtttattaaacagtattggaagatgcacggcagacccctctttttggtgctcatacgggaggacaacatcaggggctcaaggttcaatccaattctcgatatgcttgcggccctcaagaaggggattatcggtggggtgaaggtgcacgtggacagactgcagacactgatatctggcgcggttgtagagcagctggacttcctgaggatctccgacaccgaggaacttcctgagtttaaatcgttcgaggaacttgagccacctaaacactccaaggtgaaacgtcagtccagcactccatccgccccagagctaggccagcagcccgatgttaacatctctgaatggaaagataaacccacccatgagatcctccagaaattaaatgactgttcttgcctggccagccaggccatcctgctggggattctgctgaagagagagggtcccaacttcatcaccaaggaaggcaccgtctctgaccacattgagcgagtctatcgacgcgcaggctctcagaaactatggttggctgttcgttatggggccgcattcacgcagaaatttagctcgtccattgcccctcacatcaccaccttcctggtgcatggtaagcaggtcacccttggggccttcggccacgaagaggaggtgattagtaacccgttgtctcccagggttatccagaatattatctactacaaatgcaatactcacgacgagagagaagctgtgatccagcaagagctcgtgatacacattggatggattatttccaacaatcctgaactgttctctggtatgctgaaaatcaggattgggtggatcatccacgctatggagtacgagctccagatcaggggcggggataaacccgcgttagacctgtaccagctgtccccctctgaggttaaacagctactgctggatatacttcagccgcagcaaaacggacgctgctggcttaaccggcgtcagatagacgggtccctcaataggacgccgaccggattctacgaccgcgtttggcagattcttgagagaacccccaatggtattatcgtggccggcaagcatctgcctcaacagccgactctaagcgatatgaccatgtatgaaatgaatttttcccttttggtggaggacacactgggcaatatcgaccagccacagtatcgccagatagtggtggagctgctgatggtcgtttccattgtgctggagagaaaccccgagttagagttccaagacaaagtcgatcttgacaggctggtgaaggaggccttcaacgagtttcaaaaagatcagtcacggctgaaagagattgagaaacaggacgacatgacaagcttctacaatacaccaccgctgggaaaacgtggcacttgtagttatcttacgaaggctgtgatgaacctgctgctggagggtgaagtgaaacctaataatgatgacccctgcctcatcagc

SEQ ID NO: 6346 - DNA, 3279 bp, Artificial Sequence
  derived and/or modified sequence
atggcaggtgctgcaggcctcactgctgaggtgtcttggaaagtgcttgagcgaagggcgcgaactaaaagatcaggcagcgtttatgaaccattaaagtctataaatctcccacgcccagacaacgagactctctgggacaagctcgaccattactacagaatcgtcaaaagcaccttgcttctgtatcagagtccaactacgggacttttcccaactaagacctgtggtggagatcaaaaggctaaaatacaggactcgttgtattgcgctgcaggtgcttgggctctggctttagcataccgcaggattgacgatgataaaggtaggactcatgagctcgaacatagtgcaataaagtgcatgcgtgggatcctctactgttacatgagacaggccgataaagttcaacagtttaagcaagatccccggcctactacttgcctccatagcgttttcaatgttcacacaggtgatgaacttctttcctatgaagaatacgggcatctccagatcaatgctgtgagcctatacctgctgtacttggttgaaatgattagtagtggacttcagattatctataatacggatgaggtttcattcattcagaacttggtgttctgtgttgaacgagtgtaccgtgtacctgattttggtgtttgggaaaggggatctaaatacaataacggttccaccgaacttcatagttccagtgtaggcctcgctaaggcagccttggaagctattaacggatttaatttgttcgggaatcaaggctgtagttggtccgtgattttcgttgacctggatgcacacaatcgaaatcgtcaaaccttgtgtagtctccttccgcgtgagtcccgttcacataacacggatgccgccctccttccttgcatcagttaccctgccttcgctttggatgacgaggtgttgttctcacaaaccctcgataaggttgttcgtaaattgaaaggcaagtatggattcaagaggttcctccgagatggttatcgaactagtctagaggatcctaatcgatgctattataagcctgcggaaattaaactcttcgatggtatcgaatgtgaattcccaatctttttcctgtatatgatgatagacggagtttttagggggaacccaaagcaagtccaagaatatcaagatttactgacgccagtgctacaccacaccactgagggttaccctgtagtccccaaatactactatgttcccgctgattttgtcgaatatgaaaaaaacaatcccggctctcagaagagatttccctccaactgtgggagagatgggaagctgttcctgtggggtcaagccctttatattatcgctaagttgcttgctgatgaacttattagccctaaagacatcgatcctgttcagcgatatgtgccactgaaggatcagaggaatgttagtatgcgattctccaatcagggacctcttgaaaacgatttagttgtccacgttgctctcattgctgagtcccaacggttgcaagttttccttaacacttatgggattcaaactcaaactcctcaacaggtggaaccaatacagatctggccacagcaggagctcgtcaaagcatatttgcaacttggaatcaatgaaaagctcggcctcagtggtcgtcctgatcgtcccattggatgtttggggacttcgaaaatctaccgcatcctaggcaaaactgttgtttgctaccccataatatttgatttgagtgatttttatatgagtcaggacgtcttcctgctcattgatgatataaaaaatgctcttcagtttattaagcaatattggaaaatgcacggtaggcctctgtttttggtattaatccgggaggacaatatcaggggtagcagattcaatcctattttagatatgctggcagctcttaaaaagggtattataggtggggttaaggttcatgttgataggctccagactttgatatctggggctgtggttgagcaattggatttcttgcggatcagcgacactgaggagcttccggagttcaagtcattcgaagagttagaacctccgaagcacagcaaggtcaaaagacagagttccacaccatccgcacctgagttgggccaacaacctgacgtcaatatctccgaatggaaggataagccaactcacgagatccttcaaaagcttaatgactgctcctgccttgcttcacaagctatcctcttgggcattctcctgaagcgtgagggccctaacttcatcacaaaggagggtaccgttagtgatcatatagagcgtgtttacagacgagctgggagtcagaaactttggcttgcggtacgatacggtgcggctttcacccagaaattttctagctctatcgccccgcatatcaccacttttcttgtgcacggcaagcaggtgacccttggagctttcggacatgaagaagaggtgatttctaacccactctcacctagggtcatacagaatattatttattacaaatgtaacacccatgatgagcgtgaagcggttatacagcaggagcttgttattcatatcggttggattatatccaataatccagaactgttttcaggaatgttaaagatacgtattggatggattattcacgccatggaatacgaattgcagattagaggcggcgataaaccagccctcgacctctatcaacttagtccatctgaggttaaacaacttcttctggatatattacaaccacaacagaacggccgttgctggcttaatcgtagacaaatcgatggtagcttgaatcgcactcccaccggtttctacgatcgtgtttggcagattcttgagaggacgccaaatgggataattgtggctggtaagcatctcccacagcagccaaccctttccgatatgacaatgtacgagatgaatttttcgttgttggtcgaagacactctgggaaacattgaccagcctcagtataggcaaattgtggtagaactattaatggtcgtgtctatagtgttagagcgtaatccagaattagaatttcaggataaagtagacttggataggctggtgaaggaggccttcaacgagttccagaaggatcaatcacgcttaaaggaaattgagaaacaagatgacatgactagcttctacaacactccccccctcggaaagagaggtacgtgttcatacttaacaaaagccgttatgaaccttctacttgaaggagaagttaagcctaataacgacgatccttgtttgatttca

SEQ ID NO: 6347 - DNA, 3279 bp, Artificial Sequence
  derived and/or modified sequence
atggcaggtgccgcgggccttaccgccgaagtctcctggaaggtgcttgagcgccgagcgaggaccaagagatcaggatcggtgtacgagccgcttaaatccatcaatctgccacgcccagataacgaaactctgtgggataagctggaccattactacaggattgtaaagtcgacccttctgctgtaccaatcaccaaccactggcctgtttcccactaagacctgtggaggggaccaaaaagcgaagatccaggattccctctactgtgcagcgggtgcgtgggccttggcccttgcgtaccggcgaattgatgacgacaagggacggacccatgaactcgagcatagcgcaatcaaatgtatgagaggaatcctgtactgctacatgaggcaagccgataaggtgcagcaattcaagcaggatccacggccaaccacctgccttcactcggtgttcaacgtccatactggcgatgaacttctgtcatatgaagaatacggacatctccagataaacgccgtctccctgtacctcttgtaccttgtggagatgatatccagcggactgcaaatcatctacaacactgatgaagtgtcatttatccaaaaccttgtgttttgtgtggaacgcgtctacagagtgcctgattttggggtctgggagaggggatcaaagtacaacaacggaagcaccgagctccattccagcagcgtcggacttgcgaaggcagcccttgaagctattaacggattcaacctgttcggaaatcaggggtgttcatggtcagtgatatttgttgacttggacgcccataatagaaatagacaaaccctttgttccctccttccacgggagtcccgttcgcataacaccgacgcagcactgttgccatgtatttcgtatcctgccttcgcactggatgatgaggttcttttttcccaaactctggacaaggtggttagaaaacttaagggaaaatacggttttaagcgatttctcagagacgggtaccgcacctcgctggaggacccgaaccgctgttattacaaacctgcagagattaagctgtttgacggaattgaatgtgaatttcctattttcttcctgtacatgatgattgacggagttttcaggggaaaccccaagcaagtccaagaataccaagatctgttgacccccgtcctgcatcataccaccgagggctaccccgtggtgcctaagtactactacgtgccagcggactttgtcgaatacgagaagaataatccaggatcgcaaaaacggttcccatcgaactgcggaagagacggtaagctgtttctttggggacaagcattgtacattattgcaaaactgctcgctgatgaacttatcagcccaaaagacattgatcctgtccaaagatacgtccctctcaaggaccagagaaacgtgagcatgcggttttcgaaccaaggtccgttggaaaacgatctcgtggtccatgtggcactgattgccgaatcccaaagactgcaggtgtttctgaatacgtacggaattcaaacccagactcctcagcaagtggaacctatccagatttggccacaacaggaactcgtgaaggcatacctgcagcttgggattaacgaaaagctcggactgtcgggacggcctgataggcctattggttgtcttgggacgtcgaagatctacagaatcctcgggaaaactgtcgtctgttaccccattatcttcgatttgagcgatttctacatgagccaagatgtgtttctccttattgacgatatcaagaatgcattgcagttcattaagcaatattggaagatgcatggcaggcctctctttctggtgctcattagagaggacaacatcaggggctcgagatttaacccaatccttgatatgcttgcagcactcaagaagggaattatcggtggtgtgaaggttcacgtggacaggctgcagaccctcatatccggcgccgtggttgagcaactcgattttcttcgaatcagcgatactgaggagcttcctgagtttaagagctttgaggaacttgaaccacctaagcattccaaggtcaagcgtcaatcaagcactccgtcagcgcctgagttgggacaacagccagacgtgaacatctcggagtggaaagacaagccaacccatgaaatcctgcagaaacttaatgattgctcctgccttgcgtcccaagcgattctgctgggaattctgttgaaaagagaaggtccaaacttcattaccaaggagggaaccgtgagcgatcacatagaaagggtgtacagacgggccggatcgcagaagctgtggctggcagtgagatacggtgccgcctttactcagaagttttcgtcctccatcgcacctcacatcaccaccttcttggttcacggcaaacaagtgacccttggtgcattcgggcacgaagaagaggtgatctccaaccctctttcgccacgtgtgattcaaaacattatctactacaagtgtaacactcatgatgaaagggaggcagtgatccaacaggagctggtcatccacatcggttggatcatttcgaataatcccgaattgttttcgggaatgctcaagattcgaattgggtggataatacacgctatggaatacgagcttcagattagagggggtgataagcctgcacttgacctctaccagctttccccctcggaagtcaagcagctgctgttggatattctgcaaccccaacaaaatggcagatgttggcttaatagaaggcaaatcgatggaagccttaatcgcactcctaccgggttctacgatagggtgtggcagatcctcgaaaggacccccaacggtatcattgtggcagggaagcaccttcctcagcaaccgaccctgtcggatatgaccatgtacgaaatgaacttcagcctgttggtggaagatactctgggaaatatcgatcaacctcaatacagacagattgtggtcgagcttctcatggtggtgagcatcgtgctcgaacgcaaccctgaactggagttccaggacaaggtggatctggatcgtctcgtgaaggaggcatttaacgaatttcagaaggatcaatcccgactgaaggaaattgaaaaacaggatgatatgacgtcgttttacaataccccacctctcgggaagcgtggtacctgcagctacctcacgaaagcggtgatgaatctgcttcttgaaggtgaggttaagcctaacaacgatgatccatgccttatttcg

SEQ ID NO: 6348 - DNA, 3279 bp, Artificial Sequence
  derived and/or modified sequence
atggccggcgcggccggcttaaccgccgaggtgtcctggaaagtgcttgagcggcgggctcgcaccaagcgctctggctctgtgtatgagccactaaagtccatcaacctccccagacccgataacgagactctgtgggacaagttggaccattactacagaatcgtgaagtccacccttttactctatcagagtccaacgaccggattattccccactaaaacttgcggcggtgaccaaaaggctaagatccaggattcactctattgtgctgctggggcttgggctctggctctcgcctacagacgtatcgacgacgataaaggcagaacacacgagctggagcacagtgccatcaagtgcatgcggggcattctatattgctatatgagacaggccgacaaagtccaacagttcaagcaagatcctagacccaccacttgccttcactccgtgtttaacgtgcatacaggcgatgaactgctgtcatacgaggagtacgggcacctccagattaacgccgtgtcattgtatctgttgtatctcgtggagatgatctcctctggcctgcagatcatctacaatacagacgaggttagcttcatccagaatctggtgttctgcgtcgaaagagtgtatcgcgtccctgactttggcgtatgggagagaggctctaaatataataatggttctaccgaactccactcatcttctgtgggcctagctaaggcggcgcttgaagctattaatggatttaacctgtttgggaaccaaggttgtagttggtccgtgatttttgtagatctggacgcacataacaggaacagacagacgctgtgttcgctactgccccgggaatcccgttcacataacaccgatgcagccctcttgccatgcatctcttacccagctttcgctctcgatgacgaagtactcttctcacagacattggacaaggtggtgcgcaaacttaaggggaaatacggcttcaaacgcttcctcagagatggctatcgcaccagcctagaagacccaaaccgatgttactataaaccggccgagatcaaactgttcgacggcatcgaatgtgagtttcctatcttcttcttgtacatgatgatagacggagttttccgcggcaacccgaaacaagtccaagaatatcaggacttactcactcccgttctacaccataccacagagggttacccagtcgtgccaaagtactactatgtgcctgcagacttcgtggaatatgaaaaaaataaccccgggtctcagaaacggtttccatccaattgtggccgtgatggcaaactgtttctttggggccaggcgctgtatatcattgccaagcttctggcggacgagcttatttctccaaaggacatcgatcctgttcaacgctatgtgccattaaaggatcagaggaacgtgtcgatgcgcttttccaatcagggaccgctggaaaacgacctcgtcgttcacgttgccctgatcgcagaatctcaaaggttacaggtttttctgaatacatatggcatccaaacacaaacccctcagcaggttgaacctattcaaatctggcctcagcaggagttggtgaaagcatacctacaactgggcataaacgaaaagctgggattatccggacgcccagaccgcccaatcggatgtctgggcacatctaagatttatagaatcctcggtaaaaccgtggtttgctacccaataatatttgacctctctgatttttacatgtcacaggacgtgttcctgctgatcgacgacattaaaaatgccctgcagttcattaaacagtactggaaaatgcatgggagacctctctttctggtgttaatcagggaagataatatcaggggttcacggttcaatcctatcctggacatgttggccgctctgaagaagggcatcattggaggcgtcaaggttcacgtcgaccgtctgcagacactgatctctggggctgtagtggaacaactcgattttctgcgcattagtgataccgaggagctgcctgaattcaagagctttgaggagctcgagccacccaagcactcgaaagtgaaacggcaatcatccacccccagcgcccccgagctgggccaacagcccgacgtgaatatttctgagtggaaagataaacccacacatgagatactgcagaagctgaatgactgctcttgtctggcaagccaggcaatcctgctagggatcttactgaagcgcgagggacccaacttcataaccaaagaaggcacagtgtctgaccacatcgagagggtgtaccgaagggccggcagtcagaagctttggcttgccgttagatatggcgccgcttttactcagaagttttcatcaagtatcgcccctcatatcactacgttcctggtccatggtaaacaggttacgttaggagctttcggtcatgaggaggaggtgatatccaacccgctttctccaagggtgattcagaatatcatttactataaatgcaacacacacgacgagagggaggctgtgatccagcaggagttagtgattcatatcggttggatcatttcaaacaaccccgaacttttcagcgggatgctcaaaataaggattggatggattattcacgccatggaatacgaactgcagatacgcggaggcgacaagcccgccctggatctctaccagctctctccctcagaggtcaaacagttgctcctggatattctccagccccagcagaatggcaggtgttggctgaaccggaggcagattgacgggtccctgaatcggacgcccacaggcttttacgacagggtgtggcaaattcttgaaagaactcctaatggcattatcgtcgccggaaagcacttgcctcagcagcctaccctctcagacatgactatgtacgagatgaatttcagcctcttagtggaggacaccctggggaacattgatcaacctcaataccgtcaaatcgtggtggagctgcttatggtagtgagtatagtcctagagaggaatccagaattggaattccaggacaaggtcgacctggacaggctggtgaaggaagcgtttaacgagtttcagaaggatcagtccaggctcaaggaaatagagaagcaggacgatatgacctcattctacaataccccaccactgggcaagcgaggaacctgctcatatctcacaaaggccgtgatgaatctgttactcgagggcgaggttaagccgaacaacgatgatccttgtctgatcagc

SEQ ID NO: 6349 - DNA, 3279 bp, Artificial Sequence
  derived and/or modified sequence
atggcgggagccgcgggccttactgcagaagtgtcatggaaggtgcttgagagacgggcaagaaccaagcgctccggttctgtgtacgaacctctgaagagcattaacttgccaagaccagacaacgaaactctttgggataagctggatcattactaccggatagtcaagagcaccctgctgttgtaccaatccccaaccacgggcctttttcctactaaaacctgtggaggagatcaaaaagccaagattcaggattccctttactgcgcagctggtgcttgggcacttgcgctggcctaccggagaatcgacgatgataagggaagaacgcatgagttggagcactcggcaattaagtgtatgcgcggaattctgtactgctacatgcgccaggctgataaggtgcagcaattcaagcaagatccgcgcccaactacttgccttcattccgtctttaacgtgcacactggagacgaactgctgtcatacgaggagtacggtcaccttcagatcaacgcagtctcgctgtatctgctttacctggtcgagatgatctcatctggactgcaaatcatctacaacaccgacgaagtgtcgttcattcagaatcttgtgttttgtgttgagcgcgtgtatcgggtgccagactttggagtctgggagagaggtagcaaatacaacaacggatcgaccgagctgcattcctcctcggtgggacttgcgaaggcggcccttgaggcaattaacggattcaacttgtttggcaatcagggatgttcgtggtccgtgatcttcgtggatctggacgctcacaatcgaaaccgccagactctttgttcgctccttcctagggagtcgcgctcccataataccgatgcagcattgctgccatgcatctcctaccctgcctttgcactggatgatgaggtgcttttttcccagaccctggacaaggtggtgcgcaagctgaagggaaaatacggattcaagaggtttttgagagacggttacagaacctccctggaggatccaaatcggtgttactacaaaccagccgagattaaactttttgacggaattgaatgcgaatttccgatattcttcctctacatgatgattgatggggtgtttcgtggcaaccctaagcaagttcaagagtaccaagaccttctcaccccagtgctgcatcatactaccgaaggatatccagtcgtccctaagtactactacgttccagccgactttgtggaatacgagaaaaacaatcctggttcgcaaaaacgttttccttcgaattgtgggagggacggcaagctgtttctttggggccaagcgctttacataattgcaaagctgcttgcggatgaactgatttcccccaaggacattgaccctgtgcagcgatatgtgcctctcaaagatcaaagaaacgtgtccatgagattttcaaatcagggaccactggaaaacgaccttgtggtgcacgtggcactcatcgcagagtcccagcgcctgcaagtctttcttaacacctacggtattcaaacccaaacgcctcaacaggtggaacctatacaaatttggccgcaacaggagttggtgaaggcttacctgcagctgggcattaatgaaaaacttggacttagcggtaggccagatcggcccatcggctgtcttggaacctcgaaaatctaccggatacttggaaagacggtcgtctgttatcctatcattttcgatctttccgacttttacatgtcccaagatgtctttcttctcattgatgatatcaaaaacgcactccagtttatcaagcagtactggaagatgcatgggcggcctctttttctggtgctgatcagggaagataacattcgggggtcccgctttaatcctattctggatatgttggcagcacttaagaagggcattataggaggcgtgaaagtgcatgtggatcggctgcagactctgatctcgggggcagtcgtggaacagctggattttctccggattagcgataccgaagaacttcctgagttcaagtcgttcgaggagctcgaaccgccaaaacattccaaggtgaagcgccaatcgtcaaccccttccgcacctgaactggggcagcaaccagacgtgaacatttctgaatggaaagacaagcctactcatgaaatcctgcaaaagctgaacgactgctcatgtctcgcaagccaagctattctgctcggcattcttcttaaacgagaaggaccaaatttcatcaccaaggagggaaccgtctccgatcacattgaacgcgtctacagacgggccgggagccagaaactttggctggcagtgagatacggcgcggcctttactcagaagttttcatcctccatagcacctcatatcaccacttttcttgtgcatgggaagcaagtcactctgggcgcattcgggcatgaagaggaagtgatttccaatccactgtcgccaagagtgattcagaacataatctattacaaatgtaacacgcatgatgaacgcgaagcagttatacagcaggagcttgtgatccatattggttggattatctcgaataaccccgagcttttctcggggatgcttaagattaggatcggttggattattcacgctatggaatacgagcttcagatccggggtggcgacaagccagctcttgatctgtaccaactttcaccttcggaggtcaagcaacttctcctggatattctgcagccccagcagaatgggcgctgttggctcaaccgtagacaaatcgatgggtccttgaatcgaactcctactggattttacgaccgcgtgtggcaaatccttgagcgaaccccaaacgggattatcgtggctggtaagcacctgcctcagcagcccaccctctccgacatgactatgtacgaaatgaactttagcttgctggtggaagatactcttggcaacattgatcagcctcaataccgtcaaatcgtcgtcgaactcttgatggtggtgagcattgtcttggagcgaaacccagagcttgaatttcaagacaaagtggatctggatcggctggtcaaggaagcgtttaacgaatttcagaaggaccagagccggctcaaggaaatcgaaaaacaggatgacatgacctctttctacaacaccccacctttgggaaagcggggtacttgctcgtatctgaccaaggcagtcatgaatcttttgctcgaaggagaagtgaagccgaacaatgatgatccctgtcttatttcg

SEQ ID NO: 6350 - DNA, 3279 bp, Artificial Sequence
  derived and/or modified sequence
atggccggggctgctgggcttacagcagaagtctcctggaaagtactagagagaagagcccgcacaaagagatctggatcagtgtatgaaccactcaaaagtataaacctgccccggcctgacaatgaaacactctgggacaaacttgatcactattacagaatcgtaaaatccactctccttttatatcagtctcctactacaggactattcccaacaaaaacttgtgggggggatcagaaagccaaaatccaagattcactctattgcgccgcaggggcttgggcccttgccctggcctatagacggatcgatgatgataaagggcggactcatgagttagagcactccgccatcaagtgtatgagggggatcctgtactgttatatgcggcaggccgataaagtgcaacagttcaaacaggatccacgcccaacaacttgcctgcactctgtgtttaatgttcatacaggagatgaacttctatcatatgaagaatacggacatctccagataaacgcagtgtcattatacctcctctacttagtggagatgatctcatccgggctacaaatcatatataacacagatgaagtgtctttcatccagaatcttgtattctgcgtggaaagggtgtatagagttccagatttcggagtgtgggaaagggggtcaaaatataataatggatctactgagctccattcctcctccgtggggctggccaaagctgccctcgaggccataaatggattcaatctttttgggaatcagggatgctcttggtctgtgattttcgtagatctggatgcccacaaccggaacagacagactctttgttccctcctgcctagagaatccagatctcacaacacagatgctgccctgctcccctgtatatcttaccccgcgtttgcactagatgatgaggtgctcttctcgcagactctagataaggtcgtgaggaaactgaaagggaaatatgggtttaaacggttccttagagacggatacagaacttcactggaggatcctaacagatgttactataaacccgctgagatcaaacttttcgacgggatagaatgcgaattcccaatcttctttctgtacatgatgatcgacggagtatttagggggaatcccaagcaggtccaggagtaccaggatctcctcactccagtgctccatcatacaactgaagggtatcctgtggtcccaaaatactattatgtgccagctgatttcgtggaatatgaaaaaaataaccccgggtcacagaaaagattcccctccaattgtgggagagatggaaaactgtttctatggggacaggctctctatatcatagccaaacttttggccgatgaacttatctcccccaaagatattgatcccgttcagaggtacgtgcccctgaaagaccagcggaacgtatctatgcgattcagtaatcagggaccacttgaaaatgaccttgtcgtgcatgtcgcattaatagcagaatctcaacgacttcaggtctttctaaacacttatgggatccagacacagactccacaacaggttgagcctatccagatctggcctcagcaggaactggtcaaagcctacctccagctcggaatcaacgaaaaactggggctgtctgggagacctgataggccaatcgggtgtctggggacatccaagatctatagaatactaggaaagacagtggtatgttaccccatcatctttgatctcagtgacttctatatgtcccaagatgtgttcctgcttatagacgatatcaaaaatgctcttcagttcataaaacagtattggaaaatgcatggaaggcccctgttcctggtcttaatccgcgaggataatataagggggtctcgatttaatccgatcctcgacatgctggccgcccttaaaaaagggattatagggggggtgaaagtgcatgtcgatcggctgcaaacactaatctctggagctgttgtagaacagttggattttctgagaatatcagatacagaggaactaccagagttcaaatcatttgaagaattagaacctcctaaacactccaaagtgaaaaggcaaagttcaacaccatcggcccctgaactcgggcagcagcctgatgtgaatatatccgaatggaaggataagcctactcatgaaatactccaaaaactcaacgattgttcgtgtctcgcctcacaggcgatcctcctcggaatcctacttaaacgggaggggcctaacttcattactaaagaagggacagtgtccgaccatatcgagagagtatatagaagggctggatcccagaaactgtggctagccgtgcggtacggggccgcctttacacagaaattcagttcctcaatcgccccacacataacaactttcctcgtgcatgggaaacaggtcacactcggagctttcggacacgaagaagaagtgatcagtaacccactctcaccacgagtgatacagaatatcatatattataaatgtaatactcacgatgaaagggaagctgtgatacagcaagagctggtcatacatatagggtggataatatcaaacaatcctgagctgttctccgggatgttaaaaatcaggatagggtggataatccatgccatggagtatgaactgcagataagaggaggggataaacccgcccttgacctataccagctgtctccttctgaagtaaaacagttactgctcgatattttgcagccccagcagaacgggcggtgttggctgaaccgccgccagattgatggaagtctcaaccggactccaacagggttctatgatagagtctggcagatccttgaaaggacacccaatggaattatcgtcgcaggaaaacacctccctcagcagcccacactttctgatatgacaatgtacgaaatgaatttctcactgctcgttgaggatactctaggaaacatcgatcagcctcaatatagacaaatcgtcgtcgaattattaatggtggttagtattgttttggaacgcaaccctgaactcgaatttcaggataaagtcgacttagatcggctggtgaaagaagctttcaacgaattccagaaagatcaatcacggctgaaagaaatcgaaaaacaggatgacatgactagtttctacaacacacctcctctgggaaaacgtggaacatgcagttatctaacaaaagctgtaatgaaccttctcttagaaggagaagtaaagcctaacaatgacgatccctgcctcatatca

SEQ ID NO: 6351 - DNA, 3279 bp, Artificial Sequence
  derived and/or modified sequence
atggctggcgccgccggattaacagctgaagtgtcctggaaagtcctggagcgccgggctcggactaagcgcagcggttctgtgtatgagccgcttaagagtatcaatctcccaagacctgacaacgaaacattgtgggataagctggaccattattatagaattgtgaagagtacgctgctgctgtatcaatcaccgactaccggactgttcccaacaaagacctgtggaggtgaccagaaagctaaaatccaggacagtttatattgtgccgctggcgcctgggccctggccttagcttaccgccgaatcgacgacgacaagggacgcacgcacgaactcgagcactctgcaattaagtgcatgcgtggaattctctactgctatatgcgacaggccgacaaggtacagcagtttaagcaggatccccggccgactacatgcttgcatagtgtctttaatgtccacacaggtgacgaactgctgtcctacgaggaatacggccaccttcaaattaacgctgtctcactctatcttttgtacttggttgaaatgatttccagcggactccagatcatttataacacagacgaggtgagcttcattcagaacctggtattctgcgttgaaagggtgtaccgtgtgcccgacttcggcgtctgggagcgcggctctaagtataataacggctcaactgagctgcactcctctagcgtggggctggccaaggctgcactcgaggcaatcaatgggtttaatctgttcgggaatcaggggtgtagctggagcgttatcttcgtggacctggatgcccacaatcgcaacaggcagaccctctgctcgttgttgcctagagagtccagaagccataacaccgacgcagccctcctgccatgtattagctaccctgcattcgcccttgatgatgaggtgttgttttctcaaaccttggacaaggtggtacgtaagttgaagggcaagtatggcttcaagcggttcctccgcgatggctatcggacctctctggaggaccctaatcgttgttactataaacccgctgaaattaagctgtttgatggcatcgagtgcgagtttcccattttttttttgtacatgatgatcgatggagtgtttagagggaacccgaaacaggtgcaagaatatcaggacctgctgacccccgtgctgcatcacaccacagaaggctatccggtcgtgcccaagtactattatgtcccagccgacttcgtcgaatacgagaaaaataatccgggcagccagaagagattcccgtctaactgtgggagagatggaaaattattcctttggggacaagctctctatattattgcaaagctattggcagacgagttaatttctcctaaggatatcgacccagtgcaaagatatgttcctctgaaagatcagaggaacgtgtctatgcgcttcagtaaccaggggccactggaaaatgatctagtggtccatgtggccctcattgcggaatcacagcgactccaagtgtttctcaacacctatggcatccagacgcagactccacaacaggttgagccaatccaaatttggcctcagcaggagctagttaaagcttacctgcagctcgggatcaacgaaaaactggggctctcaggcaggccagataggccgatcggatgtctcggaacgtccaagatctatcgcatcttgggaaagacagtcgtgtgctatcctattatcttcgatttatccgatttttatatgtcacaggacgtcttcctgctgatcgatgatatcaagaacgctctgcaatttatcaaacagtactggaagatgcatggaagaccgctgttcttggtactcatacgcgaagataacatacgcggctcacgcttcaacccaatccttgatatgcttgctgctctaaagaaggggatcattggtggggtgaaagtgcacgttgacagactacagactttgatatcgggtgcggttgtggaacagctagatttcttgaggatctctgatacggaagagctacctgaatttaaaagctttgaagagctggagccgccaaagcacagtaaggtgaagcgacagtcgtccacacccagcgcccctgagctcggccagcagcccgacgtgaatataagtgagtggaaagacaaacccactcacgagatcctgcagaagctgaatgattgctcctgtctcgctagccaagctatcctcttgggcattctcctcaaacgcgaggggcccaacttcattacaaaggagggaactgtgtcagaccacatagagcgcgtttaccgaagagccggatcacaaaaactttggctggccgtgaggtatggcgccgccttcacacagaaattctcgagctccattgcaccacatatcactacctttcttgtccacggaaagcaggtaactctcggggcttttgggcatgaagaggaggtgatcagtaatcctttgagcccaagggttatccaaaatataatctactataagtgcaacacacacgatgaacgagaggccgtgatccagcaagaactggtgatccatattgggtggatcatttctaacaatcccgaactgtttagcggcatgttgaaaatcaggattggatggatcatccatgctatggaatacgagttacagattaggggcggcgataagccagcgcttgacctatatcagttaagcccatccgaagtaaaacaactactcctcgacatcttgcagccacagcagaacggcaggtgctggctaaaccggaggcagatcgatgggtccctgaatcgaactccaaccgggttttacgatcgggtatggcaaatattagagaggaccccaaatggtatcatagtggcgggtaagcacctaccacagcagccaactctgagcgacatgacaatgtacgagatgaatttctcgctcttggtggaagacactctgggaaatatcgatcagcctcagtaccggcagatagtggtcgagctcctgatggtcgtgagcatcgtcctggagcgaaaccctgagctagagtttcaggacaaggtcgatctggacagactcgtgaaggaagcgttcaatgaattccagaaggatcagtctcggttaaaggagattgagaagcaggatgacatgaccagcttctacaacacccctcccttggggaagagaggcacctgttcctatctaactaaggccgtgatgaacctcttgctcgaaggcgaggtcaagcctaacaacgacgatccatgcctcatctct

SEQ ID NO: 6352 - DNA, 3279 bp, Artificial Sequence
  derived and/or modified sequence
atggccggagccgccggactgacagccgaagtgagctggaaggtcttggagagacgagctcgcaccaagcggtcaggttccgtttacgagccccttaaaagtataaatctgcctaggccagataacgagaccttgtgggataaactggatcactactacagaatcgtgaaatccaccttgcttctgtaccagtcgcctaccacaggcttgtttcctacaaagacatgtggcggagatcaaaaagccaagatacaggacagtctgtattgcgccgctggcgcctgggcattggcgctggcctaccgtcgcattgatgacgataaaggaaggactcacgaactcgagcattccgccattaagtgtatgagaggaattctgtactgttacatgcgccaggctgataaagtgcagcagtttaagcaagacccgcggccaacaacatgcctccactctgtattcaatgtgcatacgggcgacgaactgctttcctatgaggaatacggacatttgcaaattaatgccgtttccctttatctgctatacctcgtggagatgatatcatccggactgcagatcatctacaatacggatgaagtaagtttcatccagaacctcgtgttttgtgttgagagggtgtaccgggttcccgactttggggtgtgggagagaggttctaagtacaacaacggttctacagagctgcatagttcttccgtgggacttgccaaagctgcacttgaggcaattaacgggttcaacctcttcggcaatcagggctgtagttggagcgtgatctttgtagacttggatgcccataatagaaatagacagaccctctgttcccttttaccccgcgagagccgatcccacaacaccgatgctgcactgcttccatgcatttcatatcctgcattcgcattggacgacgaggtgcttttttcccagaccctggacaaagtcgtccgtaagctgaagggtaagtatgggttcaagcgcttcctaagagatggatataggacatcccttgaagaccctaaccggtgttattataaaccggccgagatcaagctgttcgacggcatcgagtgtgagtttccaatattctttctttacatgatgattgacggcgtgttccgcggaaatcctaagcaggtacaggaataccaggatcttctgacacctgtgttacaccatacaactgaaggctatcctgtagtgcccaagtattattacgtgcccgccgactttgtggaatacgagaaaaataatccggggtctcaaaaaaggtttcctagtaactgcggaagagatggaaaattattcctttggggacaagctttatacatcattgctaaactcctggcagacgagctgatctcccctaaggatattgatcccgtgcagcgttatgtgccactgaaggaccagcggaatgtgagcatgaggttctcaaaccagggtccgttagagaatgacctggtggtgcacgtagccctgattgcagagagccagcgcctccaggtctttctgaacacatatggaattcaaacacagactcctcagcaggtcgagccgattcagatttggccgcagcaagaactggttaaagcttatctacagctgggcatcaacgagaagctcggattatctggacgacccgatcggccaatcggctgcctcggcactagcaaaatctataggattttaggtaaaaccgtggtctgctaccctatcatcttcgatttgagcgatttttatatgtcccaggacgtgtttctcctgatcgatgatattaagaatgccttacaattcattaagcaatattggaagatgcatggacggcctctgtttcttgttctcatcagggaagacaatattcgaggctcacgcttcaatccgatcctggatatgctggctgccttgaaaaaagggattattggaggtgtgaaagttcacgtggacagactgcagactctcatctctggtgctgtggtggaacagctcgattttctgagaatctccgacaccgaggagttgcctgaattcaagagttttgaggaacttgagccccctaagcattccaaggtcaagaggcagtcctccaccccctctgccccagagctcggccagcagcccgacgtgaatattagtgaatggaaggacaagcccacccacgagatcctgcagaaactgaatgattgctcctgtttggcctctcaagccatactgctaggaatactactgaaacgagagggtccaaactttattacaaaggaagggaccgtctcggatcacatcgagagagtctaccgtcgagccgggtcccagaagctgtggcttgctgtcaggtatggggcagcattcacccagaagttctcaagtagcattgccccccatataactacattccttgtacacgggaaacaagttactttgggggcctttggacatgaagaggaggtgatatcaaatcctttatctccacgggtgatccagaacatcatctactataaatgtaacactcatgacgaacgggaagcagtaattcagcaggagctcgtcatccacattggatggattatttctaacaacccagagctgttttcaggaatgctgaagatcaggatagggtggattattcatgcgatggaatatgaattacagattcgcgggggtgacaagcccgcgctggatctgtaccaattgtcgccctcggaggtgaaacaattgctgctggacattctacagccccagcagaacggccgatgctggctgaatcggaggcaaattgacggatccttgaaccgcacccccaccggtttctatgaccgggtgtggcaaattttagagcgcacgcctaacggcatcattgtcgccgggaagcacctccctcagcaacctacactctcagacatgactatgtacgagatgaacttctccttgctggtcgaagataccctggggaacattgaccaaccccagtatcgccagatcgtggttgagttattgatggttgtctcaattgtactcgagcgtaatccagagctagaatttcaggataaagtcgatttagaccgcttggtgaaggaagccttcaacgagttccagaaggatcagtcacggcttaaggaaatcgaaaagcaagatgacatgacgagtttctacaacaccccgccactcggcaagcggggcacctgctcctatctgacgaaagctgtcatgaaccttctgctggaaggcgaagtgaagccaaataacgacgacccctgccttataagc

SEQ ID NO: 6353 - DNA, 3279 bp, Artificial Sequence
  derived and/or modified sequence
atggcaggagccgcgggactcaccgcagaggtatcgtggaaggtgctcgagaggagggcacgcactaagagatcggggtccgtctacgaacccctgaagtcgatcaacttgccgaggccggacaacgagacgctgtgggataagctcgatcactattaccggatcgtcaaatccactcttctgctctaccagtcacctactaccggactcttcccaactaagacttgtggaggcgaccaaaaggcgaagatccaagactctctctactgcgctgcgggcgcatgggccctcgcactggcataccggcggattgacgacgacaaggggcggacccacgaactcgaacactccgcgattaagtgtatgcgcggaatcctctactgctacatgagacaagcggacaaggtgcagcagttcaaacaggacccaaggcctaccacctgcctgcactccgtgttcaacgtccacactggcgacgaattgttgtcttacgaggagtacggacatctgcagatcaacgcggtgtcgctctacctgctctacctggtggagatgatatcctctgggctccagattatctacaacaccgatgaggtgtccttcattcagaacttggtattctgcgtggaacgcgtgtacagagtccccgactttggagtttgggagcgcggttctaaatacaataatggatcgaccgaactgcattcgtcgtcagtgggcctcgcaaaggctgccctggaggctataaacggattcaatctgtttgggaatcagggttgctcctggtcagtcattttcgtcgacttggacgcgcacaacagaaaccgccaaacgctgtgcagcctgctgcctagggagagccgcagccacaacactgacgcggcgctgctcccatgcattagctacccggcttttgcactggatgatgaggtgctgttttcacagaccctcgataaggtggtgcggaaattgaaaggcaagtacggcttcaagcgcttcctgcgcgacggctaccgtactagccttgaggatccgaatcggtgctactacaagccggccgagatcaaactgttcgacggaatcgaatgcgagttcccgatcttcttcctctacatgatgatagacggagtgttccggggaaatccgaagcaagtgcaagaataccaagacctcctgacccccgtgctgcatcacactaccgagggatacccagtggtgccgaagtattactacgtgccagccgactttgtcgaatacgagaagaacaacccggggtcccaaaagcgctttccatcaaattgtggaagagacggaaaactctttctgtggggacaagccctttacatcatcgccaagctgctggccgatgaactcatctcacccaaagacatcgatcctgtccagcggtacgtcccgctgaaggaccagagaaacgtgtccatgcggttctccaatcaaggaccactcgaaaatgatctggttgtccacgtggctctgattgccgagtcccagcgcttgcaagtgtttctcaatacgtacggcattcaaacccaaactccacagcaggtggaaccgatccagatctggcctcaacaggagctggtgaaggcctacttgcagttgggaatcaatgaaaagctgggtctgtcaggcagaccggacaggccgatcggatgcctgggaacttcgaagatctaccggatcttggggaaaacggtggtctgctacccaatcatcttcgatctgtccgacttttacatgtcgcaggacgtgttcctcctgatcgatgacattaagaacgctctccagttcatcaaacagtactggaagatgcacggacgtccgctgttcttggtcctgatccgggaagataacatcagaggatcccgctttaatccaatcctggatatgcttgcagcgctgaagaagggtatcatcggaggggtgaaagtgcatgtggaccgactgcagaccctgatctcaggggcagtggtggaacagctcgactttctgcggatttccgacactgaagaactgccggaattcaaatctttcgaggaactggaaccgccaaagcactcaaaagtgaagcggcaatccagcaccccgtctgcaccagaactggggcaacagcccgatgtgaacatcagcgagtggaaggacaagcctacccatgagattcttcagaagctcaatgattgctcatgcctcgcgagccaggctatcctgttgggaatcctccttaagcgtgaaggcccgaatttcatcaccaaggaaggaactgtctcggatcatatcgagcgcgtctacaggagagcaggctcgcaaaagttgtggctcgcggtgcgctatggcgcggcctttacccagaaattctcttcctcgatcgctccgcatatcaccaccttcctggtgcacggcaagcaggtgaccctcggcgccttcggccacgaagaagaggtgatctcaaacccgcttagcccgagagtgatccagaacattatctattacaagtgcaacacccacgacgaacgggaagcggtcatccagcaagaactcgtgatccatatcggatggatcatttcgaataacccagaactgttctccgggatgctgaagatccggatagggtggataattcatgctatggaatacgaactgcaaatcaggggaggagacaagccggccctggatctctaccagctgagcccttccgaggttaagcagctgctgctcgatatcttgcaaccgcagcagaacggtcgctgttggctgaaccgccgccaaatcgacggatcactgaaccggactccgactggattctatgacagagtgtggcagatcctcgaacggactcctaacgggatcatcgtcgcagggaaacatctgccacaacagccgaccctgtcggatatgaccatgtacgaaatgaacttctccctgctggttgaggacacccttggtaatatcgaccagcctcaataccggcagattgtggtggagttgctgatggtcgtgtcgattgtgctcgaacggaatccggaactcgagtttcaggataaggttgatctggatcgcctggtcaaggaggcattcaatgaattccaaaaggaccagtcccggctgaaggagatcgaaaagcaagatgatatgacttccttttacaatactccacctcttggcaagcgcggaacctgttcgtacctgaccaaggccgtcatgaacctgctcctggagggcgaggtgaagccgaacaatgacgacccatgtctcatcagc

SEQ ID NO: 6354 - DNA, 3282 bp, Artificial Sequence
  derived and/or modified sequence
atggccggcgccgccggcctgaccgccgaggtgagctggaaggtgctggagagaagagccagaaccaagagaagcggcagcgtgtacgagcccctgaagagcatcaacctgcccagacccgacaacgagaccctgtgggacaagctggaccactactacagaatcgtgaagagcaccctgctgctgtaccagagccccaccaccggcctgttccccaccaagacctgcggcggcgaccagaaggccaagatccaggacagcctgtactgcgccgccggcgcctgggccctggccctggcctacagaagaatcgacgacgacaagggcagaacccacgagctggagcacagcgccatcaagtgcatgagaggcatcctgtactgctacatgagacaggccgacaaggtgcagcagttcaagcaggaccccagacccaccacctgcctgcacagcgtgttcaacgtgcacaccggcgacgagctgctgagctacgaggagtacggccacctgcagatcaacgccgtgagcctgtacctgctgtacctggtggagatgatcagcagcggcctgcagatcatctacaacaccgacgaggtgagcttcatccagaacctggtgttctgcgtggagagagtgtacagagtgcccgacttcggcgtgtgggagagaggcagcaagtacaacaacggcagcaccgagctgcacagcagcagcgtgggcctggccaaggccgccctggaggccatcaacggcttcaacctgttcggcaaccagggctgcagctggagcgtgatcttcgtggacctggacgcccacaacagaaacagacagaccctgtgcagcctgctgcccagagagagcagaagccacaacaccgacgccgccctgctgccctgcatcagctaccccgccttcgccctggacgacgaggtgctgttcagccagaccctggacaaggtggtgagaaagctgaagggcaagtacggcttcaagagattcctgagagacggctacagaaccagcctggaggaccccaacagatgctactacaagcccgccgagatcaagctgttcgacggcatcgagtgcgagttccccatcttcttcctgtacatgatgatcgacggcgtgttcagaggcaaccccaagcaggtgcaggagtaccaggacctgctgacccccgtgctgcaccacaccaccgagggctaccccgtggtgcccaagtactactacgtgcccgccgacttcgtggagtacgagaagaacaaccccggcagccagaagagattccccagcaactgcggcagagacggcaagctgttcctgtggggccaggccctgtacatcatcgccaagctgctggccgacgagctgatcagccccaaggacatcgaccccgtgcagagatacgtgcccctgaaggaccagagaaacgtgagcatgagattcagcaaccagggccccctggagaacgacctggtggtgcacgtggccctgatcgccgagagccagagactgcaggtgttcctgaacacctacggcatccagacccagaccccccagcaggtggagcccatccagatctggccccagcaggagctggtgaaggcctacctgcagctgggcatcaacgagaagctgggcctgagcggcagacccgacagacccatcggctgcctgggcaccagcaagatctacagaatcctgggcaagaccgtggtgtgctaccccatcatcttcgacctgagcgacttctacatgagccaggacgtgttcctgctgatcgacgacatcaagaacgccctgcagttcatcaagcagtactggaagatgcacggcagacccctgttcctggtgctgatcagagaggacaacatcagaggcagcagattcaaccccatcctggacatgctggccgccctgaagaagggcatcatcggcggcgtgaaggtgcacgtggacagactgcagaccctgatcagcggcgccgtggtggagcagctggacttcctgagaatcagcgacaccgaggagctgcccgagttcaagagcttcgaggagctggagccccccaagcacagcaaggtgaagagacagagcagcacccccagcgcccccgagctgggccagcagcccgacgtgaacatcagcgagtggaaggacaagcccacccacgagatcctgcagaagctgaacgactgcagctgcctggccagccaggccatcctgctgggcatcctgctgaagagagagggccccaacttcatcaccaaggagggcaccgtgagcgaccacatcgagagagtgtacagaagagccggcagccagaagctgtggctggccgtgagatacggcgccgccttcacccagaagttcagcagcagcatcgccccccacatcaccaccttcctggtgcacggcaagcaggtgaccctgggcgccttcggccacgaggaggaggtgatcagcaaccccctgagccccagagtgatccagaacatcatctactacaagtgcaacacccacgacgagagagaggccgtgatccagcaggagctggtgatccacatcggctggatcatcagcaacaaccccgagctgttcagcggcatgctgaagatcagaatcggctggatcatccacgccatggagtacgagctgcagatcagaggcggcgacaagcccgccctggacctgtaccagctgagccccagcgaggtgaagcagctgctgctggacatcctgcagccccagcagaacggcagatgctggctgaacagaagacagatcgacggcagcctgaacagaacccccaccggcttctacgacagagtgtggcagatcctggagagaacccccaacggcatcatcgtggccggcaagcacctgccccagcagcccaccctgagcgacatgaccatgtacgagatgaacttcagcctgctggtggaggacaccctgggcaacatcgaccagccccagtacagacagatcgtggtggagctgctgatggtggtgagcatcgtgctggagagaaaccccgagctggagttccaggacaaggtggacctggacagactggtgaaggaggccttcaacgagttccagaaggaccagagcagactgaaggagatcgagaagcaggacgacatgaccagcttctacaacaccccccccctgggcaagagaggcacctgcagctacctgaccaaggccgtgatgaacctgctgctggagggcgaggtgaagcccaacaacgacgacccctgcctgatcagctag

SEQ ID NO: 6355 - DNA, 3261 bp, Artificial Sequence
  derived and/or modified sequence
atggcctgcagccccgacgccgtggtgagccccagcagcgccttcctgagaagcggcagcgtgtacgagcccctgaagagcatcaacctgcccagacccgacaacgagaccctgtgggacaagctggaccactactacagaatcgtgaagagcaccctgctgctgtaccagagccccaccaccggcctgttccccaccaagacctgcggcggcgaccagaaggccaagatccaggacagcctgtactgcgccgccggcgcctgggccctggccctggcctacagaagaatcgacgacgacaagggcagaacccacgagctggagcacagcgccatcaagtgcatgagaggcatcctgtactgctacatgagacaggccgacaaggtgcagcagttcaagcaggaccccagacccaccacctgcctgcacagcgtgttcaacgtgcacaccggcgacgagctgctgagctacgaggagtacggccacctgcagatcaacgccgtgagcctgtacctgctgtacctggtggagatgatcagcagcggcctgcagatcatctacaacaccgacgaggtgagcttcatccagaacctggtgttctgcgtggagagagtgtacagagtgcccgacttcggcgtgtgggagagaggcagcaagtacaacaacggcagcaccgagctgcacagcagcagcgtgggcctggccaaggccgccctggaggccatcaacggcttcaacctgttcggcaaccagggctgcagctggagcgtgatcttcgtggacctggacgcccacaacagaaacagacagaccctgtgcagcctgctgcccagagagagcagaagccacaacaccgacgccgccctgctgccctgcatcagctaccccgccttcgccctggacgacgaggtgctgttcagccagaccctggacaaggtggtgagaaagctgaagggcaagtacggcttcaagagattcctgagagacggctacagaaccagcctggaggaccccaacagatgctactacaagcccgccgagatcaagctgttcgacggcatcgagtgcgagttccccatcttcttcctgtacatgatgatcgacggcgtgttcagaggcaaccccaagcaggtgcaggagtaccaggacctgctgacccccgtgctgcaccacaccaccgagggctaccccgtggtgcccaagtactactacgtgcccgccgacttcgtggagtacgagaagaacaaccccggcagccagaagagattccccagcaactgcggcagagacggcaagctgttcctgtggggccaggccctgtacatcatcgccaagctgctggccgacgagctgatcagccccaaggacatcgaccccgtgcagagatacgtgcccctgaaggaccagagaaacgtgagcatgagattcagcaaccagggccccctggagaacgacctggtggtgcacgtggccctgatcgccgagagccagagactgcaggtgttcctgaacacctacggcatccagacccagaccccccagcaggtggagcccatccagatctggccccagcaggagctggtgaaggcctacctgcagctgggcatcaacgagaagctgggcctgagcggcagacccgacagacccatcggctgcctgggcaccagcaagatctacagaatcctgggcaagaccgtggtgtgctaccccatcatcttcgacctgagcgacttctacatgagccaggacgtgttcctgctgatcgacgacatcaagaacgccctgcagttcatcaagcagtactggaagatgcacggcagacccctgttcctggtgctgatcagagaggacaacatcagaggcagcagattcaaccccatcctggacatgctggccgccctgaagaagggcatcatcggcggcgtgaaggtgcacgtggacagactgcagaccctgatcagcggcgccgtggtggagcagctggacttcctgagaatcagcgacaccgaggagctgcccgagttcaagagcttcgaggagctggagccccccaagcacagcaaggtgaagagacagagcagcacccccagcgcccccgagctgggccagcagcccgacgtgaacatcagcgagtggaaggacaagcccacccacgagatcctgcagaagctgaacgactgcagctgcctggccagccaggccatcctgctgggcatcctgctgaagagagagggccccaacttcatcaccaaggagggcaccgtgagcgaccacatcgagagagtgtacagaagagccggcagccagaagctgtggctggccgtgagatacggcgccgccttcacccagaagttcagcagcagcatcgccccccacatcaccaccttcctggtgcacggcaagcaggtgaccctgggcgccttcggccacgaggaggaggtgatcagcaaccccctgagccccagagtgatccagaacatcatctactacaagtgcaacacccacgacgagagagaggccgtgatccagcaggagctggtgatccacatcggctggatcatcagcaacaaccccgagctgttcagcggcatgctgaagatcagaatcggctggatcatccacgccatggagtacgagctgcagatcagaggcggcgacaagcccgccctggacctgtaccagctgagccccagcgaggtgaagcagctgctgctggacatcctgcagccccagcagaacggcagatgctggctgaacagaagacagatcgacggcagcctgaacagaacccccaccggcttctacgacagagtgtggcagatcctggagagaacccccaacggcatcatcgtggccggcaagcacctgccccagcagcccaccctgagcgacatgaccatgtacgagatgaacttcagcctgctggtggaggacaccctgggcaacatcgaccagccccagtacagacagatcgtggtggagctgctgatggtggtgagcatcgtgctggagagaaaccccgagctggagttccaggacaaggtggacctggacagactggtgaaggaggccttcaacgagttccagaaggaccagagcagactgaaggagatcgagaagcaggacgacatgaccagcttctacaacaccccccccctgggcaagagaggcacctgcagctacctgaccaaggccgtgatgaacctgctgctggagggcgaggtgaagcccaacaacgacgacccctgcctgatcagctag

SEQ ID NO: 6356 - DNA, 3425 bp, Artificial Sequence
  derived and/or modified sequence
gggaaataagagagaaaagaagagtaagaagaaatataagagccaccatggcgggtgcggcagggctcacggcggaagtatcgtggaaagtacttgaacggcgagcccgcacaaaaagatccggttccgtgtatgagccattgaaatccattaaccttcctagacccgacaacgaaaccttgtgggataagctcgatcactactatagaatcgtgaagtcgacactcctgctctatcaatcgccgactacagggcttttcccgacgaaaacatgtggaggggaccagaaggcaaaaatccaagattcgctctactgcgcggcaggagcgtgggcactcgccttggcgtatagaagaatcgatgatgataaggggcgcacccacgagcttgaacattccgccatcaagtgcatgaggggcatcctctactgttacatgcgccaggcagacaaggtgcagcagttcaagcaggaccctcgccccacgacgtgtttgcactccgtattcaatgtccacactggggacgaactgctctcgtacgaagagtatggacacctccaaatcaacgctgtatcactgtacttgctgtaccttgtggagatgatttcgagcggactgcagatcatctacaataccgatgaagtatcattcatccagaacctcgtgttttgtgtggagcgggtctacagagtccctgacttcggagtgtgggagaggggatcgaagtacaataatggaagcacagaacttcactcctcctccgtcggtttggcgaaggcggctttggaagcgattaatgggttcaatctcttcggaaaccagggatgctcctggtcggtgatctttgtggacctcgacgcgcataataggaaccggcagacactctgctcactgcttccgcgcgagtcgcggtcgcacaatacggacgcagccctccttccctgcatctcatatccggcgttcgcgttggacgacgaggtcctctttagccagactctcgataaagtagtaagaaagttgaaagggaagtatggttttaagcggtttcttcgggatggatataggacttcgctcgaagatcctaacaggtgttattacaaacccgcggagatcaaactcttcgatgggatcgaatgcgagtttccgatcttctttttgtatatgatgatcgacggagtattccgagggaacccaaaacaggtccaagagtaccaggatcttctcacacccgtactccatcataccacagaggggtacccggtagtccccaaatactattatgtgccggcagatttcgtcgagtatgagaaaaacaatcccggttcacaaaagagatttccctcgaattgcggacgagatgggaaattgtttctttggggtcaggccttgtacattatcgctaagctgctggcggatgaactcatttccccaaaagacattgatccagtgcagagatacgtacccctcaaggaccagcgcaacgtgtcaatgcgcttctcgaaccaaggacctttggaaaatgaccttgtcgtgcatgtcgcgctcattgcggaatcccagcggctccaagtgttcttgaacacttatggtattcagacccaaacgccgcaacaggtcgagcctatccaaatctggccacaacaggaactggtaaaggcttatcttcagctcgggattaatgagaaattggggctgagcggacgccccgatcgccctatcgggtgtctcgggacgtccaagatctaccgcatcttgggcaaaacagtggtgtgctatccgattatctttgacctctcggacttttacatgagccaggatgtatttctgctcatcgacgacatcaaaaacgcgttgcaattcatcaagcaatactggaaaatgcacggacgccctctgttcctcgtgctgatccgcgaggataacatccgcggaagccggttcaatcccatcttggacatgcttgcggctcttaagaaggggatcatcggaggtgtcaaagtccacgtcgacaggctgcagactctgatctcaggcgccgtggtggagcagcttgatttcctccggatctcagacactgaagagctcccagagttcaagtcgttcgaagagctggaaccgccgaaacactcgaaggtgaagaggcagtcgtcgacaccttcagctccggaacttggccaacaaccggacgtgaacatctcagaatggaaggacaagcccacccatgagattcttcaaaaactcaacgattgttcgtgtttggcatcccaggcgatcttgctcggaatcttgctgaagcgggagggtccaaactttatcactaaagagggtacggtatcggatcacattgaacgagtctaccgaagagcggggtcgcagaaactgtggctggcagtgaggtacggcgcagctttcacgcagaaattctccagctcgatcgcaccgcatattacgaccttcttggtacacggaaaacaggtaacgctcggggcattcggccatgaagaggaggtgatcagcaatcccctgtcacctagagtgatccagaacatcatctactataagtgcaatacgcatgatgaacgggaagccgtaatccagcaagagttggtcattcacatcgggtggattatctccaacaaccctgaattgttttcgggaatgttgaagattcgaattggctggattatccacgccatggaatacgagctccagatcagaggcggagataaacccgcacttgatctctatcagctttccccatcagaagtaaaacagcttttgcttgacattcttcagccccagcagaacggtcgctgctggttgaataggaggcaaattgatggctcacttaaccggacgcccacgggtttttacgaccgagtctggcagattttggagcggaccccaaacggaatcatcgtcgccgggaaacatctgccgcagcagcccacgctgagcgatatgacaatgtatgagatgaacttctcgcttctggtggaggacacgttggggaatattgaccagccccagtacagacagattgtagtcgagctcttgatggtcgtgtcgatcgtgctggagagaaaccctgaactggaatttcaagataaggtggatctcgatcggcttgtaaaggaggcgttcaatgagttccagaaggatcagtcgagactgaaggagatcgaaaagcaagacgacatgacatcgttttacaatacaccgcccctgggtaaacgcgggacatgttcgtatttgacgaaagccgtcatgaatttgttgctggagggtgaggtaaaacccaataatgacgatccctgcttgatctcctgataagctgccttctgcggggcttgccttctggccatgcccttcttctctcccttgcacctgtacctcttggtctttgaataaagcctgagtaggaag

SEQ ID NO: 6357 - DNA, 3282 bp, Artificial Sequence
  derived and/or modified sequence
atggcgggagcagccgggctgaccgccgaggtctcctggaaagtcttggagaggcgtgctagaaccaaaagatccgggtcggtctacgaaccgctgaagagcattaatctgccccggcccgataacgaaaccctgtgggataagctggatcattactataggatcgtaaagagcacactgctcctttatcaatcacccacaacagggctctttcctacgaaaacgtgcggtggagaccagaaagccaaaattcaagacagcctctactgtgccgcgggtgcatgggcccttgctctcgcctatcggcgtattgacgacgacaaaggaaggacccatgagctggagcactcagccattaaatgcatgcggggcattttatattgttacatgcgccaggcggataaggttcagcaattcaaacaggatcctaggcctacaacttgtctccattcagtcttcaatgttcatacaggggacgaattgctttcctacgaagagtatgggcacctgcagatcaatgccgtgtcattgtatctgctatacttggtggagatgatctcctctggcctgcagatcatatataacacggacgaagtatcttttatccaaaaccttgtcttctgtgttgagcgtgtgtatcgggtgccagactttggggtctgggagagaggatctaaatacaataacggatccaccgagctgcactcctctagtgtaggccttgcgaaggccgcacttgaagcgataaatgggttcaacctgtttggtaaccagggttgctcctggtcagtgatcttcgtggatctggacgcccacaatagaaacaggcagacactgtgcagccttcttccccgtgaatctaggagccacaatacagatgccgccctcctgccttgtatatcctacccagcctttgccttagatgacgaagtattatttagccagactctggataaagttgtaaggaaacttaaaggaaaatacgggttcaaacggttcctgcgcgacggttaccgtacgtcattggaagaccccaatcgttgttactataagcctgcagagattaagctgttcgacgggattgagtgcgaattccccatatttttcctatacatgatgatcgacggcgtgttcaggggtaacccgaagcaagtacaggaatatcaagatctcctgaccccagtcctacatcatacaaccgaaggttaccccgtggtgcccaagtattactatgtgcctgctgatttcgtcgaatatgagaagaataatcccgggtcacagaaaagatttcccagcaactgtggaagagatggcaagctctttctgtggggccaggcactttacatcatagcgaaactgctggcagacgagctgatatctcccaaagacatcgaccctgtgcaaagatacgtaccactgaaagatcagcgcaacgtgtccatgagattctccaatcagggtccgctcgagaacgacctcgtagtacatgtggccttgatcgcggaatcccagcgcttgcaggtgtttctgaacacgtacggaattcagacacagactccacagcaagtggaaccaatccagatctggccccagcaggagctggtgaaagcctacttgcagctgggcatcaacgaaaaactgggcttatcagggcggcccgaccgaccaatcggctgtctgggaaccagcaagatctatcgcatcctgggtaaaactgtggtgtgctatccgatcatctttgatctgtctgacttctacatgtctcaggatgtctttcttttgatcgatgatatcaagaacgcactgcagttcatcaaacaatactggaaaatgcatggcagaccactgttccttgtactcatccgcgaagataacattcgaggatcccggttcaatcctatcctggatatgctggccgcactgaaaaagggaatcatcggaggagtgaaggtgcatgtggacaggctccagacactgatctccggagccgtcgtcgagcagctggacttcctgcggatctctgatactgaggagctccctgagtttaaatctttcgaagagctggagccacctaagcatagcaaagtgaagagacaaagctctaccccttctgcccctgagcttgggcagcagcctgatgtcaacatctccgagtggaaggataagccaactcatgagatactccaaaagctgaacgactgcagctgtctcgcgtcacaggcaatcctactcggtattttactgaagcgggaaggcccaaacttcattacgaaagagggcacggtctcagatcacattgagagagtctatcggcgtgcaggttcccagaaactttggctggccgtgagatatggagcagcgttcactcagaaattctcttcgtccatagccccgcacattactacctttctcgttcacgggaagcaggttaccctgggcgcattcggacacgaagaagaagtcatctcgaaccccctcagcccaagagttatccagaatatcatctattataagtgtaacacacatgacgaacgcgaggccgtgatacagcaggagctcgttattcacattggctggataatatcaaataacccagagctgttttctggtatgctgaaaatccggattggctggatcatacatgcaatggaatacgaactccaaatccgggggggcgataaaccagctctggacctgtaccagctctcccctagtgaagtcaaacagttgctgctggatatactacagccccagcaaaacggcagatgttggctcaataggcgacagattgacggatccctgaacagaaccccaaccggcttttacgaccgcgtgtggcagatcctggagcgcacgcctaatggcattatagtagctggaaagcatctaccacagcagccaactctgagtgatatgaccatgtatgaaatgaatttctcattgcttgtggaagatacactaggaaacattgaccaaccccaataccgacagatcgtagtggagttgctaatggtggtgagcatcgtgttggagcggaatccagagctggagttccaggacaaggtcgacctggatcgactagttaaggaagcgtttaacgagtttcagaaggatcagagtaggctgaaagaaattgagaagcaggatgatatgacatcgttctataatactccaccactcggcaagcggggtacttgtagctatctcacgaaagctgttatgaatttgctgctagaaggagaagtgaaacctaacaatgacgatccctgtttaatttcatag

SEQ ID NO: 6358 - DNA, 3261 bp, Artificial Sequence
  derived and/or modified sequence
atggcatgttcacccgatgcagtggtgtctccatccagcgcttttctccggagcggatccgtatatgagccactgaaaagcattaatctgcctcgtcccgacaacgaaaccctgtgggataagttggatcattattaccgaatcgtgaaaagtacactgttattatatcagtccccaaccacagggctcttccctactaagacttgtggaggagaccaaaaggcaaaaattcaggactccctctactgtgcagctggtgcatgggcacttgccttggcctatcgtcgaattgatgacgacaagggcaggacacacgaattggaacacagtgccatcaaatgtatgcgcggtatcctgtactgttatatgaggcaagcagacaaagttcagcagttcaagcaggatcctcggcccacaacctgcctgcattcagtttttaatgtgcacacaggagatgagctgctgtcctatgaggaatatggacacctccagatcaatgctgtgtcgctgtacctgttgtacttagttgaaatgattagctccggcctgcagattatttataatacggatgaagtgtcttttatccagaacctggtgttctgcgtagagcgcgtgtaccgcgtgcctgactttggcgtttgggagcggggatctaaatataacaacggatccactgaattgcatagtagtagtgtgggcttggccaaggcggcgctggaagccatcaacggattcaacctatttgggaaccagggctgcagttggtcggttatatttgtcgatctggatgcccataaccggaatcggcaaacactctgctctctgttgcctagagaatctcgctctcacaataccgatgccgcactgctaccttgcatctcctacccagctttcgccttagatgacgaagtgttattctcacagacacttgataaagtggtccgcaaactcaaagggaaatacggattcaaaaggttcctccgcgatggctacaggactagtttagaggacccaaatcgctgctattataaaccggccgagattaagttatttgacggcattgaatgcgaattccctattttctttttgtacatgatgattgatggcgtgtttcggggaaatccaaagcaggtgcaggagtaccaggacctgctgaccccagtcctacaccacaccactgaaggttacccggtcgtacctaagtattactacgttcccgctgattttgttgaatacgaaaagaacaaccctggatcacaaaagagatttccaagtaactgtggccgagacggcaaacttttcctttggggtcaggctctttacatcatcgccaaactgttagccgatgagctgatcagccccaaggatattgaccctgtgcagcggtacgttccattgaaagatcagaggaacgtgtctatgaggttctcaaatcaaggacctttggaaaacgatttggtggtgcacgtcgcattgatcgctgagagccagaggctgcaggtgtttctgaacacctacggaatccaaacccaaacaccccagcaggtggaaccaatccaaatttggccacagcaggagctggtcaaggcgtacctgcagctgggcatcaacgagaaactgggcctctcgggacggcctgaccgccccattgggtgtctcgggaccagcaaaatttaccggatcctgggaaagaccgtcgtgtgctaccccattattttcgacctctccgacttttacatgtcgcaggacgtgtttctccttattgacgatattaagaatgcactgcagttcattaagcagtactggaagatgcacggtcggccgttgtttctggtgcttatcagggaggataacataagagggagtagatttaatcctatccttgacatgctggctgctctaaagaagggcatcatcggaggcgtcaaagtgcacgttgaccgcttacagactctaatctcgggcgccgtagtggaacagctggattttctgcgcatctcagataccgaagaattacctgagtttaagtccttcgaagaactcgaaccccctaagcattcaaaggtgaagcgccagagcagtaccccatctgcacccgaactcggacagcagcccgatgtgaacatctcagagtggaaggataaacccacacatgagatccttcaaaagctgaacgactgttcttgcttagcatcacaagccatcctgctcggtatattgctgaaacgggaaggtcccaattttataaccaaagagggaaccgtatcggaccatatcgagagagtgtatcggcgcgcaggttcccaaaaactgtggctggcagtcaggtacggagccgccttcacccagaagttctccagtagcatcgcaccccacattaccacttttctcgtccacgggaagcaggtgacactgggtgctttcggccatgaggaggaggtaattagcaatcccctgagcccgcgggtcatccagaatattatctactataagtgtaatacacacgacgaacgtgaagcagtgattcagcaagaattggtcattcacattggatggatcatatcaaacaatccagagctcttcagtgggatgcttaagatccgcattggctggatcatccatgccatggaatatgaactacagatacgggggggcgacaaaccagccctggatctgtatcaactttcaccctccgaagtgaagcagctgctgctcgatatcctgcagccgcaacagaacggtagatgctggctgaataggagacagattgatggatctctgaaccggacacccacggggttctacgatagggtgtggcagattctggagagaaccccaaacgggatcattgtggccggaaaacacctcccgcagcagcctacattgtcagacatgacaatgtacgaaatgaacttttcactcctcgtggaggataccctgggaaacatcgatcaaccgcagtacaggcaaatcgtcgtggagctcctaatggtggtgtccatcgtgctggagaggaatccagagctggaattccaggataaggtggatctcgacagattagtcaaagaagcattcaatgaattccaaaaagatcagagcaggctgaaggagattgagaagcaggacgatatgacgtctttctataatacccctccgctgggtaagagagggacgtgttcttatcttacaaaggccgtcatgaatctcctgctcgagggtgaagtcaagccaaacaatgacgacccctgcctaataagctag

SEQ ID NO: 6359 - DNA, 3282 bp, Artificial Sequence
  derived and/or modified sequence
atggccggggctgctggcctgacagctgaggtgtcctggaaggtgctggagcggcgggcccggaccaagaggagcggctctgtgtatgagcccctgaagagcatcaacctgcccaggccagacaatgagaccctgtgggacaagctggaccactactacagaattgtgaagagcaccctgctgctgtaccagagccccaccaccggcctcttccccaccaagacctgtggcggggaccagaaggccaagatccaggacagcctgtactgtgccgccggggcctgggccctggccctggcctacagaagaattgatgatgacaagggccgcacccatgagctggagcacagcgccatcaagtgcatgaggggcatcctgtactgctacatgaggcaggccgacaaggtgcagcagttcaagcaggacccccggcccaccacctgcctgcacagcgtcttcaacgtgcacactggagatgagctgctgtcctatgaggagtatggccacctgcagatcaatgctgtgtccctgtacctgctgtacctggtggagatgatcagcagcggcctgcagatcatctacaacacagatgaggtgtccttcatccagaacctggtgttctgtgtggagcgggtgtacagagtgcctgactttggagtgtgggagcggggcagcaagtacaacaacggcagcacagagctgcacagcagctctgtgggcctggccaaggccgccctggaggccatcaatggcttcaacctgtttggaaaccagggctgctcctggagcgtcatctttgtggacctggatgcccacaacagaaaccggcagaccctgtgcagcctgctgccccgggagagccgcagccacaacacagatgctgccctgctgccctgcatctcctacccagcctttgccctggatgatgaggtgctcttcagccagaccctggacaaggtggtgaggaagctgaagggcaagtatggcttcaagcgcttcctgagagatggctaccgcaccagcctggaggaccccaaccgctgctactacaagccagctgagatcaagctgtttgatggcattgaatgtgagttccccatcttcttcctgtacatgatgattgatggagtcttccggggcaaccccaagcaggtgcaggagtaccaggacctgctgacccctgtgctgcaccacaccacagagggctaccctgtggtgcccaagtactactacgtgcctgctgactttgtggagtatgagaagaacaaccctggcagccagaagcgcttccccagcaactgtggcagagatggcaagctgttcctgtggggccaggccctgtacatcatcgccaagctgctggctgatgagctgatcagccccaaggacatcgaccctgtgcagcgctacgtgcccctgaaggaccagagaaatgtgtccatgaggttcagcaaccagggccccctggagaatgacctggtggtgcacgtggccctgattgctgagagccagaggctgcaggtgttcctgaacacctacggcatccagacccagaccccccagcaggtggagcccatccagatctggccccagcaggagctggtgaaggcctacctgcagctgggcatcaatgagaagctgggcctgagcggccgcccagaccggcccatcggctgcctgggcaccagcaagatctaccgcatcctgggcaagacagtggtgtgctaccccatcatctttgacctgagtgacttctacatgagccaggatgtgttcctgctgattgatgacatcaagaatgccctgcagttcatcaagcagtactggaagatgcacggccggcccctcttcctggtgctgatccgggaggacaacatccggggcagccgcttcaaccccatcctggacatgctggccgccctgaagaagggcatcatcggcggcgtgaaggtgcacgtggaccggctgcagaccctcatctctggagctgtggtggagcagctggacttcctgcgcatcagtgacacagaggagctgcctgagttcaagagctttgaggagctggagccccccaagcacagcaaggtgaagaggcagagcagcacccccagcgcccctgagctgggccagcagccagatgtgaacatcagcgagtggaaggacaagcccacccatgagatcctgcagaagctgaatgactgcagctgcctggccagccaggccatcctgctgggcatcctgctgaagcgggagggccccaacttcatcaccaaggagggcaccgtgtctgaccacatcgagcgggtgtacagaagagctggcagccagaagctgtggctggccgtgcgctacggggccgccttcacccagaagttcagcagcagcatcgccccccacatcaccaccttcctggtgcacggcaagcaggtgaccctgggcgcctttggacatgaggaggaggtgatcagcaaccccctgagccccagggtcatccagaacatcatctactacaagtgcaacacccatgatgagcgggaggccgtcatccagcaggagctggtgatccacatcggctggatcatcagcaacaaccctgagctgttcagcggcatgctgaagatccgcatcggctggatcatccacgccatggagtatgagctgcagatccggggcggggacaagccagccctggacctgtaccagctgagccccagcgaggtgaagcagctgctgctggacatcctgcagccccagcagaatggccgctgctggctgaacagacggcagattgatggcagcctgaacagaacacccaccggcttctatgacagagtgtggcagatcctggagaggacccccaacggcatcatcgtggccggcaagcacctgccccagcagcccaccctgagtgacatgaccatgtatgagatgaacttcagcctgctggtggaggacaccctgggcaacatcgaccagccccagtaccggcagatcgtggtggagctgctgatggtggtgtccatcgtgctggagaggaaccctgagctggagttccaggacaaggtggacctggaccggctggtgaaggaggccttcaatgagttccagaaggaccagagccggctgaaggagattgagaagcaggatgacatgaccagcttctacaacaccccacccctgggcaagaggggcacctgcagctacctgaccaaggctgtgatgaacctgctgctggagggggaggtgaagcccaacaatgatgacccctgcctgatctcctag

SEQ ID NO: 6360 - DNA, 3261 bp, Artificial Sequence
  derived and/or modified sequence
atggcctgcagcccagatgctgtggtgagccccagcagcgccttcctgcggagcggctctgtgtatgagcccctgaagagcatcaacctgcccaggccagacaatgagaccctgtgggacaagctggaccactactaccgcatcgtgaagagcaccctgctgctgtaccagagccccaccaccggcctcttccccaccaagacctgtggcggggaccagaaggccaagatccaggacagcctgtactgtgccgccggggcctgggccctggccctggcctacagaagaattgatgatgacaagggccgcacccatgagctggagcacagcgccatcaagtgcatgaggggcatcctgtactgctacatgaggcaggccgacaaggtgcagcagttcaagcaggacccccggcccaccacctgcctgcacagcgtcttcaacgtgcacactggagatgagctgctgtcctatgaggagtatggccacctgcagatcaatgctgtgtccctgtacctgctgtacctggtggagatgatcagcagcggcctgcagatcatctacaacacagatgaggtgtccttcatccagaacctggtgttctgtgtggagcgggtgtacagagtgcctgactttggagtgtgggagcggggcagcaagtacaacaacggcagcacagagctgcacagcagctctgtgggcctggccaaggccgccctggaggccatcaatggcttcaacctgtttggaaaccagggctgctcctggagcgtcatctttgtggacctggatgcccacaacagaaaccggcagaccctgtgcagcctgctgccccgggagagccgcagccacaacacagatgctgccctgctgccctgcatctcctacccagcctttgccctggatgatgaggtgctcttcagccagaccctggacaaggtggtgaggaagctgaagggcaagtatggcttcaagcgcttcctgagagatggctaccgcaccagcctggaggaccccaaccgctgctactacaagccagctgagatcaagctgtttgatggcattgaatgtgagttccccatcttcttcctgtacatgatgattgatggagtcttccggggcaaccccaagcaggtgcaggagtaccaggacctgctgacccctgtgctgcaccacaccacagagggctaccctgtggtgcccaagtactactacgtgcctgctgactttgtggagtatgagaagaacaaccctggcagccagaagcgcttccccagcaactgtggcagagatggcaagctgttcctgtggggccaggccctgtacatcatcgccaagctgctggctgatgagctgatcagccccaaggacattgatcctgtgcagagatatgtgcccctgaaggaccagagaaatgtgtccatgaggttcagcaaccagggccccctggagaatgacctggtggtgcacgtggccctgattgctgagagccagaggctgcaggtgttcctgaacacctacggcatccagacccagaccccccagcaggtggagcccatccagatctggccccagcaggagctggtgaaggcctacctgcagctgggcatcaatgagaagctgggcctgagcggccgcccagaccggcccatcggctgcctgggcaccagcaagatctaccgcatcctgggcaagacagtggtgtgctaccccatcatctttgacctgagtgacttctacatgagccaggatgtgttcctgctgattgatgacatcaagaatgccctgcagttcatcaagcagtactggaagatgcacggccggcccctcttcctggtgctgatccgggaggacaacatccggggcagccgcttcaaccccatcctggacatgctggccgccctgaagaagggcatcattggaggagtgaaggtgcacgtggaccggctgcagaccctcatcagcggggctgtggtggagcagctggacttcctgcgcatcagtgacacagaggagctgcctgagttcaagagctttgaggagctggagccccccaagcacagcaaggtgaagaggcagagcagcaccccatctgcccctgagctgggccagcagccagatgtgaacatcagcgagtggaaggacaagcccacccatgagatcctgcagaagctgaatgactgcagctgcctggccagccaggccatcctgctgggcatcctgctgaagcgggagggccccaacttcatcaccaaggagggcaccgtgtctgaccacatcgagcgggtgtaccgccgggccggcagccagaagctgtggctggccgtgcgctatggagctgccttcacccagaagttcagcagcagcatcgccccccacatcaccaccttcctggtgcacggcaagcaggtgaccctgggcgccttcggccacgaggaggaggtgatcagcaaccccctgagccccagggtcatccagaacatcatctactacaagtgcaacacccatgatgagcgggaggccgtcatccagcaggagctggtgatccacatcggctggatcatcagcaacaaccctgagctgttcagcggcatgctgaagatcagaattggctggatcatccacgccatggagtatgagctgcagatccggggcggggacaagccagccctggacctgtaccagctgagccccagcgaggtgaagcagctgctgctggacatcctgcagccccagcagaatggccgctgctggctgaacagacggcagattgatggcagcctgaacagaacacccaccggcttctatgacagagtgtggcagatcctggagaggaccccaaatggcatcatcgtggccggcaagcacctgccccagcagcccaccctgagtgacatgaccatgtatgagatgaacttcagcctgctggtggaggacaccctgggcaacatcgaccagccccagtaccggcagatcgtggtggagctgctgatggtggtgtccatcgtgctggagagaaatcctgagctggagttccaggacaaggtggacctggaccggctggtgaaggaggccttcaatgagttccagaaggaccagagccggctgaaggagattgagaagcaggatgacatgaccagcttctacaacaccccacccctgggcaagaggggcacctgcagctacctgaccaaggctgtgatgaacctgctgctggagggggaggtgaagcccaacaatgatgacccctgcctgatctcctag

SEQ ID NO: 6361 - DNA, 3282 bp, Artificial Sequence
  derived and/or modified sequence
atggccggcgccgccggcctgaccgccgaggtgagctggaaggtgttggaaagaagggcgagaacaaagcgaagtggaagcgtgtacgaacccctgaagtcaatcaacctgcctcggcctgacaacgagaccttatgggataagcttgaccattattatagaatcgtcaagtctacactgctcctttaccagtctccaactacaggcctgttcccgacaaaaacttgtggcggcgaccagaaggcaaaaattcaggattccttgtattgcgcggcaggggcctgggcgttggctctggcctatcgaaggattgacgacgataagggacgtacccatgaacttgagcacagcgcaatcaaatgtatgcgagggatactttattgttacatgagacaggccgacaaggtccaacagtttaaacaagacccacgtccaaccacctgcctgcactcagttttcaatgtccatacaggtgatgagctgctttcttacgaggagtacgggcatctgcagatcaatgcagtatcattatacctattatacttagtggaaatgatcagtagtggcctgcagatcatctacaataccgacgaagttagtttcatccaaaatttggttttctgtgttgaaagggtgtacagggtgcctgatttcggcgtgtgggagcggggcagcaagtacaacaatgggtcgaccgagctacactcaagttccgtggggctcgccaaggccgctctggaagccatcaacggcttcaatctgttcggcaaccagggttgctcttggagcgtcatattcgtggatctcgacgctcacaacaggaacagacagaccctatgctcactactgcctagggagagccggtcccacaatactgatgccgcactgcttccctgtatcagctaccctgcttttgccctcgacgatgaagttttattttcccaaacactggacaaagtcgtccggaagctgaaaggaaagtacggattcaagaggttcctcagggatggatacaggaccagcctggaagacccaaatcggtgttactataaaccagctgaaattaaacttttcgacggtatagagtgtgagttccctattttcttcctatacatgatgattgatggagtgtttcgagggaatcctaagcaggttcaggagtaccaggatctgctgaccccggtgctgcaccatactactgaaggttaccccgtggttccaaagtattattatgtgccagccgatttcgtggaatatgaaaaaaacaaccctgggagtcagaaacgcttcccgtccaactgcggacgggatggcaaactcttcctctgggggcaagccctgtacatcatagccaagctgctagcagatgagctaatctccccgaaggacatcgatcccgtacaaaggtacgtaccattgaaggaccagaggaacgtgtcaatgcgcttcagcaaccaaggaccactggagaatgatctggtggtccacgtggcacttattgccgagtctcagaggcttcaagtgtttcttaacacgtatggcattcagacacagacccctcagcaggttgagccaattcagatctggccccagcaggagttagtaaaagcttatttgcagctggggattaacgagaagctggggcttagcggccggcctgaccgccccatagggtgtctgggcacaagtaagatctaccgcatccttgggaaaacagtggtctgctacccaatcatatttgacctgtccgatttttatatgagccaggacgtgttcctgcttatcgacgatatcaaaaatgccttacaattcattaaacagtattggaagatgcatggccgcccactgttccttgttctaatcagagaggataatattaggggctccaggttcaacccaatcctggacatgctggctgccttgaagaagggaatcattgggggagtaaaggttcacgtggatcggctgcaaacactgattagcggagccgttgttgaacagctggatttccttcgtattagtgataccgaagagcttcctgagtttaagagctttgaagagctcgaaccccctaaacatagtaaggtgaagagacagtctagcaccccttcagcacctgagcttgggcagcaaccagatgtgaatatatctgagtggaaggacaagcccactcacgaaatcctacaaaagttgaacgactgtagttgtctggcctctcaggctatcttactgggaatactgcttaagcgggaaggccccaatttcattaccaaagagggaaccgtctcagatcatatcgaacgcgtgtatcggcgagcagggtcacagaagctgtggctggctgtccgatacggtgccgcttttacacagaagttttcctcctccattgcaccccatataaccactttcttagtccacgggaaacaggtgactttgggcgcctttggtcatgaggaagaggtaatttcgaaccctctgtccccgcgggttatacagaacataatttattacaagtgtaatactcatgatgagcgggaagctgttatccagcaggaattggttattcacatagggtggatcatcagcaataatccagaactgttttcagggatgctgaagatcagaattggatggatcatacatgctatggaatacgagctccagataaggggaggagataaacccgcgctcgatctgtaccagcttagcccgagtgaggtgaagcagctattgctggatattctgcagccccagcagaacggcagatgctggctcaatcgcaggcagattgatggttcactgaatagaacgccgactggtttttatgatcgggtctggcaaattctggaaaggactccaaatggcatcattgtcgccgggaaacacctacctcaacagcctactctgtcagacatgacaatgtatgagatgaacttctcactgctggttgaggacactcttggtaacattgatcagccccaataccggcaaattgtcgtggaattacttatggtagtcagcatcgtgctcgaaaggaacccagagttggagttccaggacaaggttgacctggatagacttgttaaggaagccttcaacgaattccagaaagaccagagccgactaaaagagatcgaaaagcaagacgatatgacgagcttctacaataccccccctttgggcaaacgtggtacatgcagctatctgacgaaagccgtcatgaacctcctcctcgaaggagaggtcaagccgaacaatgacgatccctgcctgatttcgtag

SEQ ID NO: 6362 - DNA, 3261 bp, Artificial Sequence
  derived and/or modified sequence
atggcctgcagccccgacgccgtggtgagccccagcagcgccttcctccggagcggatccgtttacgaacctttgaagagcataaacttgccaagaccagacaacgagacgttgtgggacaagctggatcactactacagaattgtaaaatctaccctcctcctgtaccagtccccaaccactgggttgttccctacaaagacatgcgggggagaccaaaaggctaaaatacaggatagcttatattgcgccgccggagcctgggccctagccctggcatatcggagaatagacgacgacaagggccgcacacacgagctggaacatagcgcgattaagtgcatgcgcggcattttatattgctacatgcgacaagccgacaaggtgcaacagttcaagcaggatccacgccctactacctgccttcacagtgtgtttaatgtgcacacaggtgacgagctccttagctatgaggaatatggccatttgcaaatcaatgccgtgtcactgtacctcctgtatctggtggagatgattagtagcggactgcagatcatttacaacacggatgaagtgagcttcatccaaaacctggtattctgtgttgagcgcgtgtatcgcgtgcctgattttggtgtgtgggagcgcggctccaagtacaataatggcagtaccgaactgcattcgagctccgtcgggctcgccaaagctgcactcgaagcgatcaatggattcaatctgtttggcaatcaggggtgtagctggagcgtgattttcgttgatttggatgctcataaccgcaatcgccagactctttgctcacttcttccccgtgagtcgcggtctcacaacacagatgccgcactcttaccctgtattagctatcctgccttcgcactcgacgacgaggtgctgttttctcaaaccctcgataaagttgtgaggaagctgaaaggtaaatacgggtttaaacgctttctgagggacggatacagaacctcgttggaggatcctaataggtgctactacaaaccagccgagatcaaactgtttgacggtatcgaatgtgagtttcctatctttttcctctatatgatgattgatggagttttccgtggtaacccaaagcaggttcaggagtatcaagacctgctcactcctgtcttgcatcacacaaccgagggttatcccgtagtgccaaagtactactatgttccggctgactttgtggaatatgaaaaaaataatccggggagccagaaacgattcccatctaactgcggtcgggatggaaagttgttcctgtggggccaggccctctatattatcgccaaattactggcggacgagttgataagtcctaaagatatcgatccagtccagcgatatgttcctttgaaggatcaaagaaacgtttctatgcgcttcagtaaccagggtcccctggaaaacgacctggtcgtgcacgtggctctcatcgcggagtcgcaacgactccaggtctttctaaatacctacgggatccagactcagacccctcagcaggtcgaaccaatccaaatctggcctcaacaggagctggtgaaggcttacttgcagctgggcatcaacgagaaactgggcctctctggtaggccggaccgacctatcggttgtttgggaacctccaagatctacagaattctgggaaaaacagtggtgtgctacccaatcatcttcgacttatctgatttctacatgtctcaggacgtcttcttgctgatcgacgacataaaaaatgcccttcaattcatcaagcagtattggaaaatgcacggtaggccgttgtttctcgtgctcatccgggaggataacatccgggggagcaggttcaatcctattcttgacatgctcgccgctctgaagaaaggaatcattggaggggtcaaagtgcacgttgacagactgcagaccctgatctctggggccgtggttgaacagctggacttccttaggataagcgacacagaggaacttcccgagttcaagtcatttgaagaacttgagccaccaaaacattctaaggtcaaacgccaatcttcaacacccagcgccccagagctcggacagcagccggacgtaaatatatctgaatggaaagacaagccgacccatgagatcctccagaagttaaatgattgttcttgcctggcatcacaggccatcttgttgggaatattgctgaagagagagggaccaaattttattacaaaggaagggacagtctctgaccatatcgaacgggtgtatcgtcgggccggcagccagaagttgtggctagccgtgaggtacggcgccgcattcacacagaagttcagctccagtatcgcacctcatattacaacatttttggtgcacggcaaacaggtcacacttggggcattcggtcacgaggaggaggttattagtaatccactgagtccacgcgtcatccagaatatcatctattataaatgtaatacacacgacgaaagagaggccgttatccagcaggaactcgtcattcacatcggctggataatcagtaataatcccgagttgtttagtgggatgctcaaaatacgaattggttggatcatccatgcaatggagtatgagctgcagatcagagggggagataagcctgcacttgatctctaccagctgtcaccatccgaggtgaaacagctcctcttagacatccttcagccgcagcagaatggacgatgttggttaaaccgaaggcaaatcgacggttccctgaacaggacccctactggattttacgatcgggtttggcagattttagagcgcacgcctaatggcatcatagtggccggcaagcatctgcctcagcagccaaccctgtcggatatgacaatgtatgaaatgaacttctcattacttgtggaggacacgcttggcaacatcgaccagccacagtaccgacaaattgttgttgagctgttgatggtcgtgagcatcgtcctcgaaaggaatcccgaacttgagtttcaggataaggtcgacctggacagactagtgaaagaggcctttaacgagttccagaaagaccagagccgcctgaaagagattgaaaaacaggatgacatgacctccttctacaatacgcccccactgggtaaaagaggcacttgttcctacctgacaaaagccgtgatgaatcttttgctggagggagaggttaagcccaataacgacgacccctgcctaatctcgtag

SEQ ID NO: 6363 - DNA, 3282 bp, Artificial Sequence
  derived and/or modified sequence
atggcgggagcagctggtctcacggccgaggtcagctggaaggtcctcgaacggagggccaggaccaaacggtcagggtccgtatatgagcccctgaagagcattaacctgccaagacccgacaacgagacactgtgggataagctggatcattactacagaatcgtgaagagcaccctgctcctgtaccaaagcccaacaacagggctgttccctaccaagacatgcggaggagaccagaaggccaagatccaggactccctttattgcgctgccggagcctgggctcttgctctcgcttatcgccgaatagacgatgataaggggcgaacacacgagctggaacattcagccattaagtgcatgcggggtattctgtactgctacatgagacaggctgacaaagtccaacagtttaagcaggacccaagaccaacgacctgcctccattctgtgttcaatgtccacactggtgatgaattactgagttatgaggagtatggtcaccttcagatcaacgcggtttcactatacctcttatacttggttgaaatgatctcgtcaggtctccagattatctacaacaccgacgaagtaagcttcatccagaacttggtcttctgcgtcgaacgggtgtacagagtgcccgattttggggtttgggaacggggatccaaatacaataatggctcaacagagctccatagtagttcggtggggcttgcaaaggcggctctggaagcgataaatggctttaatctctttggcaatcaggggtgttcctggagtgtgatttttgtcgacctcgacgcacataaccggaatcgccaaaccctgtgctccctgctcccccgtgaaagtaggagtcataataccgatgctgccctactcccctgtatttcttacccggcttttgcattggacgacgaagtgctgttcagccagacgctggataaggtagtccggaaactgaaagggaaatatggttttaaaagattcctgcgggatggctatcggacctcactggaagatcccaatcgctgctattataagccggctgagatcaaattgtttgacggtattgaatgtgaattccctattttcttcctatacatgatgatcgatggtgtgtttagagggaatcccaagcaagttcaggagtatcaggaccttctgactcccgtgctccatcatacaaccgagggttatcctgtggtgccaaaatactactatgtgccggcagatttcgttgagtatgagaagaacaacccaggttcccagaaacggttcccttctaactgtggaagggatggcaaactgttcctgtggggccaggcactttatattattgccaaattgttggccgatgagttgatatcaccgaaggatattgaccccgtgcagcgctacgtaccattaaaggaccagagaaatgtcagcatgcggtttagcaaccaaggacccctggagaatgatctagtggttcatgtcgcactgatagcggagtctcagcgattacaggtcttccttaatacatacggcattcagacccagactcctcagcaggtggaacccattcagatttggccacagcaggaactcgtgaaagcctatttgcaattgggcatcaatgaaaagttgggtctttctgggaggccggatcgtcccattggctgcttaggcacaagtaaaatataccggattctgggaaagaccgttgtgtgctatcctattatctttgacctgtcagatttctatatgagtcaggatgttttcctcctgattgacgatatcaagaatgctttgcaatttatcaagcaatactggaagatgcacggacggcctcttttcctggtcctgataagggaggataatatacgcggttctagattcaatccaatcctggacatgctggccgctctaaagaaggggatcattggtggcgtgaaggtacacgtggaccgactgcagacacttatatctggcgcagtggtggagcagctcgatttcttacgaatttcggacacagaggaactgcctgaattcaagtcctttgaagagctcgaaccacccaagcatagcaaggtcaaaaggcagtctagtacaccttctgccccagagcttggacagcagccagacgtgaacatatcggaatggaaagataagcccacccatgaaattctgcagaaactcaatgattgctcctgtcttgccagccaggctatcctgcttggcattctccttaagcgagaggggccaaatttcattactaaagaaggcacggttagcgatcacatagagcgcgtgtatcgcagagctggaagtcagaagttatggttggccgttcgctatggcgcagcctttacccagaaattctcctccagcatagcacctcatattacaacattcctggtacacgggaagcaggtgaccttgggcgcatttggacacgaggaagaagtgatctccaatcctctctctcccagggtcatccagaacattatctattacaaatgcaatactcacgacgagcgcgaggctgttatccagcaggaactggttatccatattgggtggatcatcagcaataaccccgagctcttttcagggatgctgaaaattcgtatcgggtggattattcacgccatggagtatgaattacagattcggggaggtgacaaaccagcactagacttgtatcaactcagcccttccgaagttaaacaactacttctggacatcctgcagcctcagcaaaacggcagatgttggttgaacaggcgtcagatcgatggctctctgaacaggacaccaacgggcttttacgacagagtttggcagattctggaacgcacaccaaatggcatcatagtcgccggaaagcatctaccacagcaacccaccctatccgatatgaccatgtacgaaatgaacttttccctgctggtggaagacaccctcggaaatattgatcaacctcagtaccgacaaatagtggtcgaattgctaatggtcgtgagtatcgtactggagcgtaatcccgagttagagttccaagacaaagttgacctcgacaggttggtgaaggaggctttcaatgagtttcaaaaggaccagtccagattaaaagagatcgaaaaacaggatgacatgacatctttctataacacccctcccctcggaaagcgtggcacctgttcctatctgactaaagcagttatgaatctcctcctcgaaggggaggtgaaacccaataatgatgacccgtgtcttattagctag

SEQ ID NO: 6364 - DNA, 3261 bp, Artificial Sequence
  derived and/or modified sequence
atggcatgttcccccgacgcagtcgtaagcccatcaagcgctttcctgcggtccggctctgtttatgagccactgaaatccataaacctcccaagacctgataacgagactctttgggataaactggaccattactacagaatcgtgaaaagcacgcttctgctctatcagtccccaaccactggcttgttccctaccaaaacgtgtgggggagaccagaaggcgaaaatccaagatagcctctactgtgcagctggtgcctgggctctggctctcgcctaccggaggattgatgacgataaaggtcggacacatgagctggagcactccgccatcaaatgtatgcgcggaatcctctactgctatatgcggcaggctgacaaagtgcagcagtttaaacaggaccctcgtcctactacctgtctacactctgtttttaatgtgcatactggtgatgagctcctttcatacgaggaatatggtcaccttcagatcaacgctgtgtccctctatctgctctacctggtcgaaatgatctcaagcggtcttcagatcatctacaacaccgacgaagtgtcctttatccagaatcttgtgttttgcgtggagagagtgtatcgtgtgccagatttcggcgtgtgggaaagaggatccaagtacaataacggtagtacggagttacacagctccagcgttggcctagcaaaagctgctctggaggcgatcaatggattcaatctgttcggaaaccagggctgtagttggtcggtgatcttcgtcgatctcgatgcacataaccggaatcggcagacactctgttctctactaccccgtgaatctagatctcataatactgacgctgctttactgccctgtatatcctaccctgcctttgccttggatgacgaagtgttgttctcacagacgctggataaggtggttcgcaaactgaaagggaagtatggcttcaaaaggttcctgcgagatggctacagaacgtcattggaggatcccaatcgatgttactacaaaccagccgaaataaagttgtttgacggaattgaatgcgaattccccattttcttcttatatatgatgatcgacggagtgtttagaggtaatcccaaacaggtacaagagtaccaggatctcctgacgcccgtgttgcaccacactactgagggataccccgtcgtaccaaaatattactatgttccagccgacttcgttgagtatgagaagaacaatcctggctcccagaagcggttcccgtcaaactgcggaagagatggcaagctctttctttggggccaggccctttacatcattgcaaaacttctggccgacgaattgatttccccaaaagatatcgacccagttcagcgctatgtccccttgaaggaccagcggaatgtgtcaatgcggttcagtaatcaggggcctttggagaacgatctagttgtgcacgtggcactcatcgctgaaagccagcgtctgcaagtctttttgaacacatatggaatccaaacgcaaaccccccagcaggtggagcctatccagatatggccacagcaagagctagtgaaagcctacctccagctggggataaacgagaaactggggctatccggcagacctgatagacctatcggctgtctgggcaccagcaaaatttaccgtattctgggcaaaacagttgtctgctacccaatcatcttcgacctgtctgatttttacatgagccaggatgtgttcctactgatcgacgacatcaaaaatgccctgcaattcattaaacagtattggaaaatgcacggcagacccctctttcttgtgctaatccgcgaagacaacatcagagggtctcgctttaaccccattctggacatgcttgccgctcttaagaagggaattatcgggggagtgaaagtgcacgtggatcgcctccagacactgatttccggagcagtggttgagcagttagactttctacgaatttccgacactgaggagctcccagagttcaagagctttgaggagctagagccaccaaaacattccaaggtaaaaagacaatcttcaactccttccgctccagagctcgggcagcaacctgatgtgaatatcagcgagtggaaagataagccaacacacgaaatcctgcagaaactgaatgattgctcatgtctcgcgtcccaggcaattttgcttgggattctgcttaaaagggagggccctaatttcatcacaaaagagggtaccgtgtccgatcacatcgagagggtctatcggcgagccggatctcagaagctttggctagcagtccgctacggggctgctttcactcaaaagtttagctcctctattgccccacatattaccacctttttggtgcacggcaaacaggtgacactgggggcattcggacatgaggaagaggtgatatcaaacccactgtctcccagggtcattcaaaacattatatattacaaatgtaacacccacgacgaacgagaggctgtaattcagcaggaactggtcatacacatcggctggatcatcagtaacaacccagagctcttcagcggaatgctgaaaatcaggattggatggatcatacatgctatggagtacgaactgcaaattcgcggaggggataaacccgcattagatctataccagctctctccctccgaggtgaagcagttactcctggacattttgcagccacaacagaacggacgatgctggctgaataggaggcaaattgatggatcactgaacaggacacctaccggcttctacgaccgggtgtggcagatcctggaacgcacccccaacgggattatcgtggcaggtaagcatcttccgcaacagccgaccttgtccgatatgactatgtacgagatgaacttctctctgctggtagaggacacgctgggtaatatcgatcaaccccaataccgacagatagtcgtcgagttactgatggtcgtgtctatcgtcctggagaggaatccggagcttgaattccaggacaaggtagacctcgacaggcttgtgaaagaagcctttaatgagtttcaaaaagaccaaagcaggctgaaggagatcgagaaacaggacgacatgacatccttttacaacacccccccactgggaaagcgaggcacctgttcctatctcacaaaggcagtgatgaatctgctgttagaaggcgaggtaaagcccaacaacgacgacccatgtctgatttcatag

SEQ ID NO: 6365 - DNA, 5463 bp, Artificial Sequence
  derived and/or modified sequence
ggccaaggcggcgaccggagcgcgatggcgggggcggcgggactcacggcagaagtgagctggaaggtcttggagcgaagagctcggaccaagcgctcaggctcagtttatgaacctcttaaaagcattaatcttccaagacctgataatgaaactctctgggataagttggaccattattacagaattgtcaagtcaacattgctgctgtatcaaagtccaactaccggtctctttcccactaaaacatgcggtggtgaccagaaggccaagatccaggacagcctatactgcgctgctggggcctgggctttggctcttgcatacaggcgaattgatgatgacaagggaaggacccatgagctggagcactcagctataaaatgcatgagaggaattctctactgctatatgcgtcaggccgataaggtccagcagtttaagcaggatccacgcccaacaacatgtcttcactctgttttcaatgtgcatacaggagatgagttgctttcctatgaggaatatggtcatcttcagataaatgcagtgtcactttatctcctttaccttgtggaaatgatttcctcaggactccagattatctacaacactgatgaggtctcttttattcaaaaccttgtattttgtgtggaaagagtttaccgtgtgcctgactttggtgtctgggaaagaggaagcaaatataataatggcagcacagagctacattcgagctcggttggtttagcaaaagcagctctagaagcaattaatggattcaacctttttggcaaccagggctgttcgtggtcagttatatttgtggatctcgatgctcacaatcgcaacaggcaaactttgtgctcgctgttacccagagaatcaagatcacataatacagatgctgccctgctcccctgcatcagttatcctgcatttgccctggatgatgaagttctttttagccagacacttgataaagtggttagaaaattaaaaggaaaatatggatttaaacgtttcttgagagatgggtatagaacatcattggaagatcccaacagatgctactacaagccagctgaaattaagctatttgatggcattgaatgtgaatttcccatatttttcctttatatgatgattgatggagtttttagaggcaatcctaagcaagtacaggaatatcaggatcttttgactccagtacttcatcataccacagaaggatatcctgttgtaccaaagtactattatgtgccagctgactttgtagaatatgaaaaaaataaccctggtagtcaaaaacgatttcctagcaactgtggccgtgatggaaaactgtttctttggggacaagcactttatatcatcgcaaaactcctggctgatgaacttattagtcctaaagacattgatcctgtccagcgctatgtcccactaaaggatcaacgtaacgtgagcatgaggttttccaatcagggcccactggaaaatgacttggtagttcatgtggcacttatagcagaaagccaaagacttcaagtttttctgaacacatatggtattcaaactcaaactcctcaacaagtagaacccattcagatatggcctcagcaggagcttgtgaaagcttatttgcagctgggtatcaatgaaaagttaggactctctggaaggccagacaggcccattggctgcctcgggacatcaaagatttatcgcattctaggaaagactgtggtttgttacccgattattttcgacctaagtgatttctacatgtctcaggatgttttcctgctgatagatgacataaagaatgcgctgcagttcattaaacaatattggaaaatgcatggacgtccacttttccttgttctcatccgggaagacaatataagaggtagccggttcaaccccatattagatatgctggcagcccttaaaaaaggaataattggaggagtcaaagttcatgtggatcgtctacagacactaatatctggagctgtggtagaacaacttgatttcctacgaatcagtgacacagaagagcttccagaatttaagagttttgaggaactagaacctcccaaacattcaaaagtcaaacggcaaagcagcacccctagtgctcctgaactgggacagcagccggatgtcaacattagtgaatggaaggacaaacccacccacgaaattcttcaaaaactgaatgattgcagttgtctggctagccaagccatcctgctgggtatactgctcaaaagagaaggccccaacttcatcacaaaggaaggtaccgtttctgatcacattgagagagtctatagaagagctggcagccaaaaactttggttggcggtgcgctacggggctgcatttacccagaaattttcttcctctatagccccacacattactacttttctggtacatgggaaacaggtaactctgggtgcctttgggcatgaagaagaagttatctctaatcctttgtctccaagagtgattcaaaacatcatctattataagtgtaacacccatgatgagagggaagcggtcattcagcaagaactggtcatccatattggctggatcatctccaataaccctgagttattcagtggcatgctgaaaatacgaatcgggtggatcatccatgccatggagtatgaacttcagatccgtggcggagacaagccagccttggacttgtatcagctgtcacctagtgaagttaaacagcttctgctggatattctgcagcctcaacagaatggaagatgttggctgaacaggcgtcagatcgatgggtctttgaatagaactcccaccgggttctatgaccgagtgtggcagattctggagcgcacgcccaatgggatcattgttgctgggaagcatttgcctcagcaaccaaccctgtcagatatgaccatgtatgagatgaatttctctctccttgttgaagacacgttgggaaatattgaccagccacagtacagacagatcgttgtagagttacttatggttgtatccattgtactggaaagaaaccccgagctagaatttcaagacaaagtagatctagacagactggtcaaagaagcatttaatgaatttcaaaaagatcagagtcggctaaaggaaattgaaaaacaagatgacatgacttccttttacaacactcctcccctgggaaaaagaggaacatgcagctatttgacaaaggcggtgatgaatctgctgctggaaggagaagtcaagccaaacaatgatgacccgtgtctgattagctagtggggaaggtgtaggaagctctgttgagacacatgttctgaagtgtgttgtgtttcatgttcaagcttaatcaaggcagccattaatatacgaactgagcatgctggggaggtgaatgccacatccttggcggggttatggacctcttgcatgtcatagccaatctaacggtaatggtaaatgcttttaatcaagcaggaaaaagttctcatgattatgccaactataatagtaatcctcactgagtgataaaaatagtttatgaattgaaaatttgccgctgcatgttgtatgatcaaatagttcatcaaaatgaatctttgctctttggactgaattcttaccatactgccattaaaataaatttgccaactagtaatgcatactggaaatcaaaagatactgaaagaatggtgaacttctcttagtggtattgtcatgctaaaagatgttaatatacatcataaaagcaaagtcagccagctgatattttggttctcaaaaactgcattattaataatattttagtatacagagctattctacagtttttacattgtaaacatgactgtggttttgtatttgctaaatataggggttggactaaaatataataaatctgtaccttatcaaacattttctttgagctcctgctaaaaataggacatgtctatgattgttcaaaaatatgttaaatttaggctcagcacagtagctcacacctgaaatcttagcacttcgggaggctgaggcaggtggatcacttgaggttaggagttcaagaccagcccagccaacatggtgaaaaccctgtctctactaaaaatacaaaaattagccaggcatgatggtgcatgcctttaaacccagctactgaggaggctgaggcatgagaattgcttgaaccaggagacggaggttgcagtgagctgaaatcctgccactgcacaccagcctgggtgacagagcgagactccatctcaaaaaaaaaaaaaaaaaagaaaaagaaaaaaatatgttaaatttaaggactgttaacctacgttctactagtaaaaacaacattaagggtcattaaattttatttctgaattaatgaacatatctggacattttttgttcctaggttcacaagattgagcttcaaactcccgagtgttttcatttaattgatttagaggtagaatggaagagaatctgtggtacctaccattatacacatttagttgcccagtttacttaaactttaatgaaagtagaaagtagattaaacatttaaattttatttctttcctaaatagaaaaaaaaaaggcccatgagtttgagcccttgccccaaagagagttgtttttctgatcaatcttactggagtttcacctgagaagatagatttgtcacataaaaaatgcagcttatttgtagtgttttgaaaggatgtaagaaaggatgagtggcttcagtattgagtcaatcgatatcaaatgaatggatgtgtgagcacatggaaaaatctgctgtcagtcacatttctcataacattgaggtacagtgccgagatcttgcataagaaattgtatggatattagttggcaaaattgaaatgaatgagacacagttgggccctaaagaactaaggagggggattgacaaagaatagaattaaactacttgactcaatatgttaagagagtttatgaaaagatagtcgtgaagggtgaagctaatttgtaaaactaatgcctgaaaaaaacgtaagcatgaagtccatggagagggaattgagagctgacacttcataactggagaaactggaaattaaagaaagggaaacaaaagacttaaaatttttgtttgccgaaatttttacgaaagtaaactgtgttgtagttttaagaatttttttaaaaaatctgattagctgagcaaagttaccagaaaactgctatcctagttgaaatcaaacattacttgcaaatgtgttttctgagtgttagcttcctgcttaaatgttacatatgcaaaattctgaagttttcctgtgctactcctgaaagcattcagaatctgtgacacgtattgacttcatgctttgagattcaaaatttattgttctgaaagttatatttagaatcagtaaatcttgatattcaccttta

SEQ ID NO: 6366 - DNA, 5603 bp, Artificial Sequence
  derived and/or modified sequence
attgctgacaggcggccccgggggcggtggccaaggcggcgaccggagcgcgatggcgggggcggcgggactcacggcagaagtgagctggaaggtcttggagcgaagagctcggaccaagcgctcagttttaaaattgctatagcttagcctgcgacgcttatgattagagccaacaatttgaaatggcctgctcacctgatgcagtcgtctctccgtcttccgctttcttaaggtctggctcagtttatgaacctcttaaaagcattaatcttccaagacctgataatgaaactctctgggataagttggaccattattacagaattgtcaagtcaacattgctgctgtatcaaagtccaactaccggtctctttcccactaaaacatgcggtggtgaccagaaggccaagatccaggacagcctatactgcgctgctggggcctgggctttggctcttgcatacaggcgaattgatgatgacaagggaaggacccatgagctggagcactcagctataaaatgcatgagaggaattctctactgctatatgcgtcaggccgataaggtccagcagtttaagcaggatccacgcccaacaacatgtcttcactctgttttcaatgtgcatacaggagatgagttgctttcctatgaggaatatggtcatcttcagataaatgcagtgtcactttatctcctttaccttgtggaaatgatttcctcaggactccagattatctacaacactgatgaggtctcttttattcaaaaccttgtattttgtgtggaaagagtttaccgtgtgcctgactttggtgtctgggaaagaggaagcaaatataataatggcagcacagagctacattcgagctcggttggtttagcaaaagcagctctagaagcaattaatggattcaacctttttggcaaccagggctgttcgtggtcagttatatttgtggatctcgatgctcacaatcgcaacaggcaaactttgtgctcgctgttacccagagaatcaagatcacataatacagatgctgccctgctcccctgcatcagttatcctgcatttgccctggatgatgaagttctttttagccagacacttgataaagtggttagaaaattaaaaggaaaatatggatttaaacgtttcttgagagatgggtatagaacatcattggaagatcccaacagatgctactacaagccagctgaaattaagctatttgatggcattgaatgtgaatttcccatatttttcctttatatgatgattgatggagtttttagaggcaatcctaagcaagtacaggaatatcaggatcttttgactccagtacttcatcataccacagaaggatatcctgttgtaccaaagtactattatgtgccagctgactttgtagaatatgaaaaaaataaccctggtagtcaaaaacgatttcctagcaactgtggccgtgatggaaaactgtttctttggggacaagcactttatatcatcgcaaaactcctggctgatgaacttattagtcctaaagacattgatcctgtccagcgctatgtcccactaaaggatcaacgtaacgtgagcatgaggttttccaatcagggcccactggaaaatgacttggtagttcatgtggcacttatagcagaaagccaaagacttcaagtttttctgaacacatatggtattcaaactcaaactcctcaacaagtagaacccattcagatatggcctcagcaggagcttgtgaaagcttatttgcagctgggtatcaatgaaaagttaggactctctggaaggccagacaggcccattggctgcctcgggacatcaaagatttatcgcattctaggaaagactgtggtttgttacccgattattttcgacctaagtgatttctacatgtctcaggatgttttcctgctgatagatgacataaagaatgcgctgcagttcattaaacaatattggaaaatgcatggacgtccacttttccttgttctcatccgggaagacaatataagaggtagccggttcaaccccatattagatatgctggcagcccttaaaaaaggaataattggaggagtcaaagttcatgtggatcgtctacagacactaatatctggagctgtggtagaacaacttgatttcctacgaatcagtgacacagaagagcttccagaatttaagagttttgaggaactagaacctcccaaacattcaaaagtcaaacggcaaagcagcacccctagtgctcctgaactgggacagcagccggatgtcaacattagtgaatggaaggacaaacccacccacgaaattcttcaaaaactgaatgattgcagttgtctggctagccaagccatcctgctgggtatactgctcaaaagagaaggccccaacttcatcacaaaggaaggtaccgtttctgatcacattgagagagtctatagaagagctggcagccaaaaactttggttggcggtgcgctacggggctgcatttacccagaaattttcttcctctatagccccacacattactacttttctggtacatgggaaacaggtaactctgggtgcctttgggcatgaagaagaagttatctctaatcctttgtctccaagagtgattcaaaacatcatctattataagtgtaacacccatgatgagagggaagcggtcattcagcaagaactggtcatccatattggctggatcatctccaataaccctgagttattcagtggcatgctgaaaatacgaatcgggtggatcatccatgccatggagtatgaacttcagatccgtggcggagacaagccagccttggacttgtatcagctgtcacctagtgaagttaaacagcttctgctggatattctgcagcctcaacagaatggaagatgttggctgaacaggcgtcagatcgatgggtctttgaatagaactcccaccgggttctatgaccgagtgtggcagattctggagcgcacgcccaatgggatcattgttgctgggaagcatttgcctcagcaaccaaccctgtcagatatgaccatgtatgagatgaatttctctctccttgttgaagacacgttgggaaatattgaccagccacagtacagacagatcgttgtagagttacttatggttgtatccattgtactggaaagaaaccccgagctagaatttcaagacaaagtagatctagacagactggtcaaagaagcatttaatgaatttcaaaaagatcagagtcggctaaaggaaattgaaaaacaagatgacatgacttccttttacaacactcctcccctgggaaaaagaggaacatgcagctatttgacaaaggcggtgatgaatctgctgctggaaggagaagtcaagccaaacaatgatgacccgtgtctgattagctagtggggaaggtgtaggaagctctgttgagacacatgttctgaagtgtgttgtgtttcatgttcaagcttaatcaaggcagccattaatatacgaactgagcatgctggggaggtgaatgccacatccttggcggggttatggacctcttgcatgtcatagccaatctaacggtaatggtaaatgcttttaatcaagcaggaaaaagttctcatgattatgccaactataatagtaatcctcactgagtgataaaaatagtttatgaattgaaaatttgccgctgcatgttgtatgatcaaatagttcatcaaaatgaatctttgctctttggactgaattcttaccatactgccattaaaataaatttgccaactagtaatgcatactggaaatcaaaagatactgaaagaatggtgaacttctcttagtggtattgtcatgctaaaagatgttaatatacatcataaaagcaaagtcagccagctgatattttggttctcaaaaactgcattattaataatattttagtatacagagctattctacagtttttacattgtaaacatgactgtggttttgtatttgctaaatataggggttggactaaaatataataaatctgtaccttatcaaacattttctttgagctcctgctaaaaataggacatgtctatgattgttcaaaaatatgttaaatttaggctcagcacagtagctcacacctgaaatcttagcacttcgggaggctgaggcaggtggatcacttgaggttaggagttcaagaccagcccagccaacatggtgaaaaccctgtctctactaaaaatacaaaaattagccaggcatgatggtgcatgcctttaaacccagctactgaggaggctgaggcatgagaattgcttgaaccaggagacggaggttgcagtgagctgaaatcctgccactgcacaccagcctgggtgacagagcgagactccatctcaaaaaaaaaaaaaaaaaagaaaaagaaaaaaatatgttaaatttaaggactgttaacctacgttctactagtaaaaacaacattaagggtcattaaattttatttctgaattaatgaacatatctggacattttttgttcctaggttcacaagattgagcttcaaactcccgagtgttttcatttaattgatttagaggtagaatggaagagaatctgtggtacctaccattatacacatttagttgcccagtttacttaaactttaatgaaagtagaaagtagattaaacatttaaattttatttctttcctaaatagaaaaaaaaaaggcccatgagtttgagcccttgccccaaagagagttgtttttctgatcaatcttactggagtttcacctgagaagatagatttgtcacataaaaaatgcagcttatttgtagtgttttgaaaggatgtaagaaaggatgagtggcttcagtattgagtcaatcgatatcaaatgaatggatgtgtgagcacatggaaaaatctgctgtcagtcacatttctcataacattgaggtacagtgccgagatcttgcataagaaattgtatggatattagttggcaaaattgaaatgaatgagacacagttgggccctaaagaactaaggagggggattgacaaagaatagaattaaactacttgactcaatatgttaagagagtttatgaaaagatagtcgtgaagggtgaagctaatttgtaaaactaatgcctgaaaaaaacgtaagcatgaagtccatggagagggaattgagagctgacacttcataactggagaaactggaaattaaagaaagggaaacaaaagacttaaaatttttgtttgccgaaatttttacgaaagtaaactgtgttgtagttttaagaatttttttaaaaaatctgattagctgagcaaagttaccagaaaactgctatcctagttgaaatcaaacattacttgcaaatgtgttttctgagtgttagcttcctgcttaaatgttacatatgcaaaattctgaagttttcctgtgctactcctgaaagcattcagaatctgtgacacgtattgacttcatgctttgagattcaaaatttattgttctgaaagttatatttagaatcagtaaatcttgatattcaccttta

SEQ ID NO: 6367 - RNA, 3425 nt, Artificial Sequence
  derived and/or modified sequence
gggaaauaagagagaaaagaagaguaagaagaaauauaagagccaccauggcgggugcggcagggcucacggcggaaguaucguggaaaguacuugaacggcgagcccgcacaaaaagauccgguuccguguaugagccauugaaauccauuaaccuuccuagacccgacaacgaaaccuugugggauaagcucgaucacuacuauagaaucgugaagucgacacuccugcucuaucaaucgccgacuacagggcuuuucccgacgaaaacauguggaggggaccagaaggcaaaaauccaagauucgcucuacugcgcggcaggagcgugggcacucgccuuggcguauagaagaaucgaugaugauaaggggcgcacccacgagcuugaacauuccgccaucaagugcaugaggggcauccucuacuguuacaugcgccaggcagacaaggugcagcaguucaagcaggacccucgccccacgacguguuugcacuccguauucaauguccacacuggggacgaacugcucucguacgaagaguauggacaccuccaaaucaacgcuguaucacuguacuugcuguaccuuguggagaugauuucgagcggacugcagaucaucuacaauaccgaugaaguaucauucauccagaaccucguguuuuguguggagcgggucuacagagucccugacuucggagugugggagaggggaucgaaguacaauaauggaagcacagaacuucacuccuccuccgucgguuuggcgaaggcggcuuuggaagcgauuaauggguucaaucucuucggaaaccagggaugcuccuggucggugaucuuuguggaccucgacgcgcauaauaggaaccggcagacacucugcucacugcuuccgcgcgagucgcggucgcacaauacggacgcagcccuccuucccugcaucucauauccggcguucgcguuggacgacgagguccucuuuagccagacucucgauaaaguaguaagaaaguugaaagggaaguaugguuuuaagcgguuucuucgggauggauauaggacuucgcucgaagauccuaacagguguuauuacaaacccgcggagaucaaacucuucgaugggaucgaaugcgaguuuccgaucuucuuuuuguauaugaugaucgacggaguauuccgagggaacccaaaacagguccaagaguaccaggaucuucucacacccguacuccaucauaccacagagggguacccgguaguccccaaauacuauuaugugccggcagauuucgucgaguaugagaaaaacaaucccgguucacaaaagagauuucccucgaauugcggacgagaugggaaauuguuucuuuggggucaggccuuguacauuaucgcuaagcugcuggcggaugaacucauuuccccaaaagacauugauccagugcagagauacguaccccucaaggaccagcgcaacgugucaaugcgcuucucgaaccaaggaccuuuggaaaaugaccuugucgugcaugucgcgcucauugcggaaucccagcggcuccaaguguucuugaacacuuaugguauucagacccaaacgccgcaacaggucgagccuauccaaaucuggccacaacaggaacugguaaaggcuuaucuucagcucgggauuaaugagaaauuggggcugagcggacgccccgaucgcccuaucgggugucucgggacguccaagaucuaccgcaucuugggcaaaacaguggugugcuauccgauuaucuuugaccucucggacuuuuacaugagccaggauguauuucugcucaucgacgacaucaaaaacgcguugcaauucaucaagcaauacuggaaaaugcacggacgcccucuguuccucgugcugauccgcgaggauaacauccgcggaagccgguucaaucccaucuuggacaugcuugcggcucuuaagaaggggaucaucggaggugucaaaguccacgucgacaggcugcagacucugaucucaggcgccgugguggagcagcuugauuuccuccggaucucagacacugaagagcucccagaguucaagucguucgaagagcuggaaccgccgaaacacucgaaggugaagaggcagucgucgacaccuucagcuccggaacuuggccaacaaccggacgugaacaucucagaauggaaggacaagcccacccaugagauucuucaaaaacucaacgauuguucguguuuggcaucccaggcgaucuugcucggaaucuugcugaagcgggaggguccaaacuuuaucacuaaagaggguacgguaucggaucacauugaacgagucuaccgaagagcggggucgcagaaacuguggcuggcagugagguacggcgcagcuuucacgcagaaauucuccagcucgaucgcaccgcauauuacgaccuucuugguacacggaaaacagguaacgcucggggcauucggccaugaagaggaggugaucagcaauccccugucaccuagagugauccagaacaucaucuacuauaagugcaauacgcaugaugaacgggaagccguaauccagcaagaguuggucauucacaucggguggauuaucuccaacaacccugaauuguuuucgggaauguugaagauucgaauuggcuggauuauccacgccauggaauacgagcuccagaucagaggcggagauaaacccgcacuugaucucuaucagcuuuccccaucagaaguaaaacagcuuuugcuugacauucuucagccccagcagaacggucgcugcugguugaauaggaggcaaauugauggcucacuuaaccggacgcccacggguuuuuacgaccgagucuggcagauuuuggagcggaccccaaacggaaucaucgucgccgggaaacaucugccgcagcagcccacgcugagcgauaugacaauguaugagaugaacuucucgcuucugguggaggacacguuggggaauauugaccagccccaguacagacagauuguagucgagcucuugauggucgugucgaucgugcuggagagaaacccugaacuggaauuucaagauaagguggaucucgaucggcuuguaaaggaggcguucaaugaguuccagaaggaucagucgagacugaaggagaucgaaaagcaagacgacaugacaucguuuuacaauacaccgccccuggguaaacgcgggacauguucguauuugacgaaagccgucaugaauuuguugcuggagggugagguaaaacccaauaaugacgaucccugcuugaucuccugauaagcugccuucugcggggcuugccuucuggccaugcccuucuucucucccuugcaccuguaccucuuggucuuugaauaaagccugaguaggaag

SEQ ID NO: 6368 - protein, 406 aa, Artificial Sequence
  derived and/or modified sequence
MTLDVGPEDELPDWAAAKEFYQKYDPKDVIGRGVSSVVRRCVHRATGHEFAVKIMEVTAERLSPEQLEEVREATRRETHILRQVAGHPHIITLIDSYESSSFMFLVFDLMRKGELFDYLTEKVALSEKETRSIMRSLLEAVSFLHANNIVHRDLKPENILLDDNMQIRLSDFGFSCHLEPGEKLRELCGTPGYLAPEILKCSMDETHPGYGKEVDLWACGVILFTLLAGSPPFWHRRQILMLRMIMEGQYQFSSPEWDDRSSTVKDLISRLLQVDPEARLTAEQALQHPFFERCEGSQPWNLTPRQRFRVAVWTVLAAGRVALSTHRVRPLTKNALLRDPYALRSVRHLIDNCAFRLYGHWVKKGEQQNRAALFQHRPPGPFPIMGPEEEGDSAAITEDEAVLVLG

SEQ ID NO: 6369 - DNA, 1218 bp, Artificial Sequence
  derived and/or modified sequence
atgacattagacgtagggcccgaagacgaactgcccgactgggcggccgcaaaagagttctaccagaagtatgatcccaaagatgttatagggcgcggcgtgagctccgtagtgcggcggtgcgtgcaccgtgcgaccgggcacgaattcgccgtgaagatcatggaggtgacagcagaacgtttatctccagaacagctggaggaagttagagaggcgacccggcgagaaactcatattctgcggcaggtggccggtcacccacatattatcacactgatcgatagctacgaatcaagctcattcatgttcctggtgtttgatcttatgcggaagggcgagctgtttgattacctcaccgagaaggtcgccctgagtgagaaagagactcgcagcataatgcgaagcttgctggaggcagtctcctttctacatgccaacaacatcgtgcacagggacctgaagcccgagaacatcctcctggatgataatatgcaaatacgattatcggacttcggttttagttgccatctggaaccgggggagaagcttcgagagctctgtggaacgcccggttacctggcaccagaaatcttgaagtgctctatggacgagacccacccggggtatggcaaagaggtcgacctttgggcctgtggcgtcatcctgttcactctcttggccggaagcccaccattttggcacagaagacagatcctcatgttacgcatgatcatggaagggcagtatcagttctcatcaccggaatgggacgaccgaagtagtacggttaaggatttgatctctcggctcctgcaggtcgatcctgaggcccgactcacagcagagcaggccttgcaacacccgttcttcgagcgttgcgagggcagccagccctggaatttgacgccccggcaacgcttccgtgttgcggtatggaccgtgctcgcggccgggcgcgtggcgctgagcacccaccgggtgcgccccttaactaaaaatgcgctccttagggatccctatgctcttagaagtgtgcggcatttgatcgacaactgtgcgttcaggttgtatggccactgggtgaagaagggggagcagcagaaccgggcggccctgttccagcataggccccctggtccattccccataatgggccccgaagaagagggcgattcagccgcaattaccgaggacgaggctgtgcttgtactgggc

SEQ ID NO: 6370 - DNA, 1218 bp, Artificial Sequence
  derived and/or modified sequence
atgacgctggacgtcgggcccgaggacgagctgcctgactgggctgctgctaaggagttctatcaaaagtacgatcctaaggacgtaattggccggggagtgtcctcagtcgtgcggaggtgcgtgcatagagcaactggtcatgaatttgccgtcaaaatcatggaagtgactgcagagagactttcccctgagcagctggaagaggtgcgcgaagcaacgcgccgcgaaacccatatccttagacaggtggcaggtcaccctcacattatcactcttattgactcgtacgaaagctcatcgtttatgtttcttgtctttgatcttatgagaaagggcgagctctttgattacctgacggaaaaggtggcactttcagagaaggaaaccagatccattatgagatcattgctcgaagcagtgtccttcttgcacgcgaacaatatagtccaccgggacctgaagcccgagaatatacttctggatgacaacatgcaaatccgcctctctgattttggattctcgtgtcacctggaacctggagaaaaacttcgagaactttgtggaacccctggatacctggcaccagaaatccttaagtgttcaatggatgaaactcacccagggtacggaaaggaagtcgacctttgggcctgtggggtgatcttgtttactcttcttgcaggctcgccaccgttctggcatagacgacagattcttatgctgcgaatgattatggaaggacaataccaattctcatccccagaatgggatgacaggtcgagcactgtgaaggaccttattagccgactcctgcaggtggacccagaagcccgtttgaccgcagaacaagccctgcagcatccattctttgaacggtgtgagggctcacaaccttggaacttgactcctaggcagcggttccgcgtggcagtgtggactgtgctggccgccggccgcgtggcactgtccacgcatcgcgtgcgtcctctgactaagaatgccctcctgagggacccatacgccctgaggtccgtgcggcatctgatcgataactgtgcatttcggctctacggccattgggtcaagaagggagaacagcagaaccgcgcagctctctttcaacatagaccacccgggccttttcctatcatgggaccagaagaagaaggtgactccgctgcaattacggaagatgaggcagtgctggtcctggga

SEQ ID NO: 6371 - DNA, 1218 bp, Artificial Sequence
  derived and/or modified sequence
atgacgttagacgttgggcctgaagacgagctacctgactgggcggcggccaaagaattctatcagaaatacgatccaaaagacgtcatcggccgtggagtgtcttccgtagtccgcagatgcgtccatcgcgcaacaggccacgaattcgcagtaaagatcatggaagtgacagccgaacgtctgtctccggaacagctggaagaggttcgcgaagccacaaggagggagacacacatactacgccaagtagctgggcatcctcacattatcactttgattgattcgtatgaatctagctcattcatgtttctggtcttcgatctaatgaggaagggcgaattatttgactatttgacagagaaagtggctctgagcgagaaagaaacccgctcaattatgcgatctctcctggaagctgttagcttcctgcatgccaacaatattgttcaccgcgatctcaaaccagaaaatattctgcttgatgacaacatgcagatccggttgagcgatttcggcttcagctgtcatctcgaacctggagagaaacttcgagaactctgcgggactcctggatatctggctcctgaaatactgaagtgctcaatggacgaaacacatcccgggtatggaaaagaggtagacttgtgggcttgcggagtgatactctttacacttttagccggctcgcctcctttctggcacagaaggcagatcctgatgctcagaatgattatggagggacaatatcagttctccagcccggagtgggatgatcgatcctccacggtcaaagacctgattagtaggctcctgcaggtggatccagaggccagactaactgcggaacaggctctgcaacacccatttttcgagagatgtgagggcagtcagccttggaacctgacaccccgccagcggttccgcgtcgccgtctggactgttctggcggccgggagagtggccctgagcactcacagggtgcgcccattgaccaagaacgcactcctaagggacccttatgcgctgcgttcggttaggcacctgatagacaactgtgcatttcgtctgtacggtcactgggttaaaaagggagagcagcagaaccgagcagctttgttccagcaccgcccccccggaccctttccaatcatggggccagaagaagagggagattctgccgccatcactgaggatgaggcagtgctcgttttggga

SEQ ID NO: 6372 - DNA, 1218 bp, Artificial Sequence
  derived and/or modified sequence
atgactctcgacgtgggtcctgaggatgaattgcctgattgggcagctgcaaaagagttttaccagaagtacgatccaaaggatgtgatcggacgaggtgtttcgagcgtggtgaggcgatgtgtccaccgtgcaaccggtcacgagttcgcagtgaagatcatggaagtgaccgcagaaaggctctcacctgaacagcttgaagaagtgagggaggcaacccgccgggaaactcatattctgcgccaagtggccggacacccacacataatcaccctgatcgatagctatgagtcctcctccttcatgtttctggtgttcgatctgatgcgcaaaggggagctctttgactaccttactgagaaggtcgcactttcagaaaaagaaaccagatccattatgcggagcctgctggaggcagtgtcttttctgcacgcaaacaacattgtccatagagatctgaaaccggagaatattctgcttgatgataacatgcaaattcgactttccgattttggattttcgtgtcatctcgaacctggcgaaaaactgcgggaactctgcgggactccgggttacttggcacctgagatcctgaagtgctcgatggacgaaacccacccaggctacgggaaggaggtggacctttgggcctgtggtgtgattctgtttactctgctggcgggttccccgcctttctggcatcgtcggcagattttgatgcttcggatgattatggagggtcagtaccaattctcgtcgccggaatgggacgaccggagctccaccgtgaaggatcttatctcccgtctgctccaggtggacccggaagcccggctgacggcagaacaggcactgcaacacccctttttcgaacgttgtgaaggaagccagccctggaatctgactccacggcagagattccgggtcgccgtctggacggtgcttgcagcagggcgcgtcgcattgagcactcacagagtaagaccactgactaaaaacgcactcttgagggatccatacgccctcagatcggtcagacacctcatagataattgcgcatttcggctttacggtcattgggtcaagaagggcgagcaacaaaacagggcagcgctttttcaacaccgacctcccgggccatttcctatcatgggtccggaagaagagggggactcggccgctattactgaggatgaagcggtgctggttcttgga

SEQ ID NO: 6373 - DNA, 1218 bp, Artificial Sequence
  derived and/or modified sequence
atgacattagatgtgggaccagaagatgaactgccggattgggctgcggccaaagaattctatcagaagtacgaccctaaagatgtgataggcagaggtgtatcatcggtcgttcgaagatgcgtccatcgtgctacgggacacgagttcgcggttaaaattatggaggttactgctgaaagactaagtccagagcagcttgaagaagttcgtgaagccacccgacgagaaacgcatattttgcgacaagttgctgggcatccacacatcatcacgttgatcgatagttacgagagcagcagtttcatgttcctggttttcgatcttatgcgtaaaggagagcttttcgattatcttacagaaaaagtcgcactgagtgaaaaagagaccagatcgatcatgagatccttgttagaagccgtatcctttcttcatgcaaataatatcgttcacagagatcttaaaccggaaaatattctcttggatgataatatgcagattagattgtcagattttggattctcctgtcatctggaaccaggtgaaaagttaagagagttatgtggaaccccgggatatttggctcctgaaatcctaaagtgctcaatggatgaaacccaccccggatacggaaaagaggttgatctttgggcgtgcggagttatactcttcactctgttggctggaagcccaccgttttggcatcggagacaaatcctcatgctgagaatgatcatggaaggacaatatcaattctcatcgcccgagtgggacgaccgaagctccacggtgaaggatcttatttccagacttctacaagttgatccagaagcgaggctaactgctgagcaagctttgcaacatccatttttcgaaagatgtgaaggatcccaaccatggaacttaactccacggcaacgattcagggttgcagtttggaccgtgctcgcagcaggaagagtggcactaagcactcatcgagttagaccacttacaaaaaacgcacttctccgtgatccatatgcactcagatccgtacgtcacctcattgataactgcgcatttagattgtacggtcattgggtgaagaagggagaacagcaaaacagagcggcgttattccaacaccgtcccccaggacctttcccaattatgggccctgaagaggaaggagactcagcagcaattactgaagacgaagccgttcttgtcctgggg

SEQ ID NO: 6374 - DNA, 1218 bp, Artificial Sequence
  derived and/or modified sequence
atgacacttgatgtagggccggaggacgagcttccggactgggcggcggctaaggagttttatcagaaatatgacccgaaagacgtgataggccgcggagtgagtagtgtggttcggagatgcgtccaccgtgcgacaggacacgagtttgccgtaaaaattatggaagtgacggctgagagactgtccccggagcaacttgaggaagtacgggaggccacgcggagagaaacgcatattcttcgtcaagtggctggacaccctcacattatcaccctgatcgacagctacgaaagctcttcattcatgtttctggtatttgaccttatgcgtaagggagagctgttcgactatcttaccgaaaaagtggccttgtcagaaaaagaaacacgcagcattatgcggtctcttttggaagcagtctcctttttacacgcaaataacattgtgcatagggatctgaaaccagaaaacatactgcttgatgataatatgcagattcggcttagtgactttggcttttcgtgtcatttagaacctggggagaaattacgcgaactgtgtgggacacctggttaccttgcgccggaaattctgaaatgctctatggatgagacacacccaggctatggaaaggaagtggatctgtgggcatgcggtgtgattttatttacattgttagctggatcgccgccgttttggcaccggcggcagatactcatgttacgcatgatcatggaaggacaatatcagtttagctctccggagtgggacgatagatcctcaactgtcaaagatcttatctctcgcctgcttcaggttgaccctgaggctcgccttacagcagaacaagccttacaacatcctttttttgaaagatgcgagggcagccaaccatggaacttaactcctcgccagcggtttcgtgtcgctgtttggacagtgctcgcagcaggacgcgtggcgttgtcgacccacagagtccgcccattgacaaagaatgcattgttacgtgatccgtacgcattgcggtcggtgcgtcatttgatcgataactgtgcatttagactttatggccattgggttaaaaaaggagagcaacagaatcgtgcagcgctttttcagcatcgcccgccgggtcctttccctattatgggacctgaggaggagggtgattcagccgcaattacggaagatgaggcagtcctcgtccttgga

SEQ ID NO: 6375 - DNA, 1218 bp, Artificial Sequence
  derived and/or modified sequence
atgacactggacgttggacctgaagacgagctacccgactgggcagccgcaaaggagttttatcagaagtatgacccgaaagacgtcatcggacggggggtctcatctgtagtccggcggtgcgttcacagggctaccggacacgagtttgcggttaagatcatggaagttaccgcagaacgactgtcacccgaacagctagaggaagtcagagaggctacgaggcgcgagacccacattctacgacaggtggcaggccatcctcatataataacactgatagattcttatgagtcgagcagtttcatgttcctcgtgttcgatctaatgcggaagggagagctattcgactacctgacagagaaggtcgcgctgtccgagaaggagaccaggtcaatcatgcgaagcctcttggaggctgtgtcctttctgcacgccaataacattgtgcaccgtgatctgaaacccgaaaatattctgttggatgataatatgcagattaggctatcagacttcggattctcgtgtcacctcgagccgggtgagaaattgagagagttgtgtggcaccccgggatacctcgccccagagatactcaagtgcagcatggatgagacccatcccggctacggcaaggaggttgatttatgggcctgtggggtgatcctctttaccttactcgcgggttcgcctcctttttggcacaggcgccaaattcttatgctgagaatgatcatggaggggcagtatcagtttagctcgcccgagtgggacgacaggagcagcactgtgaaggatctgataagccgacttctacaggtggaccctgaggcgcgcctgacagcagaacaggccctccagcacccatttttcgaacggtgtgagggcagtcagccttggaatttgactcccaggcagcggttcagggtggctgtgtggaccgttcttgcagccgggcgagtggcccttagtacgcacagggtgaggccgctcacaaaaaacgcattgctgcgagacccttatgctcttcgaagcgttaggcatctcatcgacaactgcgcttttcgcttatacggacactgggtgaagaagggagaacagcagaaccgcgcagccctgttccagcataggcctcctggtccttttcccatcatgggacccgaggaagagggcgactctgccgccattaccgaagacgaggctgttctcgtacttggg

SEQ ID NO: 6376 - DNA, 1218 bp, Artificial Sequence
  derived and/or modified sequence
atgacccttgatgtggggccagaggatgagctgccagactgggctgcagcaaaggaattctaccagaaatacgatcccaaggatgttatcgggaggggggtctcctctgtggtgagaagatgcgtacacagggccacgggtcacgaattcgcggtgaaaatcatggaagtcacagcagagagactctcgcctgagcagctagaagaagtgagggaggccacacgccgtgaaacccatatcctgaggcaggttgccggccacccccacattatcacgttaatcgactcatatgaatcatccagtttcatgttcctggtgtttgatctgatgcggaagggcgaactgttcgactacctgaccgagaaggttgctttgtccgaaaaagaaacacggagcatcatgcggagtttactggaagctgtatcttttctgcacgccaacaatatagtgcatcgggatctgaagccagagaacattctgcttgacgataacatgcagatcaggctgtccgatttcggcttctcgtgtcacctcgaaccaggcgaaaaactgcgcgaactttgcgggacacccggttaccttgcgcccgagatcctcaagtgtagcatggacgaaacgcacccaggttacgggaaggaagtggatctgtgggcgtgcggggttattctctttacactgctggctggaagccctcccttctggcatcgaaggcagattctgatgctacgcatgattatggagggtcagtaccagttctcttcaccagaatgggatgatcggagctcaaccgtcaaagacctgatcagcaggctgctgcaagtcgacccagaggcccgtctgactgcagagcaagcactccagcatccattcttcgagcgctgtgaggggtctcagccttggaatctaaccccgcgccaacgattccgagtggccgtgtggacagtgttggcagcagggagagtcgccttatccactcatagagtgagacctctgaccaagaatgcattgctgcgggacccttacgctctgcgctccgtaagacacctgatagataattgtgcttttcgactgtacggacactgggttaagaaaggcgaacaacaaaatagagctgccctgttccagcatcggccgccagggccgttccccatcatggggcccgaggaagagggagattctgctgctataacggaagatgaagccgttctggtgctcgga

SEQ ID NO: 6377 - DNA, 1218 bp, Artificial Sequence
  derived and/or modified sequence
atgaccctggacgttgggcctgaggatgaactgcccgattgggcagccgctaaggaattttatcaaaagtacgacccaaaggatgtcatcggccgtggcgtctcatctgtcgtccgccgatgcgtccaccgtgcaaccggccacgagtttgcagtcaaaatcatggaggttactgctgagcgacttagtcctgaacagcttgaagaggtcagagaggcgacccggcgtgagacccacatattgagacaggttgctggccatccccatatcattacattgattgattcatacgagagctccagctttatgtttctagtgtttgatctgatgcggaaaggcgagctgttcgactacctcactgagaaagtggcgctatctgagaaggagacgcgctctattatgaggagtctgctggaagcagtgtcttttttgcatgcgaataacatcgttcatcgcgatctaaaacccgagaatattttactggacgacaacatgcaaatacggctgtccgactttggcttttcctgtcatctcgagcctggagagaagttacgtgaattgtgcgggacaccggggtatttggcaccagaaatcttaaagtgctccatggatgagacgcacccgggatatgggaaagaggtggatttgtgggcatgtggggtgattttattcacgctccttgccggaagcccccccttttggcacaggagacagatcctgatgctgcgtatgatcatggagggccagtaccagttctcaagcccagaatgggatgatcggtcaagcaccgtcaaagatctgattagtaggcttctccaggtggaccctgaagctagactcaccgccgagcaggctctgcagcatcctttcttcgagagatgtgaagggagccaaccctggaacctgaccccacggcaacggtttagggtagccgtatggaccgtgcttgccgcaggacgagtagcactttcaacccaccgggtgcgtccccttactaaaaacgccctgctccgagacccctacgcgctccgctccgtgcgccatctgatcgacaattgcgcattcagactctatggacactgggtgaaaaagggtgagcaacagaaccgtgccgctctgttccagcaccgaccccccgggccattccctattatgggtcccgaggaggaaggtgatagcgccgcaataacagaagacgaagctgttctggtccttggt

SEQ ID NO: 6378 - DNA, 1218 bp, Artificial Sequence
  derived and/or modified sequence
atgaccttggacgtaggccctgaggacgagttacccgactgggctgccgccaaagagttctatcagaaatacgaccctaaagatgtgatcggaagaggcgtttccagcgttgtccggaggtgtgtgcatcgcgccacaggacatgagttcgctgtgaaaattatggaggtgacggctgaacggctctcaccagaacagctggaggaagtccgggaagcaacaaggcgggaaacgcatatactcagacaggtggccgggcacccacatataattacactgattgactcctacgaatcctcctcctttatgtttctggtgttcgatctgatgcgcaagggggaactgtttgactaccttaccgagaaagtggccctgagcgagaaagagacccggtcgatcatgagaagtttactggaggcagtgtctttcctgcatgcgaataatatcgtacatcgggatttaaagccggaaaatattttactggacgacaacatgcagattagactgagcgactttgggttcagctgccacctggaacccggtgaaaaactgcgtgagctgtgcggcactcccggctacctggctcctgaaatattgaagtgctcaatggatgagacgcatccaggatatggcaaagaggtggatctgtgggcatgtggcgtcatactgtttacgctgctcgcaggaagcccacccttttggcacaggagacagattctgatgctgcgcatgattatggaggggcagtaccaatttagtagccccgaatgggacgaccggtcctcaaccgtgaaagatctgatatctaggcttttgcaggtggaccccgaggctagattaacggctgagcaggctctgcaacacccgttctttgagaggtgcgagggttcccagccatggaacctaactcctcggcagcgttttcgcgtggctgtgtggaccgtgctggcagcagggagggtggctctctctacacaccgcgtgcgccccctgaccaaaaacgctctccttagagacccttacgccttgcggagtgtgcgacacctcatcgataattgtgcatttcgtctttatggacactgggtgaagaagggtgagcagcagaaccgagcagccctgtttcagcatagacctccaggccctttccccatcatgggaccagaggaagagggcgacagcgccgccattactgaagacgaggctgtactggtgctcgga

SEQ ID NO: 6379 - DNA, 1218 bp, Artificial Sequence
  derived and/or modified sequence
atgactttggacgttggacctgaagacgagctaccagactgggcggcggcaaaggagttttatcagaagtacgaccctaaggatgtgatagggagaggtgtgagcagcgtagtcaggagatgtgtccacagggcaaccggtcatgagtttgcggtgaagatcatggaggtgaccgccgagcgcttgagcccagagcagttggaagaagtcagggaggctacaagacgcgaaacccacatcctgagacaagtcgcaggacaccctcatattatcactctgatcgacagttacgaatcgtcttcctttatgttcttggtgttcgaccttatgcgcaaaggggagctgtttgattacctcaccgagaaagtggctctatcagagaaggagaccaggtcgataatgcggtccctgttggaggcggtctcctttctgcatgccaacaacatcgtccatcgcgatcttaagccagagaacatcctgctggacgataacatgcagatccgcctctccgattttggtttttcatgccacttagaacccggcgaaaagctccgtgagctgtgtggaactccaggctatctagctcccgagatcctgaagtgttctatggacgaaacgcaccctggctatggaaaggaggtagacctctgggcttgcggggtgattctttttaccctcctggcgggcagtcctcctttttggcaccggcggcagatactgatgctccgaatgatcatggaggggcaataccaatttagcagccccgagtgggatgaccgcagttcaacagtgaaggacttaatttctagactattacaggtcgatcccgaggcccggctgaccgcagagcaagctctccagcaccccttcttcgagcgatgtgaggggagccagccctggaatctcaccccgcgtcagcggttcagagtcgcagtgtggaccgttctcgctgctggccgcgtagccctaagcactcaccgcgtccgacccttgaccaagaatgcgttactcagggacccctatgctctgagatcagttagacatcttattgacaactgtgcttttagactgtacggccactgggtcaagaaaggagagcagcagaatagagctgctctattccagcacaggccccctgggccatttccaatcatggggcctgaagaggaaggcgactctgcagccatcacagaggacgaagccgtgcttgtgctagga

SEQ ID NO: 6380 - DNA, 1218 bp, Artificial Sequence
  derived and/or modified sequence
atgacacttgacgtgggcccggaggatgagctgcctgattgggcagctgccaaagagttctaccagaaatatgaccctaaagacgttatcgggcgtggcgtgtccagcgtagttaggagatgtgtgcatcgtgccacaggccacgagttcgcagtgaagatcatggaagttactgcagagaggctctctcccgagcaacttgaggaagtgagggaggccacccgacgcgagacccatattttgaggcaggttgccgggcacccccatatcatcacactgatcgacagttacgagagctcctctttcatgttcttagtgttcgacttgatgcggaagggagagctctttgactatctcaccgagaaggtcgccttgtctgaaaaggagacacgctcaattatgagatcactgctcgaagcagtgtcattcttgcatgcgaacaatatcgtacaccgggacctaaaaccagagaacattctgctggatgataacatgcagatccgactgtctgacttcggtttttcctgccatctggagccgggtgaaaagctccgggaactgtgtgggacacccgggtacctggctcctgagatcttaaagtgcagcatggatgaaactcatcctggatatggcaaggaggtggacctgtgggcatgtggcgtaattctcttcactttactcgccgggtcaccaccgttttggcatagaagacagatcttgatgctgagaatgatcatggaaggccagtatcaattttcctctccagagtgggacgacagatcctcaaccgtcaaagacctgataagccggctgttgcaggttgatcccgaagcccgcctcactgcggaacaagccttgcagcaccctttttttgagaggtgcgaagggagtcaaccctggaacctaaccccacggcagcgcttccgagtggcggtgtggacagtgctggccgcgggtcgggtggccttaagcacacatcgagtgagaccgttgaccaagaatgcactcttacgtgatccgtatgcgctgaggtctgttcggcacctcattgacaactgtgcttttaggctctatggtcactgggtcaagaaaggggagcagcagaacagggcagcgttgttccaacaccgtcctccaggtccatttccaatcatggggcctgaggaggagggggactctgctgcaatcacagaagacgaggcggtgctggtgttggga

SEQ ID NO: 6381 - DNA, 1218 bp, Artificial Sequence
  derived and/or modified sequence
atgacgctcgatgtcggacctgaagatgaattgcccgattgggcagcggctaaggagttctatcagaagtatgacccaaaggacgtgatcggacgcggagtttcctccgtcgtaagacggtgtgttcatcgggccacaggccatgagttcgcggttaaaattatggaagtcacagccgagcggcttagtccggagcaactcgaggaggtccgtgaagcgacccgccgtgaaacacacatccttcgacaggtggctggacatccccatattatcacattaatcgatagctatgagtcatcgagcttcatgtttcttgtgttcgatctgatgcgcaagggtgagttgtttgactacctaacagagaaggtcgccttatcggaaaaagaaactaggagcatcatgcgctccttgctcgaagcagtttcctttcttcatgccaacaacatcgtacaccgcgatttgaagccggagaacatcctattggacgacaacatgcagatacggctttcggattttgggttctcgtgccacctggagccgggtgagaagctccgggagctttgtggaacccccgggtacctcgcacctgagattctgaaatgttccatggacgagacgcatccaggttatggtaaagaagtcgacctgtgggcttgcggggtgattctgtttacccttctggcagggtcaccccccttctggcaccgtcgccagatactgatgctgcgtatgattatggaggggcaataccagttcagttctccggaatgggatgaccgatcctctaccgtcaaagacctgatctctagactgttgcaggtcgatccagaggcccggctgaccgctgagcaggctcttcagcacccattcttcgaacgttgcgaaggttcgcaaccgtggaacttaacaccgcgtcagcgattccgcgtagcagtttggacagttcttgctgctggccgagtggcgctcagtactcaccgcgtacgcccattgactaaaaacgcgctgttgcgcgatccttacgcgctgcgtagcgtccggcacctaatcgataattgcgcgtttaggctgtacgggcactgggtgaagaagggtgagcaacaaaacagagccgcgctctttcagcatcgtcctccaggtccatttccgatcatgggccctgaggaggagggagattccgccgccatcacggaggatgaagcagtgctcgtgctcggc

SEQ ID NO: 6382 - DNA, 1218 bp, Artificial Sequence
  derived and/or modified sequence
atgacgctggatgtgggtcctgaagatgagctgcctgattgggctgcagcaaaggagttctaccaaaagtacgatccgaaggacgtcatcggtcgaggagtgagctcagtagtccgcagatgtgtccatcgcgcgaccggtcatgagttcgccgtgaaaatcatggaggtgaccgccgaaagacttagccctgagcaacttgaagaggtgagagaggcaactagaagagaaacccatattcttaggcaagtcgcagggcatcctcatatcatcactctgattgactcatacgaatcatcgtccttcatgttcctggtgtttgaccttatgcgcaagggagagctgttcgattacctgactgagaaggtcgcactttccgaaaaggaaacccgtagcatcatgcggtccctgctggaagcagtgtccttcctccacgcaaacaacattgtgcaccgtgatcttaagccagagaatatccttcttgatgacaatatgcaaattagactgtcggactttggtttttcgtgtcatctggaaccaggggaaaagttgcgggaactttgcggaaccccgggatacctggcacccgagattctcaagtgttcgatggatgaaactcaccctggctatggaaaagaagtcgatctgtgggcatgcggggtaatcctttttaccctgctggccggctccccaccattttggcacagacggcaaatacttatgctccgcatgatcatggaaggacagtaccagttttcctcgcccgaatgggatgaccgctcaagcacggtgaaagatctgatatcgcgattgctgcaggttgaccctgaagcacggctcactgcggagcaggcactgcagcatccttttttcgaaagatgtgaaggtagccaaccctggaacctcactccccgtcagagatttcgagtggctgtatggactgtgcttgcggcaggaagggtggcactgagcacccatagagtgcgtccactcaccaagaacgcactgctgcgcgatccatacgccctgagatccgtgcgccatcttattgacaattgcgcgtttagactctacggccactgggtgaagaaaggggaacagcaaaaccgggcagcactttttcaacaccgccctcctggtccattccctattatgggccctgaagaagagggagactcggccgcgattaccgaagatgaggctgtcctcgtcctgggt

SEQ ID NO: 6383 - DNA, 1218 bp, Artificial Sequence
  derived and/or modified sequence
atgactttagacgtaggccccgaggatgaacttcccgactgggccgccgcaaaagaattctatcaaaaatacgacccaaaagacgtgatcggacgtggcgttagctcggtcgttcgtcggtgcgtccaccgagccactggacatgaattcgccgtcaagattatggaggtgacagcggagcgactgagcccggagcagctagaggaggtgcgagaagctacccgccgagaaacccacattctgaggcaggttgcgggacatccacatatcatcactcttattgattcctacgagtctagtagttttatgtttctggtgtttgacctcatgagaaagggcgagttgttcgattatctgacagaaaaagttgcgctctcggagaaggaaacacgatccatcatgcgatctttgctcgaagccgtatcattcctgcacgctaacaatattgtgcacagagacttgaaacctgaaaatatactcctggacgacaacatgcagatcagactctccgatttcggcttcagttgccatctcgagcccggggagaagcttagagaactctgtgggacccctggatatctagcccctgagattcttaagtgctctatggacgaaactcacccaggatacggaaaggaagttgatctttgggcatgcggtgtgattcttttcaccctgctcgcgggatccccccccttctggcataggcgccagatccttatgttgcggatgataatggagggccaataccagttcagctcgcctgagtgggatgataggtcgtctaccgtgaaagacctgatttccaggctcctgcaggttgaccctgaggctagactgaccgcagaacaagcactgcagcacccattttttgaaaggtgtgagggatcccagccatggaacctgacacctcgacagcgtttccgagtggccgtctggacagtgttggccgccgggcgagtggcattgtctacacatagggttcggccgctgactaaaaatgcactcctccgagacccgtacgccctacgctcagttcgacacctgatcgataattgtgcgttccgcctttatggtcattgggtaaaaaagggagagcagcagaatagagcggcactcttccagcaccgtcctccgggaccctttcctatcatggggcccgaagaggagggcgatagcgcagcaataaccgaggatgaagccgtgttagtgttgggt

SEQ ID NO: 6384 - DNA, 1218 bp, Artificial Sequence
  derived and/or modified sequence
atgaccctggatgtcgggcctgaggacgagctcccagactgggctgcggcgaaggaattctaccaaaagtacgatccgaaggatgtcatcggacgcggagtctcgagcgtggtccggcggtgcgtgcaccgggcaactggccatgaatttgccgtgaagatcatggaagtgactgcggagcgactctcgccggagcagctggaggaagtgcgcgaggcaacgcgccgggaaactcacattctgcgacaagtggcgggacacccgcatatcatcactctgatcgattcctacgagtcctcctcgttcatgtttctggtgtttgacctgatgcggaagggagaactgtttgattacctcaccgagaaagttgcactgtcggaaaaggaaacccggagcattatgcgctccctccttgaagctgtctccttcctgcacgctaacaatatcgttcatcgggatctcaagccagaaaacatccttcttgacgataacatgcaaatccggctgtctgatttcgggttctcatgccacctggagccgggggaaaagctgcgcgagctttgcggaactcctggctacctggcgcccgaaatcttgaagtgctcaatggacgagactcacccaggttatggaaaagaggtggacctctgggcctgcggcgtgatcctgttcaccctgctcgctggctccccgcctttctggcaccggagacaaatactcatgctgcggatgattatggagggtcaataccagttctcctcgccggaatgggatgaccggtcctctactgtgaaagatctcatctcacggcttctccaggtggaccccgaagcgcgcctgactgccgagcaggcgctgcagcatccgttttttgaacgctgcgagggatcccaaccctggaatctcactccgcgccaacgcttcagagtggcagtgtggactgtgctggccgccggcagagtggcactttccactcaccgggtgaggccactgaccaaaaatgctctcctgcgggatccatacgccctccggtccgtgagacatcttatcgacaattgtgcgttcagactctacggacactgggtgaagaagggcgagcagcaaaaccgcgctgcgctcttccagcatagacctccaggtcctttcccaattatgggaccagaggaagaaggggattcggccgcaatcacggaggacgaagccgtactggtcctggga

SEQ ID NO: 6385 - DNA, 1218 bp, Artificial Sequence
  derived and/or modified sequence
atgacactagacgtgggtcccgaagacgagctgcccgactgggccgccgccaaggaattctaccagaagtatgacccaaaagacgtcatcggacgcggcgtgtcttccgtggtgaggaggtgcgttcatcgagccacaggccacgagttcgccgttaagataatggaagtgacggccgaacgtctttcacccgagcagctggaagaagtgagggaagcaaccagacgggaaactcacattctgagacaggtggcagggcacccacacatcatcacactgatcgattcttacgagtctagctccttcatgttcctggtctttgacctgatgcgaaagggtgaactgtttgattacctcaccgaaaaagtggcattgagtgagaaagagacacgttcaatcatgcgctctttactggaagccgtttcgttcctccacgccaataacatcgtgcatcgtgacctgaagcctgagaatattctcctggacgacaacatgcagatccgcctgagcgacttcggattcagttgtcatttagaaccaggggaaaagttgcgggagctatgtgggactccggggtacctagcccctgaaatcctgaaatgcagcatggatgagactcatcccggctatggcaaggaggtagatctctgggcatgcggtgttatcttatttaccttactcgcaggttccccacccttttggcaccgacgccagattcttatgcttcggatgatcatggaaggccaataccagttttcttcccccgaatgggacgatcggtcctctacagtcaaagatcttatctctcgactgttacaagtcgatccagaggccaggttgaccgccgagcaggccctgcagcatcctttcttcgagcgatgtgaaggatcccagccctggaacctgactccacgccagcgattccgtgttgcggtgtggacagttctggcagcagggcgggtcgcactatcaacccatcgcgtgcgcccactcacgaaaaacgccttactgcgggatccctatgcacttagaagcgtacggcatcttatcgataattgcgcatttagactctacgggcactgggttaagaaaggagaacagcagaatagagcggcgttgtttcaacacaggcctccggggccatttccgataatgggccccgaggaggagggagatagcgcagccattacagaggatgaagccgtgctggttctcggg

SEQ ID NO: 6386 - DNA, 1218 bp, Artificial Sequence
  derived and/or modified sequence
atgacactggatgtggggccagaggatgaactgccagattgggcagcagcgaaggaattctaccagaagtatgatcctaaggacgtgattgggcggggggtgtcttctgtggtcaggagatgcgtacacagggctactggccacgagttcgcggtaaagataatggaggtaaccgccgaacggctgtctccggaacagctggaagaggtccgagaggctacacgacgcgaaactcacattttgcggcaagtcgcaggccacccacatattatcacattgatcgattcttacgagtcatctagcttcatgttcttggttttcgatctgatgcgcaagggagaactcttcgactacctaactgagaaagtcgccctctctgaaaaggaaactcggtctattatgagaagcctgctcgaggcggtgtccttcctccatgcaaacaatatagttcaccgcgacctgaaacctgaaaacatcctgctagacgacaatatgcagatccgcttatccgatttcgggtttagctgtcacctggaacctggagaaaagctccgcgaactatgcggcacccctgggtacctggcacctgagatactcaaatgctccatggacgaaacccaccccggatatgggaaagaagttgatctttgggcatgcggagtgatactgttcaccttgttggccggttccccgcctttttggcatcggcggcaaatcttgatgctgagaatgattatggaggggcagtaccagttctcaagccccgagtgggatgacaggagctcaaccgttaaggatttgatcagtagattactccaggtggacccagaggcgcgcctgactgcagaacaggcactccagcatccctttttcgagcggtgcgagggatcccagccctggaatcttacaccaaggcaacgcttccgggttgctgtgtggaccgtgctggcggccggaagagtggcgctttcaacacatcgcgtcaggccattgaccaagaatgccctactgagagatccctatgcccttcgaagcgtccggcacctgattgacaactgtgcatttagattgtatggccactgggtcaagaaaggtgagcagcagaacagggcagcactgtttcagcatagaccccctggtccattccccataatggggccggaagaggaaggcgattccgctgctattactgaggatgaggccgtactggtactgggg

SEQ ID NO: 6387 - DNA, 1218 bp, Artificial Sequence
  derived and/or modified sequence
atgaccctggacgttggaccggaggacgagctgccggattgggcggctgcaaaggagttctatcaaaagtacgatccaaaagacgtgatcggaaggggagtgtcctcggtcgtgaggcgttgtgtgcatagggcgaccggacacgagttcgccgtcaaaatcatggaggtcaccgcagaacggctgagcccagaacaactggaagaggtgcgggaggcaactagaagggaaacccatattctgcggcaggtggccgggcaccctcatatcattactctgattgactcctacgaaagcagcagcttcatgttcctggtgttcgacttgatgagaaagggggaacttttcgactacctgactgagaaggtcgccctttcagagaaggaaaccagaagcatcatgcggtccctgctcgaggcggtgagctttctgcacgccaacaatatcgtccaccgcgatctcaagccggaaaacatcctcctggacgacaacatgcagattagactttcagacttcgggttttcatgtcaccttgaaccaggagagaaactccgggagctgtgcggcacgccgggatacctcgctcctgaaatcctgaagtgctcaatggacgaaactcacccaggctacgggaaggaagtggacctgtgggcgtgcggcgtcatcctttttactctgctcgcgggaagcccacccttctggcaccgccggcagatcctgatgctccgcatgatcatggaaggacagtaccagttctcgtccccggaatgggacgatcggagctctactgtgaaggatctgatctcacgactgcttcaagtggacccggaagcacgccttaccgccgaacaggcgctgcagcacccgttcttcgagagatgtgaaggttctcagccatggaatctgacgccaagacagcggttccgggtggcggtctggaccgtgctggccgcgggtcgggtggcactgtccactcatagggtccgcccgctcaccaagaacgcactcttgagggatccgtatgctctgcgctcggtgcgccacctgattgacaactgcgccttccgcctgtacggacattgggtgaaaaagggcgaacaacaaaacagagcggcactcttccaacatagacctccaggacctttccccatcatgggaccggaagaggagggggattcggccgccatcaccgaggacgaagcagtcctcgtcctggga

SEQ ID NO: 6388 - DNA, 1218 bp, Artificial Sequence
  derived and/or modified sequence
atgacgctcgatgtgggaccggaagatgagttgcctgactgggcagccgctaaagaattctaccaaaagtacgacccaaaggatgtgatcgggcggggggtgtcatccgtggtgcgccggtgcgtccacagagcgaccggacatgaatttgctgtgaaaatcatggaggtcaccgccgagcggctgtccccggaacaactggaggaagttcgggaggccactagacgcgagactcatatccttcggcaggtcgcagggcacccgcatatcatcaccctcatcgactcctacgagtccagctcattcatgtttcttgtgttcgacctcatgcgtaagggcgagctctttgactacttgacggagaaggtcgctctctctgagaaagagactaggtcgataatgaggtcactgcttgaggccgtgagcttcttgcatgctaacaatatcgtccaccgggacctgaagccggagaatatcctcctggatgacaacatgcagatccgcctgtccgacttcggcttcagttgtcacctggagccaggagagaagctccgcgaactgtgtggaactccgggctacctggctcctgaaattctgaagtgcagcatggacgaaacccacccgggttacggaaaagaagtggatctgtgggcctgcggcgttatccttttcaccctcctggccggaagcccgccattttggcaccgacgccagatcctgatgctgagaatgatcatggaaggacagtaccagttctcgtcccctgaatgggacgaccgctcatcaaccgtgaaggacctcatcagtcggctcctccaggttgatcctgaagctcgcctgactgcagaacaggcgcttcagcatccgtttttcgaacggtgcgaaggatcgcaaccgtggaacttgaccccccgacaacgcttccgtgtggcggtatggactgttctggcggccggtcgcgtggcattgtctactcacagagtgaggccgctgacgaagaacgccctgctgcgcgacccctacgcccttcggtcggtccggcatcttattgacaactgcgcgttccggctgtatgggcactgggtcaaaaagggagaacagcagaatagagcagcccttttccaacaccgcccgcccggcccatttcctataatgggtcctgaggaggaaggggatagcgcggccattaccgaagatgaggcggtgctcgtgctggga

SEQ ID NO: 6389 - DNA, 1218 bp, Artificial Sequence
  derived and/or modified sequence
atgactctggatgtcggtcccgaagacgaactccccgattgggctgccgctaaagagttttaccagaagtacgacccaaaggacgtgatagggaggggtgtgtcgtcggtggttcgtcgctgtgttcatcgtgcgacaggccatgagtttgccgtcaaaattatggaggtaactgccgagcgactgtcacctgaacagctggaggaggtccgagaggccaccaggcgggagacccatattctgcgacaggtagccggacatccccacatcatcaccctgatagacagctacgagtcctccagcttcatgttcctcgtgtttgatttgatgaggaagggcgagctattcgattacctgactgaaaaggttgccctgtcggaaaaagagacaagatctattatgagatctcttttagaagccgtgtcctttctgcatgcaaataacattgttcatagggacctgaagcccgaaaatattttgttggatgataacatgcaaatcaggctgtcggattttggatttagttgccatctcgaacccggagaaaagctgcgcgaactctgtggaaccccggggtaccttgcccctgagatcctgaagtgctctatggacgaaactcacccaggctacgggaaggaggtcgatctgtgggcgtgcggtgtaatcttattcaccttgctggcaggtagcccccccttttggcaccgccggcagatccttatgctgagaatgattatggaagggcagtaccagtttagttctcccgaatgggacgaccgcagctccacagtcaaagaccttataagccggctgttgcaagtcgatcccgaagctcgtctcacagctgaacaggccctgcagcaccccttctttgaacgctgcgagggtagccagccttggaacctcactccacgccagcgttttcgggtggcggtctggaccgttctcgcagccggacgagtcgccctgagcacccatcgagtccgaccactgacaaagaatgccctgctgagggacccctatgcgctgaggtctgtgcgccacttaattgataattgcgctttcaggctctacggccactgggtgaaaaagggcgagcaacagaatcgggctgccctgtttcagcatcggccacccggtccatttccgatcatgggccctgaagaagagggcgattccgcagcgatcaccgaggacgaagccgttctcgtcttaggg

SEQ ID NO: 6390 - DNA, 1218 bp, Artificial Sequence
  derived and/or modified sequence
atgacccttgacgtgggacccgaggatgagctcccagattgggccgcagcaaaggagttttaccagaagtacgacccgaaggacgtcatcggtcgcggggtgtcgagcgtcgtgcgcaggtgcgtgcaccgggcgactggccacgagttcgcggtcaagattatggaagtgaccgctgaacggctgtccccggaacaactggaggaggtcagggaagcaaccagacgcgagactcacatccttcgccaagtcgccggacatccgcacatcatcactctcatcgactcatacgagagctcgtcctttatgttcctcgtgttcgaccttatgcggaaaggggagctgttcgactacctgacggaaaaggtggcgctgagcgaaaaggaaactcgcagcattatgaggtcactcctggaagcggtgtcattcctgcatgcgaataacatcgtgcaccgcgatctcaagccggagaacatcctgctcgacgacaatatgcagatccggctgtccgatttcggtttctcctgccacctggagccaggcgagaagctgcgggagctgtgtggaacgccgggatatttggcgcctgaaatcctgaagtgctcgatggatgaaactcacccaggctacggcaaggaagtggatctgtgggcttgcggcgtgatcctcttcaccctcctggcaggatccccgcccttctggcatcggcgccagatactgatgttgcgaatgatcatggaaggccagtaccagttcagctcaccggaatgggacgaccgctcatcaaccgtgaaggacctgatcagccggctgctgcaggtggacccggaggcccggctgactgcggaacaagccctgcagcatcctttcttcgaacgctgcgaaggctcgcagccgtggaacctcaccccgaggcagcgctttcgggtcgccgtgtggaccgtgctcgcggcgggcagggtggccctctcgacgcacagagtgcgcccgcttaccaagaacgccctcttgcgcgatccgtacgccctccgatctgtcaggcacctgattgacaactgtgcctttcgcctgtacggtcactgggtgaagaagggagaacagcagaatcgtgccgccttgtttcagcatcggccaccggggccgttccctatcatggggccggaagaagagggcgactcagctgctatcaccgaggatgaagcagtgttggtgctggga

SEQ ID NO: 6391 - DNA, 1218 bp, Artificial Sequence
  derived and/or modified sequence
atgacgctggacgtagggccagaagatgagctcccggactgggcagccgccaaagaattctaccaaaagtacgacccaaaggacgtcatcgggcgcggcgtctcttccgtggttaggaggtgcgtgcaccgggccacaggccacgaatttgctgttaagattatggaggtaaccgccgagcgcctgtctccggaacagttggaggaggtgcgcgaggccacacggcgagaaacgcacatcctccggcaggtggctggtcacccccatatcatcaccctgatcgattcttatgaatccagcagctttatgtttcttgtgtttgacctgatgcgcaagggcgagttgtttgattacctcactgagaaagtcgcattgtccgagaaagagacacggagtatcatgagatcgctgctggaggctgtatctttcctccacgccaacaatatcgtacacagggacctaaagccagagaatatacttcttgatgacaacatgcagataagactgagtgatttcggcttctcttgccacctagaacctggggagaaactgcgcgaactgtgtggtacaccaggctacctagcccccgaaatcctcaaatgttccatggacgagacccatcctggttatgggaaagaagtggacctgtgggcatgcggggttattctcttcacattgttggccggctcacctcccttttggcaccgccgtcagatacttatgcttagaatgataatggagggtcaatatcagttctcatccccagagtgggacgaccgttcttctaccgtgaaagacttaatctcccgcttgttacaggtcgacccagaggcccggctgaccgccgagcaggcactgcagcatccgttttttgaacgctgtgagggatctcaaccatggaacctcacaccacgtcagaggtttagggttgccgtttggacggtccttgcagctggccgagtggcactgagcacccatagggtcagaccattgaccaagaatgccctgcttcgggatccttatgccctccggtcggtaagacatctaatcgataattgcgcatttcgcctgtacggacattgggtgaaaaagggcgagcagcagaatcgagctgccttgtttcagcacaggcctcccggtcccttccctatcatgggtcctgaagaggagggagatagcgccgccatcactgaagacgaggcagtactcgtactcggt

SEQ ID NO: 6392 - DNA, 1218 bp, Artificial Sequence
  derived and/or modified sequence
atgaccctggatgtcggacccgaggacgagctgccggattgggccgcagcaaaggagttctaccagaagtacgatccaaaggatgtgatcgggcgcggagtctcgagcgttgttagaagatgtgtgcacagagcaactggccacgaattcgcagtgaagattatggaggtgactgcggagaggctgtccccagaacagctggaagaggtgcgtgaagcaaccagacgagaaactcatatcctgagacaagtcgcaggacatccccacatcattaccctgatagattcctatgagtcgtcatcctttatgttcttggtctttgatttgatgcggaaaggagaacttttcgactacctgaccgaaaaagtggcgctctccgagaaggaaacccgctcgattatgcgttcgctgcttgaagctgtctcctttcttcacgccaataacatcgttcatagagatctgaagccagaaaacattctccttgacgataacatgcaaatccgcctttccgattttggctttagctgtcacctcgagcccggagaaaagctgcgcgaactttgtggtaccccaggatacctggcccctgagattctcaagtgttcgatggacgaaacgcatccaggctacggcaaagaggtggatctttgggcctgtggggtgatcctttttacgctgctcgcgggaagccctccattctggcaccggcggcaaatcctgatgctgcgcatgatcatggagggccagtaccagttttcaagccctgaatgggatgatagatccagcacggtgaaggatctgatttccagactgcttcaggtcgaccctgaggctcgccttaccgcggagcaggcactccaacacccgttttttgaacgatgcgagggatcgcaaccctggaacttgactcctagacaacgcttccgagtggccgtctggaccgtgctcgcagcaggccgggtcgcactgagcacccatcgggtgcggcctctgacgaagaatgcactcctgagagatccttacgccctgaggtccgtgaggcacctcattgataactgtgctttccgcctttatggccactgggtcaagaagggagaacagcaaaatcgcgcggccctgtttcaacatcggcctccaggaccgtttccaatcatgggtcctgaggaagaaggcgattccgcagcaataaccgaggatgaagcagtcttggtcctggga

SEQ ID NO: 6393 - DNA, 1218 bp, Artificial Sequence
  derived and/or modified sequence
atgaccctcgatgtgggccctgaggacgagcttccggattgggccgctgcgaaagagttctaccagaagtacgacccgaaggacgtcatcggaagaggcgtgagctcggtcgtgagacggtgcgtgcacagagcgaccggacatgaattcgctgtcaaaatcatggaagtcactgccgagcggctgagccctgagcagctcgaagaagtgagagaagcgaccagacgcgaaactcacatcctgaggcaagtcgcgggacacccgcacatcattactcttatcgactcgtacgaatcaagctcgttcatgttcctggtgttcgacctgatgcgcaagggagagctgtttgactacttgaccgaaaaagtcgccctgtccgagaaggaaacccgcagtatcatgcgctcactgttggaagccgtgagcttcctccacgcgaataacatcgtgcaccgggacctcaagccggaaaacatcctgctcgatgataatatgcaaattaggctgtccgatttcggattttcctgtcatctcgagccaggagaaaaactccgtgagttgtgcgggactccaggataccttgcccctgagatcttgaaatgctcaatggatgagactcatccaggctacgggaaggaagtggatctgtgggcctgtggtgtcattctgttcaccttgctcgcgggctcaccgccattctggcatcgccgccagatcctgatgctccgaatgataatggaaggccagtaccaattttcgtccccggaatgggacgaccggtcctctactgtgaaggacctgatctcgcgcctgctgcaagtggaccccgaggcacggctgaccgcagaacaggctctgcaacacccgttcttcgaaagatgcgagggaagccaaccgtggaacctgacccctcggcagaggttccgagtggcggtgtggaccgtgctggctgccgggcgcgttgcactgtccactcatcgcgtgaggccgctcacgaagaacgcccttctgcgcgatccctatgcacttagatcggtccgccacctcatcgacaattgcgcctttcggctctacggacattgggtgaagaagggagaacagcagaaccgggccgcactgttccagcaccggcctcccggaccatttccaatcatgggtccggaggaagagggcgactccgccgcaatcacggaggatgaagctgtgctggttctcggt

SEQ ID NO: 6394 - DNA, 1218 bp, Artificial Sequence
  derived and/or modified sequence
atgactctggatgtgggacctgaagatgagctcccggactgggctgccgcaaaggagttttaccaaaagtacgacccaaaggatgtgattggaagaggagtatcctccgtggtgagacggtgtgtgcaccgagccaccggccatgaatttgcagtgaaaatcatggaagtgactgcagaacgactcagcccagaacaactggaagaggtccgtgaggctacccggagagaaacgcatatccttagacaagtcgcagggcatcctcatatcattactctgattgatagctacgagagctcgtcatttatgttcctggtgttcgacctcatgcgcaagggggagctgttcgactatctgactgagaaggtggccctgtcggagaaggaaaccagatcgattatgaggtcgctgctggaagccgtgtcttttcttcatgcaaacaatattgtgcatcgcgatctcaagcctgagaacattctgcttgacgataacatgcaaatccgcctttccgattttggcttttcctgtcacctcgaaccgggagaaaagctgagggagttgtgcggaactcccggctatttggccccagaaattctgaaatgctccatggatgaaactcatcctggctacggtaaggaagttgatctttgggcgtgcggcgtgattctgttcactctgctggcaggcagcccacctttttggcatcggcgacagatcttgatgctgcgcatgataatggaaggccaatatcaattctcaagccctgaatgggacgaccggtcatcgacggtgaaggacctcataagcaggcttctgcaagtggaccctgaagcaaggcttaccgcagaacaggctcttcagcatccttttttcgagcgatgcgaaggaagccagccatggaatcttacgcccagacaacggtttcgcgtggccgtgtggactgtgctcgccgcaggtagggtggcactgtcaacgcatcgggtgcgtcccctcactaagaacgcccttcttcgggatccatacgccctccgtagcgtgagacatcttattgacaactgtgcattcaggctctacggccactgggtgaaaaaaggtgaacagcaaaatagagcagcattgttccagcacagacctccaggcccttttcctatcatgggtcctgaagaggaaggggactcggcagcgatcactgaagatgaagcagtgctggtgttggga

SEQ ID NO: 6395 - DNA, 1218 bp, Artificial Sequence
  derived and/or modified sequence
atgaccctcgatgtgggtccagaagatgaactcccagactgggcggccgcgaaggaattctaccagaaatacgatcctaaggatgttatcggaaggggcgtgtccagtgttgtacgcaggtgcgtccaccgcgccaccggccacgagttcgccgtgaagattatggaagtgaccgctgagaggctgagccccgaacagcttgaggaagttagggaagcaaccaggagagagactcacattttgagacaggtggccggccacccacacattatcaccctgatcgattcttatgaatccagcagcttcatgtttctggttttcgatctgatgcgcaagggagaactgttcgactaccttaccgagaaggttgctttgtccgaaaaagaaacccgctcaattatgaggagcctcctcgaggctgtatccttcttgcatgcaaacaacatcgttcatagggacctgaagcctgaaaacattttgcttgacgataacatgcagattaggctttccgattttggcttctcatgccacctggagccgggagagaaactcagggagctctgtggaacacccggatacttggccccggagatccttaagtgctccatggacgagacccaccccggatacggtaaggaggttgatttgtgggcttgcggtgtgattctgtttactctgcttgccggctctccaccgttctggcaccgccgccagattcttatgctgagaatgatcatggagggccagtatcaattctcttcacctgagtgggatgacagatctagcactgttaaggacttgatctccagactcctccaggtcgaccctgaggccaggctcacagccgagcaagcccttcaacaccccttcttcgagaggtgcgagggctcccagccttggaatctgacccccagacagagatttagggtcgccgtgtggacagtgcttgctgcaggtagagtggccctgagcacacaccgcgtgaggccgttgacaaagaacgccctgctgagagacccttatgctctgagatctgtccgccacctgattgacaactgtgcatttaggctctacggtcattgggttaagaagggcgagcaacagaacagggccgctctgtttcagcacagaccccccggaccatttcccatcatgggccctgaggaagaaggtgacagcgcagctattaccgaggacgaggctgtgttggtgctcggc

SEQ ID NO: 6396 - DNA, 1218 bp, Artificial Sequence
  derived and/or modified sequence
atgacacttgatgtaggtcccgaagacgaactccccgattgggccgccgccaaagaattttatcagaagtatgatcctaaggacgtgatcggaagaggggtgagcagcgttgtgcgtagatgtgttcatagagccacaggacatgagtttgctgtgaaaattatggaggtgaccgccgagagattgagtcctgagcaacttgaggaagtgcgcgaggcaacccgcagagagacccatattctgaggcaggtagcaggtcaccctcacataattaccctgattgatagttacgaatctagctcatttatgttcctggtttttgatctgatgaggaaaggcgagctgtttgactatctaaccgagaaagtggccttaagtgaaaaggaaacccgctctattatgcgctcattgctggaggctgtctccttcttgcatgctaataacattgttcatcgcgatttgaagcctgaaaacatcctcctggatgacaatatgcagattcggctttctgacttcgggttctcttgccacctcgaacctggtgaaaaattacgcgaactatgcgggacaccaggatatcttgcacccgagatactcaagtgttcgatggatgagacccatcctggttatggcaaggaggtggacctctgggcctgtggagtaatcctcttcacactgttggcaggtagtcccccgttttggcaccgcaggcagattctgatgcttagaatgatcatggaaggacagtatcaattctctagtcccgagtgggacgacagatcctccacagtgaaagatctgatctctcggttactgcaggtggatcccgaggctcggctaaccgcagaacaggctttacaacatccctttttcgaaagatgcgagggaagtcagccttggaatttgaccccgaggcagcgattcagggtggcggtctggacagtgctggctgcgggacgagtggcattgagtactcatagagtccgccccctgactaagaacgccctactccgggatccgtatgctctgagatctgtacggcatctgattgacaactgcgcctttaggctatacggccattgggtcaaaaaaggcgagcaacagaatagagctgcactgttccagcatagaccacccggcccatttcccattatgggcccggaggaggaaggcgattccgcagctattaccgaagacgaagcagtcctagttctgggc

SEQ ID NO: 6397 - DNA, 1218 bp, Artificial Sequence
  derived and/or modified sequence
atgacccttgatgtggggcctgaggatgagctgcctgattgggccgcggccaaggaattctaccagaagtacgatccgaaggatgtcatcggaagaggcgtcagctcggtcgtgagacgttgcgtccaccgcgccaccgggcacgaattcgcggtgaagattatggaagtgactgcggagcgtctgtcgccggaacaactcgaggaagtccgggaggcaaccaggagagaaacccatatcctgcggcaggtcgcaggtcacccgcacatcatcactctgatcgattcatacgaatcctcgtcgttcatgttcctcgtctttgatctcatgcgcaagggagagctgttcgactatctgaccgagaaggtcgcgctgtcggagaaggagactcggtcaatcatgcgatcgctcctggaggccgtctccttcctgcacgccaacaacatcgtgcaccgagatctcaaaccggagaatatcctgctggacgacaatatgcagatccgcttgtccgacttcgggtttagctgccaccttgaacctggcgagaagctcagggagctgtgcggtacccctggatacctcgctcctgaaatccttaaatgttcaatggatgagactcacccaggttacggaaaagaagtcgacctgtgggcatgtggagtgatcctgttcactctcttggcagggtcgccgccattttggcaccgcagacagatcctgatgctgcgcatgatcatggaggggcagtaccagttcagctccccagaatgggatgaccggagctcaaccgtcaaggatctgattagcaggctgctgcaggtggatccagaggcacgcctcactgccgagcaagcccttcagcatccgtttttcgaaagatgcgaaggctcgcagccgtggaatctcaccccacggcaaagattccgggtggcggtttggaccgtactggccgccggaagggtcgcattgagcacccatcgggtgcgcccgctgacgaaaaacgctctgttgcgcgatccttacgcgctgagatccgtccgacacctcatcgataattgcgctttccggctgtacgggcactgggtgaaaaagggagaacagcaaaaccgggcggcattgttccaacatcgcccccctggaccgttccctatcatgggtcctgaggaggaaggagacagcgcggccatcactgaggacgaagcagtgctggtgctcgga

SEQ ID NO: 6398 - DNA, 1218 bp, Artificial Sequence
  derived and/or modified sequence
atgacgcttgacgtgggtccagaagatgagcttccagattgggccgccgcgaaggagttttaccagaagtacgatccgaaggatgttatcggtcggggagtgtcctcggtggtgaggagatgcgtccatagagccactggacacgagtttgctgtgaagatcatggaagtgactgccgaacggctctcacccgaacagctcgaagaagtgcgcgaggcaacccgacgggaaactcacattctgcggcaggtcgcaggacacccgcatatcataacccttatcgactcgtacgaatcgtcctccttcatgttcctggtgttcgacttgatgcgcaagggagaactgttcgactacctgaccgaaaaagtggcgctctccgagaaggaaaccaggtcgatcatgcggtcgctcctggaagcggtgtctttcctgcacgccaacaatattgtgcaccgggacctcaagccggagaacattctgctggatgacaacatgcagatccgcttgtcggacttcggattctcatgccacttggagccaggggagaagctcagagaattgtgcggtaccccaggctacctggcaccagaaatcctgaaatgctccatggatgaaacccacccggggtacggcaaggaggtcgacctgtgggcttgtggagtgatcctcttcactctgctggccggaagcccaccattctggcaccggcggcagattctcatgctgcgcatgatcatggagggccagtaccaattttcatccccggagtgggatgatcggtctagcaccgtcaaggacctcatctcgcgattgttgcaagtggaccctgaagcacgtttgacggctgagcaggcgcttcaacacccgttttttgaaaggtgcgaaggaagccagccgtggaatctcactccgcggcaaagatttcgcgtggccgtgtggaccgtgcttgccgcggggcgggtggccctgtctactcaccgcgtgcgccccctgaccaaaaacgcactcctccgcgatccttacgccttgcggagcgtgcgccatctcatagataactgcgctttccgcctctatgggcactgggtgaagaagggagagcagcagaaccgggccgccctgttccagcaccgaccaccaggcccattccctatcatgggacctgaagaagaaggagactccgcggcgatcactgaggatgaggctgtactcgtcctcgga

SEQ ID NO: 6399 - DNA, 1218 bp, Artificial Sequence
  derived and/or modified sequence
atgaccctcgatgtggggccggaggatgaactcccagattgggccgcagctaaggagttctatcagaagtatgaccctaaagacgttatcgggaggggagtgagttcagtggtgagaaggtgcgtgcatagagcaacgggccatgaattcgctgtaaagatcatggaggtgactgctgaacggctgagccctgaacaactcgaagaagtaagagaggccacgcgccgggaaacccatatcctgcgtcaagtggctggacatccccacattatcacattaatcgatagttatgagagctcaagtttcatgtttctggtgtttgatctcatgcgcaaaggagaactgtttgactaccttacagaaaaagtcgctctgtctgagaaggaaacccggagcatcatgagatcattgctggaagcagtgtcatttctgcatgctaataatattgtgcaccgcgatcttaaacctgagaatatcctgttggatgataacatgcaaattcgcctgagtgattttggattcagttgccatttagagcccggcgagaagttgagggagttgtgcggcacccctggctatctggctcctgagatattgaaatgcagcatggatgagacccatccgggctacggtaaagaggtggacttgtgggcctgcggcgtcatccttttcacactgcttgccgggtccccacctttttggcacagaagacagattttaatgttgagaatgatcatggagggacaatatcagtttagtagcccagaatgggacgataggtcttcgaccgtgaaagatctcattagtcggctcttacaggtggatccagaggctcggctgaccgctgaacaggccctgcagcatccgtttttcgagcgctgcgaagggtctcagccgtggaaccttaccccacgccaacgctttagagtcgccgtgtggactgtccttgcagcaggcagagtggcactcagcacccatcgtgtgcgccctcttaccaaaaacgcactgctgcgggacccatacgctcttaggtccgtgaggcatctgatcgataattgcgcttttagactttacggacattgggttaagaagggcgaacaacagaatagggccgccttatttcagcatcgcccgccaggccctttcccaattatggggcctgaggaagagggtgacagcgcggcgatcacagaagacgaagcagtcctcgttctggga

SEQ ID NO: 6400 - DNA, 1218 bp, Artificial Sequence
  derived and/or modified sequence
atgaccctggatgtgggacctgaagacgagctacctgactgggctgccgcaaaggagttttatcagaagtatgatcctaaggacgtgatagggaggggtgtgtcaagcgttgtgagaagatgtgtgcacagggccactggccacgaatttgccgtaaagataatggaggtgaccgccgagcgcttgtctccagaacaactagaggaggttagagaagctacccgaagagaaacccatatactgcgacaggtggccgggcatccccatatcatcacactgattgactcctatgagagcagtagtttcatgttcctcgtcttcgatctgatgaggaaaggagagctgtttgactacctgactgagaaagtggccttaagcgaaaaggaaacaaggtcaatcatgcggagcctgctggaagcagtgtctttcctacacgctaacaatatagtgcaccgggatctgaaaccagagaacatcctgctggacgataatatgcagattaggctttctgactttggcttcagctgccatcttgaaccaggagaaaagctgagagaactgtgcggaacccccggatacctggcaccagagatattaaaatgctcaatggacgagacacatcctggctatgggaaggaagtggacctgtgggcttgcggcgtaatactattcaccctcctcgccggctctccacctttttggcaccgaagacagattctgatgctgcgaatgataatggaggggcagtaccagttctcttcccccgagtgggatgaccgcagtagcaccgtcaaagacctgattagtcgtttgcttcaagtggatcccgaagcaagattaacagccgagcaagctctccagcaccctttcttcgagcggtgcgagggcagccaaccatggaatttaaccccccggcaaaggtttagggtggcagtctggaccgttctcgctgctggaagagtagcactaagtacacaccgcgttcgtcctttgaccaagaacgccctgctgcgggatccctatgctctaaggtctgtaaggcacttgattgacaattgcgccttcaggctgtacgggcactgggtgaagaagggagagcagcaaaatagggccgccctgtttcagcacaggccacccggcccctttccaatcatgggccctgaggaggaaggggacagcgcagccatcaccgaggatgaggccgtgctggtgctgggc

SEQ ID NO: 6401 - DNA, 1218 bp, Artificial Sequence
  derived and/or modified sequence
atgaccctcgatgtgggaccggaggatgaactccctgactgggctgccgcgaaggaattctaccagaaatacgacccaaaggacgtgatcggacgcggagtgagctcggtggtccgccgatgcgtccaccgcgcaactggacatgagttcgcagtcaaaatcatggaagtgactgcggagcgcctgtcgcccgagcagctcgaagaggtgcgggaagcaaccaggcgggaaactcacattctgagacaggtggccgggcacccccacatcattaccctgatcgactcctacgaatcgtcctcctttatgttcctggtgttcgacctgatgcgtaagggagagctcttcgactacttgaccgagaaggtggcattgtcagagaaggaaactagatcgatcatgcgctccctgctggaagcagtgtcattcctgcacgcgaataacattgtgcacagggacctgaagccggaaaacatccttcttgacgataacatgcagatcaggctttcagatttcggattttcgtgccatctcgaaccgggcgagaagctgcgcgaactgtgcggtactccgggatacctggctccggagatcctcaagtgttccatggacgagacgcacccgggatacggaaaagaggtggatctctgggcatgcggcgttatactttttactctcctcgccggatcaccaccgttctggcatcggcgccagatccttatgctcagaatgattatggagggccagtatcaattcagttcgcctgaatgggacgacagatcctcgactgttaaggatcttatcagcaggctgctgcaggtggatccggaagctcgccttactgcagaacaggccctgcagcaccccttctttgaacgctgcgaggggagccagccgtggaacctgaccccacggcagagattccgggtggcagtgtggaccgtgctggccgcagggcgggtggcacttagcactcatcgggtgcggccgctgactaaaaacgcgctgctgagggacccatacgcactgaggtcagtaagacatctgatcgacaattgtgcatttcgcttgtacggccactgggtgaagaagggagaacagcaaaatcgagcggcgctcttccagcatagacctcctggaccattccctatcatggggccggaagaagaaggagactccgcagccattaccgaggacgaggcggtgctggtcttgggt

SEQ ID NO: 6402 - DNA, 1218 bp, Artificial Sequence
  derived and/or modified sequence
atgactttggacgttggaccagaagatgaattgcctgactgggctgctgctaaagaattttatcaaaaatatgatccaaaagatgttattggaagaggagtttcatctgtagtaagaagatgtgttcatagagctactggacatgaattcgctgttaaaattatggaagttacagcagaaagattgtctccagagcaattagaagaagttagagaagctacaagaagagaaacacatattcttcgacaagttgctggacatccacatattattactcttattgattcttatgaatcatctagttttatgtttcttgtttttgatttaatgcgtaaaggagaattatttgattatttaacagagaaagttgctttaagtgagaaagaaacaagatcaattatgcgttctttattggaagcagttagtttcctccatgcaaacaatattgtacatagagatttaaaaccagaaaatattttattggatgataatatgcaaattagattatcagatttcggattttcatgtcatcttgaaccaggtgaaaaattacgtgaattatgtggaacaccaggttatttggctcctgaaattcttaaatgtagtatggatgaaacacatccagggtatggaaaagaagttgatttgtgggcatgcggtgttattctttttactctcttagcaggttcgcctccattttggcatcgaagacaaattcttatgcttagaatgattatggaaggacaatatcagttcagttcaccagaatgggacgatagaagttcaactgttaaagatttaatatctaggcttttacaagttgaccctgaggctagattgactgctgaacaagcacttcaacaccctttttttgaaagatgtgaagggtcacaaccatggaatttaactccaagacaaagatttcgtgtagcagtctggactgtattagcagctggaagagttgcattatctacacatagagtaagaccattgactaaaaatgctcttcttagagatccttatgcattaagaagtgttagacatctaattgataattgtgcttttagattatatggtcattgggttaaaaaaggtgaacaacagaatcgtgcagctttatttcaacatcgaccaccaggaccatttcctattatgggaccagaagaagaaggagatagcgctgcaattactgaagatgaagctgtattagtcttgggt

SEQ ID NO: 6403 - DNA, 1218 bp, Artificial Sequence
  derived and/or modified sequence
atgacgctggatgtggggcccgaagatgaactgccagattgggcggctgccaaggagttttaccagaagtacgacccaaaggacgtcattggccgcggagtctcctccgtggtgaggaggtgtgtgcacagggctacgggccatgaatttgcggtcaaaatcatggaagttactgcagagcggctgagcccggagcagctcgaggaagtgagggaagccacccggcgcgaaactcatatcttgcgccaagtcgcgggacacccacatatcatcaccctgatcgactcctacgagtcgtcgtccttcatgttccttgtgttcgacctgatgcgaaaaggtgagctgttcgactatctcactgagaaagtagcattgtcagaaaaggaaacccgaagcatcatgcgctcgttgttggaggccgtctcgttcttgcatgcaaataacattgtgcatcgggatcttaagccggaaaacatcctgctggacgacaatatgcaaattcgtctttcggatttcggcttttcttgccacttggaaccaggggaaaagctcagagagctgtgcgggacgccgggatacctggcgcctgaaatcctgaagtgttctatggatgaaactcacccgggctacggtaaagaagtcgacctctgggcatgcggagtgatactgtttaccctgttggccggaagtccacctttttggcaccgcaggcaaatccttatgctgaggatgatcatggaaggtcagtaccagttctcatccccggagtgggacgatcgctcgtcgaccgttaaagacctgatctcgagactcctgcaagtggatccggaagcccggctcactgccgagcaggccctccagcacccgttcttcgaacgctgcgaggggtcgcagccttggaaccttaccccgagacaacgctttcgggtggcggtctggactgtgctggccgcgggaagggtggccctgtcgacccaccgggtccggcccttgaccaagaacgcactcctccgggacccttacgccctgaggtcggtgcgccacctgatcgataattgcgctttccgcctctacggtcattgggtgaagaagggagaacagcagaaccgggcggctctgttccagcacagaccaccgggaccattcccgatcatggggcccgaggaggagggagatagcgctgccataaccgaggacgaggccgtgctggtgctcggc

SEQ ID NO: 6404 - DNA, 1218 bp, Artificial Sequence
  derived and/or modified sequence
atgacgttggatgtggggcccgaggacgaattgcctgattgggcagcagccaaagaattctaccaaaaatacgacccaaaagatgttatcggtagaggggtctccagcgtagttcgccggtgtgtccatcgtgcaactggccacgagttcgcggtgaagattatggaagtcacagcagaaagactgagcccagagcaactagaagaggtcagggaggcaaccaggagagagacacacattcttaggcaggtcgctggacacccgcatattatcacgctgatagattcttatgagtcgagttccttcatgttcctcgtctttgacttgatgaggaaaggagaactcttcgactaccttactgaaaaggtcgccctttccgaaaaggaaacccgttctattatgaggtctttactggaagctgtgtcattccttcatgcaaacaatattgtgcacagagacttgaagcctgaaaacatattgcttgatgacaacatgcagatcaggctctctgattttggcttctcatgtcatttggaacctggggagaagctacgggaactgtgcggtacaccagggtacctggcccccgaaatcctgaaatgtagtatggacgagactcaccccggatatggaaaggaggtggacctgtgggcttgcggagtgatattatttactttgctggccggctctccgcccttctggcaccgcaggcagattctgatgctgcggatgattatggagggtcagtatcagttctcatctcccgagtgggatgaccgatcgagtaccgtaaaggacctgatcagtcgattactgcaggtggacccggaagcccgattaacagccgaacaggccctgcagcacccttttttcgagagatgcgaggggtcacagccctggaacctcacgccgcgccaacgattccgggtggcggtttggactgtactggcggccggtcgagtggcactgtctacacatcgggtgaggcctctcacaaaaaacgccctgttgagagacccttacgcgttgcgctcagtgcggcatttaatcgataattgtgctttccgcctctacgggcactgggtaaagaagggagagcagcagaaccgggctgcccttttccagcatcgtcctcctggcccttttccaattatgggcccggaggaagagggggactccgcggccataaccgaggatgaggccgtacttgtgctgggc

SEQ ID NO: 6405 - DNA, 1218 bp, Artificial Sequence
  derived and/or modified sequence
atgactcttgatgttggacctgaggacgagcttccagactgggcagcggccaaggaattctaccagaaatacgaccctaaggatgtgatcggacggggggtgtcctccgtggtccgacgatgcgtgcacagggccaccggacatgagttcgccgtgaagattatggaagtgactgcggagcgccttagcccagaacagcttgaggaagtgagggaagcgactagacgcgagactcacatcctcagacaggtcgcaggacacccacatatcattacgctgattgattcgtatgaatcgagctcttttatgttcctggtgtttgacctgatgcgcaaaggggagctcttcgattaccttaccgaaaaggttgctctgtctgagaaagaaaccagatcaatcatgcgatcgctgcttgaggcagtgtcctttctccacgctaataacatcgtccatcgggatctgaagcctgagaatattcttctggatgacaatatgcagattcggctcagcgattttggcttttcctgccacctggagccgggcgaaaagctccgggaactgtgtggtactcccggatacctcgctcctgagattctgaagtgttcaatggacgaaacgcatcccggttacggtaaggaagtggacctgtgggcatgtggcgtgattctcttcactctgttggcaggttcacctccattttggcatcgcagacaaatactcatgcttcgcatgataatggagggtcaataccagttcagcagccctgaatgggacgacaggagctcaaccgtgaaggatctcatctctcgccttctgcaagtggacccagaggcaaggcttacggccgaacaggcgctccagcacccttttttcgagcggtgtgaaggatcgcaaccttggaaccttaccccaagacaaaggtttagagtggcagtgtggaccgtccttgcagccggcagagtagcactgtctacccatcgggtccggccgctcactaagaacgcacttctcagggatccttacgcccttaggtccgtcaggcatttgattgataactgtgcatttcgcctttacggacattgggtcaagaaaggtgaacaacaaaaccgtgcagcactctttcaacatcggccccccggccctttccctattatgggcccggaagaagaaggcgattccgctgcaatcaccgaggatgaggcagtgctggtgctcggg

SEQ ID NO: 6406 - DNA, 1218 bp, Artificial Sequence
  derived and/or modified sequence
atgaccctcgacgtcggcccggaagatgagctgcctgactgggctgcagccaaggaattctatcaaaagtacgacccgaaagatgtcattgggcggggagtgtcatctgtggtccggcggtgcgtgcatcgcgcgaccggacatgaattcgccgtgaagatcatggaggttaccgctgagcgcctgtcaccagagcagctcgaggaagtgcgcgaagctacgagacgggaaacccacatcttgagacaagttgcgggtcatccacatatcattactctgatcgacagctacgagtccagctcgtttatgttcctcgtgttcgatctgatgcgcaagggggaactgttcgactacttgactgagaaagttgcactttcggagaaagagactagatccatcatgaggtcgctgctggaggcggtgtctttcctccacgcgaacaacatcgtgcaccgggacctcaagcctgaaaacatcctgctcgacgacaatatgcaaattcggctgtcggatttcggattttcctgtcacctggagcccggcgaaaagctgcgagagctgtgcggcaccccgggatacttggctccggagatcctgaagtgcagcatggatgaaacgcacccaggctatgggaaagaggtagatctgtgggcttgcggagtcatcctgttcaccctgcttgcaggaagccctcctttctggcaccgtcggcagatactgatgttgagaatgatcatggaaggacaataccagttctcatccccagagtgggacgaccggagctcgactgtgaaggacctcatctcacgccttctgcaggtggatccggaagctcgcttgactgccgaacaggccctgcagcatccgtttttcgaaagatgcgaggggagccagccctggaatctcactccacgccagagatttcgggtggcagtctggacggtgctggcagcaggaagagttgcgttgtcgacgcatagggtcaggccgcttaccaaaaacgccctgctccgggatccgtatgctctgcgctcagtgcgccatctgatcgacaactgtgctttccggctctacggccactgggtcaaaaagggagaacagcaaaacagggctgcgcttttccagcatcggccccccggaccattcccaataatgggaccggaagaggaaggggactcggcagccattaccgaagatgaggccgtgctggtgctggga

SEQ ID NO: 6407 - DNA, 1218 bp, Artificial Sequence
  derived and/or modified sequence
atgacactcgatgtcggccccgaagacgagctgcctgactgggcagcagctaaggagttctaccaaaagtatgatcccaaagacgtcatcggcaggggggtttcctccgtggttagaagatgtgtgcacagagctaccggccacgagtttgcagtaaagattatggaggttaccgccgaacggctgagcccagaacagctggaagaggtaagagaggcaacccgcagggagacccatatcttgaggcaggtggctgggcatccacacataatcacgttaatcgattcatatgagtcaagcagcttcatgttcctggtctttgacctcatgaggaaaggggagctttttgactacctcaccgagaaggtcgccttatcggagaaggagactcggagcattatgagatctctacttgaggctgtgtctttcctgcatgccaataatatagtgcacagggacctaaagccggagaacatcctgctcgacgataacatgcagatccgcctgagtgattttgggttttcctgtcaccttgagcccggagagaagttgcgcgaattgtgcgggacacccggctaccttgcaccagagatcctcaaatgtagcatggatgagacccatcccggttacggcaaggaggtcgacctgtgggcatgtggcgttatcctgttcaccctcctcgcagggtccccgcctttttggcataggcgccagatcctgatgttgaggatgataatggagggccagtatcagttttcctctccggagtgggatgatcgctcctctactgttaaggacctcattagccgccttcttcaggttgatccggaggctaggttaaccgcggagcaagcactgcaacaccccttcttcgaacgctgcgaagggtcacagccatggaacctcacgcctcgtcagagattccgcgtggcagtatggacagtcctggccgccggtcgggtcgccctgtctacccatcgagtgagaccccttacaaagaacgccctactgcgggatccttacgcactgcgaagtgttcgccacctgatcgacaactgcgcatttcggctgtacggacactgggtcaagaaaggcgagcagcagaatcgcgccgcacttttccaacatagacctcctggccctttcccaatcatgggacctgaggaagagggtgactctgcagctattacagaggacgaagcagtcctggtcctgggc

SEQ ID NO: 6408 - DNA, 1218 bp, Artificial Sequence
  derived and/or modified sequence
atgacgttagacgtggggccagaggatgaacttcccgactgggccgccgctaaggagttttaccaaaagtacgatcctaaggatgtgatcggaagaggtgtgtcatccgtagtgagacggtgtgtgcaccgtgctacaggacacgagttcgccgttaagatcatggaggtgacagctgaaagactctctcccgaacagctagaagaagtgcgggaggctactcggcgcgagacccatattctgcgacaagtggccggccacccacacataatcacgctcatcgactcttacgagagctcatccttcatgttcctggttttcgatctgatgaggaagggagaactattcgattacttaactgagaaggtggcgctgagcgagaaagagacaaggtctatcatgcgctccctattggaggcggtgtcctttttgcacgcgaacaacattgtgcaccgggatttgaaacccgagaatatcctgctagacgataatatgcagatccgtctgtcagactttgggttcagctgccacctggagcccggcgagaagctgagggagctatgtgggactcctgggtacttggccccagagatcctgaaatgttccatggacgagacacaccccggttatggtaaagaggtggatctgtgggcttgcggcgtgatcttgttcacactgctggccggatcacctcccttttggcatagacgtcagatcctgatgctgcgcatgatcatggaggggcagtaccaatttagcagtcctgaatgggacgaccgatctagcactgttaaagatttgatctcaagactgcttcaagtcgatccagaggcacggctgacagccgagcaggccctgcagcatccctttttcgagcgatgcgagggaagtcagccttggaacctgacccctagacagaggttcagagtggctgtttggaccgtccttgctgccgggcgagtagctctttccacacaccgtgtgcggcccctaacaaagaacgccctgctgagggacccttatgcactgaggtcagtccggcatctaatagacaactgcgcatttcgactctatgggcactgggtgaagaagggcgaacagcagaatcgggctgcactgttccagcacaggcccccgggaccatttcctataatgggtcccgaggaggagggagattccgccgcaattacagaagacgaagccgtgctcgtcctgggc

SEQ ID NO: 6409 - DNA, 1218 bp, Artificial Sequence
  derived and/or modified sequence
atgaccttagacgtaggtccagaggacgaactcccagactgggcggcagcgaaggagttctaccagaagtacgatccaaaggatgtgatcggccgcggtgtgagcagcgttgttcgccgttgtgtacaccgcgctactggtcatgagtttgctgtgaagattatggaggttaccgcggagcgcttgagccctgaacaactggaggaagtgagggaagcgacccgaagggagacccacatcttgcgacaagtggcaggtcaccctcatatcattaccctgattgattcgtatgaatcttcttccttcatgttcctggtgtttgatttgatgcgtaagggtgagctgtttgattatctgaccgagaaagtcgctcttagcgagaaggagacccgtagcatcatgcgcagtctgttagaagcggttagtttcctacatgccaataacattgtccaccgagatctgaaacctgaaaatatactgcttgacgacaacatgcagattcgactgtccgatttcggttttagctgtcatctggaaccaggtgaaaagctgcgagagttgtgcggcaccccgggctatcttgctccagaaatcctgaagtgttcaatggacgagacacacccaggatatggcaaggaggtggacctgtgggcgtgcggtgtcattctatttaccctgcttgcaggcagcccacccttttggcataggcgccagatcctcatgctgcgcatgatcatggaaggccaatatcagttcagcagcccagagtgggatgatagaagcagcaccgtgaaagatctgatttcccgcctgctccaggttgatccagaggcacgtttgaccgcggagcaagctctccagcacccgttttttgagagatgtgagggcagtcaaccttggaacctgacgccacgccagcgctttcgcgtggcagtttggactgttctggcagccggtcgcgtcgcgctgtcaacccatcgtgtgcgcccgctgactaaaaatgccctgctgcgcgacccctacgcgctgcgcagcgtccgtcacctcatcgacaactgcgccttccgcctgtacggacactgggttaaaaaaggcgagcaacagaatagagcggcattgttccaacatcgcccccctgggccgttccccatcatgggtcctgaggaggagggcgatagcgcagcgataactgaggacgaggcggttttggtgctgggc

SEQ ID NO: 6410 - DNA, 1218 bp, Artificial Sequence
  derived and/or modified sequence
atgaccctggacgtgggacctgaggatgaactgccggattgggctgcagcgaaggagttttaccagaagtacgatccgaaggacgtgattggccggggcgtttcgtccgttgtgagaaggtgcgtgcacagggcaactggtcatgaattcgccgtcaagatcatggaggtcaccgcagagcgcctgtcaccagaacaacttgaagaagtgcgcgaggctacgcggagagaaacccatatcctgagacaagtggccggtcacccgcatatcattactttgatcgattcgtacgagtcgtcgtcatttatgtttctggtgtttgatcttatgcgaaagggggaactgttcgactacttgaccgaaaaggtggccttgagcgaaaaggaaacccgttcaattatgcgttcgcttttggaagcagtcagcttccttcatgcaaataacattgtccaccgagatctgaagcccgaaaacattcttctggatgataacatgcagataagactttcagatttcggattttcgtgccacctcgaaccaggtgaaaagctgagagaactgtgtggcactcctggctacttggcgcccgagattcttaaatgctccatggatgaaactcatccaggatacggtaaggaagtggacctctgggcctgtggtgtgattcttttcactctgcttgcaggatccccgcctttttggcatcgccgccagatcctcatgctccggatgattatggaagggcagtaccaatttagctcgcccgaatgggatgatcgttccagcactgtcaaggaccttatttcccggctcctccaggtggatccagaagcacggcttactgcagaacaggcccttcaacatccgtttttcgagagatgcgaagggagccagccttggaacctcactccacgtcaacggtttcgagtggcagtttggactgtgctcgcagcaggcagagtcgcactgtccacccatcgcgtgcgaccgctcactaagaacgcactgctgcgggacccatacgcacttcggagcgtgcgccatcttattgacaactgtgccttcaggctttacggccactgggtgaagaagggagaacaacaaaatcgggcagcactgttccagcatagaccacccggtccttttccaatcatgggaccagaagaggagggtgatagcgcagcaattaccgaggacgaggcagtcttggttcttggt

SEQ ID NO: 6411 - DNA, 1218 bp, Artificial Sequence
  derived and/or modified sequence
atgactcttgacgtggggcctgaggacgaacttccagactgggcagcagcaaaagaattctaccaaaagtacgatcctaaggacgtcataggtcgaggtgtctcctcagtggtgcggcgatgcgtccacagagctactggacatgaattcgcagtgaagataatggaagtcaccgcagaaagattgtcgccagaacaactggaggaagttagagaggcaacgagaagggaaactcatatcctccggcaggtcgcagggcacccccatatcattaccctgatcgatagttacgagtcgtcgtcatttatgtttctcgtattcgacttgatgcggaagggagaacttttcgattacttgactgaaaaagtggcactttccgagaaggagactcgtagcatcatgcgaagcctgcttgaggcagtgtcctttctccacgccaacaatatcgtgcatagggacctgaagcctgagaatatcctgctggatgacaacatgcaaattcgactgtcagattttggattttcgtgtcatcttgaaccgggcgaaaaacttcgggaactgtgtgggacccctggatacttggctcctgaaattctgaagtgttcgatggatgagactcatcccggatacgggaaggaggtggatctgtgggcctgtggcgtgattctgtttacgctgcttgcgggcagcccaccattctggcatcgccggcagatcctcatgcttagaatgataatggagggtcaatatcaattttcatcccccgaatgggacgataggtcgtccactgtgaaagatctgataagcagactcctgcaggtggaccccgaagcacgactcactgcagaacaggcgctccagcatcctttctttgagcgatgcgaaggaagccagccttggaatctgaccccccgccaaaggtttagagtcgccgtgtggactgtcctggcagccggacgagtcgcactctcgacccaccgagtccgtcctctgacgaagaacgcccttctccgggatccatacgcactcaggtcggtgagacacttgattgataactgtgcgtttcggctctacggccattgggttaagaagggtgaacaacagaacagggcagcattgttccaacacaggccaccaggtccgttccctattatgggcccagaagaggaaggggattcggcagctattaccgaagatgaagctgtactggtgcttggg

SEQ ID NO: 6412 - DNA, 1218 bp, Artificial Sequence
  derived and/or modified sequence
atgaccctcgacgtgggaccggaggacgaactgccggattgggcagctgccaaggagttctaccagaagtacgatccaaaggatgtgatcggccggggagtgtcctcagtcgtccgcagatgcgtccatagagcgacgggacacgagttcgctgtgaaaatcatggaagttactgccgagagactgtccccggaacaacttgaggaggtccgggaagcgactcggagagagactcatattctgagacaggtggccggacatccacacattatcactctcatcgacagctacgaatcctcgtcgttcatgttcctggtgttcgacctgatgcggaagggggagctgttcgattacctgactgaaaaagtcgcactctcggagaaagaaacgagatcgattatgcggtcactccttgaagccgtgagcttcctccacgcgaacaatatcgtccatcgcgaccttaagccagaaaacatcctcctggatgacaatatgcagatccgcctctcagactttggattcagctgccacctcgagccgggagagaagctccgcgagctctgtggcaccccgggatacctggcgccagaaatcctcaagtgttccatggacgaaacccatccgggttatggcaaggaagtggacttgtgggcttgcggagtgatcctgttcactctgctggcgggatcgccaccgttttggcaccgccggcagatcctgatgcttaggatgatcatggaagggcagtaccagtttagctcgccagaatgggatgaccgtagcagtaccgtgaaggatctgatctcccgacttcttcaggtcgacccggaagcgcgcctgaccgctgaacaagccctccagcacccattcttcgagagatgcgaagggagccagccttggaatctgaccccccgccaacggttcagagtggcggtgtggacggtcctcgctgcggggcgggtggcgctgtccacccatcgggtccgcccccttaccaagaatgctctcctccgcgacccatacgccctgcggtcagtcaggcacctcatagataactgcgccttccggctttacggccactgggtgaaaaaaggcgagcagcagaatcgggcggccctctttcagcacagaccgcctggtccattcccgatcatgggaccagaggaagaaggagatagcgccgctattaccgaggatgaagctgtgctggtgctcggg

SEQ ID NO: 6413 - DNA, 1218 bp, Artificial Sequence
  derived and/or modified sequence
atgacactcgatgtcggtcccgaagacgaactcccggattgggctgccgctaaagaattttaccagaagtatgacccgaaagatgtgatcggacgaggcgtgagtagcgttgtgagaaggtgtgtgcatcgggctacggggcacgagtttgcggtgaagattatggaggtcacagccgaacgactgagtcccgagcaactcgaggaagtgagggaggctacaaggagggagactcacatattgcgacaggttgccggtcacccccatatcataactctcatcgattcctacgagtcctcatcattcatgtttctcgtgttcgaccttatgcgaaagggggagctgttcgattatcttactgagaaagtcgcactcagtgaaaaggagacccggtctatcatgaggtccctgctggaagctgtctcttttctccacgccaataatattgtccatcgagatctcaagcctgaaaatattctgcttgatgacaacatgcagataagactcagcgacttcggattctcatgtcacttggagccaggagagaagctgcgggaactgtgtggtacccccggttacctggccccggagattctgaagtgttccatggatgaaacccatccgggctatggtaaggaagtagacctctgggcttgtggtgtcattctctttacactcttggcagggtccccgcctttctggcatcgccgacaaatcctgatgttgaggatgatcatggagggccagtaccagttctctagtcccgagtgggacgaccgcagtagcacggtgaaagacctgatctcacggttgctgcaggtggatcccgaagcccgcctcacagccgagcaggccctccagcacccgttcttcgagcggtgcgagggatcccagccttggaatcttactccccgacagagattccgcgtagccgtttggacagtgcttgccgccggcagggtcgcactttcaacacaccgcgtgcgccccctgactaagaatgccctgttgcgggatccttatgcattgcgcagtgtccggcaccttatagataattgtgctttcaggttgtacggacactgggtcaagaagggtgaacagcagaaccgggctgcactgttccagcataggcccccagggcccttccctatcatgggccctgaggaagaaggcgattccgcggccattactgaggacgaggcggtgctggtcctggga

SEQ ID NO: 6414 - DNA, 1218 bp, Artificial Sequence
  derived and/or modified sequence
atgacgctagatgtaggtccggaagatgaactaccggattgggcggcggcgaaagaattttatcaaaaatatgatccgaaagatgtaataggtcgtggtgtatcgtcggtagtacgacgatgtgttcatcgtgcgacgggtcatgaatttgcggttaaaataatggaagtaacggcggaacgtctatcgccggaacaattagaagaagttcgtgaagcgacgcgtcgtgaaacgcatatattacgacaagttgcgggtcatccgcatataataacgctaatagattcgtatgaatcgtcgtcgtttatgtttttagtatttgatttaatgcgtaaaggtgaattatttgattatctaacggaaaaagtagcgttatcggaaaaagaaacgcgatcgataatgcgttcgttactagaagcggtatcgtttttacatgcgaataatatagtacatcgagatctaaaaccggaaaatatactattagatgataatatgcaaatacgattatcggattttggtttttcgtgtcatctagaaccgggtgaaaaactacgtgaattatgtggtacgccgggttatttagcgccggaaatattaaaatgttcgatggatgaaacgcatccgggttatggtaaagaagtagatttatgggcgtgtggtgtaatattatttacgttattagcgggttcgccgccgttttggcatcgtcgtcaaatactaatgttacgaatgataatggaaggtcaatatcaattttcgtcgccggaatgggatgatcgatcgtcgacggttaaagatctaatatcgcgattattacaagttgatccggaagcgcgtttaacggcggaacaagcgttacaacatccgttttttgaacgatgtgaaggttcgcaaccgtggaatttaacgccgcgtcaacgatttcgagttgcggtttggacggtactagcggcgggtcgagtagcgttatcgacgcatcgagtacgtccgttaacgaaaaatgcgttattacgagatccgtatgcgctacgttcggtacgtcatttaatagataattgtgcgtttcgtttatatggtcattgggttaaaaaaggtgaacaacaaaatcgtgcggcgctatttcaacatcgtccgccgggtccgtttccgataatgggtccggaagaagaaggtgattcggcggcgataacggaagatgaagcggtattagtattaggt

SEQ ID NO: 6415 - DNA, 1218 bp, Artificial Sequence
  derived and/or modified sequence
atgactctggacgtgggacctgaagatgagctccctgactgggcagcagccaaagaattctaccaaaagtatgatccaaaggatgtgattggtcgcggtgtgtcgtccgtggtgcgtcgctgtgtgcacagagcaaccgggcatgagttcgctgttaagattatggaagtcaccgcagagcgcctgtccccagaacagttggaagaggtgcgcgaagctacccgcagagagacgcacatcctccgccaggtggccggacatccccatatcattaccctgatagattcatacgagtcatcatcctttatgttcctggtgttcgatctgatgcggaagggtgagctgtttgattacctgaccgaaaaagtggcgctgtccgaaaaagaaactcgcagcattatgagatcgttgctcgaagcagtgtcgttcttgcatgccaacaatatcgtgcatcgagatttgaagcctgagaacattctgcttgatgacaatatgcaaattcgactttccgatttcggtttctcgtgtcatctcgaaccgggggaaaagctcagggaactctgcggcacccctggataccttgctcctgagattctgaaatgttcgatggacgagactcatccaggctacgggaaagaggtggatctgtgggcctgtggagtgattctttttaccctgcttgcaggaagcccaccattctggcatcggcgccaaatccttatgctcagaatgatcatggaaggtcagtaccagtttagctcgccagagtgggacgatagatcttccactgtgaaggaccttatctcccgccttcttcaagttgatcctgaagcgaggcttactgctgagcaagccctgcaacaccctttctttgagaggtgcgagggatcccaaccctggaacctcaccccacgtcagagatttcgggtggcagtgtggaccgtgctcgcagcaggaagggtggcgctcagcactcatcgggtccgccccctgaccaagaatgcactccttcgggatccatacgctcttagatcagtgcgccacctgatcgataattgtgcctttcgcctgtacggacattgggtaaagaagggagagcagcagaatagggcggcgcttttccaacatagaccaccaggaccatttcctatcatgggccctgaagaggaaggagattccgcagctattaccgaagatgaagcagtgcttgtcctcggg

SEQ ID NO: 6416 - DNA, 1218 bp, Artificial Sequence
  derived and/or modified sequence
atgacactggacgttggcccagaggatgaactgccggactgggccgcagccaaagaattttatcagaagtacgacccgaaagatgttattggccgtggggttagttcggtagtgcgccgctgtgtacatagggctactggacacgaattcgccgttaagatcatggaggtcaccgccgagcggttatcacctgaacagctggaggaggttagagaagccactagaagggagactcacatccttaggcaagtggccggccatccgcatattatcaccctgatcgactcctacgagtcaagctccttcatgttcctggtgtttgatctgatgagaaagggagagcttttcgactacctgactgagaaggtggcactgagtgagaaagagacccgatccattatgcgctcactcctggaggcggtgtctttcctccacgcgaacaatattgtgcacagggacttgaagcctgagaacatcttactggacgacaatatgcagattagactgagcgatttcggcttctcctgccatctggaaccgggagaaaagttacgagagctgtgcggaactcctggatacctcgcccctgaaatccttaagtgtagtatggatgagactcatccaggttacggtaaagaggtggacctgtgggcgtgcggcgtcatccttttcaccttgctcgccgggtcacctcccttttggcatcgccgacagattctgatgctgcggatgatcatggaaggccagtatcagttctcctctccggagtgggatgatcggtctagcacggttaaagacttgatttcaaggctgctgcaggtagatccagaagccagactcactgccgagcaggcactgcagcacccattctttgagcgctgtgaggggtcgcagccctggaacctcactcccagacagcggttccgtgtagccgtctggaccgttctagcggcaggcagagtggcattgtctacgcatagagtgcggcccctcacaaagaacgctctgttgcgggatccctatgctctgcgcagtgtccggcatttaatcgataactgcgcctttcggttgtacggccattgggtgaagaaaggcgaacagcagaaccgggctgcactgttccagcatagacccccaggcccattccctatcatgggcccggaggaggagggagacagcgcagctatcaccgaggatgaggcggttcttgttttggga

SEQ ID NO: 6417 - DNA, 1218 bp, Artificial Sequence
  derived and/or modified sequence
atgactctggacgttggtcctgaggacgaactgccagattgggccgccgctaaggagttctaccagaaatatgaccctaaggacgttattggacgcggcgtgtcttctgttgtccggaggtgcgttcatcgcgccactggtcatgagtttgcagtcaagatcatggaagtaactgccgagaggctgagcccagagcaattggaggaggtcagggaagccaccaggagagagacccacatcctgcgacaagtcgccgggcacccccacattatcactcttatcgactcatacgaatcttcttccttcatgtttctcgtcttcgatcttatgcggaagggcgagctgttcgattacctcaccgagaaagtggctttgtccgagaaagagacaagaagcataatgcgaagtcttctggaggccgtgtctttcttgcacgccaacaacattgtacacagagacctgaaaccagagaatatcctgctcgacgataacatgcagatccgcctgagcgacttcggattttcatgtcatctcgaacctggagagaagctgagagagctttgtggcaccccaggatatctcgcaccagaaatcctgaaatgttctatggatgagacccatcctggctacggcaaagaagtggacctgtgggcctgcggggtgatcctttttaccctcctggccggctctccacctttttggcatcggcgacagatattgatgctccgaatgataatggaagggcaatatcagttctctagccctgaatgggatgatcgctcttctactgtgaaggatctgattagcaggcttcttcaggttgatccagaagctagactgacggcagagcaagccctgcaacacccattcttcgaaaggtgcgagggctcccagccctggaatctgacgcccaggcagagattcagggtggcggtgtggacagtgcttgcagctggccgagtcgctttgagcacgcaccgagtacgccctcttactaagaatgccctgctgagggatccatacgcgctgcgctcagtcaggcatcttatcgacaattgcgccttccgcctgtacggccattgggtgaaaaaaggagagcaacagaacagggccgcactttttcagcatcgcccacctgggccattccctattatggggcctgaagaggaaggcgatagcgcagctatcactgaggacgaggcagtgctggtgttgggc

SEQ ID NO: 6418 - DNA, 1218 bp, Artificial Sequence
  derived and/or modified sequence
atgactctggatgtaggcccagaggacgagctgccagattgggccgcggccaaggaattctatcagaagtatgaccctaaggacgtgatcggacggggagtgagctcagtggtgcgcagatgcgtgcatagagccaccggtcatgaattcgcagtgaagatcatggaggtgactgcggaacgactgtcgccagaacaactcgaagaggtgcgggaagccacccgccgggagacgcatattctgaggcaagtggccggacacccgcacattatcaccctgatcgattcttacgagtcgtcctcgttcatgtttctggtgttcgacctgatgcggaagggcgagttgtttgactacctgacggaaaaggtggctctgtcggaaaaggagactcggtcgatcatgcgctcgctgctcgaagcggtgtcgttcctccacgccaacaacatcgtgcatcgcgacctgaagccagaaaacatcctgctcgacgataacatgcaaatcagactgagcgacttcggcttcagctgtcatctcgaaccgggggagaagctgagggagctctgcggaacccctggatacctggcgccggaaatcttgaaatgctccatggatgagactcacccggggtacggcaaagaggtcgatttgtgggcttgcggagtgatcctctttactctgcttgcgggctcgcctccgttttggcatcgccgccaaatcctgatgctcagaatgatcatggaaggacaataccagttcagctcaccggaatgggacgacaggtcatccaccgtcaaggacctgatctcccggctgctgcaggtggacccggaggcacggctgactgccgaacaggccctccagcatccattcttcgagcggtgtgagggatcccagccatggaatctcactcctcgacagagattccgggtcgccgtgtggacggtgctcgcagcgggacgcgtggccctgtccactcatcgggtgcggccactcaccaagaacgctcttctccgggacccctacgcactccgctccgtgcgccacctcatcgataattgtgcctttcgcctttacggacactgggtgaagaagggcgaacagcagaacagggccgcgctgtttcaacaccggccgccgggaccctttccgatcatgggacctgaagaggagggagatagcgcggccatcactgaagatgaggccgtgctcgtgctggga

SEQ ID NO: 6419 - DNA, 1218 bp, Artificial Sequence
  derived and/or modified sequence
atgacccttgacgtcggaccagaggacgagctgcccgattgggccgctgctaaggagttctaccagaaatacgacccaaaggacgtgatcggccggggagtgtcctctgttgtgcgccggtgcgtccaccgggccaccggacacgagttcgcggtcaagattatggaggtcaccgcagaacgcctgagcccggaacagctggaggaggtccgggaagcgaccaggcgcgagactcacatccttcggcaggtcgcgggacacccacacatcatcactctcatcgactcgtatgaatcatcgtcgttcatgtttctcgtgtttgaccttatgcggaagggtgagcttttcgactacttgactgaaaaggtagccctctcggaaaaggagacgaggtccattatgcgtagcttgctcgaagccgtgtccttcctgcacgcaaataacatcgtgcaccgggacctgaagccggagaacatcctgctggatgacaacatgcagattcgtttgagcgacttcggattctcgtgccatctggagccgggcgaaaagctgcgggaactgtgcggcactcctggatacctggcgccagaaatccttaagtgttcgatggacgagacgcatcccggctacggcaaggaggtggacctgtgggcctgcggtgttattctcttcactcttttggcaggatcgccgccgttttggcataggcgccaaatcctgatgctccggatgatcatggaagggcagtatcaattttcgtcccctgagtgggatgataggtcgtctactgtcaaggatctgatctcgagactgctgcaggttgacccggaagcgcgcctgactgccgagcaagctcttcagcaccctttcttcgaacggtgtgaagggagccagccctggaacctcaccccacgccagagattcagagtcgccgtgtggactgtgctggccgcaggacgcgtggctctctccacccaccgcgtgcggccattgactaagaatgccctgctgcgcgacccttacgccctgcgctccgtccgccatttgatcgacaactgtgcattccgcctgtacggacactgggtgaaaaaaggagaacagcagaatagggccgcactcttccagcatcgccccccaggaccatttccgataatgggcccggaggaggaaggagattcggcggccatcaccgaggacgaggcggtgttggttctcgga

SEQ ID NO: 6420 - DNA, 1218 bp, Artificial Sequence
  derived and/or modified sequence
atgaccttggatgtcggtccagaagacgagctgccagattgggccgccgctaaggagttctatcagaagtatgatcccaaagacgtgatcggacggggggtcagcagtgtcgtaagacgctgtgtgcacagagcgactggacatgagtttgccgtgaagatcatggaggtgaccgccgaaaggctgtctcccgagcagctagaggaagtcagggaagcaacgagaagagagacccacattctaagacaggtcgccgggcacccccacattattacgctgatcgacagttatgaaagctcctcttttatgtttttggtgttcgatttgatgaggaagggcgagctatttgactatctgaccgagaaagtcgccctgagcgaaaaagaaacaaggagcatcatgcgctcattactggaggctgtgagtttcctgcacgccaataatatagtgcatagggatttaaaaccagaaaacattctgctggacgacaacatgcagatccgtctctctgactttgggttcagctgccacctcgaacctggtgaaaagctcagggaactctgcggaacccccggatacctggcccctgagatcctgaaatgctccatggatgagacgcacccgggctacggaaaggaggtcgacctgtgggcttgtggcgttatcctgttcaccctgttggccggctcgccacccttttggcatagacggcagattcttatgctccgaatgatcatggaggggcagtatcaattttcctctccagagtgggacgatcgatcctcgacggtgaaagatctgatcagtcgcctgttacaggtggatcccgaagccagattaacggccgagcaggcgctccagcatccttttttcgagcggtgtgaaggctcccagccttggaatttgacccctcgccagagattccgcgtggccgtgtggaccgtgttggccgccgggagggttgctttgagcacccacagggttagaccgctaaccaagaatgctctgctgagagacccttacgccttgcgttccgtcaggcaccttattgacaattgcgcatttcggctctatggacactgggtgaagaaaggggagcaacagaaccgggctgctctattccagcacaggccaccgggcccgtttcctattatgggacctgaggaggagggcgactccgcagctatcactgaggacgaggccgttctggtgctaggc

SEQ ID NO: 6421 - DNA, 1218 bp, Artificial Sequence
  derived and/or modified sequence
atgacattggacgtgggccccgaggacgagctacctgactgggcagctgccaaggaattttaccagaaatatgatcccaaggacgtgatagggaggggcgtaagttccgtggtcagacgctgtgtacacagagctactgggcacgagttcgccgtgaagatcatggaggtcaccgcagagaggctgtctcccgagcagctagaggaggtgagggaggctacacgaagggaaacacatatcttgaggcaggttgctgggcacccccatattatcactctgatcgatagttatgaatcctcttcattcatgttccttgtgttcgacctaatgcgaaagggagaattgttcgactacctcactgaaaaggtcgcactttctgaaaaggaaactagatccatcatgcgatctctgctggaggccgtgagctttcttcatgccaacaatatcgtccatcgagatctcaagccagagaatatcctgctcgatgacaacatgcaaatcaggttgagcgattttggattctcctgccatctggagcccggtgaaaagctgagggagttgtgtggtaccccgggctatctggcacctgaaatcttgaaatgttctatggatgaaacacatccaggttacggcaaggaagtggacctctgggcttgcggcgttatcctctttaccctgctcgccggctcaccacccttttggcaccggcgacagatcctgatgttgcgaatgatcatggagggtcagtatcagttctcttcccccgaatgggatgacaggtcaagcactgtcaaagacctgatttcccggctcctgcaggtcgaccctgaagcgagactaacagccgagcaagcccttcagcacccattcttcgaaagatgcgagggttctcaaccctggaatctaaccccgcggcaacgttttagagtcgcagtgtggactgtcctcgccgccgggagggtggcactgagtactcacagagtaaggccactgactaagaatgcgctgctgcgagatccctacgccctcaggagcgtccgacatctcatcgataattgtgcgttccggttgtacggccactgggttaagaagggcgaacagcagaatcgagctgccctttttcagcaccgacctccagggccattccctatcatggggccagaagaggagggggactcggcggccatcacggaagacgaggcggtgcttgtcctggga

SEQ ID NO: 6422 - DNA, 1218 bp, Artificial Sequence
  derived and/or modified sequence
atgacactcgatgtcggacccgaggatgaacttcctgattgggcagcggctaaagaattctatcagaagtacgatcctaaagatgtaattggacggggagtcagtagtgttgtaaggaggtgtgtgcaccgggccactggacacgaatttgccgtgaaaatcatggaagtcactgccgaaagactgtcccccgagcagctcgaggaagtacgagaagcaactagaagggaaacacatatactgaggcaggtagccggacatccgcacataataacgcttatagactcctatgaatcctcctcatttatgttccttgtgtttgatcttatgcggaaaggggaactgtttgactatctgacagagaaagtcgcattgtccgaaaaagaaactcgaagtataatgagatctctcctcgaagcagtgagttttcttcacgcaaacaatattgtgcatagggatctcaaaccagaaaacatcctcctggatgataatatgcagattaggctttctgacttcgggttttcttgccacctggaaccaggagaaaaactgcgggaactttgtggaacacctgggtacctcgcgccagaaatcctcaaatgttccatggatgaaacacatcccgggtatggaaaggaagtagacctatgggcctgtggggtaatcctcttcacactgctggccgggtctccaccgttttggcaccgcagacagatcctaatgctgaggatgataatggaagggcagtatcagttttcctccccagaatgggatgatcgctcctcaactgtcaaggaccttatctccaggctcctacaggttgaccccgaagcacggctaacagctgaacaggctttacagcatccattttttgaaagatgtgaagggtcgcagccttggaatcttacaccaaggcagcggttccgggttgccgtttggactgtcctggccgccggaagagtggccctttctacacacagagtaagaccccttactaaaaatgctctcctccgggacccttacgccctgaggtctgttaggcacctcatagacaactgcgcttttaggctctatggacactgggtaaagaaaggagaacagcaaaatagagcagctctatttcagcatagacctcccgggccattcccaatcatgggacccgaagaggaaggagattcggcggccatcacagaagatgaggctgtgttagttcttgga

SEQ ID NO: 6423 - DNA, 1218 bp, Artificial Sequence
  derived and/or modified sequence
atgaccctcgacgtcggacctgaagatgaactgcccgactgggccgctgctaaggagttctatcaaaagtacgatccgaaggatgtgatcggtcgcggagtaagctccgtcgtgcggcgatgcgtgcatcgcgctaccggtcacgagttcgcggtcaagataatggaggtcaccgccgagcgtctctcccccgagcagttggaggaagttcgcgaggctacgcgtcgcgagacccacattctacgccaagtggctgggcacccccacatcattacccttattgatagctacgaaagtagcagcttcatgttcttggtcttcgacctgatgaggaagggcgagctgttcgactacttgaccgagaaggttgcgctctcggaaaaggagacccgctcaatcatgcggtccttgttggaggctgtttcgttcctgcatgctaacaatatagtccatagagacctgaagccggaaaacattcttttagacgacaacatgcaaatccgcctgtccgacttcggattcagttgtcaccttgagcctggagaaaagctccgcgagctttgtggcacgccaggctacctcgctcctgagatccttaagtgctccatggatgaaactcaccccggttacggaaaggaagtcgacctgtgggcctgtggtgtgatcctcttcacccttttagctggctcgcctccgttctggcaccgcagacagattctcatgctgcgtatgatcatggaaggccaataccagttctcgtcaccagagtgggacgaccgcagttccacagtcaaggacctaatttctcgcctgcttcaggtggaccccgaggcgcgtcttacagcggaacaggccctccagcaccctttcttcgagcggtgtgagggatcacagccgtggaatctcacccctcggcagcggttccgagttgctgtttggacggtcctcgcggccggtcgcgtggccttgtcaacccaccgggtccgccccttgactaagaatgctttgcttcgggacccctacgctcttaggagcgtccgccatctcatcgacaactgcgcgtttcgcctgtacggacactgggtgaaaaagggcgagcaacagaaccgtgccgcgttgttccagcaccgtccgcccggtcccttccctatcatgggcccggaagaggagggagactccgccgccattaccgaggacgaggctgttctggtccttggc

SEQ ID NO: 6424 - DNA, 1218 bp, Artificial Sequence
  derived and/or modified sequence
atgaccctggatgtggggcctgaggacgagcttcctgattgggctgcagctaaggaattttaccagaaatacgaccctaaggatgttatagggcggggcgtgtccagcgtagtccggcgctgcgtccacagagctactggccatgagttcgccgttaagatcatggaagtgactgcggagcgcctgagccccgaacagctggaagaggtcagggaagcaacaaggcgcgaaacccatatcttgaggcaggttgcaggacaccctcatatcataaccttgattgactcctacgaatcttcatctttcatgtttcttgtattcgaccttatgcggaaaggagagctgttcgattatttgaccgagaaggtcgccttgtctgagaaagaaacgcgctctataatgcgaagcctgctggaggccgtgtcattcctgcatgctaacaatatcgtgcacagagacctgaaacctgaaaacatccttctggatgataacatgcagatccgattgagtgacttcggattttcttgccacctggagcccggcgaaaagctgagggagctttgcggcactccggggtacctggcgcccgaaatcctcaaatgcagcatggacgaaacacatcctggctacgggaaggaggtggacctttgggcttgtggagttatactgtttaccttgctggccgggtcccctccgttctggcatcgacgccagattctgatgctcagaatgattatggagggccaataccaattcagctcccccgagtgggacgaccgctccagcaccgttaaagaccttataagcagattgctgcaggtagaccccgaagcccgactcacagcagaacaagctctgcagcatccattttttgagaggtgtgagggatcacagccatggaatctgactccaaggcagaggtttcgcgtagctgtgtggactgttctggctgccggaagggtggcactgtctactcatcgcgtgcgcccgctgaccaagaacgccctgctgcgggacccttacgccctgcggagcgtccgacatttgattgataactgcgccttccggctttatggacactgggtgaagaagggggaacagcagaaccgcgcggctttgtttcagcacagaccacctggacctttccctataatggggcccgaggaagagggggactccgcagcaattacggaggacgaggctgtcctggtgctcgga

SEQ ID NO: 6425 - DNA, 1218 bp, Artificial Sequence
  derived and/or modified sequence
atgaccctcgacgtcggtccagaggatgaactgcctgactgggcagctgccaaggaattctatcaaaagtatgacccaaaggatgtgataggaaggggtgtctcttccgttgtgagaaggtgcgtgcatagggctactggccatgaatttgccgtgaagataatggaagtaaccgccgagagattaagtcctgagcagctggaagaggtccgggaggccacaagacgcgaaacccatattctcagacaagtcgcaggccacccacatattatcaccctaatagactcctatgagagctccagcttcatgttccttgttttcgacctgatgagaaagggggagttgttcgattatctcacagagaaagtggcgctgtctgagaaggagacaagatcaattatgaggagcctgctcgaggcagtgtccttcttgcatgctaataacatcgtccatagagacctgaagcccgagaatatcctgttggatgacaacatgcagatcaggctaagtgattttggcttttcatgccatttggagcctggcgagaagctcagagagctatgcggcacacctggttatctggcacccgaaatcctcaagtgctctatggatgaaacccatcccggctatgggaaagaggtcgatttatgggcttgcggggttatcctctttacgctgttggcaggctcacctcccttttggcaccgccggcagatcctcatgctgcgaatgattatggaggggcagtaccagttcagctcccctgaatgggacgacaggagctcaaccgttaaagacctgataagtaggcttcttcaggtggatccagaggccaggttgactgccgagcaggctctgcagcaccctttttttgaaaggtgcgagggttcccagccatggaatttaacaccgcgtcagcgctttagagtggctgtgtggaccgtgcttgccgctggcagggtggcattgagcacccatagagtccgccccctgacaaagaacgctctgttgagggatccctacgccttgagatccgtgcgccaccttattgataattgtgcgttcagactgtacggacattgggtgaagaaaggggagcaacaaaatagagccgcactgtttcagcaccgacccccagggcccttccctatcatggggccagaggaggaaggggatagtgctgcaatcacagaggacgaagctgtccttgtgctgggt

SEQ ID NO: 6426 - DNA, 1218 bp, Artificial Sequence
  derived and/or modified sequence
atgactctcgacgttggcccagaagacgagcttccagattgggccgctgcgaaggaattctatcagaaatacgatccaaaggacgttattggacgtggtgtgtcaagtgtggttcgcaggtgcgtccaccgtgccaccggacatgagtttgcggtcaagataatggaagtgacggccgaacggctgtcccccgaacagctcgaagaagtcagagaagccactaggcgagagacacacatccttcgtcaggtagctggccatccgcatatcatcacactaattgattcatatgaatctagcagtttcatgttcctggtgtttgatctgatgcggaagggtgaactgtttgactatctcaccgagaaggttgcgctctcggaaaaagagacgagatctattatgcgctctctgctggaggccgtttcctttctgcatgccaacaacatagtgcatagggacctcaagcccgaaaatatactcctggatgataacatgcagattagactgagtgattttggcttcagctgccatctggagccgggtgaaaaactgagagagctctgtgggacacccggctatctagcccccgagatactgaagtgttccatggatgaaacacacccaggctatggaaaggaagttgacctgtgggcctgcggtgtgatcctgttcaccttactcgccgggtcccctccattttggcaccgcaggcagattctgatgttgcgtatgataatggaaggtcagtatcaattttccagtcctgagtgggacgacaggtcaagcacggtgaaagatctcatcagccgcttgttgcaagtcgatcctgaagccaggcttaccgccgaacaggctttacagcacccctttttcgagcgctgtgagggatcccagccgtggaatttgacacccaggcagagatttcgtgtggccgtgtggactgtgttagccgccgggagagtagccctatctacgcatagggtgcggcctctgaccaaaaacgccctcttaagggacccgtatgcactccggagtgtacggcaccttatagacaactgcgcttttcggctgtacgggcactgggttaaaaaaggcgagcagcaaaaccgagcagccctgttccagcatcgccctcccggacctttccctatcatgggaccggaggaggaaggcgactccgcggccattactgaagacgaggcggtgctcgtgctgggg

SEQ ID NO: 6427 - DNA, 1218 bp, Artificial Sequence
  derived and/or modified sequence
atgaccctcgacgtcggccctgaagacgagcttccagattgggccgccgccaaggaattttatcagaaatacgacccgaaggacgttatcggacgtggagtttcaagcgtggtccgtagatgcgtccatcgtgccaccggacatgaattcgcagtaaaaatcatggaggtgaccgcagagagactatcacctgaacaattggaagaagtgagggaggccaccaggcgagaaacccatatcctgcgtcaggtcgcaggccaccctcacatcatcacactcatagacagctacgaatcttctagttttatgtttctggtgtttgacttgatgaggaagggtgagttgtttgattatcttaccgagaaagtcgccctgtccgagaaggagacacgctcaatcatgcgctcattgctggaggctgtatcattcctgcacgcaaacaacattgtgcatcgagaccttaaacctgaaaatattctgctggacgataacatgcagatccggctgagcgatttcgggttcagctgtcacctggagccaggagaaaaactgcgcgaactctgcggcacaccaggatacctggctcctgagatccttaaatgcagcatggacgaaacccaccctggctacgggaaggaggtggacctgtgggcatgcggagtgatcctgtttactcttctagcggggagcccccctttttggcacagaaggcagattctgatgctgcgcatgatcatggaaggccaatatcaattcagtagccccgaatgggacgatcggtctagcaccgtgaaggacctgattagcaggttgctgcaagtcgacccggaagctcgactgaccgccgagcaagctttacaacatccatttttcgagcggtgtgagggatcccagccgtggaacttgaccccacgccagagatttagggtcgccgtatggaccgtgctggctgccggccgtgtcgcattatctacccatcgggtcagaccactgacgaaaaacgcactcctgagggatccctacgccttaaggagcgtcagacaccttatcgacaactgtgcctttcgactctacggacattgggtgaagaagggcgaacagcagaaccgggcggctcttttccagcatcgccctccaggcccatttcctatcatgggccccgaagaagaaggagattcagccgctatcacagaagatgaagccgtcctcgtccttggc

SEQ ID NO: 6428 - DNA, 1218 bp, Artificial Sequence
  derived and/or modified sequence
atgactcttgacgttggccccgaggatgagctgcctgactgggcagccgccaaagagttctaccagaagtatgatcccaaggacgtgataggccggggtgtgtcgtcggtggtacgccgatgcgtccatcgagctacgggtcatgagtttgccgtgaagattatggaagtgaccgctgagcgactcagtcctgagcagctggaggaggttcgtgaagcaacgcgacgcgagacccacatcctgcgccaagttgcgggacaccctcacattataaccctgatcgattcttatgagtcgtccagtttcatgttccttgtgtttgaccttatgcgcaaaggtgaactgttcgactatctcaccgaaaaggtcgcccttagtgagaaggagactcggtccatcatgcgttccctgttggaagcggtgagctttctacatgcgaataatatagtgcaccgtgacctgaagcctgagaatattctgcttgatgacaacatgcaaatcagactgagtgactttggcttttcctgccatctcgagcccggcgagaagcttagggagctgtgcggtactccggggtatctggccccagagatcctgaagtgctcgatggatgagactcaccccggatacggaaaagaggtcgatctgtgggcctgtggagtgattctctttaccctgctggcgggatccccaccgttttggcaccggcgacagattctgatgctgaggatgataatggaaggacaatatcagttttcgagccctgagtgggatgatagatcgtccactgtgaaggacctgattagccggcttctacaggtcgacccagaggcccgcctgaccgcagagcaggccctccagcatcccttctttgaacgctgcgagggctctcaaccctggaacctaacgccccgccagcggtttagggtggcggtttggacagtgttggctgccggccgcgtagcgcttagcacccaccgtgtccgaccactgacaaaaaatgccctactacgggatccatatgcgctgcgatcagtgcgtcatctgatcgataactgtgcattccggttgtacggccattgggtgaagaagggggagcagcaaaaccgggcggccctgttccaacataggccccccggcccctttcccattatgggccctgaggaagaaggcgactcagctgccatcaccgaggatgaggcagtgctagtactgggc

SEQ ID NO: 6429 - DNA, 1218 bp, Artificial Sequence
  derived and/or modified sequence
atgacgctggacgtcgggccggaggacgaacttcccgactgggcagccgcgaaggagttttaccagaaatatgatcccaaggacgtgatcgggcgcggtgtgagctcagtcgtgagacgctgcgtgcaccgcgcaaccggacatgaattcgcggtgaagatcatggaagtgaccgcagaacgcctctccccggagcagctcgaggaggttagggaagctacccgcagagaaacccatatcctgaggcaggtggccgggcatccgcacattatcaccctcatagactcgtacgaaagctcctccttcatgttcctggtgttcgatctcatgcgaaagggagaactgttcgactacctcactgaaaaagtggctctctcagaaaaggagactaggtcgattatgagatctctgctcgaagcagtctcgtttttgcacgctaataacatcgtgcacagagacttgaaaccagagaacatcttgctggacgataacatgcaaatccggctgtcagatttcggtttctcatgtcatcttgaaccgggggaaaagctgcgcgagctttgcggcactccgggatacctggcgccggagatcctcaaatgcagcatggacgagacgcatccgggatatggcaaggaagtcgatctgtgggcatgcggagtgatcctcttcaccctgttggctggctcaccgccattctggcatcggcgccaaatcctcatgctgagaatgattatggaaggacaataccaattcagctcaccggaatgggacgaccggtcatcgaccgtgaaggatctgatctccagactgctccaggtggaccctgaggcgagactcactgccgaacaggcgctgcaacacccgttcttcgaaaggtgcgaaggatcacagccgtggaatctgactccaagacagcggtttcgagtggccgtgtggaccgtcctcgcggccggacgggtcgccctctccacccaccgcgtgaggccgttgacgaagaatgcactcttgcgcgatccttacgcgctgagatcagtccgccaccttatcgataactgtgcctttcgactgtacggtcactgggttaagaaaggtgagcagcagaaccgcgccgcgctctttcagcaccggccaccgggtcccttcccaatcatgggaccagaggaggaaggggactcggccgctatcacggaggatgaggcggtgctggtgttggga

SEQ ID NO: 6430 - DNA, 1218 bp, Artificial Sequence
  derived and/or modified sequence
atgactcttgatgtcggtccggaggacgaactcccagattgggctgcagctaaggagttttatcaaaagtacgaccctaaggatgtcatcggccgaggggtgtcctcggtggttcgccggtgtgttcatagagccaccggacacgagtttgcagttaagattatggaggtgacggcagaacgactttcaccagagcagctggaagaagtgcgcgaggcgacccgccgcgagactcatatcctcagacaagtggcggggcatccgcacatcattaccctcattgatagctacgagagctcgtccttcatgtttctcgtgttcgatctgatgagaaagggagaacttttcgactaccttaccgaaaaagtggcactctcggaaaaggaaaccagaagcatcatgcgaagcctccttgaagcggtgtcctttctgcacgcaaacaatatcgtccatagagatcttaagccagaaaacattctgctggacgacaacatgcagattcggctgtcagatttcggtttcagctgtcaccttgaacctggcgagaaactgagagaactttgcggcactcctggatacttggcaccggaaattctgaaatgttcgatggacgaaactcatccaggatatggcaaggaagtcgatctttgggcgtgcggcgtgattcttttcacgcttctggccggctcgcctcctttttggcacagaaggcaaatcctcatgctcagaatgattatggaaggacagtaccagttttcctcgcctgagtgggacgacagatcttcgacggtgaaggaccttatctccaggctgctccaagtcgatccagaggcacgccttaccgcggaacaggcccttcaacacccattctttgagcgctgtgagggctcacagccatggaacctgactccacgacaacgctttagagtggcagtgtggaccgtccttgccgcaggacgtgtggccctgtcgactcatcgggtgcgccccctgaccaaaaacgcgctgcttagagatccatacgcacttagaagtgtgagacatctgattgataattgtgctttccgattgtacggacattgggtgaagaaaggagagcagcaaaacagggcagcactgtttcaacacagaccacctggcccatttccaattatgggaccagaagaagaaggcgactccgcagcaatcacggaagatgaggcggtcctggtgctcggg

SEQ ID NO: 6431 - DNA, 1218 bp, Artificial Sequence
  derived and/or modified sequence
atgacactcgatgttggccctgaagacgagcttcctgactgggctgccgccaaggagttttatcagaagtacgaccctaaggatgtgatcggccgtggagtgtccagcgtagtaagacgctgcgtccaccgcgctacaggccacgagttcgccgttaaaatcatggaggtaaccgccgagaggttgtctccagaacagctcgaggaagttagagaggctacaagacgtgaaactcacattctgcgccaggtggccggtcatcctcacattattactctgatcgacagttacgagagcagtagtttcatgttcctcgttttcgatctcatgagaaaaggcgagctgttcgactacctgaccgaaaaggtagccctgtctgagaaagaaacacgttcaattatgcgctctctgcttgaggcagtgtcctttctgcacgccaacaacattgtgcaccgtgacctgaagcctgagaatattttgctggatgacaatatgcaaatcaggctgagcgatttcggcttctcttgccatctcgaacccggtgaaaagttgcgtgagttgtgcggcaccccaggctacctcgccccagaaatcctgaaatgcagtatggatgagactcatcccggttacggcaaggaggtcgacctgtgggcatgtggtgtgatcttgttcacccttcttgctggttccccccctttctggcacagaagacagatcctcatgctcagaatgattatggaaggtcagtaccaattctcaagtcctgaatgggatgaccgctcatccactgtgaaggacctgatttctcgcctcttgcaggtggatcccgaagcacgcctgaccgccgaacaggccctgcagcacccatttttcgagcgctgcgagggatcccaaccctggaacctgaccccccgccagcgctttagagtcgctgtgtggacagtgctggccgccggaagagtagcactgtccacacaccgtgttcgcccactgactaaaaacgctctgctgagagacccctacgcactccgcagcgtcaggcacctcattgacaattgcgcctttaggctttacggtcattgggtcaagaaaggcgagcagcaaaatcgcgcagctctcttccagcaccgcccaccaggtccttttcccataatgggacccgaggaggaaggtgatagtgctgccatcactgaggacgaagctgtgctggtactgggc

SEQ ID NO: 6432 - DNA, 1218 bp, Artificial Sequence
  derived and/or modified sequence
atgactttggacgtgggcccagaagatgaactgcccgattgggctgcggccaaagaattttatcaaaagtatgatcccaaagatgtgatcggacgcggggtctcaagtgtggtacgcagatgcgtccaccgggcgacagggcacgagttcgctgtgaaaatcatggaggtcacagccgaacgtctgtcccctgagcagctggaggaggtgagggaagctacccgccgggagacccacatcctcaggcaggtggctggacacccccacatcatcacgctgatagatagctacgagtccagttctttcatgtttcttgtgttcgaccttatgagaaagggtgagctgtttgactatctgaccgagaaagttgctctgagtgagaaggagactagaagtatcatgcgctccctgctggaagcggtgtccttcttgcacgcgaataacatcgtccatcgcgacctgaagcccgagaacatccttctcgacgacaatatgcagattcgcctgtccgacttcggtttctcctgtcacctggagccaggggagaagctgcgggagctgtgcgggacgccgggatacctcgcccccgagattctcaagtgctcaatggacgaaacgcaccctggctacggcaaagaggtggacctctgggcttgcggtgttatattatttactttgctggccgggagcccgcccttctggcacaggcgtcagatcctgatgctgcgcatgatcatggagggacagtaccagttctcctcccccgagtgggacgaccgctcaagcacggtcaaagacctgatcagtagactactgcaggtggatcctgaggcccggttgactgcagaacaagccctgcagcaccctttttttgagcgctgcgaagggagtcagccttggaacctgactcctaggcagcggtttcgtgtcgccgtctggacggttctcgccgctggaagagtagccctctctactcatcgcgtgcgcccattaaccaaaaacgcattgttgcgtgacccctacgcgctgcgctccgtccggcaccttattgacaactgtgccttccgcctttatggtcactgggtaaaaaaaggagaacagcagaatcgagcagctctcttccaacaccggccccccggaccctttcccattatggggcccgaagaggagggcgacagtgctgccatcacagaagatgaagctgtgctcgtgctcggg

SEQ ID NO: 6433 - DNA, 1218 bp, Artificial Sequence
  derived and/or modified sequence
atgaccctcgatgttggaccagaggacgagctcccagactgggcggctgccaaggaattctaccagaagtacgatcctaaggatgtgatcggtagaggtgtcagcagcgtggtccggaggtgtgtgcaccgggccactgggcacgaatttgcagtgaagataatggaagtgactgcagaaagattgagccctgaacaactggaagaagtgagagaggcgactcgccgcgagactcatatccttcgccaggtcgcaggccacccacacataatcacccttatcgattcctatgaaagctcgtcgtttatgtttcttgtgtttgatctcatgcggaagggtgaactgtttgattatcttaccgaaaaagtggctctgtccgaaaaggaaactcgctccatcatgcgctcattgctggaagcagtgtccttcctccacgccaataacatcgtgcatagggatctgaagccagagaacattttgctggatgacaacatgcaaattcggctgtcagattttggtttttcgtgccacctggaacctggagagaaacttcgagaactttgtggtactccgggatacctggcacccgaaatcttgaagtgttccatggatgaaacccacccaggctacggtaaggaagtggatctctgggcctgtggagtgatactttttactcttctggcaggatcacctcctttttggcaccgcagacaaattcttatgctcaggatgataatggagggtcaataccaattttcatccccagaatgggatgacagaagctcgaccgtgaaggatctgatatccaggcttcttcaggtggatcctgaggcacgccttaccgcagaacaagcactgcagcatccttttttcgaaagatgtgagggctcgcagccctggaaccttactcctcgacagcgattccgcgtggccgtgtggaccgtgctcgcagcaggtcgggtggctctttctactcatagggtcaggccacttaccaagaacgcactgctgagggatccttacgctcttagatcggtccgacacctgatcgataactgcgcgttcagattgtacggacattgggtcaagaagggagagcagcagaatcgtgccgcactgttccaacacagacccccgggaccattccctattatggggccagaggaggagggtgatagcgcagccataactgaagatgaggcagtcctcgtgctgggt

SEQ ID NO: 6434 - DNA, 1218 bp, Artificial Sequence
  derived and/or modified sequence
atgactctggatgtgggtcctgaggacgaactcccggattgggccgcggctaaagagttctaccagaaatacgaccccaaagatgttattggtcgcggggtgtcatccgtggtgaggcgctgcgttcaccgggcgacggggcatgagttcgctgtcaagatcatggaagtgaccgctgaaagactgtcgccagagcagctcgaagaagtgcgggaggcgactagacgggagactcatatcctgagacaggtggcaggccacccacacatcataaccctcatcgacagctacgagtcatcttcgtttatgttcttggtgttcgatctgatgcgcaaaggcgagctgtttgattacctcactgaaaaagtggccctgtcagaaaaggagactagatccatcatgcgctcgctcctggaagccgtgtccttcctgcacgccaacaatatcgtgcaccgcgacttgaaacctgagaatattctgctggatgacaatatgcaaattcgcctgagcgatttcggattctcatgccatctggagccaggggaaaagctccgcgagttgtgcggcacgccgggataccttgctccggaaatcctcaaatgctccatggatgaaacccatcctggatacggaaaggaagtggacttgtgggcgtgcggagttattctgttcaccctgctcgcaggatccccaccgttttggcaccgccggcaaatcctgatgctgcgcatgataatggaaggccagtaccagttctcctcccccgaatgggatgaccggagctcgactgtgaaggacctcatctcgcggctgctgcaggttgacccggaggcccggctcactgccgagcaggcacttcaacatccgttttttgaacggtgtgaaggcagccagccgtggaatctcaccccaagacaacggttccgcgtggcagtgtggactgttctggcggctggaagggtggcgctgtcgactcaccgggtgcgcccgctgactaagaacgccctgctgcgggacccatacgccctgcgttcagtcagacacctgatcgacaactgtgcgttccgcttgtacggtcattgggtgaaaaagggagaacaacagaatagggcagcgctcttccagcaccgcccacctggaccgttcccgatcatggggccagaagaagaaggagactcagccgccattactgaggacgaagcggtgctcgtgctggga

SEQ ID NO: 6435 - DNA, 1218 bp, Artificial Sequence
  derived and/or modified sequence
atgactttggatgtggggcctgaagacgaattgcccgattgggctgctgccaaggagttctatcagaagtacgatcccaaggatgtaatcggtagaggtgtctcgtctgtggtgagaaggtgcgtccatcgagctacagggcacgagttcgcagttaagataatggaggttacggccgagaggctgtctccagaacagcttgaggaggtgagagaggccactagaagggaaacacatatattaaggcaggtggctggtcatccgcacattattacattgattgactcgtatgaaagctcgtctttcatgtttttggttttcgacttgatgagaaaaggagaactgttcgattacttaaccgaaaaggttgccctttcagagaaggagacccgcagcattatgcgctcccttctagaagcagtgtctttccttcatgctaataatatcgtgcatcgtgatttaaaaccagaaaacattttgttagatgacaacatgcaaatcaggctttcagattttggattctcttgtcatctggagcctggtgaaaaacttcgtgaactttgcggtacacccgggtatcttgcgcctgaaatcttgaagtgctcgatggacgagactcatcctggctacggaaaagaagttgacctgtgggcttgtggagttattctgtttactttgttagctggaagtcctcctttttggcacagaagacagattttaatgttgaggatgattatggaaggtcaatatcaatttagttcaccagagtgggatgaccgttcttccacagtgaaggatttgatctctcgattactccaggttgatcctgaggctaggttgactgctgaacaagcacttcaacatccattcttcgagcgttgcgagggatcacagccttggaacctaacccctcgccagagattcagggttgctgtttggactgtactcgctgctggccgtgttgcactatcgactcatagggtacgacctcttaccaagaacgcactccttcgggatccttacgctttgcgttcagtgcgtcatctgattgataactgcgcttttagactctacggccattgggtgaaaaagggagagcaacaaaatcgggcagctctctttcaacatcgacccccaggaccttttcctattatggggcctgaggaggaaggagattcagctgctattaccgaggatgaagcagtacttgttttggga

SEQ ID NO: 6436 - DNA, 1218 bp, Artificial Sequence
  derived and/or modified sequence
atgaccctggacgttggccccgaggacgaactccctgattgggcggcagcaaaagaattctatcagaaatatgatccaaaggacgtgatcgggagaggcgtgtcctcggttgtacggcggtgcgtgcacagggctaccggtcatgagtttgcggttaaaattatggaggtgacagccgaaagactttcacccgagcagttggaggaggtgcgagaagccactcggagagagacccatatattgcgtcaggtggcggggcatccacacattatcacgctgatcgatagctacgagagctcaagcttcatgttcctcgtgtttgatttgatgcgcaagggagaactgttcgactatctcaccgagaaggtcgctctgagcgaaaaggagactagaagcattatgcgatccctgttggaggcagtgagcttcttgcacgccaataatatcgtgcaccgagacttaaaacctgagaacatcctcctggatgacaacatgcagatacgcttgagcgacttcgggtttagttgccacctggagccaggggagaagttacgggagctgtgcggaacacccggttatttggcgccagagattctgaaatgttccatggatgagactcacccaggttatggcaaagaggtggatctgtgggcctgcggggtaattctgtttaccctgttagcaggaagcccccccttctggcataggagacagatcctgatgttgagaatgatcatggaagggcagtaccagttctcatccccagagtgggacgataggagctccaccgttaaggacctgatcagtcgtctcctccaagtcgatccagaggcccgactaaccgccgagcaggctctgcagcacccttttttcgaacgttgcgaaggctctcaaccttggaatttgactccgcgacaaagattccgggtagcagtgtggacagtcctggccgcaggtagggtcgcactgagcacccaccgcgtgagaccacttacaaagaacgcgctgctacgcgacccatacgcccttaggtcagtgcggcacttgatagacaactgcgcctttagactctacggtcactgggttaagaagggagaacaacaaaaccgtgcagcgttgttccagcaccgcccacccggccccttcccaatcatgggaccggaagaggagggggacagtgctgccatcactgaagatgaagctgtgttagtgttaggt

SEQ ID NO: 6437 - DNA, 1218 bp, Artificial Sequence
  derived and/or modified sequence
atgaccctcgacgtggggccagaagatgaactcccggattgggcggccgcaaaagaattctatcaaaagtacgaccccaaggatgtcatcggacgtggcgtgagtagcgtagtgcgccggtgtgtgcatcgggcaaccggccacgagtttgccgtcaaaatcatggaggtcacggcagagagactttctcctgaacaattggaagaagtgagagaagcaacccgcagggaaactcatattcttcgccaggtcgccggtcacccccacattatcacgcttatcgactcatacgagtctagcagcttcatgtttctggtctttgatttgatgcggaagggagaactttttgactaccttactgagaaggtcgcgctctctgaaaaggaaacccgttccattatgaggtccctgcttgaagcagtgtcgttccttcatgcaaataacattgtgcacagggacctgaagccagagaatatactcttggatgataacatgcaaattcgactgtccgatttcggttttagctgtcatctggagccaggtgagaaattgcgtgaactctgcggaacccctggatacctggctcccgaaatactgaaatgctcgatggacgaaacccatcctgggtacggcaaagaggtggacttgtgggcatgcggagttattctttttaccctgctcgctggctcaccgccattttggcaccgccgccagatccttatgctgaggatgattatggaaggacaataccagttcagcagccctgagtgggacgatcgaagctcgactgtcaaggatttgatctcgaggctcctgcaagtagatccggaggcacgattgactgcggagcaggcccttcaacatccttttttcgaacgttgtgaggggtcacagccttggaatcttaccccacgacaacgattcagagtggcagtgtggacggtgttggcagcgggtcgggtcgcactctcaactcaccgtgttcgtcctctgaccaagaacgcactgcttcgggacccttacgccctgcgctccgtcagacatcttattgataactgtgcttttcggctctacggacattgggtgaagaagggcgaacaacagaacagagcagccctcttccagcatcggccacctggaccttttcctatcatgggtccagaagaagaaggagattcggcagcgattactgaggatgaagcagtgctggtgctgggg

SEQ ID NO: 6438 - DNA, 1218 bp, Artificial Sequence
  derived and/or modified sequence
atgactctcgacgtgggaccagaggacgaactgccggattgggcggccgcaaaggagttctaccaaaagtacgacccgaaagacgtcatcggccggggtgtctcctccgtggtgcgcagatgtgtgcatcgggctaccggccacgagtttgccgtgaaaatcatggaggtgaccgctgaaaggctgtcgccagagcaattggaggaggtccgcgaagcaacccggcgtgagacgcatatccttagacaggtggccggtcaccctcacatcattactctgattgactcgtatgaaagctcatcgttcatgttcttggtctttgatctgatgcgcaagggagagctctttgactatctcactgaaaaagtcgccctgtcggaaaaggaaactaggtcgataatgcgctcactcctcgaggcagtctcttttctgcacgccaacaacatcgtgcatcgcgatctgaaaccggagaacatcttgttggacgataacatgcagatccggctgtcagattttggcttttcgtgtcaccttgaacccggagagaagctgcgggaactgtgcgggaccccgggctacctggcccccgagatcctcaagtgctcgatggatgaaacccaccccggttacggaaaggaagtggatctgtgggcgtgcggtgtcattctgtttactctgctggcgggctcacccccgttctggcatcgcagacaaatcctcatgctgcgcatgatcatggaaggacaataccagttctccagccctgaatgggatgatcggtctagcaccgtgaaggatcttatctcccgcttgctgcaggtggaccctgaagctcgcttgaccgccgaacaggccctgcagcatccgttcttcgaacggtgcgagggtagccagccttggaatctgactccgaggcaacggttccgcgtggctgtctggacggtgctggccgccgggcgggtcgctctgagcacccaccgggttcgcccactgacgaagaatgcgcttcttagggacccttacgcgctgcgatctgttcgccatttgatcgataattgcgcgttccgcctttacggccactgggtgaagaaaggagaacaacagaaccgtgctgctcttttccagcaccgcccgccgggaccgttccctatcatggggccagaggaggaaggagactccgcggctatcaccgaggacgaagcagttctcgtgctcgga

SEQ ID NO: 6439 - DNA, 1218 bp, Artificial Sequence
  derived and/or modified sequence
atgacattggatgtcggtccagaagacgaactgcccgattgggctgctgcaaaggagttttaccagaagtacgaccccaaggacgttatcggaagaggagtgtccagcgtcgtccgccgctgcgtgcatcgggcgacgggtcatgaattcgccgtcaagattatggaggtgacggcagagcgcctttctccggagcaactggaggaagtccgtgaagcaactcgacgcgagacacatatactgaggcaggttgccggccatccccacatcatcactcttatagactcttatgagtcatcttcgttcatgttcctggtgttcgatcttatgagaaaaggggaattatttgattacctaaccgagaaggtggctctgtcagagaaggagacacgaagcatcatgcggagcctgctcgaagcagtgtcattcttgcatgctaataacatcgtccacagagacctgaagcctgagaacattcttcttgatgataacatgcaaatccgtctaagtgactttggattctcttgccacctggagcccggagagaagcttcgcgaactgtgcggcaccccagggtacctcgcccccgaaatactgaaatgctctatggatgagactcatcctggctacgggaaggaggtggatctctgggcatgcggcgtcatcctgttcactctgcttgctggctcacctccattttggcaccggagacagattctgatgttgcggatgataatggagggccagtatcagtttagttctccagagtgggatgacaggtcttccacagtgaaggatttaattagccggctcctgcaagtagacccggaggccagactaacggccgaacaggccctgcagcaccccttctttgagcggtgcgagggttcacagccgtggaatttaaccccacgccagcgatttagagtggcggtatggactgttctagcagcaggacgggtcgctctgtctactcaccgggtccgacctctcacaaagaacgcactcctgcgggacccttacgcgctgcgaagcgtgaggcaccttattgacaattgcgcatttagactttatggccactgggtgaaaaaaggcgaacagcagaatcgcgctgctttgtttcagcaccggccaccaggcccatttcccatcatgggacctgaggaggagggcgattcagcagccataacggaggatgaggctgtgctcgtgctggga

SEQ ID NO: 6440 - DNA, 1218 bp, Artificial Sequence
  derived and/or modified sequence
atgacactggacgtgggtccagaggatgaattgccggactgggctgccgccaaagagttctatcagaaatatgaccctaaggatgtgattggtcggggcgtgagcagtgtggttcgcagatgtgtgcatagagccacgggacacgaatttgccgtcaaaatcatggaggtgaccgcggagcgcctgagccctgagcagctggaagaggtcagggaggctacccgccgtgaaactcatatccttcgtcaagtcgccggacacccgcatattattacacttattgatagctacgagagtagctcatttatgttcctggtgtttgacttgatgaggaagggtgaactgtttgattatctgactgagaaagtggcactgagtgagaaagagaccagatctatcatgagatccttgcttgaggcagtgtcctttctgcacgcaaataacatcgtgcaccgggacttgaagcccgagaacattttattggacgacaacatgcagattcgcctgtctgatttcggtttttcttgccatctggaacctggggagaagctccgcgagctctgtggaactcccggctacttagcgcctgaaatattaaagtgctccatggacgagactcaccctggatacggtaaggaggtggatctctgggcctgcggagtgatactgttcaccctcctggcgggttccccacctttttggcaccgccggcagatactgatgctgcggatgatcatggaaggccagtatcagttttcttcccctgagtgggacgatcgctcctcaaccgtgaaagatctgatttccagactgctgcaggtggacccggaggctagactcaccgctgagcaagctctgcaacaccccttcttcgagaggtgtgaggggagtcagccttggaatctgacccctaggcagcggttccgcgtggccgtttggactgtgttggcagccggacgtgtcgcactctctacccatcgcgtgcggccccttacgaagaacgcactactccgcgacccttatgccctgagaagcgtcagacacctgatcgacaattgcgctttcagactctatggacactgggtcaagaagggggaacagcagaaccgcgcagctctattccagcataggccccctggcccatttcctataatgggccccgaagaggaaggggacagcgcagccattaccgaggatgaagctgtgctcgttctggga

SEQ ID NO: 6441 - DNA, 1218 bp, Artificial Sequence
  derived and/or modified sequence
atgactcttgatgtgggaccagaagatgaacttcccgattgggcggcggctaaggagttttatcagaagtacgatcctaaagacgtcattggtcgcggtgtgtcgtcggtggtgcggaggtgtgtgcatagagcaactgggcacgaattcgcagtcaagattatggaggtgactgcagagagactttcccctgaacaactggaagaagtgagagaggcaactagaagggaaactcatattcttcggcaagttgcaggacacccccacattatcactcttattgattcctacgaaagctcatcgtttatgttcctcgtttttgatctcatgcgaaaaggagagctttttgattatctcaccgaaaaggtggcactgtcggagaaggaaactagatcaataatgcgctcccttctggaggcagtgtcatttctgcatgcaaataacatcgtccatcgtgatcttaagcccgaaaacattctcctcgatgacaacatgcaaatcagactttcggattttgggtttagctgtcacctggaacctggagagaagttgcgggagctttgcggcacccctgggtaccttgcacccgaaattctgaagtgtagcatggatgaaacccatcctggttacggaaaagaagttgacctctgggcctgcggagtcattctttttacccttcttgcaggatcgcctcctttctggcacaggcgccaaatcctgatgctccgcatgataatggaagggcaataccagttcagtagcccagagtgggatgatcgcagctccactgtcaaggacctgatctcgcggcttctgcaggttgaccctgaggctcgacttacggccgaacaggccctccaacatcctttctttgaaagatgtgaaggctcgcagccttggaaccttactccgcggcagagattccgtgtggcggtctggactgtccttgcggcaggccgagtcgcactctcgacccacagggtccggcctcttactaagaacgcactgctcagggacccatacgcactgcgttcagtgagacatcttatagacaactgcgcatttcggctttacggacattgggtgaaaaagggtgaacagcaaaaccgggccgcactttttcaacatagaccgcctggacccttcccaattatgggccccgaagaagagggtgactccgcagcaataactgaagatgaagccgtgctggtccttggg

SEQ ID NO: 6442 - DNA, 1218 bp, Artificial Sequence
  derived and/or modified sequence
atgaccctggacgtgggtccagaggatgagttgccagactgggctgcagcaaaggagttctaccagaagtacgaccctaaagatgtgatagggcgtggtgtgagctcggtggttcgacgatgtgtgcatcgggccaccggacatgagtttgcagtcaagattatggaagtcaccgcagaaagattgtcccccgaacagctcgaggaggtcagagaggccacccgccgggaaactcacatcctccggcaggttgctgggcatccgcatatcattaccctgattgattcgtacgaaagcagctcatttatgtttctcgtgtttgacttgatgcgtaagggagaattgtttgactaccttaccgagaaggttgccctttcagaaaaggaaactcgttcgattatgcgcagccttcttgaagccgtgtcgtttctgcacgcgaataacatcgtgcaccgggacctcaagccagaaaacatacttcttgatgacaatatgcagattcgcctcagcgactttggcttctcgtgccatctggaaccgggagagaaacttcgagaactttgtggtaccccgggataccttgcccctgaaatcctgaagtgctcgatggatgaaactcatcctgggtacggtaaggaggtcgatctctgggcatgtggagtcattctcttcaccctgctcgcaggcagccccccattttggcaccgacgccaaattctgatgctgagaatgattatggagggtcagtaccaattctcaagccctgagtgggatgaccgaagttcgaccgttaaagaccttattagcaggctgctccaagtggaccctgaagcacgccttactgcagaacaagcgctgcaacatccatttttcgaaaggtgtgaggggtcccaaccgtggaaccttaccccacggcaacgttttcgcgtggcagtgtggactgtccttgcagcaggacgggtggccctctcgacccaccgtgtcaggcctctcaccaaaaatgcactgctgcgtgacccatacgcacttcgctcggtcaggcatcttattgataactgtgcgtttcggttgtatggtcattgggtgaaaaaaggagagcagcagaacagggctgcactgtttcaacacagaccacccggtccctttcctatcatgggccccgaagaagaaggagattccgctgcaataaccgaagatgaggcagtgttggtgcttggg

SEQ ID NO: 6443 - DNA, 1218 bp, Artificial Sequence
  derived and/or modified sequence
atgactttggatgtgggaccagaggacgagctccctgactgggcggcggccaaagaattttatcagaagtacgatcctaaggacgtcatcggccgaggagtcagttctgtcgtccgcagatgcgtacatcgcgcgacagggcacgagttcgcggtgaagataatggaggtgacagcagagcgtctttcccccgagcagctagaggaagtacgggaggccactaggagggaaactcacatactgcgccaagtcgcaggccacccccacatcattacgctgatcgactcctatgagtcaagtagctttatgttcctcgtctttgatctgatgcggaaaggtgaattgttcgattatttgacagagaaggttgctctctctgaaaaggagacacgctccataatgaggagcctgctggaagcagtttcgttcctccatgctaataacatcgtgcatcgtgaccttaaaccagagaatatattactggacgataacatgcagatccggctttcagattttgggttctcttgccacctggaacctggcgaaaaattgagggagctatgcggcacaccgggttaccttgcaccagaaattctgaagtgcagcatggatgagactcaccccggctacggcaaagaggtggatctgtgggcctgcggagtgattctgtttacactgctggccggcagccctcctttctggcaccgtaggcagattctcatgctgcgcatgattatggagggccaatatcaattctccagcccagagtgggatgaccgtagttcgacggttaaagatctaatttcaaggctactccaggtagatcccgaggctagattgacagcagaacaagctctgcagcaccccttcttcgaaaggtgtgagggcagccaaccttggaatctgaccccacggcagaggttcagagtcgcagtctggaccgtcttggccgcagggcgggtggccctctccacgcatagggtaagaccgctgaccaaaaacgccctgctgcgcgacccctacgctctgagaagcgtccgacacctgatagacaactgcgccttccgcttgtatgggcactgggtgaagaagggtgaacaacagaaccgggcagctctgttccagcacagacccccaggcccttttccgatcatgggacctgaggaggagggagattccgctgcgataaccgaggatgaggctgtactggtgctcggt

SEQ ID NO: 6444 - DNA, 1218 bp, Artificial Sequence
  derived and/or modified sequence
atgaccctcgacgtggggccagaggatgaattgcctgactgggccgcagcgaaggaattctaccaaaagtacgatccaaaagacgtgatcggacgaggtgtctcctcagtggtccggcgctgcgtgcatcgcgcaaccgggcacgaatttgctgtcaagattatggaagtgactgccgagcgcctgtcgccggagcaacttgaggaggtgcgcgaagcgaccaggcgggagactcacatcctccggcaggtggctggccatccacacatcatcaccttgatcgactcgtatgaaagttcctcattcatgttcctggtgttcgatctgatgcgcaaaggcgaattgttcgactacttgaccgaaaaagtggcgctgagcgagaaagagactagatctatcatgcgttcgctgctggaagccgtgtcattcctgcacgctaacaacatcgtccatcgcgatctgaagccggaaaatatcctgttggacgataacatgcaaatccgcctgtcagatttcgggttcagctgccatctcgaaccaggagagaaacttcgagaactctgcggtaccccgggatacctcgcccctgagatcctgaagtgctcgatggacgagacgcatcctggatacgggaaggaagtcgatctgtgggcttgcggagtcatcctgttcactcttcttgctggaagccctccattctggcacagacggcagatcttgatgctgcgaatgatcatggaaggacaatatcaatttagctccccggagtgggacgataggtcgtccactgtcaaggacctgatctcccgcctcctgcaagtggacccggaagcgcggttgaccgctgagcaggccctccagcacccgttcttcgaacgctgcgagggctcacagccgtggaatctgactccaagacagcggtttcgtgtggcggtgtggacggttctggccgcagggagggtggccctgtccactcatcgggtcaggccactgaccaagaacgctctgctgcgagatccctacgctctgcgctccgtcagacatctgatcgacaactgcgcattcagactctacggacactgggtgaaaaaaggggagcaacagaatagagcggcgctcttccaacacaggccaccaggcccattcccaattatgggtccggaagaggagggcgactcggcagccatcaccgaggatgaggcagtgcttgtgctgggt

SEQ ID NO: 6445 - DNA, 1218 bp, Artificial Sequence
  derived and/or modified sequence
atgactctggatgtcggacccgaagatgaactcccggactgggcggccgcgaaggaattctaccagaaatatgatccaaaagacgtgatcggcagaggcgtgagctccgtcgtgcggcggtgcgtgcatcgggctaccggccacgagttcgccgtgaagattatggaggtgactgctgaaagattgtcgcccgagcagctcgaggaagtaagagaagcgacccgccgggaaactcacatcctccgccaagtcgccggccacccgcatatcatcaccctgatcgactcctacgaatcatcctcctttatgttcctggtgttcgatctgatgcggaaaggggaactgttcgattacttgactgagaaggttgctctctcggaaaaggagactcggtcaatcatgcgctcactgctcgaggcagtgtcgtttctgcacgcgaataacatagtgcacagagatctcaagccggaaaacatcctgttggatgataacatgcagatcaggttgagcgactttggattctcctgccatctcgaacccggggagaaacttcgggagctgtgcggcaccccaggatacctggctccagaaattctcaagtgcagcatggatgaaacccatccaggatatggaaaagaagtggacctgtgggcctgcggagtcatcctgttcactttgctcgcgggatcgccgccattctggcatcgccgccagatcttgatgctccgtatgatcatggaaggacagtatcagttctcatcgccggagtgggacgaccggtcgagcactgtgaaggatctgatcagccgcctgctccaagtcgatccagaagcgaggctcactgccgaacaggccctgcagcacccattctttgagagatgcgaaggatcgcagccatggaacttgacgcctagacagaggttccgggtcgcagtgtggacggtcctggccgccggacgggtggcactgtccacgcatagagtgcggccgctgaccaaaaacgccctcctccgggacccgtacgcactccgatcggtccgccacctgatcgacaattgcgccttccgactgtacggacactgggtgaagaaaggagagcagcagaatcgcgccgccctgttccagcatcggccacctggcccatttccgatcatgggtccggaggaagagggcgactccgcagccatcaccgaagatgaagccgtgctggtgctcggc

SEQ ID NO: 6446 - DNA, 1218 bp, Artificial Sequence
  derived and/or modified sequence
atgaccctcgacgttggaccggaggacgagctcccagactgggcggctgcaaaggagttctaccagaagtacgatccgaaggacgtcataggcaggggcgtgtccagcgttgtgcggcggtgcgtccatcgcgcgactgggcacgaattcgccgtaaagatcatggaagtcaccgccgagagactctcgcctgaacagctcgaagaggtgagagaagcaacccgcagggaaactcacatcctgcggcaagtggcaggacatccgcacattatcaccttgatagactcctacgaatcctcgtcttttatgttcctggtgtttgacctcatgcggaagggagagttgttcgattaccttactgagaaagtggcattgtctgagaaggagactcgctcgatcatgcgctccttgctcgaggccgtgtcgtttctgcacgccaacaacattgtacatcgggacttgaagccagaaaacattttgctcgatgataacatgcaaatccggctttccgacttcggattttcctgccacctggaaccgggggagaaacttagagaactgtgcggaacccctggctacctggccccagaaatccttaagtgtagcatggacgaaactcaccctggttacggaaaggaagtcgacctctgggcttgcggagtcatcttgttcactctgctcgcgggcagcccaccgttctggcaccgacggcagatcttgatgcttagaatgatcatggagggacaatatcaattctcctcaccggaatgggacgatcgttcgtcgactgttaaggatctgatctcacggctgctgcaggtcgaccctgaggcgaggctgaccgccgaacaggccctgcaacatccgttcttcgagcggtgtgaaggcagccagccgtggaatctcacgccccgccagagattccgcgtcgctgtgtggaccgtgctggcagcggggcgcgtggcgctgtcaacccaccgtgtgcgcccattgaccaaaaatgccctcctgcgcgatccctacgcgcttcgctcagtccgtcatctgatcgacaattgcgcattcaggctttacgggcactgggtgaaaaagggtgaacagcagaaccgggctgccctgttccagcaccgtcccccgggaccgtttccaatcatgggaccagaggaagagggagattcggctgccatcacggaggacgaagccgtgctcgtcctgggg

SEQ ID NO: 6447 - DNA, 1218 bp, Artificial Sequence
  derived and/or modified sequence
atgactctggacgtgggaccagaagatgagttaccggattgggccgctgcgaaagagttctatcagaaatatgaccctaaggatgtgataggtagaggggtgtctagcgtggtccgaagatgcgtccaccgcgctactggacatgaattcgctgtgaagattatggaggttacagccgaaaggctgtccccagagcagctggaggaagttagggaggccactcgtcgagaaacgcatatccttaggcaagtcgctggccaccctcacatcattaccctgatcgactcttacgagtctagttctttcatgtttctcgtgtttgacctgatgcggaagggcgaactgttcgattaccttacggaaaaagtcgccctctcagaaaaggagacacggtctattatgaggagtctcctggaggcagtatccttcctgcatgctaacaacatcgttcatcgcgacctgaaacctgaaaatatactgctggatgacaacatgcagatcaggttaagcgacttcgggttcagttgtcacttggaaccaggtgagaaacttagagagctttgtggaacaccaggttatctcgcacccgagatcctgaagtgctccatggatgagactcatcctggttacggcaaggaggtggacctatgggcatgtggggtgatccttttcaccctgctggctggctctccccccttttggcacagaagacagatcctgatgttgcggatgatcatggaagggcaataccagttctcctctcctgagtgggatgaccggagctctacagtaaaagacctaatttcaagactcctgcaggtagatccagaggctagactgacagcagagcaagctctgcagcatccattcttcgaacgctgtgaggggtcacaaccctggaatctgacccctaggcagcgttttcgggtggcagtgtggactgtgctggctgctgggcgggtcgctctgtccacccaccgggtaaggcccctgactaagaacgccctgttacgggacccttacgccttgcgttctgtacggcatcttattgacaattgtgcattcagactgtacggtcactgggtcaagaagggtgagcagcagaatcgcgcagctctgttccagcaccggcccccgggacctttccccattatgggtcctgaagaggagggcgactctgccgcgatcacggaggacgaggcggtcctggtcctcggt

SEQ ID NO: 6448 - DNA, 1218 bp, Artificial Sequence
  derived and/or modified sequence
atgacactcgacgtcggtccggaggatgagttaccggattgggccgcagcaaaagagttctatcaaaagtacgatccaaaagatgttatcggcaggggggtcagctctgtcgtgcgccggtgtgtccaccgggcgacagggcacgaattcgccgttaagatcatggaagtcaccgcagagcggctctccccggagcagctcgaggaggttcgggaagccacacggcgcgaaacgcatatcttacggcaggttgccggccatccccacatcatcactttgatcgacagctatgagtcatctagttttatgttcctggtgttcgacctcatgcgaaagggagaactgttcgactatttgaccgaaaaagttgctctgtcagaaaaagagacgcggtccattatgcggagcctgttagaagccgtgagctttctgcatgctaacaatattgtccacagagacctaaagccagagaacatcttgctggacgacaacatgcaaatcagattgtcagatttcggtttcagttgtcacctggagccaggagagaagctcagggaattgtgtgggacccctggttatttagcccccgagattctgaagtgctctatggatgagacccatcctggatacggcaaggaggtggacttgtgggcatgtggcgtaatactcttcaccctgctagctggttctcctcccttctggcacaggcggcagatcctgatgctacggatgattatggaaggacagtaccagttttcctcacctgagtgggacgaccgaagtagtaccgtgaaagacctgatttcccgtctgttacaggtagacccagaagcacgcctcaccgccgaacaggctttgcagcacccgttcttcgagcggtgcgagggctctcaaccctggaacctcaccccgagacaacgttttagggttgccgtatggactgtcctagctgccgggcgtgtcgccctatccacacatcgcgtaagaccgctgactaagaacgcgttgctccgagacccttacgcgctcaggagcgtgcgccatctcatagataactgtgcttttagattgtacggccactgggttaagaagggagagcagcagaatagggctgcactcttccaacacagaccgcctggaccgttcccaattatgggccctgaagaagagggtgattccgccgcaatcacggaggatgaggccgttctggtccttggc

SEQ ID NO: 6449 - DNA, 1218 bp, Artificial Sequence
  derived and/or modified sequence
atgactcttgacgtgggcccagaggatgaactcccagactgggccgccgctaaagagttctaccagaagtatgaccccaaggacgtgatcgggcgcggagtgtctagcgttgttaggagatgcgtgcaccgggccaccggccatgagttcgccgtgaagatcatggaagttactgcggagcgtctctcgccggagcagttggaagaagtccgggaggctacccggcgggagacgcacatcttacggcaggtggcaggccatccccacataatcacactaattgacagttacgagagcagttcgtttatgttccttgtgttcgacctgatgcggaaaggggagttattcgattacttgactgagaaagtggcgttgtcggagaaggagacaaggtccattatgaggagcctgctcgaagctgtgagcttcctgcacgccaacaatatcgtgcaccgagatctcaagcctgaaaatatactgctggatgacaacatgcaaattaggctcagtgatttcggcttcagctgtcacctggagccgggtgagaaacttcgggagttatgcggcacccccggttaccttgcccccgagatcctgaagtgttctatggacgaaacacaccctggttacggaaaggaggttgacctctgggcctgcggggtgatcctgtttacgcttctggccgggtctccaccattttggcaccggcgccagatacttatgttgcggatgattatggaaggccagtatcagttctcaagcccggagtgggacgaccgttcctctaccgtgaaggacttgatctcacggttgctgcaggtggatcctgaggcgcgcctgacagcggaacaggcccttcagcatccctttttcgaacggtgcgagggctcacaaccttggaacctgaccccccgccagcgctttagagtagcagtgtggactgtcctagcagcaggacgggtcgctctctcgacacatcgggttaggcccctgaccaaaaatgccttactacgagatccctatgcactccggtcagtcagacacttaatagacaactgcgccttccggctgtatggccattgggtaaagaagggtgagcagcagaacagggccgctttgtttcagcatcggccaccgggtcccttcccaatcatgggacccgaagaggagggtgactccgccgccatcaccgaggatgaggccgttttggtgcttggt

SEQ ID NO: 6450 - DNA, 1218 bp, Artificial Sequence
  derived and/or modified sequence
atgactctggatgtgggtccagaagatgagctgccagactgggcagcagcaaaagaattctaccaaaagtacgaccccaaagatgtgataggccgcggggtgtcgtccgtcgtccgacggtgtgtccaccgtgcaactggtcatgaatttgctgtgaagattatggaagtcacggcagagagactttcaccagaacagcttgaggaagtcagagaggctacgagacgtgaaacccatattctgaggcaggtggcgggccatccacacattatcaccctcatcgacagctacgaatcgtcctccttcatgtttcttgtgtttgatttgatgcgaaaaggcgaactttttgactacctgactgaaaaggttgccctgtcggagaaagagactcggagcattatgagatccctcttggaagctgtctcgttccttcatgccaataacatcgtgcatcgcgatttgaaacccgagaatatactcctggatgataacatgcagatcaggttgtcagactttgggttttcatgtcacctggaacctggtgaaaagctgcgcgagctgtgcgggacccctggatacctcgcgccggaaattctgaagtgctcgatggacgaaactcatcctggttatgggaaggaggttgatctttgggcgtgtggagtcattctgtttacccttcttgctgggtcgccccctttttggcataggcggcaaatacttatgttgcgtatgatcatggaaggccaataccaattctctagccctgaatgggacgatcgctcaagcaccgtcaaggatctgatctcgcgtctgctgcaggtggatcccgaggcaaggttgaccgccgaacaggcactgcaacaccccttctttgaacgttgtgaaggaagccaaccctggaaccttaccccccgccagcggttccgcgtggctgtgtggacggttctcgcagcaggtagagtcgcgctttccacgcatcgggtcagaccgcttaccaagaacgcacttcttagagatccttacgctctgcgttcggtgagacatcttattgataactgtgccttccgactttacggtcactgggtgaaaaaaggcgaacaacaaaatagagcagcactcttccagcacagaccacctggtccatttccgattatgggccccgaagaggagggagatagcgcagcaatcactgaagatgaggcggtgctggtgcttgga

SEQ ID NO: 6451 - DNA, 1218 bp, Artificial Sequence
  derived and/or modified sequence
atgactcttgacgtggggccagaggacgagcttccggattgggcagccgcaaaggaattttaccagaagtatgatcccaaagatgtcatcgggcgcggcgtgtccagtgtggtgaggcgatgtgttcacagggctacgggacatgagtttgcagtaaagattatggaagtgacagccgagcgcttgagtcccgagcagctcgaagaagttcgtgaggccacccggagggaaacccacatcctgcggcaggttgctggccaccctcatataatcacactgatcgacagttacgagagctcctcattcatgtttcttgtttttgatctgatgcgcaaaggagaattgttcgattacttgactgaaaaggtcgccctgagtgaaaaggaaacaaggtcaatcatgcgcagtctgcttgaagccgtttcattcctgcatgccaacaatatcgtgcaccgtgacctgaaaccggaaaacatcctgctggatgacaacatgcagatacgactcagtgatttcggctttagctgccacttagagccaggtgagaagctgcgggagttgtgcggcactcccggctacctagcgcccgagattttgaaatgttccatggacgaaacacatccagggtacggcaaagaagtggatctgtgggcttgtggcgtaatcctgttcacattgctggccgggagtccaccattctggcacaggcgccagatattgatgctccgcatgatcatggagggtcagtatcaatttagtagccccgagtgggacgatagatcatccacagttaaggatttgattagccggttactacaggtggaccctgaggcccgtctgacagcggagcaggctcttcagcaccccttctttgagaggtgcgaggggtctcagccatggaacctaacgcctcgccaaagattcagggttgcagtctggactgtgctagccgccgggcgggtagcactgagcactcacagggtgagacctctgaccaaaaacgcactgcttagagatccctatgccctgagatccgtgcgacacctgattgataattgtgcttttcgtctgtatggccattgggtaaaaaagggagagcagcagaatcgagcggccctcttccaacatcggccgcctggacccttcccgataatgggtccggaggaggagggagactccgctgccatcactgaggatgaggcggttctggttttgggc

SEQ ID NO: 6452 - DNA, 1218 bp, Artificial Sequence
  derived and/or modified sequence
atgaccctggatgtgggtccagaggatgagctgcccgattgggcagcagcaaaagagttctaccagaaatacgatcctaaagatgtgataggtagaggagtgtcaagcgtcgttcgtaggtgtgtgcatagggcgactgggcatgaatttgcagtgaagataatggaagtgaccgccgagcgactgtcaccagaacaacttgaagaggtgagagaagcaactcggcgcgagactcatattctcagacaagtggctggacacccgcacatcattacccttattgatagctacgaatcctcgtcattcatgttccttgtgtttgacctgatgcggaagggggaactttttgattacctgaccgagaaggttgcactcagcgagaaagaaacccgcagcatcatgcggagcctcttggaggcagtgagcttccttcacgcaaacaatattgtgcaccgagatctgaagcccgaaaacatcctgctcgatgacaacatgcaaatcagacttagcgattttggattttcctgtcaccttgaaccgggtgaaaagctgagagaactgtgtgggacgcccggttacctggctcctgaaattctgaaatgcagcatggacgaaacccatccaggatacggaaaagaagtcgatctttgggcctgtggtgtgattctcttcaccctgcttgccggatccccacccttttggcatagaaggcagattctgatgctcaggatgatcatggaagggcaataccaattcagctcgcctgaatgggatgacaggtcgtcaactgtcaaggacctgattagcagactgttgcaagtcgaccctgaggcaaggctgaccgccgaacaggcacttcaacatccttttttcgaacggtgtgaaggctcccaaccttggaacctgacccctaggcagagatttcgtgtggcagtgtggactgtgcttgccgcaggaagagtcgcactgtcaacccaccgggtcagacctctcactaagaacgcacttctgcgtgatccttatgccctccgttcggtccggcatcttattgataactgcgccttccggctttacggacattgggtcaagaaaggtgaacagcagaatagagccgcactgtttcagcatcgtccaccaggcccattccctatcatgggccccgaggaagagggtgactcggcagccataactgaggatgaagccgtgttggtgctgggt

SEQ ID NO: 6453 - DNA, 1218 bp, Artificial Sequence
  derived and/or modified sequence
atgactctcgacgttggacctgaagatgaactccctgactgggccgcagcaaaggaattctaccagaaatatgatcccaaagatgttatcgggcggggggtgtcttccgtcgttcgtaggtgtgtgcatagggccactgggcatgagtttgctgttaaaatcatggaggtaactgcagaaagactctctcccgaacagctggaagaagttcgggaagccactcgaagggaaacacacattttaaggcaggttgctggacacccccatatcatcactcttatagattcgtacgagtcatcatcttttatgtttctcgtgttcgatcttatgcggaagggggaactatttgattatctaacagaaaaagtagccctctctgaaaaagaaacacgatcaattatgcgatctctcctggaggcagtttcatttttacatgctaacaacattgtgcatagagatctcaaacccgaaaacatcctacttgacgataatatgcaaatacgccttagtgattttggattctcatgccacctcgaaccaggggaaaaactccgggaactctgcggaactcctggatatctggctcccgaaatcctgaagtgctccatggatgaaacacaccctggatatgggaaggaagttgatctgtgggcttgtggggtcatcctgttcactcttctcgcgggatcaccccccttctggcatcggaggcagatactaatgctccgaatgattatggaggggcagtatcagttttcttcaccagaatgggatgatcgaagtagtactgtgaaagacctgatttccaggctgctccaggtggatcctgaagcacgattaacagccgaacaggccctacagcatcccttttttgaaagatgcgaaggaagtcagccttggaatctcactccacggcagcggtttcgggtcgcagtgtggactgtgcttgctgccgggcgggtcgcgctcagtacacatagggtccggcctcttactaagaacgcactccttagagacccctacgcgttgaggagtgtcaggcatctcatagataattgtgcatttagactctatggacactgggtgaaaaaaggggagcaacagaatcgggctgccttatttcagcataggccacctggacctttccctataatggggcctgaagaggaaggagattccgctgcaatcactgaggacgaagcagtccttgtgctcgga

SEQ ID NO: 6454 - DNA, 1218 bp, Artificial Sequence
  derived and/or modified sequence
atgacccttgatgtcggcccggaagatgaactgcctgattgggcagcggctaaggagttttaccaaaagtacgatcctaaggatgtcattggcagaggtgtgtctagcgtagtgagaaggtgtgtgcacagggcaaccggccacgaattcgcagtgaagattatggaagtcactgccgaaagactgtcacctgagcagctggaagaggttcgggaagcaaccagaagagaaacccatattctgaggcaagtggcaggacacccacatatcataacccttattgattcctacgaatcgtcgagctttatgtttttggtgtttgatctcatgagaaagggtgaactctttgattacctgacggagaaagtggccctgtccgagaaggaaacccgctcaatcatgcgctcgctgctcgaagcagtgtcctttcttcacgctaataacatcgttcacagagatctgaagccagaaaacattctgcttgacgataacatgcaaataagactgtcggattttgggttttcgtgtcacctggaacctggagaaaagttgcgggagctgtgtggaactcctggatacctggccccagaaatactgaagtgctccatggacgaaactcacccaggttacggcaaagaggtcgatctgtgggcatgcggggtcatactctttactcttttggcaggatcccctcctttttggcatagacgccagattcttatgcttcgaatgatcatggaaggacagtaccagtttagctccccagaatgggacgatcgctcgtcgaccgtgaaggacctgatctctcggcttctgcaagtcgatccagaggcacggctgaccgccgaacaggccctccaacatcccttttttgaacgatgtgagggaagccaaccatggaatctcactcccagacagcgcttcagagtggcggtgtggaccgtcttggctgccggcagagtcgctctgagcacccatcgggtcagaccacttaccaagaacgcactgcttcgtgatccttacgcccttaggtccgtgcgtcatctgatcgacaactgtgcattccgcctgtacggccattgggtgaagaagggggaacagcaaaacagggcagcactgtttcaacaccggccccctggacctttccctatcatggggcccgaagaagagggagatagcgccgctattactgaggatgaagcagtgctcgtcctgggc

SEQ ID NO: 6455 - DNA, 1221 bp, Artificial Sequence
  derived and/or modified sequence
atgaccctggacgtgggccccgaggacgagctgcccgactgggccgccgccaaggagttctaccagaagtacgaccccaaggacgtgatcggcagaggcgtgagcagcgtggtgagaagatgcgtgcacagagccaccggccacgagttcgccgtgaagatcatggaggtgaccgccgagagactgagccccgagcagctggaggaggtgagagaggccaccagaagagagacccacatcctgagacaggtggccggccacccccacatcatcaccctgatcgacagctacgagagcagcagcttcatgttcctggtgttcgacctgatgagaaagggcgagctgttcgactacctgaccgagaaggtggccctgagcgagaaggagaccagaagcatcatgagaagcctgctggaggccgtgagcttcctgcacgccaacaacatcgtgcacagagacctgaagcccgagaacatcctgctggacgacaacatgcagatcagactgagcgacttcggcttcagctgccacctggagcccggcgagaagctgagagagctgtgcggcacccccggctacctggcccccgagatcctgaagtgcagcatggacgagacccaccccggctacggcaaggaggtggacctgtgggcctgcggcgtgatcctgttcaccctgctggccggcagcccccccttctggcacagaagacagatcctgatgctgagaatgatcatggagggccagtaccagttcagcagccccgagtgggacgacagaagcagcaccgtgaaggacctgatcagcagactgctgcaggtggaccccgaggccagactgaccgccgagcaggccctgcagcaccccttcttcgagagatgcgagggcagccagccctggaacctgacccccagacagagattcagagtggccgtgtggaccgtgctggccgccggcagagtggccctgagcacccacagagtgagacccctgaccaagaacgccctgctgagagacccctacgccctgagaagcgtgagacacctgatcgacaactgcgccttcagactgtacggccactgggtgaagaagggcgagcagcagaacagagccgccctgttccagcacagaccccccggccccttccccatcatgggccccgaggaggagggcgacagcgccgccatcaccgaggacgaggccgtgctggtgctgggctag

SEQ ID NO: 6456 - DNA, 1364 bp, Artificial Sequence
  derived and/or modified sequence
gggaaataagagagaaaagaagagtaagaagaaatataagagccaccatgaccctcgacgtcggtccagaagatgagctccccgattgggcagcagcgaaggagttctatcagaaatatgacccgaaggacgtgatcggaagaggagtctcgtcggtagtacgacgctgtgtgcatagagcgaccgggcatgagttcgccgtgaagattatggaagtaactgcggagcgcttgtcgccggagcaattggaagaggtcagagaggccacccggagagaaacacacatcttgcgccaggtcgcgggacatccccacatcatcacgctgattgattcatacgaatcatccagctttatgtttttggtgttcgaccttatgcggaaaggcgagctgttcgattacctgacagagaaagtagcgcttagcgaaaaggaaaccaggtcgatcatgcggtcactccttgaagccgtgtcgtttttgcacgctaacaacatcgtgcatcgcgatcttaaacccgagaatatcttgttggatgacaatatgcagatccggctgtcggacttcgggttctcgtgtcaccttgaaccaggagagaagctgcgcgagttgtgcggaacacccgggtatctggcgcctgagattctcaaatgcagcatggacgaaacacacccgggctacggtaaagaggtggatctctgggcgtgtggggtgatcctttttacgctgctcgcggggtccccacccttttggcatcggaggcagatcctcatgctgcgaatgatcatggaaggacagtatcaattctcctcgcctgagtgggatgacaggtccagcaccgtaaaggacctcatttcccgcttgctgcaagtcgatccggaagccaggcttacggcagaacaggcactgcagcacccgttctttgaacgctgcgagggtagccagccatggaaccttacgccgaggcagagattccgggtcgccgtctggacagtgcttgcggctggaagagtggccctctcaacgcaccgagtccggcccttgacgaaaaatgctcttttgagggacccctacgcgttgaggtcagtaagacacctgattgacaactgcgcattccgcctctacggacactgggtgaagaagggtgagcagcagaatagagcggccctttttcaacatcgacctcctggcccttttcccatcatgggacccgaggaagaaggggattcagcagcgattactgaggacgaggccgtgctcgtactggggtgataagctgccttctgcggggcttgccttctggccatgcccttcttctctcccttgcacctgtacctcttggtctttgaataaagcctgagtaggaag

SEQ ID NO: 6457 - DNA, 1221 bp, Artificial Sequence
  derived and/or modified sequence
atgaccctagatgtcggccccgaagatgagcttcctgactgggcggccgcaaaagagttttaccaaaaatacgacccaaaagacgtgatcgggcggggagtctcttccgtggtgcgacgatgtgtgcatcgggcgacagggcatgaatttgccgtgaaaatcatggaggtaactgcagaaaggctgagcccggagcagctagaagaggtcagagaagctaccagaagagagacacatattctcagacaggtggcaggccaccctcacataatcaccctgatcgactcatatgagagctctagctttatgttcctggtttttgatctgatgagaaaaggggaactatttgattatcttacagagaaggtcgcactgtctgagaaggagactcggagcattatgcgcagcctcttggaggcggtgtcctttcttcatgccaataatatcgttcatcgggatctgaagccagagaacatccttttggacgacaatatgcagattagactcagtgattttggtttctcttgtcatctggaaccaggagagaagctccgcgagttgtgtggcaccccaggatatctagctcccgaaatcctaaaatgttctatggatgaaacccacccagggtatggcaaggaggttgatctctgggcctgcggcgtgatcttgttcacactactggcaggcagtccccctttctggcaccggagacagatactgatgctgcgcatgatcatggaaggacagtaccagttctcaagcccggagtgggacgatcgctcatcgaccgtgaaagatctgatctcaagactgctgcaagtcgacccagaggccagacttacagctgaacaggcactgcagcaccctttcttcgagaggtgtgagggctctcaaccatggaatctgacaccaagacagaggttccgggttgcagtgtggaccgtcctcgccgccggcagagtggcactgtcaacacaccgagtgagacctttgactaagaacgctctgctgcgtgacccttacgcactgaggtcagtgcgccacctgattgacaattgcgcatttaggctgtacggccattgggtcaaaaagggggagcagcagaacagagccgctctgtttcagcacagaccccctggaccctttcccataatggggccggaggaggaaggcgacagtgccgcaatcacggaagatgaggccgtgctggtcctgggctag

SEQ ID NO: 6458 - DNA, 1221 bp, Artificial Sequence
  derived and/or modified sequence
atgaccctcgacgtgggaccagaggatgagcttcctgactgggctgcggccaaggaattttatcagaagtatgacccaaaggatgtaatcggccgcggggtcagcagtgtggtgcggaggtgtgtccatagggccactgggcacgagttcgcggtgaaaatcatggaggttactgctgagcgtctgtctcccgagcagttagaggaggtgagagaagctacgaggagggagacccacatcctgagacaggttgccggtcacccgcatattattaccctgatagattcctacgaatcttctagttttatgtttctggtattcgatctcatgagaaagggcgagctgtttgactatctaaccgagaaagtggccttaagtgagaaggagacccggagcatcatgcggagcctgctcgaggcagtttcattcctgcatgcgaacaatattgtacaccgcgatctgaaaccggagaacattctcctggacgataatatgcaaatccgcctgtctgatttcgggttcagctgccacctggagcccggggagaaactaagagaattatgtggcacaccaggctacttggctcccgaaattctgaagtgctcaatggacgaaacccacccagggtatgggaaagaggtcgatctttgggcctgtggagttatcctcttcactctccttgcaggatcaccccccttctggcatcgacggcagattctgatgctcagaatgattatggaaggccagtatcaattttcttctcctgagtgggacgataggtctagcacagtgaaagatctgataagtcgactgctgcaagtggatcccgaggctcggctaaccgctgaacaggcactacagcatccattcttcgagcggtgtgagggctcccaaccatggaatttgactccgcgtcagcggttccgggtcgcagtgtggacagtcctggcagccgggcgcgtggccttgtcgacacatcgggtgcgacctttaacaaagaacgcactactgcgcgacccttatgccctgagaagcgtgcggcatctcattgataactgcgcatttagactgtatgggcactgggtgaagaagggcgaacagcaaaaccgggcagcattattccagcataggccccccggcccatttccaatcatgggaccagaggaagagggcgacagcgccgcgatcactgaggatgaggctgtgctcgtgttgggctag

SEQ ID NO: 6459 - DNA, 1221 bp, Artificial Sequence
  derived and/or modified sequence
atgaccctggatgtgggcccagaagatgagctgcctgactgggccgccgccaaggagttctaccagaagtatgaccccaaggatgtgattggccggggcgtgtcctctgtggtgagaagatgtgtgcaccgggccaccggccacgagtttgctgtgaagatcatggaggtgacagctgagcggctgagccctgagcagctggaggaggtgcgggaggccacccggcgggagacccacatcctgcggcaggtggccggccacccccacatcatcaccctgattgacagctatgagagcagcagcttcatgttcctggtgtttgacctgatgaggaagggggagctgtttgactacctgacagagaaggtggccctgtctgagaaggagaccaggagcatcatgaggagcctgctggaggccgtgtccttcctgcacgccaacaacatcgtgcaccgggacctgaagccagagaacatcctgctggatgacaacatgcagatccggctgagtgactttggcttcagctgccacctggagcccggggagaagctgcgggagctgtgtggcaccccaggctacctggcccctgagatcctgaagtgcagcatggatgagacccaccctggctacggcaaggaggtggacctgtgggcctgtggggtcatcctcttcaccctgctggccggcagcccccccttctggcaccggcggcagatcctgatgctgaggatgatcatggagggccagtaccagttcagcagccctgagtgggatgacaggagcagcacagtgaaggacctgatcagccggctgctgcaggtggaccctgaggcccggctgacagctgagcaggccctgcagcaccccttctttgagcgctgtgagggcagccagccctggaacctgaccccccggcagcgcttccgggtggccgtgtggacagtgctggccgccggccgggtggccctgagcacccaccgggtgcggcccctgaccaagaatgccctgctgcgggacccctatgccctgcggtctgtgcgccacctgattgacaactgtgccttccggctgtatggccactgggtgaagaagggggagcagcagaacagagctgccctcttccagcaccggcccccaggccccttccccatcatgggccctgaggaggagggggacagcgctgccatcacagaagatgaagctgtgctggtgctgggctag

SEQ ID NO: 6460 - DNA, 1221 bp, Artificial Sequence
  derived and/or modified sequence
atgaccctggacgtgggccccgaggacgagctgcccgactgggccgctgctaaggaattctatcaaaagtatgaccccaaggacgtcattggaaggggggtgagctccgtcgtacgtcgttgtgtacacagagctacagggcatgaattcgcggtcaagatcatggaggttaccgctgaacgactgtcccctgagcaactggaggaggtccgcgaggcaacccgccgtgaaacccatattctccgtcaagtcgccggacacccacatatcatcactctcatcgatagttacgagagtagttccttcatgttcttagtctttgacctcatgaggaagggggagctgtttgattacttgaccgagaaagttgcactttccgaaaaagagactcggtctattatgaggtcgcttctggaggccgtcagttttctgcacgcaaataacattgttcacagggacctgaaacccgagaacatactgctggacgacaatatgcagattagattatctgattttggattttcttgtcacttggagcccggcgagaaattgagggagctgtgcggaacgcctggctatctcgcccccgagatcctcaaatgttcaatggatgagacacatcccggatacggcaaggaagttgatttgtgggcatgtggcgttattctcttcacgcttctagccggtagcccacctttttggcatagaagacagattctgatgctgcgaatgattatggagggacagtaccaattctccagtcccgagtgggatgacagaagctctacagttaaggacctgatctcacggctgcttcaggtggacccggaggcgcggctgactgccgaacaggctctgcagcacccattctttgagaggtgcgaaggctcccagccatggaatctgactccaaggcagcgctttcgcgtcgccgtatggaccgtgttagccgccgggcgagtggcactgagtacccacagggtgcgtccgctgaccaaaaacgctctcttgagggacccctatgcactgaggtccgtacgtcatctcattgataattgtgcgtttcgactctatgggcactgggtgaaaaaaggggaacagcagaacagagctgctctgtttcagcacaggccgcctggacctttcccaattatgggccccgaggaggaaggtgacagtgccgctatcactgaagacgaggccgttctggtcttaggatag

SEQ ID NO: 6461 - DNA, 1221 bp, Artificial Sequence
  derived and/or modified sequence
atgaccctggacgtgggccccgaggacgagctgcccgactgggccgccgctaaggagttctaccagaaatatgaccctaaagatgttatcggtcggggcgtctctagtgtggtgcgcaggtgtgtccaccgagccactggacacgaattcgcagttaaaattatggaagtgactgccgaacggctctcacccgaacagcttgaggaagttagagaagcaacgcgtcgggagacacatatcttacgccaggtagccggacacccacatatcattactctaattgacagctacgagagctcttccttcatgttcttagtgtttgacctcatgcgtaagggggagctcttcgattatttgactgagaaggtggcactttcagagaaagagacgaggtccattatgcgctctcttctggaggccgtgtccttcctacacgcgaacaacatagtgcatcgggacctgaaaccagagaacatcttgctcgatgataacatgcagatccgcctaagcgatttcggcttttcgtgtcatcttgagcctggggaaaagctgagggagttgtgcggaacacctggctacctggcccctgagatccttaagtgttctatggacgagacacacccggggtatgggaaggaagttgatttgtgggcctgtggcgtcatactgttcaccctgttggctggaagccccccattttggcaccgcaggcaaatcctgatgctgagaatgatcatggagggccagtaccaatttagcagtcccgagtgggacgaccgctcatccaccgttaaggacttgatctcacgactcctgcaggtggaccccgaagcaagactcaccgctgagcaggcgcttcagcatcctttttttgaacgctgtgaaggatcccagccatggaacctgaccccgcggcagcggttcagggtcgctgtgtggacagtcctcgccgcagggagggtggcactatctacccaccgtgtacggcccctgactaagaatgcgctgctgcgagacccttatgccctcagaagcgtcaggcacctgatagataactgcgcttttagactgtatggtcattgggttaagaagggggaacaacaaaaccgagccgctctcttccagcatcggccaccaggccctttccctataatgggccccgaagaggagggggactctgccgcgatcacagaggacgaagctgtgttagtgctgggttag

SEQ ID NO: 6462 - DNA, 1221 bp, Artificial Sequence
  derived and/or modified sequence
atgacacttgatgtgggacccgaagacgagctgcctgattgggccgctgccaaggaattttatcagaagtatgacccaaaagatgtgatcgggaggggcgtttcaagtgttgtgcggagatgtgtgcatcgtgcgactgggcacgaatttgccgtcaagataatggaggtgaccgcagagcgcctcagcccggaacaattggaggaagttcgggaggctacacggagagagacccacatactccgacaggtagccggtcacccacacattattacactgatcgatagctacgagtcatccagctttatgtttctggtcttcgatctgatgcggaagggtgagttgtttgattacttgacagagaaagtggctctgtcggagaaagaaacacgcagcatcatgaggtcactcctggaggccgtgtctttcctgcacgctaataacatcgtgcaccgcgatctgaaaccagagaatatcttactcgatgacaatatgcagattcgcctgtccgatttcggcttttcgtgccacctggagcctggagaaaaactcagagaactgtgtggcacacccggatacctggctcccgagatcctgaagtgtagcatggatgagacccacccgggatacggtaaggaggtggacctgtgggcttgcggagtcattttatttaccctgctcgctggctcaccacccttttggcatagaaggcagattctcatgctaaggatgattatggagggtcagtaccagttcagctcacccgagtgggacgacagatcatccacagtgaaggacttgatctctagactcctgcaagtggacccggaggctaggttgaccgccgaacaagccctccagcacccttttttcgagcgatgtgagggtagccagccttggaatttgacgcccaggcagagattccgggtggcagtctggactgtgttggctgcaggcagagtggccctgagtacacacagagttagacccctgacaaaaaatgctctgctgcgggatccttacgcactgcggtctgtcagacacttgatcgacaactgcgcgttccggctttacgggcactgggtgaagaagggcgagcagcagaatagagccgcactgtttcagcatcgccctcccggtccttttcctatcatgggaccggaggaagaaggcgactctgccgctattaccgaagacgaagccgtgctcgtgctagggtag

SEQ ID NO: 6463 - DNA, 1221 bp, Artificial Sequence
  derived and/or modified sequence
atgactttggacgtgggacctgaggatgaacttccagactgggcagcagccaaggagttttatcagaaatacgatcctaaggacgtgattggcagaggagtgagttccgtcgtgcggagatgcgtgcaccgagcaactggacacgagtttgctgtcaaaatcatggaagtaacggcagagcgcctttcccctgaacagttggaagaggtacgggaagccacgaggagagaaactcatatactgagacaggtggctggtcatccccatattattactctgatagactcatacgaatcctcttcatttatgtttctggtcttcgatctgatgcgaaaaggggagctcttcgactatctcaccgaaaaggttgctctttccgaaaaggaaacacgtagtatcatgcgctcgctgctggaggcggtctcttttctccacgcgaacaacatagtgcaccgggacctcaagcccgagaacattctgctggacgacaatatgcaaatcaggctctctgatttcggcttctcgtgccaccttgagcccggagaaaaactccgggaactctgtggtacccctggctacctcgcccctgagattttgaaatgctccatggacgaaactcatcccggatacgggaaggaggtggacctgtgggcctgcggggtaatactttttaccctactggctggaagtcctccattctggcaccggagacaaatacttatgctgcgcatgatcatggaaggacagtatcagtttagcagtcctgagtgggacgataggtctagcactgtgaaagacctaattagcagactccttcaggtggacccagaggccaggctgacagccgagcaggccctgcagcacccattctttgagcggtgcgaggggtctcagccctggaacctcacaccccgacagcgcttcagagtcgccgtttggaccgtcctggctgcaggcagggtggctctttcaacccaccgggttcgaccgctgaccaaaaacgccttattgcgggacccctacgctctgcgttccgtcaggcatttgatcgacaattgtgcctttcgtttatacgggcactgggtgaaaaagggggagcagcagaaccgagcagctctgtttcaacaccgacccccaggaccgttccctatcatgggacccgaggaggagggggacagtgctgccataaccgaggatgaagcggtgctagttttgggttag

SEQ ID NO: 6464 - DNA, 5532 bp, Artificial Sequence
  derived and/or modified sequence
agccgagcgccgactcacgccccagccccaattgggcggccggtttccaattggaagggcttctgagcctcagtcttcgggcggcgctgaccattggcgggcaggatggaggcggagccttgggttgtcgcccgccgccgggggttaaggtgagcgactgcaggcaaacccggcgacagcgcagctcgcgtcgaccctggctcctctgcctgccccctcaggcccccgcctccttcaggatgacgctggacgtggggccggaggatgagctgcccgactgggccgccgccaaagagttttaccagaagtacgaccctaaggacgtcatcggcagaggagtgagctctgtggtccgccgttgtgttcatcgagctactggccacgagtttgcggtgaagattatggaagtgacagctgagcggctgagtcctgagcagctggaggaggtgcgggaagccacacggcgagagacacacatccttcgccaggtcgccggccacccccacatcatcaccctcatcgattcctacgagtcttctagcttcatgttcctggtgtttgacctgatgcggaagggagagctgtttgactatctcacagagaaggtggccctctctgaaaaggaaaccaggtccatcatgcggtctctgctggaagcagtgagctttctccatgccaacaacattgtgcatcgagatctgaagcccgagaatattctcctagatgacaatatgcagatccgactttcagatttcgggttctcctgccacttggaacctggcgagaagcttcgagagttgtgtgggaccccagggtatctagcgccagagatccttaaatgctccatggatgaaacccacccaggctatggcaaggaggtcgacctctgggcctgtggggtgatcttgttcacactcctggctggctcgccacccttctggcaccggcggcagatcctgatgttacgcatgatcatggagggccagtaccagttcagttcccccgagtgggatgaccgttccagcactgtcaaagacctgatctccaggctgctgcaggtggatcctgaggcacgcctgacagctgagcaggccctacagcaccccttctttgagcgttgtgaaggcagccaaccctggaacctcaccccccgccagcggttccgggtggcagtgtggacagtgctggctgctggacgagtggccctaagcacccatcgtgtacggccactgaccaagaatgcactgttgagggacccttatgcgctgcggtcagtgcggcacctcatcgacaactgtgccttccggctctacgggcactgggtaaagaaaggggagcagcagaaccgggcggctctctttcagcaccggccccctgggccttttcccatcatgggccctgaagaggagggagactctgctgctataactgaggatgaggccgtgcttgtgctgggctaggacctcaaccccagggattcccaggaagcagaactctccagaagaagggttttgatcattccagctcctctgggctctggcctctggcctcaggcccactaatgatcctgctaccctcttgaagaccagcccggtacctctctccccactggccaggactctgagatcagagctggggtggaagggagccattctgaacgccacgcctggcccggtcagtgctgcatgcactgcatatgaaataaaatctgctacacgccagggagaacaggtgtcctgtgtctgtctggcttgggcaggaaagcccagaaggtgctcagcagggtgcagggatggtgccattctggcccagacctttattggggaaaatgttgggggtcacttggtcttgctcttgcctttacccggaggtagctggaagggccgctctagtgcagtcaacttgctgctgagcctttcctcgctggccttgagccgctcctccaccagcccctggagctgctccagctctttgttcacttgggtcttgatgtaggctcggaggacgtggatgtggcctgcaggggcagggaagaaggggcagggtgaggagagatgctgtctggcaatggggggatggtccctagttgggcaaacagtccccaaatttcccctggtggggatatagaggtagcaatgttgtttccctttaggaaatgttagcaagcccttgtgtgagaggtagttgggtagggtggctatgctggactttgcagcttcaaattctgatccctactcagtagctgtgtgaccttaggcaggttatttaacctatctgtgcctcagtttccttgtatgaaatgtggatagtgatacctagcacataggattgagggaggattaaatgagttaatttatgtaaaatgcttagagcagggcatgcactgcacacctattgccaagtatgtgctggctgttattgtcattggctttctctttttttttttttttttgagatggagtcttgctttatcccccaggctggagtgcagtggcagcgatctcagctcactgcaagctctgcctcccaggttcatgccattctcctgcctcagcctcccagtagctgggactacaggcacccgccaccacgcccggctaactttttgtatttttagtagagacggggtttcacagtgttagccaggatggactcgatctcctgacctcgtgatccgcctgcctcagcctcccaaagtgctgggattacagttgtgagccactgcacctggcctgttctttgtttttttttaactcttaagttctgggatacgagcagaacatgcaggtttgctacgtaggtatacatgggccatggtggtttgctttacccatcaacccatcatataggttttaagccaccgtcattggctttctaatgatcatttctctggagccacttcagctgtgctttttgtttgtttgtttgtttgttttgagacagagtcttgctctgttgcccaggctggagtgcagtggccagatcttggctcactgcagtctccacctcctgggttcatgcagttctcctgcctcagcctcctgagtagctgggactacaagcgcgcaccaccatgcctggctattttttgtattttagtagatagggggtttcacggtgttgcccaggctggtcgcgaactcctgagctcaggcaatccgcctgcctcagattgtgctgggattacaggtgtgagccaccacgcctggcctgcagctgtgcttttatctgtcatcttggacttctgcataagggatcatttagagaaaggactctgactaaaaacaaaaagtctgaagtcctgatgtcatccaaacccttcattctacacctgctcagagggacagggcagcctgccctctccagatcctcacttggctctggctctggtggggccactgtctctagttcctctttctgcggggtaactgcctgctcctccatctccttgctttcttctttctctgcaaaccagaagcaggaagagactgtggccccaggcctggcccagcccagccctgccctggcactctcccttacccgtctcactctctggccacagtttgggtggctgtagccccatgtaagtcaaagacagatccagccgcacctgggaagcaaggcagagggaggctgaaaggagtgcacctgtgctgaggggaggggcggttgagggtggctcctcatggtccaccaccccctacctggggtgtgaagacgtatttatagagcttgaagtggcggaagtaagtgttgaccacgtagtcttccaaggccagcagctgttcctctttgaagaggtcgatgctgaaaggaggccgctgtggtggtgactcggaattagaaccctgactaccttccggagccctggctttgcctccaaaagcccagcaacaggagcaaggagagcccactggggtcttcacaagaagataagggtgatgaatgtgagagagactgggtgagaccttgtctggggatgggtaaagtttccagaatgttccaggggaactgaccctgactccatggcaaaaaaggacactggtgaagtagcggtagcactcctccacgttgcccaagggggttgctggtagggaaagcaagatgcagcagtgaggccctctctggtatccattcattcacttcactcaacagctgtttatgaccatgagcttcagaagcagacagatctgggtttcagcactggcttgtttccttaactcatgtaacaaatactgaatacccactatatgcccactgtatggttttcggcactgaacaagacagacaaggtcctgcccttacgaagcttatattctaggggaataaaccaagaaatagatcatttcagctattaaacattctgaagcaagagctattaaacattctaaagcaggtgttattgtgcactatgcatatatttgcatatattatttctcagaacagtcctgtaaaatgtgtgctgtatccttaatttctagataaggaagcagtggattggaaagctgatggcttgtgtatgatgatgctactaataatgacatattccaggcagaaatcccctgcttctgcttcccatggtcacttgtgccaggcccggttcctcttctccctggggctcaaacctggtagctgccccctctcaccaatacaagccttgtgaagatcctggagcagggcacaagccgctgacgtctgctccagtgagaagccctgctggcggcagaaaatgagcgcgtggcagaagaggtccagggtgatggcgtccctcaggctctgctcaggacaccctagctccagcagctcagccagcacccttgggagggagagaggagtgagtgacaactgggcctcctttcatcaccctacacccaccacatgctttggagtcagccattcctcatgttttcccaacctgacccctcagcctttgccaagagctcttcccacgcccccctcagtccctactccctcatctcagcattggtggtcttctccagctggtgcatggaatggacgtccaggtacttcctgttatagtaaaagaaaaagagtattggtggccgttacctatcatgacaaggctgtgacagctagtgcgtgagactgggagttggccaccggcgtgaagctgggctcttttgccagcttgctgtgtgactatgcaaatcgttaactctctgggcctaaatgaactcttatgagcctctccatttctaaagcctagggttaggaatcttgaattcttttttctgctctgccactaccttgtatgaccttggtcaagtactccctgtggccctcagtgtccccctctgtacaatactccttagcggccatgagactccatttacattctgtctttggctctttttttctcacactgcctcctctttggactggagaggctggaaagccaacttccagtcacctggagtaattgcatctccaggcctcagtctcatctgtaaaatggggatgccctggccacagacaggactgttggggagacaataaagaacgcaaatattc

SEQ ID NO: 6465 - DNA, 1728 bp, Artificial Sequence
  derived and/or modified sequence
agccgagcgccgactcacgccccagccccaattgggcggccggtttccaattggaagggcttctgagcctcagtcttcgggcggcgctgaccattggcgggcaggatggaggcggagccttgggttgtcgcccgccgccgggggttaaggtgagcgactgcaggcaaacccggcgacagcgcagctcgcgtcgaccctggctcctctgcctgccccctcaggcccccgcctccttcaggatgacgctggacgtggggccggaggatgagctgcccgactgggccgccgccaaagagttttaccagaagtacgaccctaaggacgtcatcggcagaggagtgagctctgtggtccgccgttgtgttcatcgagctactggccacgagtttgcggtgaagattatggaagtgacagctgagcggctgagtcctgagcagctggaggaggtgcgggaagccacacggcgagagacacacatccttcgccaggtcgccggccacccccacatcatcaccctcatcgattcctacgagtcttctagcttcatgttcctggtgtttgacctgatgcggaagggagagctgtttgactatctcacagagaaggtggccctctctgaaaaggaaaccaggtccatcatgcggtctctgctggaagcagtgagctttctccatgccaacaacattgtgcatcgagatctgaagcccgagaatattctcctagatgacaatatgcagatccgactttcagatttcgggttctcctgccacttggaacctggcgagaagcttcgagagttgtgtgggaccccagggtatctagcgccagagatccttaaatgctccatggatgaaacccacccaggctatggcaaggaggtcgacctctgggcctgtggggtgatcttgttcacactcctggctggctcgccacccttctggcaccggcggcagatcctgatgttacgcatgatcatggagggccagtaccagttcagttcccccgagtgggatgaccgttccagcactgtcaaagacctgatctccaggctgctgcaggtggatcctgaggcacgcctgacagctgagcaggccctacagcaccccttctttgagcgttgtgaaggcagccaaccctggaacctcaccccccgccagcggttccgggtggcagtgtggacagtgctggctgctggacgagtggccctaagcacccatcgtgtacggccactgaccaagaatgcactgttgagggacccttatgcgctgcggtcagtgcggcacctcatcgacaactgtgccttccggctctacgggcactgggtaaagaaaggggagcagcagaaccgggcggctctctttcagcaccggccccctgggccttttcccatcatgggccctgaagaggagggagactctgctgctataactgaggatgaggccgtgcttgtgctgggctaggacctcaaccccagggattcccaggaagcagaactctccagaagaagggttttgatcattccagctcctctgggctctggcctctggcctcaggcccactaatgatcctgctaccctcttgaagaccagcccggtacctctctccccactggccaggactctgagatcagagctggggtggaagggagccattctgaacgccacgcctggcccggtcagtgctgcatgcactgcatatgaaataaaatctgctacacgccagggagaa

SEQ ID NO: 6466 - RNA, 1364 nt, Artificial Sequence
  derived and/or modified sequence
gggaaauaagagagaaaagaagaguaagaagaaauauaagagccaccaugacccucgacgucgguccagaagaugagcuccccgauugggcagcagcgaaggaguucuaucagaaauaugacccgaaggacgugaucggaagaggagucucgucgguaguacgacgcugugugcauagagcgaccgggcaugaguucgccgugaagauuauggaaguaacugcggagcgcuugucgccggagcaauuggaagaggucagagaggccacccggagagaaacacacaucuugcgccaggucgcgggacauccccacaucaucacgcugauugauucauacgaaucauccagcuuuauguuuuugguguucgaccuuaugcggaaaggcgagcuguucgauuaccugacagagaaaguagcgcuuagcgaaaaggaaaccaggucgaucaugcggucacuccuugaagccgugucguuuuugcacgcuaacaacaucgugcaucgcgaucuuaaacccgagaauaucuuguuggaugacaauaugcagauccggcugucggacuucggguucucgugucaccuugaaccaggagagaagcugcgcgaguugugcggaacacccggguaucuggcgccugagauucucaaaugcagcauggacgaaacacacccgggcuacgguaaagagguggaucucugggcguguggggugauccuuuuuacgcugcucgcgggguccccacccuuuuggcaucggaggcagauccucaugcugcgaaugaucauggaaggacaguaucaauucuccucgccugagugggaugacagguccagcaccguaaaggaccucauuucccgcuugcugcaagucgauccggaagccaggcuuacggcagaacaggcacugcagcacccguucuuugaacgcugcgaggguagccagccauggaaccuuacgccgaggcagagauuccgggucgccgucuggacagugcuugcggcuggaagaguggcccucucaacgcaccgaguccggcccuugacgaaaaaugcucuuuugagggaccccuacgcguugaggucaguaagacaccugauugacaacugcgcauuccgccucuacggacacugggugaagaagggugagcagcagaauagagcggcccuuuuucaacaucgaccuccuggcccuuuucccaucaugggacccgaggaagaaggggauucagcagcgauuacugaggacgaggccgugcucguacuggggugauaagcugccuucugcggggcuugccuucuggccaugcccuucuucucucccuugcaccuguaccucuuggucuuugaauaaagccugaguaggaag

SEQ ID NO: 6467 - protein, 4302 aa, Artificial Sequence
  derived and/or modified sequence
MPPAAPARLALALGLGLWLGALAGGPGRGCGPCEPPCLCGPAPGAACRVNCSGRGLRTLGPALRIPADATALDVSHNLLRALDVGLLANLSALAELDISNNKISTLEEGIFANLFNLSEINLSGNPFECDCGLAWLPRWAEEQQVRVVQPEAATCAGPGSLAGQPLLGIPLLDSGCGEEYVACLPDNSSGTVAAVSFSAAHEGLLQPEACSAFCFSTGQGLAALSEQGWCLCGAAQPSSASFACLSLCSGPPPPPAPTCRGPTLLQHVFPASPGATLVGPHGPLASGQLAAFHIAAPLPVTATRWDFGDGSAEVDAAGPAASHRYVLPGRYHVTAVLALGAGSALLGTDVQVEAAPAALELVCPSSVQSDESLDLSIQNRGGSGLEAAYSIVALGEEPARAVHPLCPSDTEIFPGNGHCYRLVVEKAAWLQAQEQCQAWAGAALAMVDSPAVQRFLVSRVTRSLDVWIGFSTVQGVEVGPAPQGEAFSLESCQNWLPGEPHPATAEHCVRLGPTGWCNTDLCSAPHSYVCELQPGGPVQDAENLLVGAPSGDLQGPLTPLAQQDGLSAPHEPVEVMVFPGLRLSREAFLTTAEFGTQELRRPAQLRLQVYRLLSTAGTPENGSEPESRSPDNRTQLAPACMPGGRWCPGANICLPLDASCHPQACANGCTSGPGLPGAPYALWREFLFSVPAGPPAQYSVTLHGQDVLMLPGDLVGLQHDAGPGALLHCSPAPGHPGPRAPYLSANASSWLPHLPAQLEGTWACPACALRLLAATEQLTVLLGLRPNPGLRLPGRYEVRAEVGNGVSRHNLSCSFDVVSPVAGLRVIYPAPRDGRLYVPTNGSALVLQVDSGANATATARWPGGSVSARFENVCPALVATFVPGCPWETNDTLFSVVALPWLSEGEHVVDVVVENSASRANLSLRVTAEEPICGLRATPSPEARVLQGVLVRYSPVVEAGSDMVFRWTINDKQSLTFQNVVFNVIYQSAAVFKLSLTASNHVSNVTVNYNVTVERMNRMQGLQVSTVPAVLSPNATLALTAGVLVDSAVEVAFLWTFGDGEQALHQFQPPYNESFPVPDPSVAQVLVEHNVMHTYAAPGEYLLTVLASNAFENLTQQVPVSVRASLPSVAVGVSDGVLVAGRPVTFYPHPLPSPGGVLYTWDFGDGSPVLTQSQPAANHTYASRGTYHVRLEVNNTVSGAAAQADVRVFEELRGLSVDMSLAVEQGAPVVVSAAVQTGDNITWTFDMGDGTVLSGPEATVEHVYLRAQNCTVTVGAASPAGHLARSLHVLVFVLEVLRVEPAACIPTQPDARLTAYVTGNPAHYLFDWTFGDGSSNTTVRGCPTVTHNFTRSGTFPLALVLSSRVNRAHYFTSICVEPEVGNVTLQPERQFVQLGDEAWLVACAWPPFPYRYTWDFGTEEAAPTRARGPEVTFIYRDPGSYLVTVTASNNISAANDSALVEVQEPVLVTSIKVNGSLGLELQQPYLFSAVGRGRPASYLWDLGDGGWLEGPEVTHAYNSTGDFTVRVAGWNEVSRSEAWLNVTVKRRVRGLVVNASRTVVPLNGSVSFSTSLEAGSDVRYSWVLCDRCTPIPGGPTISYTFRSVGTFNIIVTAENEVGSAQDSIFVYVLQLIEGLQVVGGGRYFPTNHTVQLQAVVRDGTNVSYSWTAWRDRGPALAGSGKGFSLTVLEAGTYHVQLRATNMLGSAWADCTMDFVEPVGWLMVAASPNPAAVNTSVTLSAELAGGSGVVYTWSLEEGLSWETSEPFTTHSFPTPGLHLVTMTAGNPLGSANATVEVDVQVPVSGLSIRASEPGGSFVAAGSSVPFWGQLATGTNVSWCWAVPGGSSKRGPHVTMVFPDAGTFSIRLNASNAVSWVSATYNLTAEEPIVGLVLWASSKVVAPGQLVHFQILLAAGSAVTFRLQVGGANPEVLPGPRFSHSFPRVGDHVVSVRGKNHVSWAQAQVRIVVLEAVSGLQVPNCCEPGIATGTERNFTARVQRGSRVAYAWYFSLQKVQGDSLVILSGRDVTYTPVAAGLLEIQVRAFNALGSENRTLVLEVQDAVQYVALQSGPCFTNRSAQFEAATSPSPRRVAYHWDFGDGSPGQDTDEPRAEHSYLRPGDYRVQVNASNLVSFFVAQATVTVQVLACREPEVDVVLPLQVLMRRSQRNYLEAHVDLRDCVTYQTEYRWEVYRTASCQRPGRPARVALPGVDVSRPRLVLPRLALPVGHYCFVFVVSFGDTPLTQSIQANVTVAPERLVPIIEGGSYRVWSDTRDLVLDGSESYDPNLEDGDQTPLSFHWACVASTQREAGGCALNFGPRGSSTVTIPRERLAAGVEYTFSLTVWKAGRKEEATNQTVLIRSGRVPIVSLECVSCKAQAVYEVSRSSYVYLEGRCLNCSSGSKRGRWAARTFSNKTLVLDETTTSTGSAGMRLVLRRGVLRDGEGYTFTLTVLGRSGEEEGCASIRLSPNRPPLGGSCRLFPLGAVHALTTKVHFECTGWHDAEDAGAPLVYALLLRRCRQGHCEEFCVYKGSLSSYGAVLPPGFRPHFEVGLAVVVQDQLGAAVVALNRSLAITLPEPNGSATGLTVWLHGLTASVLPGLLRQADPQHVIEYSLALVTVLNEYERALDVAAEPKHERQHRAQIRKNITETLVSLRVHTVDDIQQIAAALAQCMGPSRELVCRSCLKQTLHKLEAMMLILQAETTAGTVTPTAIGDSILNITGDLIHLASSDVRAPQPSELGAESPSRMVASQAYNLTSALMRILMRSRVLNEEPLTLAGEEIVAQGKRSDPRSLLCYGGAPGPGCHFSIPEAFSGALANLSDVVQLIFLVDSNPFPFGYISNYTVSTKVASMAFQTQAGAQIPIERLASERAITVKVPNNSDWAARGHRSSANSANSVVVQPQASVGAVVTLDSSNPAAGLHLQLNYTLLDGHYLSEEPEPYLAVYLHSEPRPNEHNCSASRRIRPESLQGADHRPYTFFISPGSRDPAGSYHLNLSSHFRWSALQVSVGLYTSLCQYFSEEDMVWRTEGLLPLEETSPRQAVCLTRHLTAFGASLFVPPSHVRFVFPEPTADVNYIVMLTCAVCLVTYMVMAAILHKLDQLDASRGRAIPFCGQRGRFKYEILVKTGWGRGSGTTAHVGIMLYGVDSRSGHRHLDGDRAFHRNSLDIFRIATPHSLGSVWKIRVWHDNKGLSPAWFLQHVIVRDLQTARSAFFLVNDWLSVETEANGGLVEKEVLAASDAALLRFRRLLVAELQRGFFDKHIWLSIWDRPPRSRFTRIQRATCCVLLICLFLGANAVWYGAVGDSAYSTGHVSRLSPLSVDTVAVGLVSSVVVYPVYLAILFLFRMSRSKVAGSPSPTPAGQQVLDIDSCLDSSVLDSSFLTFSGLHAEAFVGQMKSDLFLDDSKSLVCWPSGEGTLSWPDLLSDPSIVGSNLRQLARGQAGHGLGPEEDGFSLASPYSPAKSFSASDEDLIQQVLAEGVSSPAPTQDTHMETDLLSSLSSTPGEKTETLALQRLGELGPPSPGLNWEQPQAARLSRTGLVEGLRKRLLPAWCASLAHGLSLLLVAVAVAVSGWVGASFPPGVSVAWLLSSSASFLASFLGWEPLKVLLEALYFSLVAKRLHPDEDDTLVESPAVTPVSARVPRVRPPHGFALFLAKEEARKVKRLHGMLRSLLVYMLFLLVTLLASYGDASCHGHAYRLQSAIKQELHSRAFLAITRSEELWPWMAHVLLPYVHGNQSSPELGPPRLRQVRLQEALYPDPPGPRVHTCSAAGGFSTSDYDVGWESPHNGSGTWAYSAPDLLGAWSWGSCAVYDSGGYVQELGLSLEESRDRLRFLQLHNWLDNRSRAVFLELTRYSPAVGLHAAVTLRLEFPAAGRALAALSVRPFALRRLSAGLSLPLLTSVCLLLFAVHFAVAEARTWHREGRWRVLRLGAWARWLLVALTAATALVRLAQLGAADRQWTRFVRGRPRRFTSFDQVAQLSSAARGLAASLLFLLLVKAAQQLRFVRQWSVFGKTLCRALPELLGVTLGLVVLGVAYAQLAILLVSSCVDSLWSVAQALLVLCPGTGLSTLCPAESWHLSPLLCVGLWALRLWGALRLGAVILRWRYHALRGELYRPAWEPQDYEMVELFLRRLRLWMGLSKVKEFRHKVRFEGMEPLPSRSSRGSKVSPDVPPPSAGSDASHPSTSSSQLDGLSVSLGRLGTRCEPEPSRLQAVFEALLTQFDRLNQATEDVYQLEQQLHSLQGRRSSRAPAGSSRGPSPGLRPALPSRLARASRGVDLATGPSRTPLRAKNKVHPSST

SEQ ID NO: 6468 - DNA, 12909 bp, Artificial Sequence
  derived and/or modified sequence
atgccacccgccgcccccgctagacttgcactggcattaggtttagggctttggctgggagcccttgccggggggccggggagagggtgcgggccctgtgaacctccatgcctttgtggaccagctcccggagccgcgtgtcgcgtcaattgttctggcaggggcctgcgcactctgggtcccgcgttgcggattcccgccgacgccacagccttggatgtttcccataatctcttaagagcgctggacgtagggttgttagctaacttatcggcacttgcggagctcgatatttctaataataaaatcagcaccctcgaggagggaattttcgctaacctgttcaacctgagcgagatcaatttatctgggaatccttttgagtgtgattgtggattggcttggctgccccggtgggcagaggaacagcaggtcagagttgtccagccagaggcggctacttgcgccgggcctggaagtctcgccgggcagccactccttggcatcccactgctcgattcaggatgtggcgaagaatatgtagcttgcttgcccgataactccagtgggactgtggctgctgtttcattttcagcagcacatgaaggccttctgcagcctgaggcgtgtagtgctttttgtttctcgacaggccaaggactggcagcgctgagcgagcagggctggtgtttgtgcggcgcagcacagccaagttccgcctccttcgcgtgcctttccctatgcagtggacctccccccccaccagctccgacctgtcgaggccctactctacttcaacacgtctttcccgcgtcgccgggggccactctggtgggaccccacggccccctggcctctggacaattggccgcatttcatattgccgcccctctgcctgtaacggccacccgctgggattttggcgacgggtcagctgaggtcgatgcagcagggcctgctgcctcccacaggtacgtactccctggaaggtatcatgtcaccgccgtccttgccttgggcgctgggtcggccctcctgggtacagacgtccaggtggaggcagctcccgctgcacttgagttagtttgtccgagttctgtgcagtccgacgaatcattggacctgtctatccagaaccgtgggggtagtgggcttgaagcagcatacagtattgtcgcgctaggcgaagagcccgctcgcgccgtgcatcccttatgccccagtgatacggagattttccccgggaacgggcattgctaccgcttagtggtggagaaagccgcctggcttcaggcacaggaacaatgccaagcttgggcgggagccgctctcgccatggtggacagccctgccgtgcaaagatttctcgtttcacgtgtcactcgctccttggacgtctggattggcttctccacggtgcagggcgttgaagtagggccagcaccccagggcgaagcattttcacttgagtcctgccagaattggctgccaggagaacctcaccccgctacagctgaacactgtgtgcgactggggcccaccggctggtgtaatacagacctctgttctgcccctcacagctatgtctgcgaattacagcccggcggccccgttcaggacgcggagaacttgctggttggagcgccttccggtgacctccagggaccactgactccgctggcacagcaggatgggttgagcgctccccatgaacctgtagaagtgatggtgtttccaggcctacgcttgagccgcgaagcctttctgacgacggctgaattcggaacccaagagctgcgacgccctgcgcagctgcgcttacaggtgtacaggctcctgagcaccgctgggacccctgaaaatggatctgagcctgagtcccggtctcccgacaatcgaacccagctggcacctgcgtgcatgcccggaggaaggtggtgtcctggggcaaatatttgtctaccgctggacgcttcctgccacccacaggcgtgtgccaatggttgcacatcagggccaggcctccccggagctccctatgctctgtggcgtgagttcttgttctccgtgccagcgggccctcccgctcagtatagcgtgacactccatggccaagacgtgctgatgttgccaggcgaccttgttggactacagcacgacgccggacctggggcgctgctacactgttctccagcgcccggccatcccggaccccgcgccccatatctgtccgccaacgcatcatcatggctgccccatttaccggcccagctggaaggcacctgggcctgcccggcctgcgctcttaggttgcttgccgctactgagcagctgacagtgctgttggggttgcgccccaatcccggcttgaggctgccgggacggtatgaggtgagagccgaagtcggaaacggagtcagccgacataacttgtcctgttcgtttgacgtagtgtctccagtagcaggactccgcgtgatctatcctgccccacgggacggcagattgtacgttcctacaaatggtagtgctctggtgctccaggttgattcaggagctaacgccactgcaaccgccagatggccgggcggcagcgtctccgcaagatttgagaacgtgtgccctgcactggtggccacatttgtccctggatgtccgtgggaaaccaacgacacgctgttctccgtggtagctctgccctggctctctgagggagagcacgttgtcgacgtggtcgtagagaactcagcctcaagagcgaacctgagtcttagggtcaccgcagaagagccgatctgtggactcagggcaacaccttctcctgaagcacgggtcttgcaaggcgtcctcgtgcggtattccccggttgtggaggccgggtcagatatggtatttcggtggaccattaacgataaacagtccctgaccttccagaatgtggtgtttaatgtgatctatcagagcgctgcagttttcaagctgtctctgaccgctagcaaccacgtgtccaacgtgacagttaattataacgtgactgtggagcgaatgaaccgcatgcaaggcctgcaggtgtcaactgttccagctgtcctctccccaaacgcaaccctagctctaaccgcaggagtcctggttgattccgccgtggaggtggccttcctttggaccttcggcgacggtgagcaggccttgcaccagtttcaaccaccctacaacgaatcttttcctgtgcctgacccatccgtcgctcaggtcctggtggaacacaacgtgatgcatacttatgccgctccgggagaatacctgctcactgtgctggcctccaacgcttttgagaacctcactcagcaggttccggtctctgtaagggccagtctcccaagcgttgccgtgggagtatcggatggcgtgttagttgcgggtagaccagttaccttttaccctcaccctctgcccagcccgggcggtgtgttgtacacctgggattttggcgacggctcccccgtcttaacgcagtcgcaacctgcagccaaccacacatacgctagtcgcggcacctaccatgtgaggctggaggtgaacaacaccgtgtccggagctgccgctcaggccgacgtgcgagtgttcgaggagctccgggggctgtccgtcgatatgtcactggcagtggaacagggagctccagtcgtggtttccgccgccgtgcagacaggcgacaacattacttggaccttcgatatgggcgacggtacagtcttgagtgggcctgaggcaaccgtagagcatgtctatctaagggcccaaaattgcactgtgacggtgggtgctgcttccccggccggtcaccttgcccggtctcttcacgtgctggtatttgtgctcgaggtgctacgggtcgagccagccgcctgtattcctacccagccagacgcgaggctgactgcttacgtgactggcaaccccgcccactatctgtttgactggacgttcggcgatggtagttccaataccacagtaagagggtgtcccacagtgacgcacaactttacccgcagcggcacattccccttagctctggtgctgtcctcacgggtgaatagggcgcactacttcacctcgatttgcgtcgagcctgaggtcggaaacgtcacactccagccagaaaggcagttcgtccagctcggagacgaggcctggttggttgcttgcgcttggccacctttcccatatcgctacacttgggatttcggaacagaggaggccgctccaaccagagcacggggcccagaggtgacatttatctacagagatccagggtcttatctggtaaccgtgactgcgagtaacaacatctccgccgcgaacgatagcgcactggttgaggtgcaggagcctgtcttagtgacctccattaaggtgaatggaagtctgggacttgaactgcagcaaccctatctgtttagtgccgtgggaagaggaaggcctgccagctacctgtgggacttaggggacgggggttggctagaaggtcccgaagtgacccacgcgtacaactcaacaggggactttactgtccgagtggctggctggaatgaagtctctcggtcagaggcgtggctgaacgtcaccgtcaaaaggagggtgagaggtctggttgttaacgcctctcgtacagtagttcctctgaatggctcggtgtccttctcaaccagcctagaggccggcagcgatgtgcggtattcctgggtcctgtgtgataggtgtactccaattccaggcggcccaacaattagctatacctttagatccgtaggaactttcaacattattgtgactgccgagaatgaagtgggaagcgctcaggattcgattttcgtctacgtgctccaactgatagagggcctgcaggtggtgggtggcggtagatacttcccaactaaccatacagtacagctgcaggccgtggtgcgcgacggtactaatgtcagctacagttggacagcttggcgggacaggggccccgccctcgctggatctggtaaaggtttctctcttaccgttcttgaagcaggcacttatcacgtgcagcttagagccactaacatgctcggcagcgcctgggcagattgtacaatggatttcgtagagcccgtgggttggctgatggtcgcagcctcccctaaccctgcagcagtgaacacctcagtgaccctgtccgccgagctagcaggcggttcaggggtggtgtatacctggtccctggaggaagggttatcctgggagacgagtgaaccattcacaacccatagtttccctactccaggactgcatctggtcactatgactgccggaaaccctctgggttccgcgaatgcaaccgtagaagtagacgtgcaggtccccgttagcggtctgtcaattagggccagcgagccggggggcagcttcgttgccgctggctcttctgttcccttctgggggcagcttgcaaccggaactaatgtgagctggtgttgggctgtgcccggcggcagctcaaagcggggaccccacgtcacaatggttttcccagatgccggcacattcagcattcggctgaatgcgagcaacgcagtgtcgtgggtgtcagctacatacaaccttaccgcggaggaacccatcgtagggcttgttctgtgggcctctagtaaagtggtggcccctgggcagctggtgcattttcagatcttgctcgctgccggttccgcagtcacatttcggctgcaggtggggggtgcaaacccggaggtcctgccaggccctaggttctcccatagcttcccacgggtgggagatcacgtggttagcgtgaggggaaaaaaccatgtttcgtgggctcaggcgcaggtcaggatagtagtcctggaagccgtgtctggcctgcaggttccaaattgttgcgaaccaggcatcgccaccggtacagagcggaatttcacagccagggttcaaaggggttccagggtggcatatgcctggtatttctcattgcagaaagtgcagggcgactcactcgtcatcctatcggggcgggacgttacttacaccccggtcgcagccggcctattggagatccaggtgcgcgcctttaacgccctagggtcagagaatagaaccttggtgcttgaagtgcaggacgccgtgcaatatgtcgccctgcaaagcggcccttgtttcaccaataggagcgctcaatttgaagccgcaacctccccaagtccccggcgggtggcctaccattgggactttggggacggctcaccaggtcaggatactgacgagccaagggccgaacacagttatctgagacccggtgattacagagtccaggtcaacgctagcaacttagtcagcttttttgtggctcaggctaccgtgactgtccaggttctggcctgtcgagaaccagaagtggacgtcgtgctgccattgcaagttctgatgaggagatcccagagaaactatctggaggctcacgtagaccttcgcgactgcgtgacataccagacggagtacagatgggaagtctaccggaccgccagttgccaaagaccaggacggccagccagagtcgccctgccgggtgtggacgtctccagaccacgcctggtgctcccgaggctggcccttccggtgggacactattgcttcgtgtttgtggtgtccttcggcgacacaccgcttacacaatctattcaggcaaatgtaaccgtggcaccagagaggctggtcccgatcatcgagggtggttcctacagagtgtggtcagacacacgtgatctggttcttgacggatcagagagctacgatccaaacttggaagatggagatcaaaccccactgtcgttccattgggcctgtgtggcaagtacccaacgggaagctggggggtgtgccctcaacttcgggccccggggcagttctaccgtgacaatccctcgggagcggcttgccgcaggcgtcgagtacacattctcgcttaccgtgtggaaggccggccgtaaagaggaggctacaaaccagactgtgctcataagatccgggcgggtacccattgtgagcctggaatgcgtttcatgtaaggcccaagccgtgtacgaagtatccagatcatcttatgtatacctggaaggaagatgcctcaactgtagttccggcagcaagcgagggaggtgggctgccagaaccttctccaataaaaccctcgttctcgacgagacaactacctccacaggcagcgcaggtatgagattagtcctgaggaggggagtcctgcgtgatggcgagggctatacttttacattgacagtgctcggacggtctggcgaggaggaaggctgcgcttctattagactgagtcccaaccgcccacccttggggggcagctgcagactgtttccacttggcgccgtgcatgccttgacaacaaaggtgcactttgagtgcaccgggtggcacgatgccgaagacgctggcgcccccctggtgtatgcgctgctgttgcgccggtgtcggcagggacactgcgaggagttttgtgtgtacaagggctcactgtcctcctacggtgccgtgttgccaccaggcttccggccacacttcgaagtggggctggctgtggtggtgcaggaccagctcggagcagccgtggtggccctcaaccgctcattagcaattactttgccagagccgaatggttctgcaactggattaaccgtatggctgcacggcctgaccgcgagcgtgttgcccggcctactgagacaggcagatccacaacacgtgattgaatactctcttgctctcgtcacggtcctgaatgagtatgaaagagccctggacgtggcagccgaaccaaagcacgagagacagcatcgcgcacagatcaggaagaacatcaccgaaaccctcgtgtccttaagggtgcataccgtagatgacattcagcagattgccgcggccctggcccaatgtatgggcccatccagagaactcgtatgcaggagctgcctcaaacagaccctccacaaactggaggccatgatgttaattttgcaggctgaaaccacagccggcaccgtgacacccacagctatcggggacagtatcctgaatattaccggcgacctgatccacttagcctcaagtgatgttcgagctccccagccctccgaacttggggcagaatctccatcccgcatggtggcttctcaggcttacaacctcacgtcggctctgatgaggatcttgatgcgatcacgggtactgaacgaggagccgctgacgctggccggtgaggagatcgtggctcaggggaaaaggagcgaccctagaagtctgctgtgctacggaggcgcacccggcccgggctgccatttctctattcctgaggcattctctggggccctggcgaatctgtccgatgttgtccaactgatatttctcgttgattctaacccattcccctttggatacatttccaactacacagtgtcaacaaaggtcgcgtctatggctttccaaacccaggccggggcccagatccctattgaacggctggctagtgagcgggcaattacagtgaaagtgccaaataattcagattgggctgcccgtggccacagaagcagtgctaacagcgctaattccgtcgtcgtgcagccccaagcgagcgtcggggccgtggtcacactggactcgagcaaccccgcggcaggactccacctgcagcttaactacactctgctggacggacactacctctcggaggagcccgaaccttatctcgccgtctatctccacagcgaacctagaccaaacgaacataattgttcagctagccggcgcatccgacccgagtcactccagggcgcagaccatcgcccttacaccttttttatttcacccggcagcagagatcctgcgggctcctaccaccttaacctgagctcacattttagatggagcgcgctgcaggtgtcggtcggtctctatacctctctgtgtcagtacttctccgaagaagatatggtgtggaggacggagggacttctgcccctggaagaaacatcaccgcgacaggccgtgtgcctgacgcgccatctcactgcgttcggcgcgtcccttttcgtcccaccaagtcacgtccggtttgtctttccagaacccactgcagatgttaactatattgtgatgttgacttgcgctgtgtgtctcgtcacttacatggtgatggccgcgatcctgcacaagcttgatcagcttgatgctagtcgggggcgagccatccccttctgtgggcagcgcggacgctttaagtatgaaatactcgtgaagacaggctgggggaggggttccggtactaccgcacatgtgggcattatgctgtacggcgtggactcccggtccggacacagacacttagacggcgatagggcatttcacaggaatagcttggatatcttccgtatcgcaactccacactctctcggtagcgtctggaaaatccgagtctggcacgacaacaagggtctttctcccgcatggttcctccagcatgtaattgtgcgggacttgcagactgctcgatccgcttttttcctggtaaatgattggctttccgtcgaaacagaggccaacggggggttggtcgagaaggaagtgctcgcagcaagtgacgcagcactcttgaggttccgccgactcttggtggccgagctgcagagaggcttttttgacaagcatatctggttatccatttgggaccgaccaccccgaagtcggttcacaaggattcagagggcaacctgctgtgtcctcctaatttgcctctttcttggtgccaatgccgtgtggtacggagcggtgggcgactctgcttatagcaccggacatgtgagcagattgagccctctgagcgtcgatactgttgctgtgggcctcgtaagcagtgtcgtggtttatcctgtgtacctggccatcctgttcctgtttagaatgtcaaggtcaaaagtcgccggctctccatcccctactcccgccgggcaacaggtgcttgacatagactcatgcctcgactcaagcgtgctggatagctcattcctcacctttagcggtctgcatgcagaagcattcgtgggacagatgaaatctgatctttttttggatgattctaagtctctggtgtgttggcccagcggagaaggaaccctgagctggcccgatctgctatctgaccccagtattgtggggtctaacctgcggcaactggccaggggccaggctggtcatggcctgggccctgaggaggacgggttttcactcgcctcaccctattcgccggctaaatctttcagcgctagcgatgaggatttgattcagcaggtattggccgagggagtgtcatcccccgcacctacccaggatactcatatggaaacagacctgctcagctcacttagtagcaccccaggcgagaagaccgagaccctggcactgcagaggctaggtgaactcggcccccccagccccggcctgaattgggagcaacctcaagctgcccggctgagcagaaccggcctggtcgagggtctgcgcaaacggcttttgccggcctggtgcgcatccctggcccacggcctctccctgctcctggtcgccgtcgccgtggctgtgagtggctgggtgggggcctctttcccccccggggtgagcgtggcgtggctgctgtcatcctctgcctcctttcttgcgtcatttttgggttgggaaccactgaaggtgttacttgaggctctgtatttttcattagtggcaaaaaggctacatcctgacgaggatgataccctggtcgagagtcccgcagtgactccggtgagcgcccgtgtgcccagagtgaggcctcctcatggttttgctctgtttttagccaaagaggaagcccgcaaggtgaagcgcctccatggtatgttgcgatccctgctggtgtatatgctgttccttctcgttacattgctggcttcttacggggacgcttcttgtcacggccatgcgtatcgtttacaatctgcgatcaaacaagaactgcacagtagagcttttttggctatcacaaggtccgaggaactatggccttggatggcgcacgtcctgctcccgtatgtgcatggaaatcagagctctccagaattgggccctccaagattgcggcaggtgaggctccaggaagctctatatccggacccacccggccctagagtccacacgtgtagtgcagccggtggtttcagcaccagtgattatgatgttggatgggaatctccacacaacggttccggtacctgggcctactccgcccccgacctgctcggcgcatggagttggggcagctgcgccgtgtacgattccggtggatacgtgcaagaactcggactctccttagaagaaagccgcgataggctacgattcttgcaattgcacaattggctggacaaccggagccgagccgttttcctggaacttacgaggtattctcctgctgtcggcttgcacgcagctgtgaccctccgtctcgaatttccagccgctgggcgggccttggctgctctgtctgtgcgcccctttgcgctgaggaggctctccgccggcctcagcctgccattactgacttccgtctgtctgctcctgttcgccgtccacttcgccgtcgctgaggctcgcacctggcatcgcgagggaagatggcgcgtcctgaggttaggagcttgggctaggtggctgcttgtggccctgaccgctgccaccgcgttagtgcgccttgcccaacttggtgcagcagacagacaatggactcgcttcgttagaggccgtccacgacgctttacgagcttcgaccaggtagcccagctttcttcagcagcacgggggctcgccgccagcctgttgtttcttctgttggtcaaggcagcccagcagttacggttcgttaggcagtggagtgtttttggaaagacgctttgccgggccctgccagaactcttaggggtcacactcggcttggtggtactgggggtggcctacgctcaacttgccattctcctggtaagttcttgcgtggatagcctgtggtccgtcgcacaggctctgcttgttctgtgccctggcactggcctgtctaccctctgtcccgctgaaagctggcacctgagcccccttctctgtgtagggctttgggccctcaggctgtggggagctctaaggttgggggccgtaatcctgcgatggcgctatcacgcccttagaggcgagctctacaggcctgcctgggagccccaggactacgaaatggttgaactcttccttaggaggcttcgtctgtggatggggctctccaaagttaaagagttccgccataaagtgaggttcgagggcatggaacccttaccaagtagatcgtcacgtggatcaaaggttagtcccgatgtgccacctcccagcgccggctcagacgcaagccatccatctacttctagcagccagctcgatggcctgtcggtgtctctgggtaggcttggcaccaggtgcgagcccgagccctcccgcctgcaggcagtgtttgaggcccttctgacccagtttgaccggctcaatcaggctacagaagatgtatatcagcttgagcagcagctccacagtctgcagggccgacgctcaagtcgagcccccgctggctcctctcgaggacctagtcctggcttacgacctgcactcccaagtcgtctggccagagcgtctagaggagtggatctggccactggcccctcgcgcactcctctcagggcaaaaaacaaagtgcatccctctagtacttag

SEQ ID NO: 6469 - DNA, 12909 bp, Artificial Sequence
  derived and/or modified sequence
atgcccccagctgccccagcccggctggccctggccctgggcctgggcctgtggctgggcgccctggccggcggccctggccggggctgcggcccctgtgagcccccctgcctgtgtggccctgcccctggagctgcctgccgggtgaactgcagcggccggggcctgcggaccctgggccctgccctgcgcatcccagcagatgccacagccctggatgtgagccacaacctgctgcgggccctggatgtgggcctgctggccaacctgagcgccctggccgagctggacatcagcaacaacaagatcagcaccctggaggagggcatctttgccaacctcttcaacctgtctgagatcaacctgagcggcaacccctttgaatgtgactgtggcctggcctggctgccccgctgggccgaggagcagcaggtgcgggtggtgcagcctgaggccgccacctgtgccggccctggcagcctggccggccagcccctgctgggcatccccctgctggacagcggctgtggggaggagtatgtggcctgcctgcctgacaacagcagcggcaccgtggccgctgtgtccttctctgctgcccacgagggcctgctgcagcctgaggcctgcagcgccttctgcttcagcacaggccagggcctggccgccctgtctgagcagggctggtgcctgtgtggggccgcccagcccagcagcgccagctttgcctgcctgagcctgtgcagcggccccccacctcctccagcccccacctgccggggccccaccctgctgcagcacgtgtttcctgccagccctggggccaccctggtgggcccccacggccccctggccagcggccagctggccgccttccacatcgccgcccccctgcctgtgacagccacccgctgggactttggagatggcagcgctgaggtggatgctgctggccctgctgccagccacagatatgtgctgcccggccgctaccacgtgacagctgtgctggccctgggcgccggcagcgccctgctgggcacagatgtgcaggtggaggccgccccagctgccctggagctggtgtgccccagctctgtgcagagtgatgagagcctggacctgagcatccagaacagaggaggcagcggcctggaggccgcctacagcatcgtggccctgggggaggagcccgcccgggctgtgcaccccctgtgccccagcgacacagagatcttccctggaaatggccactgctaccgcctggtggtggagaaggccgcctggctgcaggcccaggagcagtgccaggcctgggccggggccgccctggccatggtggacagccctgctgtgcagcgcttcctggtgtcccgggtgaccaggagcctggatgtgtggattggcttcagcacagtgcagggcgtggaggtgggccctgccccccagggcgaggccttcagcctggagagctgccagaactggctgcctggagagccccacccagccacagctgagcactgtgtgcggctgggccccaccggctggtgcaacacagacctgtgcagcgccccccacagctatgtgtgtgagctgcagcccggcggccctgtgcaggatgctgagaacctgctggtgggcgcccccagcggggacctgcagggccccctgacccccctggcccagcaggacggcctgagcgcccctcatgagcctgtggaggtgatggtgtttcctggcctgcggctgagccgggaggccttcctgaccacagctgagtttggcacccaggagctgcggcggcctgcccagctgcggctgcaggtgtaccgcctgctgagcacagctggcaccccagaaaatggaagtgagcctgagagccgcagcccagacaacagaacccagctggccccagcctgcatgcctgggggccgctggtgccctggggccaacatctgcctgcccctggatgccagctgccacccccaggcctgtgccaacggctgcaccagcggccctggcctgcccggggccccctatgccctgtggagggagttcctgttctctgtgcctgctggccccccagcccagtacagcgtgaccctgcacggccaggatgtgctgatgctgcccggggacctggtgggcctgcagcatgatgctggccctggggccctgctgcactgcagccctgcccctggccaccctggcccccgggccccctacctgagcgccaatgccagctcctggctgccccacctgcctgcccagctggagggcacctgggcctgcccagcctgtgccctgcggctgctggccgccacagagcagctgactgtgctgctgggcctgcggcccaaccctggcctgcggctgcccggccgctatgaggtgcgggcagaggtgggcaatggagtgagccgccacaacctgagctgcagctttgatgtggtgtcccctgtggccggcctgcgggtcatctacccagcccccagagatggccgcctgtatgtgcccaccaatggaagtgccctggtgctgcaggtggacagcggggccaatgccacagccacagcccgctggccaggcggctctgtgtctgccaggtttgaaaatgtgtgcccagccctggtggccacctttgtgcccggctgcccctgggagaccaatgacaccctcttctctgtggtggccctgccctggctgtctgagggggagcacgtggtggatgtggtggtggagaacagcgccagccgggccaacctgagcctgcgggtgacagctgaggagcccatctgtggcctgcgggccacccccagccctgaggcccgggtgctgcagggcgtgctggtgcgctacagccctgtggtggaggccggcagtgacatggtgttccgctggaccatcaatgacaagcagagcctgaccttccagaatgtggtgttcaacgtcatctaccagagcgctgctgtgttcaagctgagcctgacagccagcaaccacgtgtccaatgtgacagtgaactacaacgtgacagtggagaggatgaacaggatgcagggcctgcaggtgtccacagtgcctgctgtgctgagccccaatgccaccctggccctgacagctggggtgctggtggacagcgctgtggaggtggccttcctgtggacctttggagatggagagcaggccctgcaccagttccagcccccctacaatgaaagcttccctgtgcctgaccccagcgtggcccaggtgctggtggagcacaacgtgatgcacacctacgccgcccctggagagtacctgctgactgtgctggccagcaatgcctttgagaacctgacccagcaggtgcctgtgtctgtgcgggccagcctgcccagcgtggccgtgggcgtgtctgatggagtgctggtggccggccggcctgtgaccttctacccccaccccctgcccagccctgggggcgtgctgtacacctgggactttggagatggcagccctgtgctgacccagagccagcctgctgccaaccacacctacgccagccggggcacctaccacgtgcggctggaggtgaacaacacagtgtctggagctgctgcccaggctgatgtgcgggtgtttgaggagctgcggggcctgtctgtggacatgagcctggccgtggagcagggcgcccctgtggtggtgtctgctgctgtgcagacaggagacaacatcacctggacctttgacatgggagatggcaccgtgctgagcggccctgaggccaccgtggagcacgtgtacctgcgggcccagaactgcaccgtgacagtgggcgccgccagccctgctggccacctggcccggagcctgcacgtgctggtgtttgtgctggaggtgctgcgggtggagcctgctgcctgcatccccacccagccagatgcccggctgacagcctacgtgacaggcaacccagcccactacctgtttgactggacctttggagatggcagcagcaacaccaccgtgcggggctgccccaccgtgacccacaacttcaccaggagcggcaccttccccctggccctggtgctgagcagccgggtgaacagagcccactacttcaccagcatctgtgtggagcctgaggtgggcaatgtgaccctgcagcctgagcggcagtttgtgcagctgggagatgaggcctggctggtggcctgtgcctggccacccttcccctaccgctacacctgggactttggaacagaggaggccgcccccacccgggcccggggccctgaggtgaccttcatctacagagaccccggcagctacctggtgacagtgacagccagcaacaacatctctgctgccaatgattctgccctggtggaggtgcaggagcctgtgctggtgaccagcatcaaggtgaatggcagcctgggcctggagctgcagcagccctacctgttctctgctgtgggccggggccgcccagccagctacctgtgggacctgggagatggcggctggctggagggccctgaggtgacccacgcctacaacagcactggagacttcaccgtgcgggtggccggctggaatgaggtgagccgctctgaggcctggctgaatgtgacagtgaagagaagagtgcggggcctggtggtgaatgccagcaggacagtggtgcccctgaatggatctgtgtccttcagcaccagcctggaggccggcagtgatgtgcgctacagctgggtgctgtgtgaccgctgcacccccatccctgggggccccaccatctcctacaccttccgctctgtgggcaccttcaacatcatcgtgacagcagaaaatgaggtgggcagcgcccaggacagcatctttgtgtatgtgctgcagctgattgagggcctgcaggtggtgggcggcggccgctacttccccaccaaccacacagtgcagctgcaggccgtggtgagagatggcaccaacgtgtcctacagctggacagcctggagggaccggggccctgccctggccggcagcggcaagggcttcagcctgactgtgctggaggccggcacctaccacgtgcagctgcgggccaccaacatgctgggcagcgcctgggccgactgcaccatggactttgtggagcctgtgggctggctgatggtggccgccagccccaacccagctgctgtgaacacctctgtgaccctgtctgctgagctggccggcggcagcggcgtggtgtacacctggagcctggaggagggcctgtcctgggagaccagcgagcccttcaccacccacagcttccccaccccaggcctgcacctggtgaccatgacagctggcaaccccctgggcagcgccaatgccaccgtggaggtggatgtgcaggtgcctgtgtctggcctgagcatccgggccagcgagcccggcggcagctttgtggccgccggcagctctgtgcccttctggggccagctggccaccggcaccaacgtgtcctggtgctgggccgtgcctgggggcagcagcaagaggggcccccacgtgaccatggtgtttcctgatgctggcaccttcagcatccggctgaatgccagcaatgctgtgtcctgggtgtctgccacctacaacctgacagctgaggagcccatcgtgggcctggtgctgtgggccagcagcaaggtggtggcccctggccagctggtgcacttccagatcctgctggccgccggcagcgctgtgaccttccggctgcaggtgggcggggccaaccctgaggtgctgcccggcccccgcttcagccacagcttcccccgggtgggggaccacgtggtgtctgtgcggggcaagaaccacgtgtcctgggcccaggcccaggtgagaattgtggtgctggaggccgtgtctggcctgcaggtgcccaactgctgtgagcccggcatcgccaccggcacagagaggaacttcaccgcccgggtgcagaggggcagccgggtggcctatgcctggtacttcagcctgcagaaggtgcagggcgacagcctggtgatcctgagcggcagagatgtgacctacacccctgtggccgccggcctgctggagatccaggtgcgggccttcaatgccctgggctctgaaaatagaaccctggtgctggaggtgcaggatgctgtgcagtatgtggccctgcagagcggcccctgcttcaccaacagaagtgcccagtttgaagctgccaccagccccagcccccggcgggtggcctaccactgggactttggagatggcagccctggccaggacacagatgagcccagggctgagcacagctacctgcggcctggggactacagagtgcaggtgaatgccagcaacctggtgtccttctttgtggcccaggccaccgtgacagtgcaggtgctggcctgccgggagcctgaggtggatgtggtgctgcccctgcaggtgctgatgaggaggagccagaggaactacctggaggcccacgtggacctgcgggactgtgtgacctaccagacagagtaccgctgggaggtgtacagaacagccagctgccagaggcctggccgcccagcccgggtggccctgcccggggtggatgtgtcccggccccggctggtgctgccccggctggccctgcctgtgggccactactgctttgtgtttgtggtgtcctttggagacacccccctgacccagagcatccaggccaacgtgacagtggcccctgagcggctggtgcccatcatcgagggcggcagctacagagtgtggagcgacacccgggacctggtgctggatggcagcgagagctatgaccccaacctggaggatggagaccagacccccctgtccttccactgggcctgtgtggccagcacccagcgggaggccggcggctgtgccctgaactttggcccccggggcagcagcacagtgaccatcccccgggagcggctggccgccggcgtggagtacaccttcagcctgactgtgtggaaggccggcaggaaggaggaggccaccaaccagacagtgctgatccgcagcggccgggtgcccatcgtgtccctggagtgtgtgtcctgcaaggcccaggccgtgtatgaggtgagccgcagcagctatgtgtacctggagggccgctgcctgaactgcagcagcggcagcaagaggggccgctgggccgcccggaccttcagcaacaagaccctggtgctggatgagaccaccaccagcacaggcagcgctggcatgaggctggtgctgcggcggggcgtgctgagagatggagagggctacaccttcaccctgactgtgctgggccgcagcggggaggaggagggctgtgccagcatccggctgagccccaaccggccccccctgggcggcagctgccgcctcttccccctgggcgctgtgcacgccctgaccaccaaggtgcactttgagtgcaccggctggcatgatgctgaagatgctggggcccccctggtgtatgccctgctgctgcggcgctgccggcagggccactgtgaggagttctgtgtgtacaagggcagcctgagcagctatggagctgtgctgcccccaggcttccggccccactttgaggtgggcctggccgtggtggtgcaggaccagctgggcgctgctgtggtggccctgaacagaagcctggccatcaccctgcctgagcccaacggcagcgccaccggcctgactgtgtggctgcacggcctgacagcctctgtgctgcccggcctgctgcggcaggccgacccccagcacgtgattgagtacagcctggccctggtgacagtgctgaatgaatatgaaagagccctggatgtggccgctgagcccaagcatgagcggcagcaccgggcccagatcaggaagaacatcacagagaccctggtgtccctgcgggtgcacacagtggatgacatccagcagattgctgctgccctggcccagtgcatgggccccagccgggagctggtgtgccgcagctgcctgaagcagaccctgcacaagctggaggccatgatgctgatcctgcaggccgagaccacagctggcaccgtgacccccacagccatcggggacagcatcctgaacatcaccggggacctgatccacctggccagcagtgatgtgcgggccccccagcccagcgagctgggcgctgagagccccagcaggatggtggccagccaggcctacaacctgaccagcgccctgatgaggatcctgatgaggagccgggtgctgaatgaggagcccctgaccctggccggggaggagatcgtggcccagggcaagagaagtgaccccaggagcctgctgtgctacggcggggcccctggccctggctgccacttcagcatccctgaggccttcagcggggccctggccaacctgagtgatgtggtgcagctgatcttcctggtggacagcaaccccttccccttcggctacatcagcaactacacagtgtccaccaaggtggcctccatggccttccagacccaggccggggcccagatccccatcgagcggctggccagcgagcgggccatcaccgtgaaggtgcccaacaacagcgactgggccgcccggggccacaggagcagcgccaacagcgccaacagcgtggtggtgcagccccaggcctctgtgggcgctgtggtgaccctggacagcagcaacccagctgctggcctgcacctgcagctgaactacaccctgctggatggccactacctgtctgaggagcctgagccctacctggccgtgtacctgcacagcgagccccggcccaatgagcacaactgcagcgccagccgccgcatccggcctgagagcctgcagggcgctgaccaccggccctacaccttcttcatcagccctggcagccgggaccctgctggcagctaccacctgaacctgagcagccacttccgctggagcgccctgcaggtgtctgtgggcctgtacaccagcctgtgccagtacttcagcgaggaggacatggtgtggaggacagagggcctgctgcccctggaggagaccagcccccggcaggccgtgtgcctgaccaggcacctgacagcctttggagccagcctgtttgtgccccccagccacgtgcgctttgtgtttcctgagcccacagcagatgtgaactacatcgtgatgctgacctgtgctgtgtgcctggtgacctacatggtgatggccgccatcctgcacaagctggaccagctggatgccagccggggccgggccatccccttctgtggccagaggggccgcttcaagtatgagatcctggtgaagacaggctggggccggggcagcggcaccacagcccacgtgggcatcatgctgtatggagtggacagccgcagcggccaccgccacctggatggagaccgggccttccacaggaacagcctggacatcttccgcatcgccaccccccacagcctgggctctgtgtggaagatccgggtgtggcatgacaacaagggcctgagccctgcctggttcctgcagcacgtgattgtgcgggacctgcagacagcccggagcgccttcttcctggtgaatgactggctgtctgtggagacagaggccaacggcggcctggtggagaaggaggtgctggccgccagtgatgctgccctgctgcgcttccggcggctgctggtggccgagctgcagaggggcttctttgacaagcacatctggctgagcatctgggaccggccccccaggagccgcttcacccgcatccagagggccacctgctgcgtgctgctgatctgcctcttcctgggcgccaatgctgtgtggtatggagctgtgggggacagcgcctacagcactggacatgtgtcccggctgagccccctgtctgtggacacagtggccgtgggcctggtgtcctctgtggtggtgtaccctgtgtacctggccatcctcttcctgttcaggatgagccgcagcaaggtggccggcagccccagccccaccccagctggccagcaggtgctggacatcgacagctgcctggacagctctgtgctggacagcagcttcctgaccttcagcggcctgcacgccgaggcctttgtgggccagatgaagagtgacctcttcctggatgacagcaagagcctggtgtgctggcccagcggggagggcaccctgtcctggccagacctgctgagtgaccccagcatcgtgggcagcaacctgcggcagctggcccggggccaggccggccacggcctgggcccagaagaagatggcttcagcctggccagcccctacagccctgccaagagcttcagcgccagtgatgaagatctcatccagcaggtgctggccgagggcgtgagcagccctgcccccacccaggacacccacatggagacagacctgctgagcagcctgagcagcaccccaggagagaagacagagaccctggccctgcagaggctgggggagctgggcccccccagccctggcctgaactgggagcagccccaggccgcccggctgagcaggacaggcctggtggagggcctgaggaagaggctgctgcctgcctggtgtgccagcctggcccacggcctgagcctgctgctggtggccgtggccgtggccgtgtctggctgggtgggcgccagcttccccccaggagtgtctgtggcctggctgctgagcagcagcgccagcttcctggccagcttcctgggctgggagcccctgaaggtgctgctggaggccctgtacttcagcctggtggccaagaggctgcacccagatgaagatgacaccctggtggagagccctgctgtgacccctgtgtctgcccgggtgccccgggtgcggccccctcatggctttgccctcttcctggccaaggaggaggccaggaaggtgaagaggctgcacggcatgctgcggagcctgctggtgtacatgctgttcctgctggtgaccctgctggccagctatggagatgccagctgccacggccacgcctaccgcctgcagagcgccatcaagcaggagctgcacagccgggccttcctggccatcaccaggtctgaggagctgtggccctggatggcccacgtgctgctgccctacgtgcacggcaaccagagcagccctgagctgggccccccccggctgcggcaggtgcggctgcaggaggccctgtacccagaccccccaggcccccgggtgcacacctgcagcgctgctgggggcttcagcaccagtgactatgatgtgggctgggagagcccccacaatggaagtggcacctgggcctacagcgccccagacctgctgggcgcctggagctggggcagctgtgctgtgtatgattctgggggctacgtgcaggagctgggcctgagcctggaggagagccgggaccggctgcgcttcctgcagctgcacaactggctggacaacagaagcagagctgtgttcctggagctgacccgctacagccctgctgtgggcctgcacgccgctgtgaccctgcggctggagttccctgctgctggccgggccctggccgccctgtctgtgcggccctttgccctgcggcggctgtctgctggcctgagcctgcccctgctgacctctgtgtgcctgctgctgtttgctgtgcactttgctgtggccgaggcccggacctggcaccgggagggccgctggagggtgctgcggctgggcgcctgggcccgctggctgctggtggccctgacagctgccacagccctggtgcggctggcccagctgggcgctgctgaccggcagtggaccaggtttgtgcggggccggccccggcgcttcaccagctttgaccaggtggcccagctgagcagcgctgcccggggcctggccgccagcctgctcttcctgctgctggtgaaggccgcccagcagctgcgctttgtgcggcagtggagcgtgtttgggaagaccctgtgccgggccctgcctgagctgctgggcgtgaccctgggcctggtggtgctgggcgtggcctatgcccagctggccatcctgctggtgagcagctgtgtggacagcctgtggagcgtggcccaggccctgctggtgctgtgccccggcaccggcctgagcaccctgtgcccagctgagagctggcacctgagccccctgctgtgtgtgggcctgtgggccctgcggctgtggggcgccctgcggctgggcgccgtcatcctgcgctggagataccacgccctgcggggggagctgtacagacctgcctgggagccccaggactatgagatggtggagctgttcctgcggcggctgcggctgtggatgggcctgagcaaggtgaaggagttccgccacaaggtgcgctttgagggcatggagcccctgcccagccgcagcagccggggcagcaaggtgtccccagatgtgcccccacccagcgctggcagtgatgccagccaccccagcaccagcagcagccagctggatggcctgtctgtgtccctgggccgcctgggcacccgctgtgagcctgagcccagccggctgcaggccgtgtttgaggccctgctgacccagtttgaccggctgaaccaggccacagaagatgtgtaccagctggagcagcagctgcacagcctgcagggccgccgcagcagccgggccccagctggcagcagccggggccccagccctggcctgcggcctgccctgcccagccggctggcccgggccagcagaggagtggacctggccaccggccccagcaggacccccctgcgggccaagaacaaggtgcaccccagcagcacctag

SEQ ID NO: 6470 - DNA, 12909 bp, Artificial Sequence
  derived and/or modified sequence
atgccccccgccgcccccgcccggctggccctggccctgggcctgggtctctggctcggggccctggccggaggcccagggcgcggttgcggaccatgcgaaccaccctgcctgtgtggcccagctccaggcgccgcttgcagggtgaactgttctggccgcgggctgcgtactctgggaccagccctgcgcatcccagcggacgccacagcgctggacgtttcccacaacctgctacgcgcccttgacgtggggctgctggccaacctcagtgccctggccgaactggatatatcaaacaataaaatctcaacactggaagagggaatcttcgcaaacctgtttaatctttcagagatcaatctgtcaggcaacccatttgaatgtgactgcgggctggcatggctccccaggtgggccgaggagcagcaagtcagagtggtgcagcccgaggccgcaacgtgcgccggaccaggctctctggccggccagccgttgctgggaatccccctcctcgactcaggctgtggtgaagaatatgtggcgtgtcttccagacaatagctctggaacagtggccgccgtgagtttttccgcggctcacgaaggactgcttcaaccggaagcatgctcagctttttgtttctcaacgggccagggactagctgcactgtctgagcaggggtggtgtttatgcggcgctgctcagcccagcagtgcctcctttgcctgcctgtctctgtgttctggaccacccccgccacctgcacctacttgcagaggtccaactctgctgcagcatgtgttccccgcaagtcctggtgccacgctggtgggtccacacgggcctctcgcctccggtcagctggccgctttccacattgccgcccctctgcctgtgactgcgaccaggtgggactttggggatggatctgcggaagtcgatgccgcaggacctgcggctagccatcgatatgtgctcccggggcggtaccacgtcactgccgtgcttgcgcttggtgcaggctcagccctgcttggcaccgatgtgcaagtggaggctgctcccgccgccctggaactggtgtgtccgagctcagtgcagagcgacgaaagcctggacctttccatccagaacaggggcggatcaggactggaggcagcttacagcattgttgctctcggggaagaacccgccagagccgttcatcctttgtgcccatccgacaccgaaattttccccgggaatggccactgctacagactggtggtggaaaaggccgcctggcttcaggctcaggaacagtgtcaagcctgggccggggccgctcttgcgatggtggatagccccgctgttcagagattccttgtgagccgggtgaccaggtcactcgacgtgtggataggattttccaccgtccagggagttgaagtgggccctgccccacagggggaggccttctcactggaatcgtgtcagaactggctccctggtgaacctcatcctgccaccgcggagcactgtgtcaggctgggccccactggctggtgcaataccgacctgtgcagcgcaccacacagttacgtgtgtgagctgcagcccggcggccctgtgcaggacgccgaaaacctactcgtaggtgcaccctcaggagatctgcaaggccccttaacgccattggctcaacaggatggcctcagcgccccgcatgagcctgtcgaagtgatggtattccctggccttagactcagtcgggaagcttttttgaccacagcagaattcggtactcaagagttgcgccgtccagcccaactgcgtctgcaagtatacaggttgttatccacagccggtacgcccgagaatgggtctgaacctgagtcacgtagcccagataatcggacccaattggcccctgcttgcatgcctgggggcaggtggtgcccaggggccaacatatgtctgcccctcgatgccagctgtcacccccaggcatgcgccaacggctgcacctctggccccggcctgccaggagctccctacgctctgtggcgagaattccttttttccgtgccggcaggtccgcctgcacagtatagtgtcacccttcacgggcaagatgttctgatgttgccaggggatttggtgggattgcagcacgacgccggtccgggcgctcttttgcattgttctcccgctcccggtcatccgggaccaagggcgccttatctaagcgccaatgcctcctcatggttgcctcatctgccggctcagctcgagggcacctgggcttgtcctgcttgtgctctgcggctcttggctgcaacggagcagctgactgtactgttgggtcttagacctaaccccggcctgaggctacctggtcgctatgaagttagagctgaagtcggaaacggagtgtctcgacataatctgtcgtgtagttttgacgtggtgtccccggtggccggcctgagggtgatttaccctgcaccacgtgacggcaggttgtacgttcccacaaacggttctgcccttgtgctacaggttgattcaggcgccaacgccacagccactgctcgatggccggggggatcagtgagtgccagatttgagaacgtttgtccggcactcgtggccacatttgtgccaggatgtccctgggagacaaacgataccttgttttcagttgttgctctgccttggctaagcgaaggcgaacacgtcgtggatgttgtagtggaaaattccgcttctagagcaaatctctcccttcgcgtcacagcggaggagcccatctgcggtcttcgtgccacaccttcaccggaggcccgggttttacagggcgtgcttgtacgctactcgcctgttgtggaggctggttcggacatggtgttccgatggacaatcaatgacaaacagtctctaacttttcagaacgttgtattcaatgtgatataccagtcagccgccgtattcaagctgtccttaacggcatcaaaccacgtgtctaacgtaactgttaactataatgttaccgtggagcggatgaatcgcatgcaaggccttcaggtgtccacagtacctgccgtgttatcacccaatgctacactcgccctcactgccggcgtactggtggactccgctgtggaggtcgcattcctttggacatttggagacggcgagcaggcgcttcatcagtttcagccaccctataacgaatctttccctgtcccggatccgtccgtggcccaggtgctggtcgagcataatgtaatgcacacatacgcagcacccggcgagtatctgctcaccgttctggcaagcaacgcgttcgaaaatttgacacagcaagtccctgtgtcggtgcgagcatctttgccaagcgtggccgtcggggtgtcagacggtgtgctcgtcgctggacggcctgtgactttttacccgcacccacttccaagcccaggaggggtcctgtatacttgggatttcggagacggcagtccggtgctgacgcaatcacagccagcagccaatcatacatacgccagtaggggcacctatcatgttcgcctagaggtgaataatacagtctctggggctgcagcacaggcagacgtgagggtttttgaagagttgagggggttaagtgtggatatgtcactggcagtggagcagggcgccccagtggtggtgagcgccgccgtgcagaccggcgacaacatcacatggacatttgatatgggggacggaacagttctgtcagggcccgaggcaactgtagaacacgtgtacctccgagcgcagaactgtaccgtcaccgtaggggccgcttcccctgcaggacacctggccaggtctctgcacgtcttggtattcgtgctggaagtcctgcgggtggagcccgctgcttgtatccctacccagcccgacgcaaggctgaccgcttacgtcacgggaaatcctgctcattatttgttcgactggacatttggagatggctcatctaacactaccgtccgcggctgcccaaccgtgacacataacttcacaaggagcggcacattccctctggcactggttctgtcgtcccgcgtaaaccgcgcacattattttactagtatctgcgtggaaccggaagtcggcaacgtaaccctccaacccgaacggcagtttgtccagttgggcgacgaagcttggcttgttgcctgtgcgtggccacctttcccgtaccggtacacctgggatttcgggacagaggaagccgcacccactagggccagaggaccagaggtgacatttatctaccgcgatcctggctcttatctcgtaaccgtgacggcttccaacaatatttctgccgccaacgactctgctctggtggaagttcaagagccagttctcgtgacctccattaaagtcaacgggtctttagggctggagctccaacagccataccttttctccgcagtgggccgtggaaggccagcttcctatctttgggacttaggcgacgggggctggctggagggccctgaggtcacacacgcctataactcaactggagacttcactgtccgggtcgccgggtggaacgaggtgtcacggagtgaggcatggctcaatgtgaccgtgaaacggcgcgtcagggggctggtggtgaacgcaagcagaaccgttgtgcctcttaacggatccgtgagcttctcaacctccctggaggcaggatctgatgtgcgatacagctgggttctctgcgaccggtgtacgcctattcctggaggtcccaccatcagctatacattccgaagtgtagggacatttaacatcattgtgaccgccgagaatgaggtcggttcagcccaggatagcatctttgtctacgtgctgcaactgatcgaaggtctgcaggttgttggtggtggccggtacttccctactaaccataccgtccagctacaggccgttgtgcgagacggcactaatgtgagctattcttggaccgcatggagagatcgggggcctgctctagctggatccgggaaaggattctctctcactgttctcgaagccggcacatatcacgtgcaactgagagcgaccaacatgctgggtagtgcttgggctgattgcacgatggactttgtcgagcccgtggggtggttaatggttgcggccagtccaaatcccgcggctgtcaatacctctgtaacactaagtgctgagttagctggaggcagcggcgtcgtttacacttggtctcttgaggaagggctgagttgggagacatccgagccttttaccacccatagtttccccactccgggactccatctggtgactatgacggctggcaatccactgggatcggctaatgcaacggtggaagtggatgtgcaagtgccggtgagtggcctttcaatcagggcctcggagccaggcggcagctttgttgccgctggatcttcagtccccttctggggccagctggcaactggaactaacgtttcctggtgttgggctgtcccagggggaagtagtaaaaggggcccacatgttacaatggtttttccggatgccggaactttctctatccgtctgaatgcaagcaatgcggtcagctgggttagcgccacgtacaatctgactgccgaagaaccgatcgtcgggctggtgctttgggcatcgagcaaggtagtcgcccccgggcagctggttcattttcagatcctgctggccgcaggctccgccgtgaccttccggctccaagtgggtggagctaaccccgaggtgttacctggaccccgattctctcactcatttcccagagtgggcgatcatgtcgtcagcgtgcgcggtaagaaccacgtgagctgggcacaggcacaggtgagaattgtggtgttggaggcagtgtccggactgcaggtgcctaattgctgcgagcccggtatcgctaccggaacagagcgaaatttcacggctcgagtccagaggggcagcagggtggcctacgcttggtatttttccctccagaaggttcagggcgactccctggtcatcctgagtggccgggacgtcacttatacacctgtggcagcgggccttctggaaatccaggtgagagctttcaacgcactgggatcagagaatcgcacattagtactggaggtgcaggacgcggtacagtatgtggcactgcagtccggcccttgcttcactaataggagcgcgcagttcgaggcggccacaagcccctcccctagacgggtggcttaccactgggacttcggcgatggaagtcctgggcaggacactgacgagccccgggctgagcactcatatcttcgtccaggcgattaccgcgtgcaggtgaatgcatccaacctcgtgagcttctttgtcgcccaggctactgtgacagtccaggtgctagcctgcagggaacccgaggtggatgtcgtcctgccgctgcaggtccttatgagaaggtctcagcggaattaccttgaggcccacgtagatcttcgggattgcgtgacctaccagaccgagtataggtgggaggtgtatcgcactgcctcatgtcagagacccggaagacctgcccgtgtggccctcccgggcgttgatgtgtctcgcccacgtctggttttaccaaggctcgccttgccagtcggtcactactgcttcgtttttgttgtgagcttcggggatacgccactcacgcagtctatccaagcaaatgttacagttgcgccagagaggctggtacctataatagaaggcggctcataccgggtgtggagtgatacgcgcgatctcgtgcttgacggttctgagtcctacgatccaaatctggaggacggagatcagacccctctgagctttcactgggcctgcgtcgcctctactcagagggaggccggaggttgcgcgctcaatttcggacctcgcgggagcagtacagtgaccatcccccgtgagcgactggccgcgggagtcgagtacacattctccctaactgtttggaaagctggacgcaaagaggaagcaacaaatcagaccgtgctcattcggtctggccgtgtccccatcgtctcactggagtgcgtgtcctgcaaggctcaggcagtctacgaagtgtccagatcatcttacgtgtatctggagggtaggtgcttaaactgttcctcgggttctaaaagagggagatgggccgccagaactttttccaacaaaacgttggtgctcgacgaaactaccacctctactggctcagcaggtatgcgactcgtgcttcgtcgaggcgtgttacgcgacggcgaggggtatacattcacactcaccgttcttgggagatccggcgaagaagaagggtgcgcttccattaggctgagtccaaacagaccacccctgggaggatcttgtcggttatttcctctgggcgctgtgcatgccctcacaacaaaggttcactttgagtgcacggggtggcacgatgctgaggatgctggcgcccccctggtttatgccctgcttctgcgacggtgtcggcaagggcattgcgaagagttctgcgtgtataagggctcgttgagctcttatggagccgtactgccacccggatttagaccacacttcgaagtggggctagctgtcgtagttcaagaccagctgggggcagccgtggttgcgctaaaccgatccctggcaatcacgctcccagagcccaacggcagcgctaccggcttgactgtgtggttacatgggcttactgcatccgttctgcctgggttgttacgccaggctgacccccaacatgtaattgagtactctcttgctctcgttactgtgctaaacgagtatgagcgggctctagatgtcgcagctgaacccaaacatgaaaggcagcacagagcacagataaggaagaatataactgagaccctggttagcctgcgggtccacacagtcgacgacatccaacagattgctgcagccctggcccagtgcatgggaccatccagagaacttgtttgcaggagctgcttaaagcagacccttcataagctggaggctatgatgctgatccttcaggcagagactaccgcaggtaccgtcaccccaacagctatcggagactctatcctgaatattacgggggatctgatacaccttgccagttcagacgtccgggcgccacagcctagtgagcttggcgctgagtccccgagcagaatggtagcgagccaggcctacaatttaacatctgccctcatgaggattcttatgcgtagccgtgttctaaatgaagagccattaacgctcgcaggagaggaaatagtggctcagggtaaaagatcggatcccagaagcctcctttgctacggaggcgctccggggccgggatgtcacttcagcattcccgaagcttttagcggggcgctggccaacttgagcgacgttgtacagctgatatttctggtcgattctaacccatttccgttcggctacatttccaactacaccgtcagtacgaaagtagccagcatggcctttcagacacaggccggcgcccagatcccgatagagcggttagctagcgagcgggccataaccgtgaaagtgcctaataacagtgactgggcagctcggggccacaggtcttccgcaaatagcgccaattcggtggtggttcagccccaggcatccgtgggggccgtcgttacactggactcttccaaccccgcagctggcctgcaccttcaactgaattatacactgctggacggtcattatctctccgaggagcctgaaccttacctggccgtgtacctgcactccgagcctcgaccaaacgagcataattgtagcgccagccgccgaattcgaccagaaagcctacagggggccgaccatcgcccctacacttttttcattagcccaggcagcagagatcctgccggatcttaccaccttaacttatctagtcatttccgctggtccgcccttcaggtttcagtgggactgtatacctccctttgccaatatttttcggaggaggatatggtgtggagaactgaaggtctgctgcccttagaggaaacaagccctcgacaggctgtctgtctcacccgacacctcacggcatttggagcatcgctttttgtccctcccagccacgttcgatttgtattcccagaacccactgccgacgtaaactatatcgttatgctgacatgcgcagtgtgcctcgtgacttatatggtgatggccgccatcctgcacaagctggaccaattggacgccagccgaggtagggctattcccttttgtggccaacgggggcgattcaagtacgaaattctggtgaaaacaggatgggggcgcggctccggaaccactgcgcacgttggcattatgctgtacggagtcgattcaaggtcgggccaccgtcatctcgatggagacagggcgttccacaggaattccctggacatttttaggatagccacccctcacagcctgggcagcgtgtggaagattcgtgtgtggcacgacaacaaaggcctatcacctgcatggttcctgcagcatgttatcgtgcgcgatctccagaccgcgcgatccgccttcttcctggtgaatgactggttaagcgtcgagacagaggctaatggaggactcgtcgaaaaagaagtgctcgcagcctccgatgcagctttactgagattccgccgactcctcgtggcagagttgcagcggggctttttcgataagcacatctggctatccatttgggaccgccctccaaggtctcgattcacacgcattcagagggcgacttgttgtgtcttgctcatttgtcttttcttgggcgcaaatgcagtctggtatggagctgtgggagactccgcatactccaccggccatgtaagtcggctctctcctctgagcgtggacactgtggctgtgggacttgtgagcagcgttgtcgtttatccagtgtacttggcaattctatttcttttcagaatgtccaggtccaaagttgccggaagcccttcgcccacaccggctggacagcaagtgttagatatagacagctgtctggatagttcagtcctcgactctagctttctgactttctcaggcctgcatgccgaggcctttgtcggccagatgaaaagtgacctttttttggacgactctaaatctctcgtatgttggccctcaggggaagggactttgtcctggcctgacttgcttagcgacccaagcatagtgggctcaaacctgaggcaactcgcccgggggcaggcagggcacggactgggtccagaagaggatgggttcagtttggcttcaccttattcaccagcaaagagtttctcagcttctgacgaagaccttatccagcaggtgctcgccgaaggcgtctccagtccggcccctactcaagacacacatatggagactgatctgctgtcttccctctccagcacgcctggcgaaaaaacagagacgctggcgctgcaacggcttggcgaattgggaccaccctctcccggattaaactgggagcagccccaggccgctcggttatccagaaccggactggtggagggactgcgaaagaggctgctacccgcctggtgcgcttcacttgctcacggcctcagtctcctcctagtagcagtggccgtggctgttagcggttgggtcggcgcctcatttcctcccggagtctcagttgcatggttgctcagctcttcagccagctttcttgcctctttcctgggctgggagccactgaaagtgctcttagaggcgctttacttcagtctggtggcgaagcggctgcaccccgacgaggacgataccctggtcgaatctccagcagtgacgccagtcagtgccagggtgcctagggttaggccccctcacggctttgccttattcctagccaaagaggaggcgaggaaggttaagcggctccatggaatgcttcggagcctgctagtttatatgttattcctgctggtgaccttattggcctcctatggcgacgcctcctgccacggccatgcttaccgccttcagtctgcaatcaaacaggaactgcatagtcgcgctttcttagccataacacgctcagaagaactttggccctggatggcccatgtccttctcccctatgtacatggcaaccagtcttctcccgagcttggaccacctcggctgcgtcaggtaagactgcaggaggccctgtacccagatcctccaggtcccagggtgcatacctgctcggcggccggaggcttttcaacatctgactatgacgtgggctgggaatctccccataacggatccgggacttgggcttattccgcacccgacctgcttggggcctggtcctggggaagttgcgccgtgtatgactcggggggctacgtgcaggagctaggactgtctctggaggagagtcgcgacaggctccgctttctgcaactccataactggctggataatcgaagccgggctgtgttcctggaactgacaaggtactctccagctgttggactgcatgctgcagttaccctgaggttagaatttccagccgcaggcagagccttggcagcattatctgtgagacctttcgcattgcgacgcttgtctgccgggctctctcttccgcttctgacctctgtctgcctgctgctttttgccgtgcattttgccgtagcggaggcccgaacatggcatagggaggggcggtggagagtgctgagactcggcgcatgggctagatggctccttgtggccctgactgctgccaccgcactggtccggctggcccagctcggagcggccgacagacaatggacacggttcgtgcggggccgcccccggcgttttacgtctttcgaccaggtggctcagctgagctccgccgctcgggggctcgctgcatctctcctcttcttgttgctggtgaaggctgctcaacagcttcgattcgtgcgtcagtggagtgtgtttggtaagactctgtgccgcgctcttccagagctgctgggcgttaccctcggactggttgttctcggcgtggcctatgcgcagctcgccatcctactggtgtcctcatgcgtggatagcctttggtctgtggcccaagctttgctggtcctctgtccagggaccgggctcagtacactgtgcccggctgaaagctggcacctatctcccctactgtgcgttgggctatgggcccttcgcctctggggtgctctgaggttaggagcagtcatcctgaggtggcgatatcatgcactacggggtgaactgtatcgacctgcctgggagccccaggactatgagatggtggagctctttctcaggcgactacgcttatggatgggactttccaaggtgaaggaattcaggcacaaggtgcgtttcgaggggatggagcctttaccaagtcggtcgagcagggggagcaaggtctctcctgatgtaccgccacccagcgcgggttctgatgccagtcacccgagtacttcttcatcgcagctcgacggactctcagtgagtctgggccggcttggtaccaggtgtgagccagaaccgtccaggttacaggcagttttcgaagctttgctgacccaatttgatagactgaatcaggcaacagaagatgtgtatcaactggaacagcagctgcactccttgcaaggtagaaggtccagccgagcacccgctggcagttcaagaggcccttcccccggactgcgcccggccctcccttcacggctggccagggcctctcgcggtgtagatttggccacaggaccctctagaacccccctgagggccaagaacaaggtgcacccctccagcacctag

SEQ ID NO: 6471 - DNA, 14011 bp, Artificial Sequence
  derived and/or modified sequence
gcactgcagcgccagcgtccgagcgggcggccgagctcccggagcggcctggccccgagccccgagcgggcgtcgctcagcagcaggtcgcggccgcagccccatccagccccgcgcccgccatgccgtccgcgggccccgcctgagctgcggcctccgcgcgcgggcgggcctggggacggcggggccatgcgcgcgctgccctaacgatgccgcccgccgcgcccgcccgcctggcgctggccctgggcctgggcctgtggctcggggcgctggcggggggccccgggcgcggctgcgggccctgcgagcccccctgcctctgcggcccagcgcccggcgccgcctgccgcgtcaactgctcgggccgcgggctgcggacgctcggtcccgcgctgcgcatccccgcggacgccacagcgctagacgtctcccacaacctgctccgggcgctggacgttgggctcctggcgaacctctcggcgctggcagagctggatataagcaacaacaagatttctacgttagaagaaggaatatttgctaatttatttaatttaagtgaaataaacctgagtgggaacccgtttgagtgtgactgtggcctggcgtggctgccgcgatgggcggaggagcagcaggtgcgggtggtgcagcccgaggcagccacgtgtgctgggcctggctccctggctggccagcctctgcttggcatccccttgctggacagtggctgtggtgaggagtatgtcgcctgcctccctgacaacagctcaggcaccgtggcagcagtgtccttttcagctgcccacgaaggcctgcttcagccagaggcctgcagcgccttctgcttctccaccggccagggcctcgcagccctctcggagcagggctggtgcctgtgtggggcggcccagccctccagtgcctcctttgcctgcctgtccctctgctccggccccccgccacctcctgcccccacctgtaggggccccaccctcctccagcacgtcttccctgcctccccaggggccaccctggtggggccccacggacctctggcctctggccagctagcagccttccacatcgctgccccgctccctgtcactgccacacgctgggacttcggagacggctccgccgaggtggatgccgctgggccggctgcctcgcatcgctatgtgctgcctgggcgctatcacgtgacggccgtgctggccctgggggccggctcagccctgctggggacagacgtgcaggtggaagcggcacctgccgccctggagctcgtgtgcccgtcctcggtgcagagtgacgagagcctcgacctcagcatccagaaccgcggtggttcaggcctggaggccgcctacagcatcgtggccctgggcgaggagccggcccgagcggtgcacccgctctgcccctcggacacggagatcttccctggcaacgggcactgctaccgcctggtggtggagaaggcggcctggctgcaggcgcaggagcagtgtcaggcctgggccggggccgccctggcaatggtggacagtcccgccgtgcagcgcttcctggtctcccgggtcaccaggagcctagacgtgtggatcggcttctcgactgtgcagggggtggaggtgggcccagcgccgcagggcgaggccttcagcctggagagctgccagaactggctgcccggggagccacacccagccacagccgagcactgcgtccggctcgggcccaccgggtggtgtaacaccgacctgtgctcagcgccgcacagctacgtctgcgagctgcagcccggaggcccagtgcaggatgccgagaacctcctcgtgggagcgcccagtggggacctgcagggacccctgacgcctctggcacagcaggacggcctctcagccccgcacgagcccgtggaggtcatggtattcccgggcctgcgtctgagccgtgaagccttcctcaccacggccgaatttgggacccaggagctccggcggcccgcccagctgcggctgcaggtgtaccggctcctcagcacagcagggaccccggagaacggcagcgagcctgagagcaggtccccggacaacaggacccagctggcccccgcgtgcatgccagggggacgctggtgccctggagccaacatctgcttgccgctggacgcctcctgccacccccaggcctgcgccaatggctgcacgtcagggccagggctacccggggccccctatgcgctatggagagagttcctcttctccgttcccgcggggccccccgcgcagtactcggtcaccctccacggccaggatgtcctcatgctccctggtgacctcgttggcttgcagcacgacgctggccctggcgccctcctgcactgctcgccggctcccggccaccctggtccccgggccccgtacctctccgccaacgcctcgtcatggctgccccacttgccagcccagctggagggcacttgggcctgccctgcctgtgccctgcggctgcttgcagccacggaacagctcaccgtgctgctgggcttgaggcccaaccctggactgcggctgcctgggcgctatgaggtccgggcagaggtgggcaatggcgtgtccaggcacaacctctcctgcagctttgacgtggtctccccagtggctgggctgcgggtcatctaccctgccccccgcgacggccgcctctacgtgcccaccaacggctcagccttggtgctccaggtggactctggtgccaacgccacggccacggctcgctggcctgggggcagtgtcagcgcccgctttgagaatgtctgccctgccctggtggccaccttcgtgcccggctgcccctgggagaccaacgataccctgttctcagtggtagcactgccgtggctcagtgagggggagcacgtggtggacgtggtggtggaaaacagcgccagccgggccaacctcagcctgcgggtgacggcggaggagcccatctgtggcctccgcgccacgcccagccccgaggcccgtgtactgcagggagtcctagtgaggtacagccccgtggtggaggccggctcggacatggtcttccggtggaccatcaacgacaagcagtccctgaccttccagaacgtggtcttcaatgtcatttatcagagcgcggcggtcttcaagctctcactgacggcctccaaccacgtgagcaacgtcaccgtgaactacaacgtaaccgtggagcggatgaacaggatgcagggtctgcaggtctccacagtgccggccgtgctgtcccccaatgccacgctagcactgacggcgggcgtgctggtggactcggccgtggaggtggccttcctgtggacctttggggatggggagcaggccctccaccagttccagcctccgtacaacgagtccttcccggttccagacccctcggtggcccaggtgctggtggagcacaatgtcatgcacacctacgctgccccaggtgagtacctcctgaccgtgctggcatctaatgccttcgagaacctgacgcagcaggtgcctgtgagcgtgcgcgcctccctgccctccgtggctgtgggtgtgagtgacggcgtcctggtggccggccggcccgtcaccttctacccgcacccgctgccctcgcctgggggtgttctttacacgtgggacttcggggacggctcccctgtcctgacccagagccagccggctgccaaccacacctatgcctcgaggggcacctaccacgtgcgcctggaggtcaacaacacggtgagcggtgcggcggcccaggcggatgtgcgcgtctttgaggagctccgcggactcagcgtggacatgagcctggccgtggagcagggcgcccccgtggtggtcagcgccgcggtgcagacgggcgacaacatcacgtggaccttcgacatgggggacggcaccgtgctgtcgggcccggaggcaacagtggagcatgtgtacctgcgggcacagaactgcacagtgaccgtgggtgcggccagccccgccggccacctggcccggagcctgcacgtgctggtcttcgtcctggaggtgctgcgcgttgaacccgccgcctgcatccccacgcagcctgacgcgcggctcacggcctacgtcaccgggaacccggcccactacctcttcgactggaccttcggggatggctcctccaacacgaccgtgcgggggtgcccgacggtgacacacaacttcacgcggagcggcacgttccccctggcgctggtgctgtccagccgcgtgaacagggcgcattacttcaccagcatctgcgtggagccagaggtgggcaacgtcaccctgcagccagagaggcagtttgtgcagctcggggacgaggcctggctggtggcatgtgcctggcccccgttcccctaccgctacacctgggactttggcaccgaggaagccgcccccacccgtgccaggggccctgaggtgacgttcatctaccgagacccaggctcctatcttgtgacagtcaccgcgtccaacaacatctctgctgccaatgactcagccctggtggaggtgcaggagcccgtgctggtcaccagcatcaaggtcaatggctcccttgggctggagctgcagcagccgtacctgttctctgctgtgggccgtgggcgccccgccagctacctgtgggatctgggggacggtgggtggctcgagggtccggaggtcacccacgcttacaacagcacaggtgacttcaccgttagggtggccggctggaatgaggtgagccgcagcgaggcctggctcaatgtgacggtgaagcggcgcgtgcgggggctcgtcgtcaatgcaagccgcacggtggtgcccctgaatgggagcgtgagcttcagcacgtcgctggaggccggcagtgatgtgcgctattcctgggtgctctgtgaccgctgcacgcccatccctgggggtcctaccatctcttacaccttccgctccgtgggcaccttcaatatcatcgtcacggctgagaacgaggtgggctccgcccaggacagcatcttcgtctatgtcctgcagctcatagaggggctgcaggtggtgggcggtggccgctacttccccaccaaccacacggtacagctgcaggccgtggttagggatggcaccaacgtctcctacagctggactgcctggagggacaggggcccggccctggccggcagcggcaaaggcttctcgctcaccgtgctcgaggccggcacctaccatgtgcagctgcgggccaccaacatgctgggcagcgcctgggccgactgcaccatggacttcgtggagcctgtggggtggctgatggtggccgcctccccgaacccagctgccgtcaacacaagcgtcaccctcagtgccgagctggctggtggcagtggtgtcgtatacacttggtccttggaggaggggctgagctgggagacctccgagccatttaccacccatagcttccccacacccggcctgcacttggtcaccatgacggcagggaacccgctgggctcagccaacgccaccgtggaagtggatgtgcaggtgcctgtgagtggcctcagcatcagggccagcgagcccggaggcagcttcgtggcggccgggtcctctgtgcccttttgggggcagctggccacgggcaccaatgtgagctggtgctgggctgtgcccggcggcagcagcaagcgtggccctcatgtcaccatggtcttcccggatgctggcaccttctccatccggctcaatgcctccaacgcagtcagctgggtctcagccacgtacaacctcacggcggaggagcccatcgtgggcctggtgctgtgggccagcagcaaggtggtggcgcccgggcagctggtccattttcagatcctgctggctgccggctcagctgtcaccttccgcctgcaggtcggcggggccaaccccgaggtgctccccgggccccgtttctcccacagcttcccccgcgtcggagaccacgtggtgagcgtgcggggcaaaaaccacgtgagctgggcccaggcgcaggtgcgcatcgtggtgctggaggccgtgagtgggctgcaggtgcccaactgctgcgagcctggcatcgccacgggcactgagaggaacttcacagcccgcgtgcagcgcggctctcgggtcgcctacgcctggtacttctcgctgcagaaggtccagggcgactcgctggtcatcctgtcgggccgcgacgtcacctacacgcccgtggccgcggggctgttggagatccaggtgcgcgccttcaacgccctgggcagtgagaaccgcacgctggtgctggaggttcaggacgccgtccagtatgtggccctgcagagcggcccctgcttcaccaaccgctcggcgcagtttgaggccgccaccagccccagcccccggcgtgtggcctaccactgggactttggggatgggtcgccagggcaggacacagatgagcccagggccgagcactcctacctgaggcctggggactaccgcgtgcaggtgaacgcctccaacctggtgagcttcttcgtggcgcaggccacggtgaccgtccaggtgctggcctgccgggagccggaggtggacgtggtcctgcccctgcaggtgctgatgcggcgatcacagcgcaactacttggaggcccacgttgacctgcgcgactgcgtcacctaccagactgagtaccgctgggaggtgtatcgcaccgccagctgccagcggccggggcgcccagcgcgtgtggccctgcccggcgtggacgtgagccggcctcggctggtgctgccgcggctggcgctgcctgtggggcactactgctttgtgtttgtcgtgtcatttggggacacgccactgacacagagcatccaggccaatgtgacggtggcccccgagcgcctggtgcccatcattgagggtggctcataccgcgtgtggtcagacacacgggacctggtgctggatgggagcgagtcctacgaccccaacctggaggacggcgaccagacgccgctcagtttccactgggcctgtgtggcttcgacacagagggaggctggcgggtgtgcgctgaactttgggccccgcgggagcagcacggtcaccattccacgggagcggctggcggctggcgtggagtacaccttcagcctgaccgtgtggaaggccggccgcaaggaggaggccaccaaccagacggtgctgatccggagtggccgggtgcccattgtgtccttggagtgtgtgtcctgcaaggcacaggccgtgtacgaagtgagccgcagctcctacgtgtacttggagggccgctgcctcaattgcagcagcggctccaagcgagggcggtgggctgcacgtacgttcagcaacaagacgctggtgctggatgagaccaccacatccacgggcagtgcaggcatgcgactggtgctgcggcggggcgtgctgcgggacggcgagggatacaccttcacgctcacggtgctgggccgctctggcgaggaggagggctgcgcctccatccgcctgtcccccaaccgcccgccgctggggggctcttgccgcctcttcccactgggcgctgtgcacgccctcaccaccaaggtgcacttcgaatgcacgggctggcatgacgcggaggatgctggcgccccgctggtgtacgccctgctgctgcggcgctgtcgccagggccactgcgaggagttctgtgtctacaagggcagcctctccagctacggagccgtgctgcccccgggtttcaggccacacttcgaggtgggcctggccgtggtggtgcaggaccagctgggagccgctgtggtcgccctcaacaggtctttggccatcaccctcccagagcccaacggcagcgcaacggggctcacagtctggctgcacgggctcaccgctagtgtgctcccagggctgctgcggcaggccgatccccagcacgtcatcgagtactcgttggccctggtcaccgtgctgaacgagtacgagcgggccctggacgtggcggcagagcccaagcacgagcggcagcaccgagcccagatacgcaagaacatcacggagactctggtgtccctgagggtccacactgtggatgacatccagcagatcgctgctgcgctggcccagtgcatggggcccagcagggagctcgtatgccgctcgtgcctgaagcagacgctgcacaagctggaggccatgatgctcatcctgcaggcagagaccaccgcgggcaccgtgacgcccaccgccatcggagacagcatcctcaacatcacaggagacctcatccacctggccagctcggacgtgcgggcaccacagccctcagagctgggagccgagtcaccatctcggatggtggcgtcccaggcctacaacctgacctctgccctcatgcgcatcctcatgcgctcccgcgtgctcaacgaggagcccctgacgctggcgggcgaggagatcgtggcccagggcaagcgctcggacccgcggagcctgctgtgctatggcggcgccccagggcctggctgccacttctccatccccgaggctttcagcggggccctggccaacctcagtgacgtggtgcagctcatctttctggtggactccaatccctttccctttggctatatcagcaactacaccgtctccaccaaggctccgccaactccgccaactccgttgtggtccagccccaggcctccgtcggtgctgtggtcaccctggacagcagcaaccctgcggccgggctgcatctgcagctcaactatacgctgctggacggccactacctgtctgaggaacctgagccctacctggcagtctacctacactcggagccccggcccaatgagcacaactgctcggctagcaggaggatccgcccagagtcactccagggtgctgaccaccggccctacaccttcttcatttccccggggagcagagacccagcggggagttaccatctgaacctctccagccacttccgctggtcggcgctgcaggtgtccgtgggcctgtacacgtccctgtgccagtacttcagcgaggaggacatggtgtggcggacagaggggctgctgcccctggaggagacctcgccccgccaggccgtctgcctcacccgccacctcaccgccttcggcgccagcctcttcgtgcccccaagccatgtccgctttgtgtttcctgagccgacagcggatgtaaactacatcgtcatgctgacatgtgctgtgtgcctggtgacctacatggtcatggccgccatcctgcacaagctggaccagttggatgccagccggggccgcgccatccctttctgtgggcagcggggccgcttcaagtacgagatcctcgtcaagacaggctggggccggggctcaggtaccacggcccacgtgggcatcatgctgtatggggtggacagccggagcggccaccggcacctggacggcgacagagccttccaccgcaacagcctggacatcttccggatcgccaccccgcacagcctgggtagcgtgtggaagatccgagtgtggcacgacaacaaagggctcagccctgcctggttcctgcagcacgtcatcgtcagggacctgcagacggcacgcagcgccttcttcctggtcaatgactggctttcggtggagacggaggccaacgggggcctggtggagaaggaggtgctggccgcgagcgacgcagcccttttgcgcttccggcgcctgctggtggctgagctgcagcgtggcttctttgacaagcacatctggctctccatatgggaccggccgcctcgtagccgtttcactcgcatccagagggccacctgctgcgttctcctcatctgcctcttcctgggcgccaacgccgtgtggtacggggctgttggcgactctgcctacagcacggggcatgtgtccaggctgagcccgctgagcgtcgacacagtcgctgttggcctggtgtccagcgtggttgtctatcccgtctacctggccatcctttttctcttccggatgtcccggagcaaggtggctgggagcccgagccccacacctgccgggcagcaggtgctggacatcgacagctgcctggactcgtccgtgctggacagctccttcctcacgttctcaggcctccacgctgaggcctttgttggacagatgaagagtgacttgtttctggatgattctaagagtctggtgtgctggccctccggcgagggaacgctcagttggccggacctgctcagtgacccgtccattgtgggtagcaatctgcggcagctggcacggggccaggcgggccatgggctgggcccagaggaggacggcttctccctggccagcccctactcgcctgccaaatccttctcagcatcagatgaagacctgatccagcaggtccttgccgagggggtcagcagcccagcccctacccaagacacccacatggaaacggacctgctcagcagcctgtccagcactcctggggagaagacagagacgctggcgctgcagaggctgggggagctggggccacccagcccaggcctgaactgggaacagccccaggcagcgaggctgtccaggacaggtgtgcttgcgtagccccgggatgcccctagcccctccctgtgtgcctccctggcccacgggctcagcctgctcctggtggctgtggctgtggctgtctcagggtgggtgggtgcgagcttccccccgggcgtgagtgttgcgtggctcctgtccagcagcgccagcttcctggcctcattcctcggctgggagccactgaaggtcttgctggaagccctgtacttctcactggtggccaagcggctgcacccggatgaagatgacaccctggtagagagcccggctgtgacgcctgtgagcgcacgtgtgccccgcgtacggccaccccacggctttgcactcttcctggccaaggaagaagcccgcaaggtcaagaggctacatggcatgctgcggagcctcctggtgtacatgctttttctgctggtgaccctgctggccagctatggggatgcctcatgccatgggcacgcctaccgtctgcaaagcgccatcaagcaggagctgcacagccgggccttcctggccatcacgcggtctgaggagctctggccatggatggcccacgtgctgctgccctacgtccacgggaaccagtccagcccagagctggggcccccacggctgcggcaggtgcggctgcaggaagcactctacccagaccctcccggccccagggtccacacgtgctcggccgcaggaggcttcagcaccagcgattacgacgttggctgggagagtcctcacaatggctcggggacgtgggcctattcagcgccggatctgctgggggcatggtcctggggctcctgtgccgtgtatgacagcgggggctacgtgcaggagctgggcctgagcctggaggagagccgcgaccggctgcgcttcctgcagctgcacaactggctggacaacaggagccgcgctgtgttcctggagctcacgcgctacagcccggccgtggggctgcacgccgccgtcacgctgcgcctcgagttcccggcggccggccgcgccctggccgccctcagcgtccgcccctttgcgctgcgccgcctcagcgcgggcctctcgctgcctctgctcacctcggtgtgcctgctgctgttcgccgtgcacttcgccgtggccgaggcccgtacttggcacagggaagggcgctggcgcgtgctgcggctcggagcctgggcgcggtggctgctggtggcgctgacggcggccacggcactggtacgcctcgcccagctgggtgccgctgaccgccagtggacccgtttcgtgcgcggccgcccgcgccgcttcactagcttcgaccaggtggcgcagctgagctccgcagcccgtggcctggcggcctcgctgctcttcctgcttttggtcaaggctgcccagcagctacgcttcgtgcgccagtggtccgtctttggcaagacattatgccgagctctgccagagctcctgggggtcaccttgggcctggtggtgctcggggtagcctacgcccagctggccatcctgctcgtgtcttcctgtgtggactccctctggagcgtggcccaggccctgttggtgctgtgccctgggactgggctctctaccctgtgtcctgccgagtcctggcacctgtcacccctgctgtgtgtggggctctgggcactgcggctgtggggcgccctacggctgggggctgttattctccgctggcgctaccacgccttgcgtggagagctgtaccggccggcctgggagccccaggactacgagatggtggagttgttcctgcgcaggctgcgcctctggatgggcctcagcaaggtcaaggagttccgccacaaagtccgctttgaagggatggagccgctgccctctcgctcctccaggggctccaaggtatccccggatgtgcccccacccagcgctggctccgatgcctcgcacccctccacctcctccagccagctggatgggctgagcgtgagcctgggccggctggggacaaggtgtgagcctgagccctcccgcctccaagccgtgttcgaggccctgctcacccagtttgaccgactcaaccaggccacagaggacgtctaccagctggagcagcagctgcacagcctgcaaggccgcaggagcagccgggcgcccgccggatcttcccgtggcccatccccgggcctgcggccagcactgcccagccgccttgcccgggccagtcggggtgtggacctggccactggccccagcaggacaccccttcgggccaagaacaaggtccaccccagcagcacttagtcctccttcctggcgggggtgggccgtggagtcggagtggacaccgctcagtattactttctgccgctgtcaaggccgagggccaggcagaatggctgcacgtaggttccccagagagcaggcaggggcatctgtctgtctgtgggcttcagcactttaaagaggctgtgtggccaaccaggacccagggtcccctccccagctcccttgggaaggacacagcagtattggacggtttctagcctctgagatgctaatttatttccccgagtcctcaggtacagcgggctgtgcccggccccaccccctgggcagatgtcccccactgctaaggctgctggcttcagggagggttagcctgcaccgccgccaccctgcccctaagttattacctctccagttcctaccgtactccctgcaccgtctcactgtgtgtctcgtgtcagtaatttatatggtgttaaaatgtgtatatttttgtatgtcactattttcactagggctgaggggcctgcgcccagagctggcctcccccaacacctgctgcgcttggtaggtgtggtggcgttatggcagcccggctgctgcttggatgcgagcttggccttgggccggtgctgggggcacagctgtctgccaggcactctcatcaccccagaggccttgtcatcctcccttgccccaggccaggtagcaagagagcagcgcccaggcctgctggcatcaggtctgggcaagtagcaggactaggcatgtcagaggaccccagggtggttagaggaaaagactcctcctgggggctggctcccagggtggaggaaggtgactgtgtgtgtgtgtgtgtgcgcgcgcgcacgcgcgagtgtgctgtatggcccaggcagcctcaaggccctcggagctggctgtgcctgcttctgtgtaccacttctgtgggcatggccgcttctagagcctcgacacccccccaacccccgcaccaagcagacaaagtcaataaaagagctgtctgactgc

SEQ ID NO: 6472 - DNA, 14135 bp, Artificial Sequence
  derived and/or modified sequence
gcactgcagcgccagcgtccgagcgggcggccgagctcccggagcggcctggccccgagccccgagcgggcgtcgctcagcagcaggtcgcggccgcagccccatccagccccgcgcccgccatgccgtccgcgggccccgcctgagctgcggcctccgcgcgcgggcgggcctggggacggcggggccatgcgcgcgctgccctaacgatgccgcccgccgcgcccgcccgcctggcgctggccctgggcctgggcctgtggctcggggcgctggcggggggccccgggcgcggctgcgggccctgcgagcccccctgcctctgcggcccagcgcccggcgccgcctgccgcgtcaactgctcgggccgcgggctgcggacgctcggtcccgcgctgcgcatccccgcggacgccacagcgctagacgtctcccacaacctgctccgggcgctggacgttgggctcctggcgaacctctcggcgctggcagagctggatataagcaacaacaagatttctacgttagaagaaggaatatttgctaatttatttaatttaagtgaaataaacctgagtgggaacccgtttgagtgtgactgtggcctggcgtggctgccgcgatgggcggaggagcagcaggtgcgggtggtgcagcccgaggcagccacgtgtgctgggcctggctccctggctggccagcctctgcttggcatccccttgctggacagtggctgtggtgaggagtatgtcgcctgcctccctgacaacagctcaggcaccgtggcagcagtgtccttttcagctgcccacgaaggcctgcttcagccagaggcctgcagcgccttctgcttctccaccggccagggcctcgcagccctctcggagcagggctggtgcctgtgtggggcggcccagccctccagtgcctcctttgcctgcctgtccctctgctccggccccccgccacctcctgcccccacctgtaggggccccaccctcctccagcacgtcttccctgcctccccaggggccaccctggtggggccccacggacctctggcctctggccagctagcagccttccacatcgctgccccgctccctgtcactgccacacgctgggacttcggagacggctccgccgaggtggatgccgctgggccggctgcctcgcatcgctatgtgctgcctgggcgctatcacgtgacggccgtgctggccctgggggccggctcagccctgctggggacagacgtgcaggtggaagcggcacctgccgccctggagctcgtgtgcccgtcctcggtgcagagtgacgagagcctcgacctcagcatccagaaccgcggtggttcaggcctggaggccgcctacagcatcgtggccctgggcgaggagccggcccgagcggtgcacccgctctgcccctcggacacggagatcttccctggcaacgggcactgctaccgcctggtggtggagaaggcggcctggctgcaggcgcaggagcagtgtcaggcctgggccggggccgccctggcaatggtggacagtcccgccgtgcagcgcttcctggtctcccgggtcaccaggagcctagacgtgtggatcggcttctcgactgtgcagggggtggaggtgggcccagcgccgcagggcgaggccttcagcctggagagctgccagaactggctgcccggggagccacacccagccacagccgagcactgcgtccggctcgggcccaccgggtggtgtaacaccgacctgtgctcagcgccgcacagctacgtctgcgagctgcagcccggaggcccagtgcaggatgccgagaacctcctcgtgggagcgcccagtggggacctgcagggacccctgacgcctctggcacagcaggacggcctctcagccccgcacgagcccgtggaggtcatggtattcccgggcctgcgtctgagccgtgaagccttcctcaccacggccgaatttgggacccaggagctccggcggcccgcccagctgcggctgcaggtgtaccggctcctcagcacagcagggaccccggagaacggcagcgagcctgagagcaggtccccggacaacaggacccagctggcccccgcgtgcatgccagggggacgctggtgccctggagccaacatctgcttgccgctggacgcctcctgccacccccaggcctgcgccaatggctgcacgtcagggccagggctacccggggccccctatgcgctatggagagagttcctcttctccgttcccgcggggccccccgcgcagtactcggtcaccctccacggccaggatgtcctcatgctccctggtgacctcgttggcttgcagcacgacgctggccctggcgccctcctgcactgctcgccggctcccggccaccctggtccccgggccccgtacctctccgccaacgcctcgtcatggctgccccacttgccagcccagctggagggcacttgggcctgccctgcctgtgccctgcggctgcttgcagccacggaacagctcaccgtgctgctgggcttgaggcccaaccctggactgcggctgcctgggcgctatgaggtccgggcagaggtgggcaatggcgtgtccaggcacaacctctcctgcagctttgacgtggtctccccagtggctgggctgcgggtcatctaccctgccccccgcgacggccgcctctacgtgcccaccaacggctcagccttggtgctccaggtggactctggtgccaacgccacggccacggctcgctggcctgggggcagtgtcagcgcccgctttgagaatgtctgccctgccctggtggccaccttcgtgcccggctgcccctgggagaccaacgataccctgttctcagtggtagcactgccgtggctcagtgagggggagcacgtggtggacgtggtggtggaaaacagcgccagccgggccaacctcagcctgcgggtgacggcggaggagcccatctgtggcctccgcgccacgcccagccccgaggcccgtgtactgcagggagtcctagtgaggtacagccccgtggtggaggccggctcggacatggtcttccggtggaccatcaacgacaagcagtccctgaccttccagaacgtggtcttcaatgtcatttatcagagcgcggcggtcttcaagctctcactgacggcctccaaccacgtgagcaacgtcaccgtgaactacaacgtaaccgtggagcggatgaacaggatgcagggtctgcaggtctccacagtgccggccgtgctgtcccccaatgccacgctagcactgacggcgggcgtgctggtggactcggccgtggaggtggccttcctgtggacctttggggatggggagcaggccctccaccagttccagcctccgtacaacgagtccttcccggttccagacccctcggtggcccaggtgctggtggagcacaatgtcatgcacacctacgctgccccaggtgagtacctcctgaccgtgctggcatctaatgccttcgagaacctgacgcagcaggtgcctgtgagcgtgcgcgcctccctgccctccgtggctgtgggtgtgagtgacggcgtcctggtggccggccggcccgtcaccttctacccgcacccgctgccctcgcctgggggtgttctttacacgtgggacttcggggacggctcccctgtcctgacccagagccagccggctgccaaccacacctatgcctcgaggggcacctaccacgtgcgcctggaggtcaacaacacggtgagcggtgcggcggcccaggcggatgtgcgcgtctttgaggagctccgcggactcagcgtggacatgagcctggccgtggagcagggcgcccccgtggtggtcagcgccgcggtgcagacgggcgacaacatcacgtggaccttcgacatgggggacggcaccgtgctgtcgggcccggaggcaacagtggagcatgtgtacctgcgggcacagaactgcacagtgaccgtgggtgcggccagccccgccggccacctggcccggagcctgcacgtgctggtcttcgtcctggaggtgctgcgcgttgaacccgccgcctgcatccccacgcagcctgacgcgcggctcacggcctacgtcaccgggaacccggcccactacctcttcgactggaccttcggggatggctcctccaacacgaccgtgcgggggtgcccgacggtgacacacaacttcacgcggagcggcacgttccccctggcgctggtgctgtccagccgcgtgaacagggcgcattacttcaccagcatctgcgtggagccagaggtgggcaacgtcaccctgcagccagagaggcagtttgtgcagctcggggacgaggcctggctggtggcatgtgcctggcccccgttcccctaccgctacacctgggactttggcaccgaggaagccgcccccacccgtgccaggggccctgaggtgacgttcatctaccgagacccaggctcctatcttgtgacagtcaccgcgtccaacaacatctctgctgccaatgactcagccctggtggaggtgcaggagcccgtgctggtcaccagcatcaaggtcaatggctcccttgggctggagctgcagcagccgtacctgttctctgctgtgggccgtgggcgccccgccagctacctgtgggatctgggggacggtgggtggctcgagggtccggaggtcacccacgcttacaacagcacaggtgacttcaccgttagggtggccggctggaatgaggtgagccgcagcgaggcctggctcaatgtgacggtgaagcggcgcgtgcgggggctcgtcgtcaatgcaagccgcacggtggtgcccctgaatgggagcgtgagcttcagcacgtcgctggaggccggcagtgatgtgcgctattcctgggtgctctgtgaccgctgcacgcccatccctgggggtcctaccatctcttacaccttccgctccgtgggcaccttcaatatcatcgtcacggctgagaacgaggtgggctccgcccaggacagcatcttcgtctatgtcctgcagctcatagaggggctgcaggtggtgggcggtggccgctacttccccaccaaccacacggtacagctgcaggccgtggttagggatggcaccaacgtctcctacagctggactgcctggagggacaggggcccggccctggccggcagcggcaaaggcttctcgctcaccgtgctcgaggccggcacctaccatgtgcagctgcgggccaccaacatgctgggcagcgcctgggccgactgcaccatggacttcgtggagcctgtggggtggctgatggtggccgcctccccgaacccagctgccgtcaacacaagcgtcaccctcagtgccgagctggctggtggcagtggtgtcgtatacacttggtccttggaggaggggctgagctgggagacctccgagccatttaccacccatagcttccccacacccggcctgcacttggtcaccatgacggcagggaacccgctgggctcagccaacgccaccgtggaagtggatgtgcaggtgcctgtgagtggcctcagcatcagggccagcgagcccggaggcagcttcgtggcggccgggtcctctgtgcccttttgggggcagctggccacgggcaccaatgtgagctggtgctgggctgtgcccggcggcagcagcaagcgtggccctcatgtcaccatggtcttcccggatgctggcaccttctccatccggctcaatgcctccaacgcagtcagctgggtctcagccacgtacaacctcacggcggaggagcccatcgtgggcctggtgctgtgggccagcagcaaggtggtggcgcccgggcagctggtccattttcagatcctgctggctgccggctcagctgtcaccttccgcctgcaggtcggcggggccaaccccgaggtgctccccgggccccgtttctcccacagcttcccccgcgtcggagaccacgtggtgagcgtgcggggcaaaaaccacgtgagctgggcccaggcgcaggtgcgcatcgtggtgctggaggccgtgagtgggctgcaggtgcccaactgctgcgagcctggcatcgccacgggcactgagaggaacttcacagcccgcgtgcagcgcggctctcgggtcgcctacgcctggtacttctcgctgcagaaggtccagggcgactcgctggtcatcctgtcgggccgcgacgtcacctacacgcccgtggccgcggggctgttggagatccaggtgcgcgccttcaacgccctgggcagtgagaaccgcacgctggtgctggaggttcaggacgccgtccagtatgtggccctgcagagcggcccctgcttcaccaaccgctcggcgcagtttgaggccgccaccagccccagcccccggcgtgtggcctaccactgggactttggggatgggtcgccagggcaggacacagatgagcccagggccgagcactcctacctgaggcctggggactaccgcgtgcaggtgaacgcctccaacctggtgagcttcttcgtggcgcaggccacggtgaccgtccaggtgctggcctgccgggagccggaggtggacgtggtcctgcccctgcaggtgctgatgcggcgatcacagcgcaactacttggaggcccacgttgacctgcgcgactgcgtcacctaccagactgagtaccgctgggaggtgtatcgcaccgccagctgccagcggccggggcgcccagcgcgtgtggccctgcccggcgtggacgtgagccggcctcggctggtgctgccgcggctggcgctgcctgtggggcactactgctttgtgtttgtcgtgtcatttggggacacgccactgacacagagcatccaggccaatgtgacggtggcccccgagcgcctggtgcccatcattgagggtggctcataccgcgtgtggtcagacacacgggacctggtgctggatgggagcgagtcctacgaccccaacctggaggacggcgaccagacgccgctcagtttccactgggcctgtgtggcttcgacacagagggaggctggcgggtgtgcgctgaactttgggccccgcgggagcagcacggtcaccattccacgggagcggctggcggctggcgtggagtacaccttcagcctgaccgtgtggaaggccggccgcaaggaggaggccaccaaccagacggtgctgatccggagtggccgggtgcccattgtgtccttggagtgtgtgtcctgcaaggcacaggccgtgtacgaagtgagccgcagctcctacgtgtacttggagggccgctgcctcaattgcagcagcggctccaagcgagggcggtgggctgcacgtacgttcagcaacaagacgctggtgctggatgagaccaccacatccacgggcagtgcaggcatgcgactggtgctgcggcggggcgtgctgcgggacggcgagggatacaccttcacgctcacggtgctgggccgctctggcgaggaggagggctgcgcctccatccgcctgtcccccaaccgcccgccgctggggggctcttgccgcctcttcccactgggcgctgtgcacgccctcaccaccaaggtgcacttcgaatgcacgggctggcatgacgcggaggatgctggcgccccgctggtgtacgccctgctgctgcggcgctgtcgccagggccactgcgaggagttctgtgtctacaagggcagcctctccagctacggagccgtgctgcccccgggtttcaggccacacttcgaggtgggcctggccgtggtggtgcaggaccagctgggagccgctgtggtcgccctcaacaggtctttggccatcaccctcccagagcccaacggcagcgcaacggggctcacagtctggctgcacgggctcaccgctagtgtgctcccagggctgctgcggcaggccgatccccagcacgtcatcgagtactcgttggccctggtcaccgtgctgaacgagtacgagcgggccctggacgtggcggcagagcccaagcacgagcggcagcaccgagcccagatacgcaagaacatcacggagactctggtgtccctgagggtccacactgtggatgacatccagcagatcgctgctgcgctggcccagtgcatggggcccagcagggagctcgtatgccgctcgtgcctgaagcagacgctgcacaagctggaggccatgatgctcatcctgcaggcagagaccaccgcgggcaccgtgacgcccaccgccatcggagacagcatcctcaacatcacaggagacctcatccacctggccagctcggacgtgcgggcaccacagccctcagagctgggagccgagtcaccatctcggatggtggcgtcccaggcctacaacctgacctctgccctcatgcgcatcctcatgcgctcccgcgtgctcaacgaggagcccctgacgctggcgggcgaggagatcgtggcccagggcaagcgctcggacccgcggagcctgctgtgctatggcggcgccccagggcctggctgccacttctccatccccgaggctttcagcggggccctggccaacctcagtgacgtggtgcagctcatctttctggtggactccaatccctttccctttggctatatcagcaactacaccgtctccaccaaggtggcctcgatggcattccagacacaggccggcgcccagatccccatcgagcggctggcctcagagcgcgccatcaccgtgaaggtgcccaacaactcggactgggctgcccggggccaccgcagctccgccaactccgccaactccgttgtggtccagccccaggcctccgtcggtgctgtggtcaccctggacagcagcaaccctgcggccgggctgcatctgcagctcaactatacgctgctggacggccactacctgtctgaggaacctgagccctacctggcagtctacctacactcggagccccggcccaatgagcacaactgctcggctagcaggaggatccgcccagagtcactccagggtgctgaccaccggccctacaccttcttcatttccccggggagcagagacccagcggggagttaccatctgaacctctccagccacttccgctggtcggcgctgcaggtgtccgtgggcctgtacacgtccctgtgccagtacttcagcgaggaggacatggtgtggcggacagaggggctgctgcccctggaggagacctcgccccgccaggccgtctgcctcacccgccacctcaccgccttcggcgccagcctcttcgtgcccccaagccatgtccgctttgtgtttcctgagccgacagcggatgtaaactacatcgtcatgctgacatgtgctgtgtgcctggtgacctacatggtcatggccgccatcctgcacaagctggaccagttggatgccagccggggccgcgccatccctttctgtgggcagcggggccgcttcaagtacgagatcctcgtcaagacaggctggggccggggctcaggtaccacggcccacgtgggcatcatgctgtatggggtggacagccggagcggccaccggcacctggacggcgacagagccttccaccgcaacagcctggacatcttccggatcgccaccccgcacagcctgggtagcgtgtggaagatccgagtgtggcacgacaacaaagggctcagccctgcctggttcctgcagcacgtcatcgtcagggacctgcagacggcacgcagcgccttcttcctggtcaatgactggctttcggtggagacggaggccaacgggggcctggtggagaaggaggtgctggccgcgagcgacgcagcccttttgcgcttccggcgcctgctggtggctgagctgcagcgtggcttctttgacaagcacatctggctctccatatgggaccggccgcctcgtagccgtttcactcgcatccagagggccacctgctgcgttctcctcatctgcctcttcctgggcgccaacgccgtgtggtacggggctgttggcgactctgcctacagcacggggcatgtgtccaggctgagcccgctgagcgtcgacacagtcgctgttggcctggtgtccagcgtggttgtctatcccgtctacctggccatcctttttctcttccggatgtcccggagcaaggtggctgggagcccgagccccacacctgccgggcagcaggtgctggacatcgacagctgcctggactcgtccgtgctggacagctccttcctcacgttctcaggcctccacgctgaggcctttgttggacagatgaagagtgacttgtttctggatgattctaagagtctggtgtgctggccctccggcgagggaacgctcagttggccggacctgctcagtgacccgtccattgtgggtagcaatctgcggcagctggcacggggccaggcgggccatgggctgggcccagaggaggacggcttctccctggccagcccctactcgcctgccaaatccttctcagcatcagatgaagacctgatccagcaggtccttgccgagggggtcagcagcccagcccctacccaagacacccacatggaaacggacctgctcagcagcctgtccagcactcctggggagaagacagagacgctggcgctgcagaggctgggggagctggggccacccagcccaggcctgaactgggaacagccccaggcagcgaggctgtccaggacaggactggtggagggtctgcggaagcgcctgctgccggcctggtgtgcctccctggcccacgggctcagcctgctcctggtggctgtggctgtggctgtctcagggtgggtgggtgcgagcttccccccgggcgtgagtgttgcgtggctcctgtccagcagcgccagcttcctggcctcattcctcggctgggagccactgaaggtcttgctggaagccctgtacttctcactggtggccaagcggctgcacccggatgaagatgacaccctggtagagagcccggctgtgacgcctgtgagcgcacgtgtgccccgcgtacggccaccccacggctttgcactcttcctggccaaggaagaagcccgcaaggtcaagaggctacatggcatgctgcggagcctcctggtgtacatgctttttctgctggtgaccctgctggccagctatggggatgcctcatgccatgggcacgcctaccgtctgcaaagcgccatcaagcaggagctgcacagccgggccttcctggccatcacgcggtctgaggagctctggccatggatggcccacgtgctgctgccctacgtccacgggaaccagtccagcccagagctggggcccccacggctgcggcaggtgcggctgcaggaagcactctacccagaccctcccggccccagggtccacacgtgctcggccgcaggaggcttcagcaccagcgattacgacgttggctgggagagtcctcacaatggctcggggacgtgggcctattcagcgccggatctgctgggggcatggtcctggggctcctgtgccgtgtatgacagcgggggctacgtgcaggagctgggcctgagcctggaggagagccgcgaccggctgcgcttcctgcagctgcacaactggctggacaacaggagccgcgctgtgttcctggagctcacgcgctacagcccggccgtggggctgcacgccgccgtcacgctgcgcctcgagttcccggcggccggccgcgccctggccgccctcagcgtccgcccctttgcgctgcgccgcctcagcgcgggcctctcgctgcctctgctcacctcggtgtgcctgctgctgttcgccgtgcacttcgccgtggccgaggcccgtacttggcacagggaagggcgctggcgcgtgctgcggctcggagcctgggcgcggtggctgctggtggcgctgacggcggccacggcactggtacgcctcgcccagctgggtgccgctgaccgccagtggacccgtttcgtgcgcggccgcccgcgccgcttcactagcttcgaccaggtggcgcagctgagctccgcagcccgtggcctggcggcctcgctgctcttcctgcttttggtcaaggctgcccagcagctacgcttcgtgcgccagtggtccgtctttggcaagacattatgccgagctctgccagagctcctgggggtcaccttgggcctggtggtgctcggggtagcctacgcccagctggccatcctgctcgtgtcttcctgtgtggactccctctggagcgtggcccaggccctgttggtgctgtgccctgggactgggctctctaccctgtgtcctgccgagtcctggcacctgtcacccctgctgtgtgtggggctctgggcactgcggctgtggggcgccctacggctgggggctgttattctccgctggcgctaccacgccttgcgtggagagctgtaccggccggcctgggagccccaggactacgagatggtggagttgttcctgcgcaggctgcgcctctggatgggcctcagcaaggtcaaggagttccgccacaaagtccgctttgaagggatggagccgctgccctctcgctcctccaggggctccaaggtatccccggatgtgcccccacccagcgctggctccgatgcctcgcacccctccacctcctccagccagctggatgggctgagcgtgagcctgggccggctggggacaaggtgtgagcctgagccctcccgcctccaagccgtgttcgaggccctgctcacccagtttgaccgactcaaccaggccacagaggacgtctaccagctggagcagcagctgcacagcctgcaaggccgcaggagcagccgggcgcccgccggatcttcccgtggcccatccccgggcctgcggccagcactgcccagccgccttgcccgggccagtcggggtgtggacctggccactggccccagcaggacaccccttcgggccaagaacaaggtccaccccagcagcacttagtcctccttcctggcgggggtgggccgtggagtcggagtggacaccgctcagtattactttctgccgctgtcaaggccgagggccaggcagaatggctgcacgtaggttccccagagagcaggcaggggcatctgtctgtctgtgggcttcagcactttaaagaggctgtgtggccaaccaggacccagggtcccctccccagctcccttgggaaggacacagcagtattggacggtttctagcctctgagatgctaatttatttccccgagtcctcaggtacagcgggctgtgcccggccccaccccctgggcagatgtcccccactgctaaggctgctggcttcagggagggttagcctgcaccgccgccaccctgcccctaagttattacctctccagttcctaccgtactccctgcaccgtctcactgtgtgtctcgtgtcagtaatttatatggtgttaaaatgtgtatatttttgtatgtcactattttcactagggctgaggggcctgcgcccagagctggcctcccccaacacctgctgcgcttggtaggtgtggtggcgttatggcagcccggctgctgcttggatgcgagcttggccttgggccggtgctgggggcacagctgtctgccaggcactctcatcaccccagaggccttgtcatcctcccttgccccaggccaggtagcaagagagcagcgcccaggcctgctggcatcaggtctgggcaagtagcaggactaggcatgtcagaggaccccagggtggttagaggaaaagactcctcctgggggctggctcccagggtggaggaaggtgactgtgtgtgtgtgtgtgtgcgcgcgcgcacgcgcgagtgtgctgtatggcccaggcagcctcaaggccctcggagctggctgtgcctgcttctgtgtaccacttctgtgggcatggccgcttctagagcctcgacacccccccaacccccgcaccaagcagacaaagtcaataaaagagctgtctgactgc

SEQ ID NO: 6473 - DNA, 12909 bp, Artificial Sequence
  derived and/or modified sequence
atgccacccgctgctccagctcgcttagctcttgccctgggacttggactttggctgggggcactggcgggtggccctggccgaggctgcggtccatgtgaacccccttgtctttgcggccctgcaccgggtgccgcttgcagggtgaactgtagcggcagggggctgagaactctcggtccagcactgcggatacccgctgatgcgacggcattggacgtttctcacaatctgctccgcgctctggacgtcggtctgttggctaacctgtccgctctggctgagctcgacatcagcaacaataaaatttccactttggaggagggaatatttgccaatctcttcaatctttctgagatcaatctatctggaaaccccttcgaatgcgattgtggcctcgcttggctgcccagatgggctgaggagcaacaggtgagggtggtccagcctgaggccgcaacttgcgcgggtcccggatcactggccggacagccactgcttggcatcccactgcttgattccggctgtggagaggaatatgtggcatgcctacccgataatagctcaggtacagtcgccgctgtctccttcagcgccgcacatgaggggcttctgcaacccgaggcttgttccgcgttttgcttttctaccggccagggcctggctgctctcagcgaacagggttggtgcctttgtggagccgcacagccctccagtgcaagcttcgcctgtctctctctatgtagcggcccacctcctcccccagcaccaacctgccgcggaccaacattactgcagcacgtgtttcccgcttctcctggcgctacattagtcggtcctcatgggccattagcttccggacaactggccgcatttcatatcgcagctcccctgccggtcaccgcaaccaggtgggactttggtgacggaagtgctgaagtagacgccgcaggccctgccgcttctcaccgttatgtgcttcccggaagatatcatgtgaccgctgtgctggctctgggagccggtagtgcactcctgggaaccgatgtccaggtggaggcagctccagccgctctggagctcgtatgcccttcctccgtgcagtcagacgaatctctggacttaagtatccagaacagaggaggcagcggactggaggctgcatacagcatcgtagctctgggagaggagccggcacgagcagtgcaccctctgtgcccatcagatacagaaattttccccggtaatggtcactgttaccgtttagttgtcgagaaggccgcatggctgcaggctcaggagcagtgtcaggcttgggcaggagctgcccttgccatggtagactcaccagccgtgcagcgattcctggttagtcgggtgacccggtctttggatgtttggatcggtttttcaacggttcaaggggttgaagtgggacctgcccctcagggcgaggcttttagcctggagtcatgtcagaactggcttcccggtgagcctcaccctgccacggccgaacattgtgtgaggctgggcccaacgggatggtgtaatactgacttgtgcagtgcccctcactcatatgtatgcgagcttcagccagggggtccagtgcaagacgcagagaatctgctggtgggtgccccatccggtgacttgcagggcccattgacgcctcttgctcagcaggatgggctcagcgctccacacgagcctgttgaagtgatggtgttccccggtctgaggctaagtcgtgaggcctttctgactaccgccgagttcgggacccaggaactcagaagaccggcacaactgcggctccaggtgtaccggctgctgtccacagccggtacccctgaaaatggatcggaacccgaatcacggtccccggacaatcgaacccagctcgcacccgcttgtatgcccggtggtcggtggtgtcctggtgcaaacatttgcctgccgctggatgcctcctgtcacccccaagcttgtgcaaacggatgcacctccggtccagggctgcccggagcaccatatgcactctggcgcgaatttcttttttcagtgcctgccggaccaccagcccaatatagcgtcaccctgcatggtcaggatgtgctgatgctgcctggggacttagttgggttacagcacgatgctggcccaggagccctccttcattgttctcccgcacctggccaccctggacctcgcgcaccctatctgtccgctaatgcctcctcctggcttccacaccttcccgctcagctggagggtacctgggcatgccctgcatgtgctctccggttactggccgctaccgaacagctcacagtactgctgggcctcagacctaatcccggactacggctgcctggtcgctacgaagtgagagctgaagtcggtaatggggtaagtcgccataacctctcttgttcttttgacgtggtcagccctgtcgcaggcctgcgcgtaatatatcctgcccctcgggatgggagactgtacgtgcccacaaatggaagtgcccttgtccttcaggtggactccggcgctaatgctaccgctactgcgaggtggcctggcggttccgtgagcgccagatttgaaaacgtgtgtccggctctggtcgccactttcgtccctggctgcccttgggaaaccaatgacacactgtttagtgtggtggccctgccatggctaagtgagggagaacatgtggtagacgtggtcgtcgagaactctgcctcgagagccaacctttccctgcgcgtaacagctgaggagcccatatgcgggttacgagccacaccatcccctgaggcccgagtactccagggagtcctcgttaggtactccccggtggtagaggcgggttccgacatggtgttcaggtggaccatcaacgacaaacagtctttgacctttcagaacgtggtcttcaatgtgatttatcagagcgccgctgtgtttaagctttcactaaccgccagcaaccacgtatctaatgtgactgtgaattacaatgtgacagtggaaagaatgaatcgcatgcagggactgcaagtctctaccgtgcctgcagtcctatctccgaatgctacactggctcttactgctggtgtgctggttgattctgctgtcgaggtagcatttctgtggacattcggtgacggggagcaggctctgcaccagtttcagccaccatacaatgagtcttttccggtgcctgatccgtccgtggctcaggttctagtggagcacaatgtgatgcatacatatgcagcgccaggtgagtatctgttaaccgtgctggccagcaatgcgttcgaaaacctgacccagcaggtgccagtttctgtccgagcctcattgccaagcgtcgccgttggggtatcagatggggtgcttgtggcagggagacctgtcactttttaccctcacccactcccctctcctggcggagtgctgtacacttgggatttcggagatggttccccggttttaacccagagccagcctgctgcaaaccatacttatgcaagccggggaacctatcatgtgagactggaggtgaacaacacagtgagtggggctgctgctcaggctgacgtgcgggttttcgaagagctgcggggattatccgtggacatgtcacttgccgtggaacagggcgcaccagtcgtagtctcagcggctgtgcaaactggagataatatcacttggactttcgacatgggggatggaaccgtgcttagcggcccagaagccacagttgagcacgtttacctgagggcgcagaactgtactgtgacagtgggtgctgccagtcccgctggccaccttgctcgtagcttacacgtcctcgtctttgtcctcgaggtcttgcgtgtggagcccgctgcttgcatcccaacccaacccgatgctcgcctcaccgcctacgtgaccgggaaccccgctcattatctgttcgactggaccttcggggatgggagctcgaacaccaccgtgcgaggctgcccgacggtgacccacaactttacacgaagtggcacatttccactggcccttgttctctcctcacgagtcaaccgggcacactactttaccagtatttgtgtagaacccgaagtggggaatgtgaccctgcagccagagcgtcagtttgtgcaattgggggacgaggcctggctcgtggcctgcgcctggcctccttttccctatcgctacacgtgggacttcggtaccgaagaggctgcacctactagagctcgtggacccgaggtaacctttatttatcgggacccaggttcgtacctggtgaccgtgacggcatccaataatattagtgcggcaaacgactccgctttagtggaggtgcaggagcctgtgctggtgacatccattaaggtcaacggctccctcggactagagctccaacagccatatcttttcagtgccgtcggtcgcggacgaccagcctcatatctttgggacctgggagatggcggatggcttgaagggcctgaagtgacccatgcctataattccacaggagattttacagttagagtggccggttggaatgaagtatctaggtcggaggcctggctcaatgtgacagtgaaaagaagggttcgtggtctggtggtgaatgctagtcggactgtcgtgccgctgaacgggagcgtgtcattctctacttcccttgaagcgggtagcgacgtgcgctacagctgggttctctgtgatcgatgcacccccatacctggaggcccaacaatctcctacacttttaggtccgtgggtacattcaatataattgtaacggccgaaaacgaagtgggcagcgcacaggactcgatctttgtttacgtgctgcaactcattgaaggactgcaagtggttggtggcggaaggtacttccccacaaatcacactgtgcagctgcaagcagttgtccgggacgggaccaacgtgtcttacagctggacagcttggcgggacagaggacctgcattggctggatctgggaaagggttcagtcttacagtactggaagccggtacataccatgtgcagctcagggccacaaatatgttgggctccgcatgggctgattgcaccatggatttcgtggaaccggtaggctggctgatggtggcggcttccccgaatcccgctgccgttaacacatctgtgactcttagtgccgaactggccggtggatccggagtggtgtatacatggtccctggaggagggcttaagctgggaaacaagcgaaccatttacgacccactcctttccaacacccggtctgcacttggtcactatgacggcaggaaaccccctaggctccgcaaacgccacagtggaggtagatgtgcaggttccagtctcaggactgagcatccgggctagcgagcctgggggaagttttgtcgccgctggctcctccgttccgttctggggccagctcgccaccggaactaacgtcagttggtgctgggccgtcccaggcggatctagtaagaggggccctcatgttacgatggtatttccagatgctggtactttctccattcgattaaatgcaagcaacgccgtgtcctgggtgagcgccacctacaaccttacggccgaggaacctattgtaggtctagtgctatgggcctctagcaaggttgttgccccagggcagctggtgcatttccagattctgttggctgctggctcagccgttacgttccgtctgcaggtagggggagccaatcctgaggtcctccctggccctagattttcgcatagtttcccgcgtgtgggagaccatgtggtgagcgtgcggggaaagaaccacgtatcgtgggcccaagctcaggttaggatcgtggtgttggaggccgtgtctggactgcaggtgccaaactgttgcgagcccggaattgccactggaacagagcgtaactttactgcgagggtgcagcgcggatctagagtagcctatgcctggtatttcagtttacaaaaagtgcagggtgacagcctcgtaatcttatccggccgtgatgttacctacacacccgttgccgctggtttgctggagattcaggtgcgcgctttcaatgccctgggaagtgagaataggaccttggtgctggaagtgcaggatgccgttcaatacgtcgccttacagtccggcccatgtttcactaatagaagtgcacagttcgaggccgctacctctccctccccgagaagagtagcctatcattgggacttcggcgacggctcaccaggccaagatactgatgagcccagagccgagcattcctacctccgacctggagactatagagtgcaggttaacgcctcaaatcttgtgagtttcttcgtagcccaggctacagttactgtgcaggttctcgcctgcagagagcctgaggtggatgtagttctcccattgcaggtgcttatgaggaggtcacagaggaactatttagaggcacacgttgacctcagagattgcgtcacataccaaacagagtatagatgggaagtttacagaactgcttcatgccaacgccctggtcggcctgctagagtagcccttccgggtgtcgacgtctctaggcctagactggtgctccccagactggctctccccgttggccattattgcttcgtcttcgtcgtgtcattcggggacactcctcttacccagagcatacaggctaacgttacagtggcaccagaacgcttagtgccaataattgaaggaggcagctatcgggtctggagtgacaccagggacctggttttagacggaagcgaatcctatgatcccaacctcgaagatggtgatcagacccccttaagtttccactgggcatgtgttgcttcaacacagagagaagcgggaggatgcgcgctgaatttcggaccacggggaagcagcactgtgacaatccctagagaaaggctggctgctggagtcgagtatactttttcgttgaccgtgtggaaagccggtagaaaggaggaggcaacaaatcagacagtgctgatccggagtggcagggtgccgatagtctcattagaatgtgtgtcttgtaaggcccaggcggtctatgaggtctcacgcagctcctacgtgtacctggagggccgatgcctgaattgttcctccggaagcaagcgcggtcgttgggccgctcggacattttctaataagacactggtgttagatgaaactactacaagcaccggttctgccggtatgcgcctagtgctgagacgcggagtgttaagagatggcgaaggctacacgtttaccctcacagtgctcggtagaagcggcgaggaggaaggctgcgcatctatccgcctgagtccaaatcgccctccgttgggtggttcatgtcggctttttcccttaggcgcagtacacgctcttacaactaaagtgcactttgagtgcaccgggtggcatgacgccgaggacgccggtgcacccctggtatatgccctgctactgcgccgatgtaggcaggggcattgtgaggagttttgcgtttacaaggggtctctgtcctcctatggggcagtgcttccgccagggttccgccctcactttgaagtaggactggccgtcgtagtgcaggatcagttgggcgctgcggtcgtggccctcaatcggtcgctggccataacactacctgagccaaacggatccgccaccgggcttacggtgtggctacatggcctcactgcttccgtactaccgggattattgcggcaagccgacccccaacacgtgatagaatatagcctcgccttggtgaccgtgttgaacgagtatgaaagggctctggacgtggccgcagagcccaaacatgaacgacagcaccgtgcgcagatcagaaagaatatcaccgaaaccctcgtgtccttgcgtgtccacacagtggatgacatacaacagattgctgctgccttagcccagtgcatggggcctagtcgcgaactcgtctgtcgcagctgcttaaaacagacgttgcacaagctggaagctatgatgcttatcctgcaggctgagaccacggccggtaccgtcacaccaactgccattggagacagtattctcaacataaccggcgatctgattcacctcgcgtcttctgacgttcgggctccccagcccagcgagttaggcgcagagtcgcccagcagaatggtggctagccaggcctacaatctgacttcagccctgatgagaatcctcatgaggtctagagtcctgaacgaagagccactgaccctcgcgggagaagagatcgttgctcaaggcaaaagatcagatccacggagtctcctgtgctacgggggagctcctggacccggttgtcactttagcatccccgaggcattttcaggggcactagccaatctaagtgatgtcgtgcagttaattttcttagtagactctaatccgttccccttcggttacatctcgaactacacggtgtcaaccaaagtggccagcatggcatttcagacacaggcaggtgcacagattcccattgaacgattggccagcgaacgcgctatcactgtgaaggttcctaacaattcagactgggctgccaggggtcaccgaagctccgccaattccgctaatagtgttgtagtccagccacaagcaagtgtcggcgcagtggtgactctggattccagtaatccggcagccggtctgcacctccagttgaattacacactgctagacggccattacctctctgaggagccagaaccttacctggctgtgtatctacactctgagccaagaccaaatgagcataattgctcagccagtcggagaattcggcctgaaagtctgcagggcgctgaccacaggccctatacgttctttatttctccgggatctagagatcccgcagggtcataccaccttaacctcagcagccattttaggtggtcagctctgcaggtctccgtggggctgtacacatcactttgtcaatatttcagcgaggaggacatggtgtggcgaacagagggactcctgcccctcgaagaaacaagtcctcggcaggccgtgtgtctcaccagacatcttacggcctttggcgcatctctgttcgtgccaccgagccatgtgcgcttcgtgtttccagagcctaccgcagacgttaactatatcgttatgcttacatgcgcggtatgcctggtgacttatatggtcatggctgctattctgcataaactcgaccaactcgatgctagccgtggcagagctattcctttctgtggccagcgcggaagattcaaatacgagatcttggttaagaccggctgggggagaggaagtggaacaactgcccacgtcggaataatgctgtacggagtggactcgcgctctggccatagacacctagatggggatagagcattccacaggaatagcctggatatctttcgcatcgccactccccacagtctcggatctgtgtggaagataagagtgtggcatgacaataagggcctttctcccgcatggtttcttcagcacgttatcgtgcgcgaccttcagacagctcgctccgcatttttcctagttaacgactggcttagtgtggagaccgaggctaatggtggactggtggagaaagaagtgctggctgctagcgatgccgcattactgcgatttcgacgcctgttggtggccgagctgcaacgaggctttttcgacaagcatatctggctctccatctgggaccgaccccctaggtcacgattcacaaggattcagcgagccacttgttgcgtgctgttgatctgtctgtttctgggggctaacgccgtgtggtatggcgcagtgggggactcagcctactcaaccggacacgtatcccgcctcagccctctgagtgtggacacagtggctgtgggcctcgtctcttctgtcgtggtgtatcctgtgtacctcgccatactgtttctattccgcatgtctaggagcaaggtagccggttcgccctcccccacaccggcaggtcagcaagtgctcgacatcgatagttgtctggatagttcagtgctggattcaagcttcctcactttttccggcctgcatgccgaggcttttgtgggccaaatgaagtcagatctgttcttggacgactcgaaatccttggtctgctggccctctggcgaaggcactctttcatggccggatttactctccgacccttccatcgtgggatccaatcttagacagttggccaggggacaggctggacatggactcgggcctgaggaagatggatttagtctggcctccccatatagcccggctaaaagtttttcagcgagcgatgaggacctgatccaacaggttttggccgagggagtgtcgagccccgctccgacacaagacacacatatggagacagatctcctatcttccctttcctctacacccggagaaaagacagaaacactcgccctccagcggctcggggagttaggtccaccgagtccaggccttaattgggagcagccacaggctgctaggctctcaagaactgggctggtggagggcctccgaaagcgcctgttacctgcttggtgcgcttctctcgcccatggactttcccttttgctggttgcagtcgctgtggccgtgagtggctgggtaggcgcatcattcccccctggtgtctccgtcgcatggctcctttcatctagtgcttcatttctcgcgtcatttctggggtgggaacccttaaaggtgcttctggaagctctgtacttctccttagtagctaagcggttacacccagacgaggatgatacactcgttgaatcacccgcagtcactcccgtgtctgcaagggtgccacgggtacgcccaccccacggctttgcactcttccttgccaaagaagaggctaggaaggttaaaagattacacgggatgctgcggagcctcctcgtgtacatgctcttcttattagtgaccctcctagcatcttacggcgatgcgagctgtcacgggcacgcatacaggctccagtcagcgatcaaacaagagttgcactcccgagcattcctagcaattacacgatcagaagagctctggccctggatggctcacgttctgctcccttacgtacacggaaaccaaagctctccagagcttgggccacctagactgagacaggtcagactccaagaggctttgtacccagacccgcctggccctcgcgtacatacatgctccgccgcaggaggcttcagcacgtctgattacgatgtcggatgggagagtccccacaatgggagtgggacctgggcttattctgctcctgacctcttaggcgcatggtcatggggcagctgcgctgtatatgacagtggaggatacgtgcaagagctggggctgtccctcgaggagagtcgggaccgcctccgctttcttcagttgcacaattggctggataacaggagccgagctgtgttcctcgaattgacacgctactccccagcagtaggccttcacgcagcagtgactcttcggctcgagttccctgccgcaggacgcgcactcgctgccttgagtgtgcggcctttcgccctgagacggctatccgccggtttgagtttgccccttttaacttctgtttgcctgctgctgtttgctgttcactttgcagtagctgaagctcgcacctggcatagggagggcaggtggagagtccttaggctgggggcatgggcccgatggcttctggttgctctgacagccgctacagcacttgtcagattagcacagctcggtgcagccgaccgccaatggactcgtttcgtgcgaggtaggcctcggagattcaccagctttgatcaggtggctcaactctcctccgccgctcgcggactggccgcttccctgctttttctgctgctcgtcaaggctgctcaacagttacgtttcgtacggcagtggagtgtgtttggcaagacactgtgtcgtgctctgcctgagctccttggcgtaacactgggtttggtcgttctgggggtggcctacgctcagcttgctatcctcctcgtaagcagttgtgtggacagcttgtggtctgttgcacaggcccttttggtgctttgtcctgggacaggtctgagtaccctgtgtccagccgagtcctggcatctatctcctctgctatgcgtgggtctttgggccctccggctttggggcgctctgcgactgggggcagtaattcttcgttggagatatcacgctctgaggggcgaactgtatcgcccagcttgggaacctcaggattacgaaatggtcgaactgtttttgcgccgactgcgcctatggatggggctgtctaaggtgaaagagttccggcacaaggtacgtttcgaaggcatggaacccctgccctctcggtcctcccggggttcgaaggtgagtcccgacgtgccccctccatccgctggctccgacgcctctcacccttctacttcctcttcccaactagacggactgtccgttagtctggggaggctcggcacccgctgcgagccagaacccagcagattacaggctgtgtttgaggctctgttgactcagttcgatcgcttaaatcaggccaccgaagacgtgtaccagctcgagcagcaactgcactcccttcagggcagacgatcttcccgagctccagccggatcaagtcgtggtccttcccctggactgcgcccagccttgcccagccgactggcaagggcctcgcggggagttgatctggcaacgggcccatcgcgtaccccactccgcgctaaaaacaaggtgcacccctcttctacctag

SEQ ID NO: 6474 - DNA, 12909 bp, Artificial Sequence
  derived and/or modified sequence
atgccccccgccgcccccgccagactggccctggccctgggcctgggcctgtggctgggcgccctggccggcggccccggcagaggctgcggcccctgcgagcccccctgcctgtgcggccccgcccccggcgccgcctgcagagtgaactgcagcggcagaggcctgagaaccctgggccccgccctgagaatccccgccgacgccaccgccctggacgtgagccacaacctgctgagagccctggacgtgggcctgctggccaacctgagcgccctggccgagctggacatcagcaacaacaagatcagcaccctggaggagggcatcttcgccaacctgttcaacctgagcgagatcaacctgagcggcaaccccttcgagtgcgactgcggcctggcctggctgcccagatgggccgaggagcagcaggtgagagtggtgcagcccgaggccgccacctgcgccggccccggcagcctggccggccagcccctgctgggcatccccctgctggacagcggctgcggcgaggagtacgtggcctgcctgcccgacaacagcagcggcaccgtggccgccgtgagcttcagcgccgcccacgagggcctgctgcagcccgaggcctgcagcgccttctgcttcagcaccggccagggcctggccgccctgagcgagcagggctggtgcctgtgcggcgccgcccagcccagcagcgccagcttcgcctgcctgagcctgtgcagcggccccccccccccccccgcccccacctgcagaggccccaccctgctgcagcacgtgttccccgccagccccggcgccaccctggtgggcccccacggccccctggccagcggccagctggccgccttccacatcgccgcccccctgcccgtgaccgccaccagatgggacttcggcgacggcagcgccgaggtggacgccgccggccccgccgccagccacagatacgtgctgcccggcagataccacgtgaccgccgtgctggccctgggcgccggcagcgccctgctgggcaccgacgtgcaggtggaggccgcccccgccgccctggagctggtgtgccccagcagcgtgcagagcgacgagagcctggacctgagcatccagaacagaggcggcagcggcctggaggccgcctacagcatcgtggccctgggcgaggagcccgccagagccgtgcaccccctgtgccccagcgacaccgagatcttccccggcaacggccactgctacagactggtggtggagaaggccgcctggctgcaggcccaggagcagtgccaggcctgggccggcgccgccctggccatggtggacagccccgccgtgcagagattcctggtgagcagagtgaccagaagcctggacgtgtggatcggcttcagcaccgtgcagggcgtggaggtgggccccgccccccagggcgaggccttcagcctggagagctgccagaactggctgcccggcgagccccaccccgccaccgccgagcactgcgtgagactgggccccaccggctggtgcaacaccgacctgtgcagcgccccccacagctacgtgtgcgagctgcagcccggcggccccgtgcaggacgccgagaacctgctggtgggcgcccccagcggcgacctgcagggccccctgacccccctggcccagcaggacggcctgagcgccccccacgagcccgtggaggtgatggtgttccccggcctgagactgagcagagaggccttcctgaccaccgccgagttcggcacccaggagctgagaagacccgcccagctgagactgcaggtgtacagactgctgagcaccgccggcacccccgagaacggcagcgagcccgagagcagaagccccgacaacagaacccagctggcccccgcctgcatgcccggcggcagatggtgccccggcgccaacatctgcctgcccctggacgccagctgccacccccaggcctgcgccaacggctgcaccagcggccccggcctgcccggcgccccctacgccctgtggagagagttcctgttcagcgtgcccgccggcccccccgcccagtacagcgtgaccctgcacggccaggacgtgctgatgctgcccggcgacctggtgggcctgcagcacgacgccggccccggcgccctgctgcactgcagccccgcccccggccaccccggccccagagccccctacctgagcgccaacgccagcagctggctgccccacctgcccgcccagctggagggcacctgggcctgccccgcctgcgccctgagactgctggccgccaccgagcagctgaccgtgctgctgggcctgagacccaaccccggcctgagactgcccggcagatacgaggtgagagccgaggtgggcaacggcgtgagcagacacaacctgagctgcagcttcgacgtggtgagccccgtggccggcctgagagtgatctaccccgcccccagagacggcagactgtacgtgcccaccaacggcagcgccctggtgctgcaggtggacagcggcgccaacgccaccgccaccgccagatggcccggcggcagcgtgagcgccagattcgagaacgtgtgccccgccctggtggccaccttcgtgcccggctgcccctgggagaccaacgacaccctgttcagcgtggtggccctgccctggctgagcgagggcgagcacgtggtggacgtggtggtggagaacagcgccagcagagccaacctgagcctgagagtgaccgccgaggagcccatctgcggcctgagagccacccccagccccgaggccagagtgctgcagggcgtgctggtgagatacagccccgtggtggaggccggcagcgacatggtgttcagatggaccatcaacgacaagcagagcctgaccttccagaacgtggtgttcaacgtgatctaccagagcgccgccgtgttcaagctgagcctgaccgccagcaaccacgtgagcaacgtgaccgtgaactacaacgtgaccgtggagagaatgaacagaatgcagggcctgcaggtgagcaccgtgcccgccgtgctgagccccaacgccaccctggccctgaccgccggcgtgctggtggacagcgccgtggaggtggccttcctgtggaccttcggcgacggcgagcaggccctgcaccagttccagcccccctacaacgagagcttccccgtgcccgaccccagcgtggcccaggtgctggtggagcacaacgtgatgcacacctacgccgcccccggcgagtacctgctgaccgtgctggccagcaacgccttcgagaacctgacccagcaggtgcccgtgagcgtgagagccagcctgcccagcgtggccgtgggcgtgagcgacggcgtgctggtggccggcagacccgtgaccttctacccccaccccctgcccagccccggcggcgtgctgtacacctgggacttcggcgacggcagccccgtgctgacccagagccagcccgccgccaaccacacctacgccagcagaggcacctaccacgtgagactggaggtgaacaacaccgtgagcggcgccgccgcccaggccgacgtgagagtgttcgaggagctgagaggcctgagcgtggacatgagcctggccgtggagcagggcgcccccgtggtggtgagcgccgccgtgcagaccggcgacaacatcacctggaccttcgacatgggcgacggcaccgtgctgagcggccccgaggccaccgtggagcacgtgtacctgagagcccagaactgcaccgtgaccgtgggcgccgccagccccgccggccacctggccagaagcctgcacgtgctggtgttcgtgctggaggtgctgagagtggagcccgccgcctgcatccccacccagcccgacgccagactgaccgcctacgtgaccggcaaccccgcccactacctgttcgactggaccttcggcgacggcagcagcaacaccaccgtgagaggctgccccaccgtgacccacaacttcaccagaagcggcaccttccccctggccctggtgctgagcagcagagtgaacagagcccactacttcaccagcatctgcgtggagcccgaggtgggcaacgtgaccctgcagcccgagagacagttcgtgcagctgggcgacgaggcctggctggtggcctgcgcctggccccccttcccctacagatacacctgggacttcggcaccgaggaggccgcccccaccagagccagaggccccgaggtgaccttcatctacagagaccccggcagctacctggtgaccgtgaccgccagcaacaacatcagcgccgccaacgacagcgccctggtggaggtgcaggagcccgtgctggtgaccagcatcaaggtgaacggcagcctgggcctggagctgcagcagccctacctgttcagcgccgtgggcagaggcagacccgccagctacctgtgggacctgggcgacggcggctggctggagggccccgaggtgacccacgcctacaacagcaccggcgacttcaccgtgagagtggccggctggaacgaggtgagcagaagcgaggcctggctgaacgtgaccgtgaagagaagagtgagaggcctggtggtgaacgccagcagaaccgtggtgcccctgaacggcagcgtgagcttcagcaccagcctggaggccggcagcgacgtgagatacagctgggtgctgtgcgacagatgcacccccatccccggcggccccaccatcagctacaccttcagaagcgtgggcaccttcaacatcatcgtgaccgccgagaacgaggtgggcagcgcccaggacagcatcttcgtgtacgtgctgcagctgatcgagggcctgcaggtggtgggcggcggcagatacttccccaccaaccacaccgtgcagctgcaggccgtggtgagagacggcaccaacgtgagctacagctggaccgcctggagagacagaggccccgccctggccggcagcggcaagggcttcagcctgaccgtgctggaggccggcacctaccacgtgcagctgagagccaccaacatgctgggcagcgcctgggccgactgcaccatggacttcgtggagcccgtgggctggctgatggtggccgccagccccaaccccgccgccgtgaacaccagcgtgaccctgagcgccgagctggccggcggcagcggcgtggtgtacacctggagcctggaggagggcctgagctgggagaccagcgagcccttcaccacccacagcttccccacccccggcctgcacctggtgaccatgaccgccggcaaccccctgggcagcgccaacgccaccgtggaggtggacgtgcaggtgcccgtgagcggcctgagcatcagagccagcgagcccggcggcagcttcgtggccgccggcagcagcgtgcccttctggggccagctggccaccggcaccaacgtgagctggtgctgggccgtgcccggcggcagcagcaagagaggcccccacgtgaccatggtgttccccgacgccggcaccttcagcatcagactgaacgccagcaacgccgtgagctgggtgagcgccacctacaacctgaccgccgaggagcccatcgtgggcctggtgctgtgggccagcagcaaggtggtggcccccggccagctggtgcacttccagatcctgctggccgccggcagcgccgtgaccttcagactgcaggtgggcggcgccaaccccgaggtgctgcccggccccagattcagccacagcttccccagagtgggcgaccacgtggtgagcgtgagaggcaagaaccacgtgagctgggcccaggcccaggtgagaatcgtggtgctggaggccgtgagcggcctgcaggtgcccaactgctgcgagcccggcatcgccaccggcaccgagagaaacttcaccgccagagtgcagagaggcagcagagtggcctacgcctggtacttcagcctgcagaaggtgcagggcgacagcctggtgatcctgagcggcagagacgtgacctacacccccgtggccgccggcctgctggagatccaggtgagagccttcaacgccctgggcagcgagaacagaaccctggtgctggaggtgcaggacgccgtgcagtacgtggccctgcagagcggcccctgcttcaccaacagaagcgcccagttcgaggccgccaccagccccagccccagaagagtggcctaccactgggacttcggcgacggcagccccggccaggacaccgacgagcccagagccgagcacagctacctgagacccggcgactacagagtgcaggtgaacgccagcaacctggtgagcttcttcgtggcccaggccaccgtgaccgtgcaggtgctggcctgcagagagcccgaggtggacgtggtgctgcccctgcaggtgctgatgagaagaagccagagaaactacctggaggcccacgtggacctgagagactgcgtgacctaccagaccgagtacagatgggaggtgtacagaaccgccagctgccagagacccggcagacccgccagagtggccctgcccggcgtggacgtgagcagacccagactggtgctgcccagactggccctgcccgtgggccactactgcttcgtgttcgtggtgagcttcggcgacacccccctgacccagagcatccaggccaacgtgaccgtggcccccgagagactggtgcccatcatcgagggcggcagctacagagtgtggagcgacaccagagacctggtgctggacggcagcgagagctacgaccccaacctggaggacggcgaccagacccccctgagcttccactgggcctgcgtggccagcacccagagagaggccggcggctgcgccctgaacttcggccccagaggcagcagcaccgtgaccatccccagagagagactggccgccggcgtggagtacaccttcagcctgaccgtgtggaaggccggcagaaaggaggaggccaccaaccagaccgtgctgatcagaagcggcagagtgcccatcgtgagcctggagtgcgtgagctgcaaggcccaggccgtgtacgaggtgagcagaagcagctacgtgtacctggagggcagatgcctgaactgcagcagcggcagcaagagaggcagatgggccgccagaaccttcagcaacaagaccctggtgctggacgagaccaccaccagcaccggcagcgccggcatgagactggtgctgagaagaggcgtgctgagagacggcgagggctacaccttcaccctgaccgtgctgggcagaagcggcgaggaggagggctgcgccagcatcagactgagccccaacagaccccccctgggcggcagctgcagactgttccccctgggcgccgtgcacgccctgaccaccaaggtgcacttcgagtgcaccggctggcacgacgccgaggacgccggcgcccccctggtgtacgccctgctgctgagaagatgcagacagggccactgcgaggagttctgcgtgtacaagggcagcctgagcagctacggcgccgtgctgccccccggcttcagaccccacttcgaggtgggcctggccgtggtggtgcaggaccagctgggcgccgccgtggtggccctgaacagaagcctggccatcaccctgcccgagcccaacggcagcgccaccggcctgaccgtgtggctgcacggcctgaccgccagcgtgctgcccggcctgctgagacaggccgacccccagcacgtgatcgagtacagcctggccctggtgaccgtgctgaacgagtacgagagagccctggacgtggccgccgagcccaagcacgagagacagcacagagcccagatcagaaagaacatcaccgagaccctggtgagcctgagagtgcacaccgtggacgacatccagcagatcgccgccgccctggcccagtgcatgggccccagcagagagctggtgtgcagaagctgcctgaagcagaccctgcacaagctggaggccatgatgctgatcctgcaggccgagaccaccgccggcaccgtgacccccaccgccatcggcgacagcatcctgaacatcaccggcgacctgatccacctggccagcagcgacgtgagagccccccagcccagcgagctgggcgccgagagccccagcagaatggtggccagccaggcctacaacctgaccagcgccctgatgagaatcctgatgagaagcagagtgctgaacgaggagcccctgaccctggccggcgaggagatcgtggcccagggcaagagaagcgaccccagaagcctgctgtgctacggcggcgcccccggccccggctgccacttcagcatccccgaggccttcagcggcgccctggccaacctgagcgacgtggtgcagctgatcttcctggtggacagcaaccccttccccttcggctacatcagcaactacaccgtgagcaccaaggtggccagcatggccttccagacccaggccggcgcccagatccccatcgagagactggccagcgagagagccatcaccgtgaaggtgcccaacaacagcgactgggccgccagaggccacagaagcagcgccaacagcgccaacagcgtggtggtgcagccccaggccagcgtgggcgccgtggtgaccctggacagcagcaaccccgccgccggcctgcacctgcagctgaactacaccctgctggacggccactacctgagcgaggagcccgagccctacctggccgtgtacctgcacagcgagcccagacccaacgagcacaactgcagcgccagcagaagaatcagacccgagagcctgcagggcgccgaccacagaccctacaccttcttcatcagccccggcagcagagaccccgccggcagctaccacctgaacctgagcagccacttcagatggagcgccctgcaggtgagcgtgggcctgtacaccagcctgtgccagtacttcagcgaggaggacatggtgtggagaaccgagggcctgctgcccctggaggagaccagccccagacaggccgtgtgcctgaccagacacctgaccgccttcggcgccagcctgttcgtgccccccagccacgtgagattcgtgttccccgagcccaccgccgacgtgaactacatcgtgatgctgacctgcgccgtgtgcctggtgacctacatggtgatggccgccatcctgcacaagctggaccagctggacgccagcagaggcagagccatccccttctgcggccagagaggcagattcaagtacgagatcctggtgaagaccggctggggcagaggcagcggcaccaccgcccacgtgggcatcatgctgtacggcgtggacagcagaagcggccacagacacctggacggcgacagagccttccacagaaacagcctggacatcttcagaatcgccaccccccacagcctgggcagcgtgtggaagatcagagtgtggcacgacaacaagggcctgagccccgcctggttcctgcagcacgtgatcgtgagagacctgcagaccgccagaagcgccttcttcctggtgaacgactggctgagcgtggagaccgaggccaacggcggcctggtggagaaggaggtgctggccgccagcgacgccgccctgctgagattcagaagactgctggtggccgagctgcagagaggcttcttcgacaagcacatctggctgagcatctgggacagaccccccagaagcagattcaccagaatccagagagccacctgctgcgtgctgctgatctgcctgttcctgggcgccaacgccgtgtggtacggcgccgtgggcgacagcgcctacagcaccggccacgtgagcagactgagccccctgagcgtggacaccgtggccgtgggcctggtgagcagcgtggtggtgtaccccgtgtacctggccatcctgttcctgttcagaatgagcagaagcaaggtggccggcagccccagccccacccccgccggccagcaggtgctggacatcgacagctgcctggacagcagcgtgctggacagcagcttcctgaccttcagcggcctgcacgccgaggccttcgtgggccagatgaagagcgacctgttcctggacgacagcaagagcctggtgtgctggcccagcggcgagggcaccctgagctggcccgacctgctgagcgaccccagcatcgtgggcagcaacctgagacagctggccagaggccaggccggccacggcctgggccccgaggaggacggcttcagcctggccagcccctacagccccgccaagagcttcagcgccagcgacgaggacctgatccagcaggtgctggccgagggcgtgagcagccccgcccccacccaggacacccacatggagaccgacctgctgagcagcctgagcagcacccccggcgagaagaccgagaccctggccctgcagagactgggcgagctgggcccccccagccccggcctgaactgggagcagccccaggccgccagactgagcagaaccggcctggtggagggcctgagaaagagactgctgcccgcctggtgcgccagcctggcccacggcctgagcctgctgctggtggccgtggccgtggccgtgagcggctgggtgggcgccagcttcccccccggcgtgagcgtggcctggctgctgagcagcagcgccagcttcctggccagcttcctgggctgggagcccctgaaggtgctgctggaggccctgtacttcagcctggtggccaagagactgcaccccgacgaggacgacaccctggtggagagccccgccgtgacccccgtgagcgccagagtgcccagagtgagacccccccacggcttcgccctgttcctggccaaggaggaggccagaaaggtgaagagactgcacggcatgctgagaagcctgctggtgtacatgctgttcctgctggtgaccctgctggccagctacggcgacgccagctgccacggccacgcctacagactgcagagcgccatcaagcaggagctgcacagcagagccttcctggccatcaccagaagcgaggagctgtggccctggatggcccacgtgctgctgccctacgtgcacggcaaccagagcagccccgagctgggcccccccagactgagacaggtgagactgcaggaggccctgtaccccgacccccccggccccagagtgcacacctgcagcgccgccggcggcttcagcaccagcgactacgacgtgggctgggagagcccccacaacggcagcggcacctgggcctacagcgcccccgacctgctgggcgcctggagctggggcagctgcgccgtgtacgacagcggcggctacgtgcaggagctgggcctgagcctggaggagagcagagacagactgagattcctgcagctgcacaactggctggacaacagaagcagagccgtgttcctggagctgaccagatacagccccgccgtgggcctgcacgccgccgtgaccctgagactggagttccccgccgccggcagagccctggccgccctgagcgtgagacccttcgccctgagaagactgagcgccggcctgagcctgcccctgctgaccagcgtgtgcctgctgctgttcgccgtgcacttcgccgtggccgaggccagaacctggcacagagagggcagatggagagtgctgagactgggcgcctgggccagatggctgctggtggccctgaccgccgccaccgccctggtgagactggcccagctgggcgccgccgacagacagtggaccagattcgtgagaggcagacccagaagattcaccagcttcgaccaggtggcccagctgagcagcgccgccagaggcctggccgccagcctgctgttcctgctgctggtgaaggccgcccagcagctgagattcgtgagacagtggagcgtgttcggcaagaccctgtgcagagccctgcccgagctgctgggcgtgaccctgggcctggtggtgctgggcgtggcctacgcccagctggccatcctgctggtgagcagctgcgtggacagcctgtggagcgtggcccaggccctgctggtgctgtgccccggcaccggcctgagcaccctgtgccccgccgagagctggcacctgagccccctgctgtgcgtgggcctgtgggccctgagactgtggggcgccctgagactgggcgccgtgatcctgagatggagataccacgccctgagaggcgagctgtacagacccgcctgggagccccaggactacgagatggtggagctgttcctgagaagactgagactgtggatgggcctgagcaaggtgaaggagttcagacacaaggtgagattcgagggcatggagcccctgcccagcagaagcagcagaggcagcaaggtgagccccgacgtgcccccccccagcgccggcagcgacgccagccaccccagcaccagcagcagccagctggacggcctgagcgtgagcctgggcagactgggcaccagatgcgagcccgagcccagcagactgcaggccgtgttcgaggccctgctgacccagttcgacagactgaaccaggccaccgaggacgtgtaccagctggagcagcagctgcacagcctgcagggcagaagaagcagcagagcccccgccggcagcagcagaggccccagccccggcctgagacccgccctgcccagcagactggccagagccagcagaggcgtggacctggccaccggccccagcagaacccccctgagagccaagaacaaggtgcaccccagcagcacctag

SEQ ID NO: 6475 - protein, 968 aa, Artificial Sequence
  derived and/or modified sequence
MVNSSRVQPQQPGDAKRPPAPRAPDPGRLMAGCAAVGASLAAPGGLCEQRGLEIEMQRIRQAAARDPPAGAAASPSPPLSSCSRQAWSRDNPGFEAEEEEEEVEGEEGGMVVEMDVEWRPGSRRSAASSAVSSVGARSRGLGGYHGAGHPSGRRRRREDQGPPCPSPVGGGDPLHRHLPLEGQPPRVAWAERLVRGLRGLWGTRLMEESSTNREKYLKSVLRELVTYLLFLIVLCILTYGMMSSNVYYYTRMMSQLFLDTPVSKTEKTNFKTLSSMEDFWKFTEGSLLDGLYWKMQPSNQTEADNRSFIFYENLLLGVPRIRQLRVRNGSCSIPQDLRDEIKECYDVYSVSSEDRAPFGPRNGTAWIYTSEKDLNGSSHWGIIATYSGAGYYLDLSRTREETAAQVASLKKNVWLDRGTRATFIDFSVYNANINLFCVVRLLVEFPATGGVIPSWQFQPLKLIRYVTTFDFFLAACEIIFCFFIFYYVVEEILEIRIHKLHYFRSFWNCLDVVIVVLSVVAIGINIYRTSNVEVLLQFLEDQNTFPNFEHLAYWQIQFNNIAAVTVFFVWIKLFKFINFNRTMSQLSTTMSRCAKDLFGFAIMFFIIFLAYAQLAYLVFGTQVDDFSTFQECIFTQFRIILGDINFAEIEEANRVLGPIYFTTFVFFMFFILLNMFLAIINDTYSEVKSDLAQQKAEMELSDLIRKGYHKALVKLKLKKNTVDDISESLRQGGGKLNFDELRQDLKGKGHTDAEIEAIFTKYDQDGDQELTEHEHQQMRDDLEKEREDLDLDHSSLPRPMSSRSFPRSLDDSEEDDDEDSGHSSRRRGSISSGVSYEEFQVLVRRVDRMEHSIGSIVSKIDAVIVKLEIMERAKLKRREVLGRLLDGVAEDERLGRDSEIHREQMERLVREELERWESDDAASQISHGLGTPVGLNGQPRPRSSRPSSSQSTEGMEGAGGNGSSNVHV

SEQ ID NO: 6476 - DNA, 2907 bp, Artificial Sequence
  derived and/or modified sequence
atggtgaacagttctcgggtccaaccacagcagcctggcgatgcgaaacggcctcctgctcccagagctcccgatccaggaaggctgatggctgggtgcgccgctgtcggcgcatcactggctgcgcccgggggactctgcgaacaaagaggactggagattgaaatgcagcgcatccgccaggcagctgcccgagacccccccgctggcgcagcagccagtccttccccccccctctcaagctgtagtcgacaggcctggtccagggacaacccaggctttgaagctgaggaggaggaagaagaggttgaaggtgaagagggcgggatggttgtagaaatggatgtggaatggaggccaggttcgaggcggtccgcagcgagcagcgctgtgtctagcgtgggagcaagaagccgcggtttggggggataccatggggcgggacacccctctgggaggcgaaggaggagagaggatcagggccctccttgccctagtccagtgggcggtggcgatcctctgcatagacacttgcccctggagggccagcctccccgcgtcgcctgggctgaaagactggttcgcggcctcagggggttgtggggaacgaggctgatggaagaatcaagcactaacagggagaaataccttaaatctgtgctgagggaactcgtgacatacctactcttcctgatcgtcctgtgcattttaacttacgggatgatgtcatctaatgtttactactacacccggatgatgagccaactgttcctcgatacccctgtgtccaagacggagaagacaaacttcaaaaccctgtcttccatggaggacttctggaagtttacggagggttctttattagatggcctttactggaaaatgcaaccgagcaatcagacagaagccgacaatcggagctttattttctatgagaatcttttgttaggtgttcccaggattcgacagttacgcgtgcggaatggctcgtgcagcattcctcaagatctgagggatgaaatcaaagagtgttatgacgtctattcagtgtcttcagaggaccgagcaccgttcggaccgaggaatggcacagcttggatatacacgtcggagaaggatctcaacggatcgtcacattgggggattatcgcaacttattccggggctggttattatctggacctgtccaggaccagggaagagacagctgcccaggttgcatcgctgaagaagaacgtatggttagaccgcggcaccagggcgacattcatcgacttctctgtgtataatgccaacatcaacctgttctgtgtcgtgaggctgcttgtggagttccccgccacaggtggagttattccgagctggcagttccagcccctgaagctgattcgttatgtaaccacatttgacttcttcctcgccgcttgcgagatcattttttgtttctttattttttactatgtcgtggaagaaatccttgagatccgcatccacaagttgcactacttccggtccttttggaactgcttggacgtggtaattgtggtgctgtctgtggtcgctattggcataaatatctacagaacgagtaatgtggaggtgctgctacagttcctggaggaccagaatacttttccaaatttcgaacatctggcctattggcaaatacaattcaataatattgccgccgtgacagtattttttgtgtggatcaaactgttcaaattcattaatttcaaccgtactatgtctcagctgagtactacaatgagtaggtgtgcgaaggacttgtttggctttgccattatgtttttcataatcttcctggcctacgcccagctcgcatatctggtctttggcacccaggtggatgatttctccacattccaggagtgtatcttcactcaattccggattatattgggcgacataaacttcgctgaaatcgaagaggctaaccgggttttaggccctatctacttcacgacctttgtcttctttatgttttttattttgctgaatatgttcctggctattataaacgacacatactcagaggtgaaatcagacctggcacagcaaaaggcagaaatggaactgtctgacctgatccgtaaagggtaccacaaggctctcgtgaagctaaaactgaaaaagaacactgttgacgatatcagcgaatcactgcggcaaggaggggggaagctgaactttgacgagctgagacaggacttaaaaggaaagggccacaccgatgctgagatagaggccatcttcactaaatacgatcaagacggagaccaggagctcacagagcatgagcaccagcagatgcgagacgacctcgagaaggaacgagaggatctcgatttggaccacagctccctgcccaggcccatgtctagccgctcctttccaaggagtcttgatgatagtgaagaagatgatgatgaagactccggccatagttccaggcgccgcggaagcataagcagcggagtgagttatgaggaatttcaagtgctggtccgcagggtggatcgtatggaacattctatcgggagcatcgtgtcaaaaatagacgccgtaatcgtaaagctggaaatcatggaaagggcgaaattgaagaggcgtgaggtgctgggccgcttgctggatggtgtggccgaagacgagaggctcggccgcgactctgaaatccatcgggagcaaatggagcgactggtgcgggaagagttagaacgctgggaatcggatgacgctgcgtctcagatatcccatggacttgggacgcccgttggcctgaacggccagccacggccgcgctcctcgagaccttcttcatcgcaaagtacagaggggatggaaggagccgggggtaacggctccagcaacgtacacgtatag

SEQ ID NO: 6477 - DNA, 2907 bp, Artificial Sequence
  derived and/or modified sequence
atggtgaacagcagccgggtgcagccccagcagcctggagatgccaagaggcccccagccccccgggccccagaccccggccgcctgatggccggctgtgccgctgtgggcgccagcctggccgcccctgggggcctgtgtgagcagaggggcctggagattgagatgcagaggatccggcaggccgccgcccgggaccccccagctggagctgctgccagccccagcccccccctgagcagctgcagccggcaggcctggagccgggacaaccctggctttgaggccgaggaggaggaggaggaggtggagggggaggagggcggcatggtggtggagatggatgtggagtggaggcctggcagcagaagatctgctgccagcagcgctgtgtcctctgtgggcgcccggagccggggcctgggcggctaccatggagctggccaccccagcggcagaagaagaagaagagaggaccagggccccccctgccccagccctgtgggcggcggggaccccctgcaccgccacctgcccctggagggccagcccccccgggtggcctgggccgagcggctggtgcggggcctgcggggcctgtggggcacccggctgatggaggagagcagcaccaaccgggagaagtacctgaagtctgtgctgcgggagctggtgacctacctgctcttcctgattgtgctgtgcatcctgacctacggcatgatgagcagcaatgtgtactactacaccaggatgatgagccagctgttcctggacacccctgtgtccaagacagagaagaccaacttcaagaccctgagctccatggaggacttctggaagttcacagagggcagcctgctggatggcctgtactggaagatgcagcccagcaaccagacagaagctgacaacagaagcttcatcttctatgagaacctgctgctgggcgtgccccgcatccggcagctgcgggtgagaaatggcagctgcagcatcccccaggacctgagagatgagatcaaggaatgttatgatgtgtacagcgtgtccagtgaagatcgggcccccttcggccccagaaatggaacagcctggatctacaccagcgagaaggacctgaatggcagcagccactggggcatcatcgccacctacagcggggccggctactacctggacctgagcaggacccgggaggagacagctgcccaggtggccagcctgaagaagaatgtgtggctggaccggggcacccgggccaccttcatcgacttctctgtgtacaatgccaacatcaacctcttctgtgtggtgcggctgctggtggagttccctgccaccggcggcgtcatccccagctggcagttccagcccctgaagctgatccgctacgtgaccacctttgacttcttcctggccgcctgtgagatcatcttctgcttcttcatcttctactacgtggtggaggagatcctggagatccgcatccacaagctgcactacttccgctccttctggaactgcctggatgtggtgattgtggtgctgtctgtggtggccatcggcatcaacatctaccgcaccagcaatgtggaggtgctgctgcagttcctggaggaccagaacaccttccccaactttgagcacctggcctactggcagatccagttcaacaacattgctgctgtgacagtgttctttgtgtggatcaagctgttcaagttcatcaacttcaacagaaccatgagccagctgagcaccaccatgagccgctgtgccaaggacctgtttggatttgccatcatgttcttcatcatcttcctggcctatgcccagctggcctacctggtgtttggcacccaggtggatgacttcagcaccttccaggagtgcatcttcacccagttccgcatcatcctgggggacatcaactttgctgagattgaggaggccaacagagtgctgggccccatctacttcaccacctttgtgttcttcatgttcttcatcctgctgaacatgttcctggccatcatcaatgacacctacagcgaggtgaagagtgacctggcccagcagaaggccgagatggagctgagtgacctgatcaggaagggctaccacaaggccctggtgaagctgaagctgaagaagaacacagtggatgacatcagcgagagcctgcggcagggcggcggcaagctgaactttgatgagctgcggcaggacctgaagggcaagggccacacagatgctgagattgaggccatcttcaccaagtatgaccaggatggagaccaggagctgacagaacatgagcaccagcagatgagagatgacctggagaaggagcgggaggacctggacctggaccacagcagcctgccccggcccatgagcagccgctccttccccaggagcctggatgacagcgaggaggatgatgatgaggacagcggccacagcagcagaagaagaggcagcatcagcagcggcgtgtcctatgaggagttccaggtgctggtgcggcgggtggacaggatggagcacagcatcggcagcatcgtgtccaagattgatgctgtgattgtgaagctggagatcatggagcgggccaagctgaagagaagagaggtgctgggccgcctgctggatggagtggccgaggatgagcggctgggccgggacagcgagatccaccgggagcagatggagcggctggtgcgggaggagctggagcgctgggagagtgatgatgctgccagccagatcagccacggcctgggcacccctgtgggcctgaatggccagccccggcccaggagcagccggcccagcagcagccagagcacagagggcatggagggcgctggaggaaatggcagcagcaatgtgcacgtgtag

SEQ ID NO: 6478 - DNA, 2907 bp, Artificial Sequence
  derived and/or modified sequence
atggtgaacagcagccgggtgcagccccagcagcccggcgacgccaagcgaccccccgcgccacgcgctcccgacccaggccgtttaatggcgggctgcgcagctgtgggtgcaagcttggccgcacctggagggctgtgtgagcaaaggggattagagattgagatgcagaggattcgccaggccgcggcgagagaccctcctgctggagctgctgcctcacccagcccccctctctcttcctgctcaagacaggcctggagtagggataaccctggcttcgaggcagaagaagaagaagaagaggtcgaaggcgaagagggcggaatggtcgtagagatggacgtggagtggcggcccgggagccggcgctccgcagctagcagtgccgtaagcagcgtaggggcaaggtctcggggactggggggctaccacggggccgggcatccttcagggcgccgcaggagacgcgaggaccaggggcccccatgtccttcacctgtcggagggggtgatcccctccaccggcaccttcccctggaaggtcaaccccccagggtggcctgggccgagcgcttggtacgcggccttcggggcctgtggggcacacgactgatggaagaatcatcaacaaaccgcgagaagtatctaaaatctgtcctgagagagttggtgacatacctgctgttcttaatcgtgttgtgcatcctgacctacggtatgatgtccagcaatgtatactattatacgcgaatgatgagccagctgttccttgatacaccagtgagcaagacggagaagacaaatttcaagacgctcagctcaatggaagacttctggaaatttacagagggctccctcctggatggtctgtattggaaaatgcagcccagcaaccagaccgaagcagataataggagtttcatcttctacgagaatctcctacttggagtgccgcgaattcggcaactgagggttagaaacggttcttgcagtattccacaggacctccgcgatgagatcaaggaatgctatgatgtctacagcgtgtcctccgaggatagggcacccttcggccctagaaatggaacggcctggatctacaccagcgagaaggacctgaacggatccagtcactggggcatcattgcgacctattccggcgctgggtattatctggatttatcccgaacccgcgaggaaaccgccgctcaggtcgcgagtctaaagaagaatgtctggctcgataggggcacacgggcgacttttatagatttctcagtctataacgccaatataaaccttttctgcgtcgttaggcttctcgtggagttccccgctaccggtggggtcattccctcttggcagttccaacccctcaagctgatccggtacgtgaccacctttgactttttcctagctgcctgtgagattatcttctgcttcttcattttctactacgtcgtggaggagatactggaaatcaggatacacaagctccattactttcggtcattttggaactgtcttgatgtggtgatcgttgtgctttccgtggtagccataggcattaacatttacaggacctctaatgtggaggtgcttctacagtttctggaggaccagaatacattcccaaacttcgagcatctagcttattggcagatccaatttaataatattgctgcagtgacagtgttcttcgtctggataaagctcttcaaattcatcaattttaacaggacgatgtcacagctgtctaccaccatgagcagatgtgctaaagacttgtttggcttcgccattatgtttttcatcatcttcctcgcttatgcccaactggcttatctggtctttggcacccaagtcgatgatttctccacatttcaggagtgcatttttacgcagtttagaatcattcttggcgacataaactttgcagaaattgaagaagctaatcgcgtgctgggaccaatatactttacaacttttgtcttcttcatgtttttcatcctgctcaatatgtttctggccataattaatgacacctattctgaggtgaaaagtgacttggctcagcagaaagcggaaatggaacttagcgatctgatcagaaagggctatcataaagccttggtaaagcttaaattgaaaaaaaatacggtagatgatatctctgagtctctgaggcagggggggggcaagcttaactttgatgagctgagacaagacctgaaaggaaaaggacacacggacgcagagattgaagccatttttacaaaatacgatcaggacggtgatcaggagctcacagaacacgaacaccaacagatgcgcgacgacctcgaaaaggagcgagaggatctcgatctggatcactctagcctgcctaggccgatgtcttccaggagcttcccacggtctctcgacgatagtgaggaggacgacgatgaagatagtggccactcaagtcgtaggcgggggtccatctcctccggcgtgagttacgaagaattccaggtgctcgtgcgtcgcgtggatcggatggagcactcaattggcagcatcgtgagcaaaattgacgctgtgattgtaaagttagagatcatggaacgagccaagttaaaaaggcgcgaggttctgggaaggttgctcgatggcgtggcagaggacgaaaggctgggaagagattccgagattcaccgagagcagatggagcggctcgtgagagaagagctggagaggtgggaatccgacgacgcggcatctcagatttcccatggcctgggaactcctgtgggcttgaatggccagcccaggcctagatcctctcgaccgtcctcttcacagtctactgagggcatggagggagctggggggaacgggagctcgaacgttcatgtttag

SEQ ID NO: 6479 - DNA, 5056 bp, Artificial Sequence
  derived and/or modified sequence
ggctcctgaggcgcacagcgccgagcgcggcgccgcgcacccgcgcgccggacgccagtgaccgcgatggtgaactccagtcgcgtgcagcctcagcagcccggggacgccaagcggccgcccgcgccccgcgcgccggacccgggccggctgatggctggctgcgcggccgtgggcgccagcctcgccgccccgggcggcctctgcgagcagcggggcctggagatcgagatgcagcgcatccggcaggcggccgcgcgggaccccccggccggagccgcggcctccccttctcctccgctctcgtcgtgctcccggcaggcgtggagccgcgataaccccggcttcgaggccgaggaggaggaggaggaggtggaaggggaagaaggcggaatggtggtggagatggacgtagagtggcgcccgggcagccggaggtcggccgcctcctcggccgtgagctccgtgggcgcgcggagccgggggcttgggggctaccacggcgcgggccacccgagcgggaggcggcgccggcgagaggaccagggcccgccgtgccccagcccagtcggcggcggggacccgctgcatcgccacctccccctggaagggcagccgccccgagtggcctgggcggagaggctggttcgcgggctgcgaggtctctggggaacaagactcatggaggaaagcagcactaaccgagagaaataccttaaaagtgttttacgggaactggtcacatacctcctttttctcatagtcttgtgcatcttgacctacggcatgatgagctccaatgtgtactactacacccggatgatgtcacagctcttcctagacacccccgtgtccaaaacggagaaaactaactttaaaactctgtcttccatggaagacttctggaagttcacagaaggctccttattggatgggctgtactggaagatgcagcccagcaaccagactgaagctgacaaccgaagtttcatcttctatgagaacctgctgttaggggttccacgaatacggcaactccgagtcagaaatggatcctgctctatcccccaggacttgagagatgaaattaaagagtgctatgatgtctactctgtcagtagtgaagatagggctccctttgggccccgaaatggaaccgcttggatctacacaagtgaaaaagacttgaatggtagtagccactggggaatcattgcaacttatagtggagctggctattatctggatttgtcaagaacaagagaggaaacagctgcacaagttgctagcctcaagaaaaatgtctggctggaccgaggaaccagggcaacttttattgacttctcagtgtacaacgccaacattaacctgttctgtgtggtcaggttattggttgaattcccagcaacaggtggtgtgattccatcttggcaatttcagcctttaaagctgatccgatatgtcacaacttttgatttcttcctggcagcctgtgagattatcttttgtttctttatcttttactatgtggtggaagagatattggaaattcgcattcacaaactacactatttcaggagtttctggaattgtctggatgttgtgatcgttgtgctgtcagtggtagctataggaattaacatatacagaacatcaaatgtggaggtgctactacagtttctggaagatcaaaatactttccccaactttgagcatctggcatattggcagatacagttcaacaatatagctgctgtcacagtattttttgtctggattaagctcttcaaattcatcaattttaacaggaccatgagccagctctcgacaaccatgtctcgatgtgccaaagacctgtttggctttgctattatgttcttcattattttcctagcgtatgctcagttggcataccttgtctttggcactcaggtcgatgacttcagtactttccaagagtgtatcttcactcaattccgtatcattttgggcgatatcaactttgcagagattgaggaagctaatcgagttttgggaccaatttatttcactacatttgtgttctttatgttcttcattcttttgaatatgtttttggctatcatcaatgatacttactctgaagtgaaatctgacttggcacagcagaaagctgaaatggaactctcagatcttatcagaaagggctaccataaagctttggtcaaactaaaactgaaaaaaaataccgtggatgacatttcagagagtctgcggcaaggaggaggcaagttaaactttgacgaacttcgacaagatctcaaagggaagggccatactgatgcagagattgaggcaatattcacaaagtacgaccaagatggagaccaagaactgaccgaacatgaacatcagcagatgagagacgacttggagaaagagagggaggacctggatttggatcacagttctttaccacgtcccatgagcagccgaagtttccctcgaagcctggatgactctgaggaggatgacgatgaagatagcggacatagctccagaaggaggggaagcatttctagtggcgtttcttacgaagagtttcaagtcctggtgagacgagtggaccggatggagcattccatcggcagcatagtgtccaagattgacgccgtgatcgtgaagctagagattatggagcgagccaaactgaagaggagggaggtgctgggaaggctgttggatggggtggccgaggatgaaaggctgggtcgtgacagtgaaatccatagggaacagatggaacggctagtacgtgaagagttggaacgctgggaatccgatgatgcagcttcccagatcagtcatggtttaggcacgccagtgggactaaatggtcaacctcgccccagaagctcccgcccatcttcctcccaatctacagaaggcatggaaggtgcaggtggaaatgggagttctaatgtccacgtatgatatgtgtgtttcagtatgtgtgtttctaataagtgaggaagtggctgtcctgaattgctgtaacaagcacactatttatatgccctgaccaccataggatgctagtctttgtgaccgattgctaatcttctgcactttaatttattttatataaactttacccatggttcaaagatttttttttctttttctcatataagaaatctaggtgtaaatattgagtacagaaaaaaaatcttcatgatgtgtattgagcggtacgcccagttgccaccatgactgagtcttctcagttgacaatgaagtagccttttaaagctagaaaactgtcaaagggcttctgagtttcatttccagtcacaaaaatcagtattgttatttttttccaagagtgtgaaggaaaatggggcattcctttccactctggcatagttcatgagcttaatacatagctttcttttaagaaaggagccttttttttcaactagcttcctggggtaaacttttctaaaagataaaatggaaaggaactccaaactatgatagaatctgtgtgaatggttaagatgaatgttaaatactatgcttttttgtaagttgatcgtatctgatgtctgtgggactaactgtatcacttaatttttaccttattttggctctaatttgaataagctgagtaaaaccaccaaagatcagttataggataaaatggcatctctaaccataacacaggagaattggaaggagccctaagttgtcactcagtttaatttcttttaatggttagtttagcctaaagatttatctgcatattctttttcccatgtggctctactcatttgcaactgaatttaatgttataactcatctagtgagaccaacttactaaatttttagtatgcactgaaagtttttatccaacaattatgttcattttaagcaaaattttaagaaagttttgaaattcataaagcatttggttttaaactattttaagaatatagtactcggtcaggtatgacggctcacgcctgtaatcccagcactttgggaggccgaaacaggcgaatcacttgagcccaggagttcaagaccaacatgggcaatgtggcgaaactccatctctacaaaaaatgcaaaaataaaaaatatagtactcaagtattcttgatcctgtgtttcaaaactagaatttgtaatgcaaatggagctcagtctaataaaaaagaggttttggtattaaaagttcatacattagacagtatcagccaaaatttgagttagcaacactgttttctttacgagagggtctcacccaaatttatggggagaaatctatttctcaaaaaaaaaaatcttcttttacagaaatgttgagtaaggtgacattttgagcgctaataagcaaaagagcatgcagtgctgttgaataaccctcacttggagaaccaagagaatcctgtcgtttaatgctatattttaatttcacaagttgttcatttaactggtagaatgtcagtccaatctccaatgagaacatgagcaaatagacctttccaggttgaaagtgaaacatactgggtttctgtaagtttttcctcatggcttcatctctatctttactttctcttgaatatgctacacaaagttctttattactacatactaaagtttgcattccagggatattgactgtacatatttatgtatatgtaccatgttgttacatgtaaacaaacttcaatttgaagtgcagctattatgtggtatccatgtgtatcgaccatgtgccatatatcaattatggtcactagaaagtctctttatgatactttttattgtactgtttttcatttcacttgcaaaattttgcagaattcctcctttctacccataaattacatatatttttcttctttagtcatggagaactccccccctcatctcttccctattatctttccctgtgtactggtattattaaaaagacattacatacgcaagtctttctcgacaatcaagaatgttattaatgtgtaatactgagcactttacttcttaataaaaacttgatatagtagca

SEQ ID NO: 6480 - DNA, 2907 bp, Artificial Sequence
  derived and/or modified sequence
atggttaattcaagccgggtacagccacagcagcccggtgatgccaagaggcctcccgcacctagagccccagaccctggcagactgatggccggttgtgctgccgtcggtgcttcactagctgcccctggtgggctgtgtgagcaaagagggttagaaattgaaatgcagagaatccgacaagctgctgcacgcgacccccctgccggtgcggctgcctcaccttcacctcccctgtcctcttgttccagacaggcgtggtcccgcgataatccagggttcgaagctgaggaagaagaggaggaggttgaaggagaggaaggaggtatggtcgtcgagatggacgtggagtggcgacctggatcaagaaggtctgcagccagtagtgccgtaagctccgttggcgctaggtcaagaggtctcggagggtaccacggagctggccatccttccgggcgtcggagacgaagagaggatcaggggcctccttgccccagcccagtgggagggggagatcccctgcaccgccacctaccactggaggggcagccaccgagagttgcttgggcagaacggctggtccgcggtcttcgcggtttatgggggaccaggttgatggaagagtcctctactaatagagaaaagtatcttaaaagcgttctgcgggagctcgttacatatctcttgttcttaatagtgctgtgcatccttacttacggaatgatgtcgagtaatgtatactactatactaggatgatgtcccagctgtttcttgacacccccgtgtcaaaaaccgagaagaccaattttaagacactgagctcgatggaggatttttggaagtttacagaagggtccttgctggatggcctttattggaaaatgcagcctagcaatcagacggaagctgataatcgcagcttcattttctacgagaatctactcctcggggttcccagaatccggcagctcagggtcaggaatggatcttgcagcatcccacaagacctaagagatgagattaaggaatgctacgacgtctatagcgtttcaagcgaggaccgtgcaccgttcggaccacggaacggaaccgcctggatatatacctccgagaaagacttgaacggatcttcacactggggcatcatagccacctactcaggcgcaggctactacctggacctgtcaaggactagggaagagaccgcagctcaggtagcttctctcaaaaagaatgtgtggctggaccgaggcacacgtgctaccttcatcgatttttctgtgtacaatgccaatatcaatctgttctgcgtcgtacggttgctggtggaattccccgcaactggcggagtgattccttcttggcagttccagccgctcaaacttatcaggtacgtgaccacctttgacttctttttggccgcttgcgagatcatcttctgtttcttcattttttactatgtagtggaggaaatcttggaaataaggattcacaagctgcactactttcgaagcttctggaactgcctagatgtcgtcattgtcgtgctctccgtggtcgcaatcggcataaacatttaccgaactagtaatgtggaggtcttactgcagttcctggaggatcagaatacttttccaaactttgagcacctggcctactggcagatccaattcaacaacattgcggcagttaccgtcttctttgtctggattaaattgtttaagtttataaattttaacagaaccatgagtcaactgtccactaccatgagtcggtgcgctaaagatctcttcgggtttgcaattatgttcttcatcatctttctagcatatgctcagctggcctacctggtttttggaacccaggttgatgacttctcgactttccaggaatgtatattcacgcagttccgaatcattttaggtgacataaatttcgccgaaattgaagaggccaatagagtgttgggaccaatctatttcaccaccttcgttttttttatgttttttatactgttgaatatgtttctggcaattatcaacgatacatacagtgaagtgaagtctgatctggcacagcagaaagcagagatggagctcagcgacctgataaggaaagggtaccataaggcattagtcaaattaaagctaaagaaaaatacagtggacgatatatctgagtctctgcggcaaggaggaggcaagctcaacttcgacgagctccgccaagatcttaagggtaagggtcacacagatgctgagattgaggcaatatttaccaaatatgatcaggacggagaccaggagttgacagagcatgaacatcagcaaatgagggacgatttagaaaaagaaagagaagaccttgatctggatcactcctcattgcccaggccaatgtcgagtagatcattccccagatctctggatgattcggaggaggatgatgatgaggattcaggacattccagccgcaggaggggaagtatttcttccggcgtgagttatgaggagttccaagttctggtgagaagagtggacagaatggaacactccataggaagcattgtgtcaaagatagatgcagtgatcgtgaagctggaaattatggagagagccaagctgaaacgcagagaagtgcttggccgattattggatggagtagctgaggacgaacgcctcggcagggattccgagattcaccgggagcaaatggagcgactggtgagggaagagcttgagagatgggaatctgacgacgctgcgtcccagatctcgcacggactgggcacccctgtgggattgaacggacagccacgtcctaggagcagcaggcctagttcctcacagagcactgaggggatggaaggagccggtggaaacggttccagtaatgtccatgtgtag

SEQ ID NO: 6481 - DNA, 2907 bp, Artificial Sequence
  derived and/or modified sequence
atggtgaacagcagcagagtgcagccccagcagcccggcgacgccaagagaccccccgcccccagagcccccgaccccggcagactgatggccggctgcgccgccgtgggcgccagcctggccgcccccggcggcctgtgcgagcagagaggcctggagatcgagatgcagagaatcagacaggccgccgccagagacccccccgccggcgccgccgccagccccagcccccccctgagcagctgcagcagacaggcctggagcagagacaaccccggcttcgaggccgaggaggaggaggaggaggtggagggcgaggagggcggcatggtggtggagatggacgtggagtggagacccggcagcagaagaagcgccgccagcagcgccgtgagcagcgtgggcgccagaagcagaggcctgggcggctaccacggcgccggccaccccagcggcagaagaagaagaagagaggaccagggccccccctgccccagccccgtgggcggcggcgaccccctgcacagacacctgcccctggagggccagccccccagagtggcctgggccgagagactggtgagaggcctgagaggcctgtggggcaccagactgatggaggagagcagcaccaacagagagaagtacctgaagagcgtgctgagagagctggtgacctacctgctgttcctgatcgtgctgtgcatcctgacctacggcatgatgagcagcaacgtgtactactacaccagaatgatgagccagctgttcctggacacccccgtgagcaagaccgagaagaccaacttcaagaccctgagcagcatggaggacttctggaagttcaccgagggcagcctgctggacggcctgtactggaagatgcagcccagcaaccagaccgaggccgacaacagaagcttcatcttctacgagaacctgctgctgggcgtgcccagaatcagacagctgagagtgagaaacggcagctgcagcatcccccaggacctgagagacgagatcaaggagtgctacgacgtgtacagcgtgagcagcgaggacagagcccccttcggccccagaaacggcaccgcctggatctacaccagcgagaaggacctgaacggcagcagccactggggcatcatcgccacctacagcggcgccggctactacctggacctgagcagaaccagagaggagaccgccgcccaggtggccagcctgaagaagaacgtgtggctggacagaggcaccagagccaccttcatcgacttcagcgtgtacaacgccaacatcaacctgttctgcgtggtgagactgctggtggagttccccgccaccggcggcgtgatccccagctggcagttccagcccctgaagctgatcagatacgtgaccaccttcgacttcttcctggccgcctgcgagatcatcttctgcttcttcatcttctactacgtggtggaggagatcctggagatcagaatccacaagctgcactacttcagaagcttctggaactgcctggacgtggtgatcgtggtgctgagcgtggtggccatcggcatcaacatctacagaaccagcaacgtggaggtgctgctgcagttcctggaggaccagaacaccttccccaacttcgagcacctggcctactggcagatccagttcaacaacatcgccgccgtgaccgtgttcttcgtgtggatcaagctgttcaagttcatcaacttcaacagaaccatgagccagctgagcaccaccatgagcagatgcgccaaggacctgttcggcttcgccatcatgttcttcatcatcttcctggcctacgcccagctggcctacctggtgttcggcacccaggtggacgacttcagcaccttccaggagtgcatcttcacccagttcagaatcatcctgggcgacatcaacttcgccgagatcgaggaggccaacagagtgctgggccccatctacttcaccaccttcgtgttcttcatgttcttcatcctgctgaacatgttcctggccatcatcaacgacacctacagcgaggtgaagagcgacctggcccagcagaaggccgagatggagctgagcgacctgatcagaaagggctaccacaaggccctggtgaagctgaagctgaagaagaacaccgtggacgacatcagcgagagcctgagacagggcggcggcaagctgaacttcgacgagctgagacaggacctgaagggcaagggccacaccgacgccgagatcgaggccatcttcaccaagtacgaccaggacggcgaccaggagctgaccgagcacgagcaccagcagatgagagacgacctggagaaggagagagaggacctggacctggaccacagcagcctgcccagacccatgagcagcagaagcttccccagaagcctggacgacagcgaggaggacgacgacgaggacagcggccacagcagcagaagaagaggcagcatcagcagcggcgtgagctacgaggagttccaggtgctggtgagaagagtggacagaatggagcacagcatcggcagcatcgtgagcaagatcgacgccgtgatcgtgaagctggagatcatggagagagccaagctgaagagaagagaggtgctgggcagactgctggacggcgtggccgaggacgagagactgggcagagacagcgagatccacagagagcagatggagagactggtgagagaggagctggagagatgggagagcgacgacgccgccagccagatcagccacggcctgggcacccccgtgggcctgaacggccagcccagacccagaagcagcagacccagcagcagccagagcaccgagggcatggagggcgccggcggcaacggcagcagcaacgtgcacgtgtag

SEQ ID NO: 6482 - protein, 488 aa, Artificial Sequence
  derived and/or modified sequence
MADTFLEHLCLLDIDSEPVAARSTSIIATIGPASRSVERLKEMIKAGMNIARLNFSHGSHEYHAESIALDTKGPEIRTGILQGGPESEVELVKGSQVLVTVDPAFRTRGNANTVWVDYPNIVRVVPVGGRIYIDDGLISLVVQKIGPEGLVTQVENGGVLGSRKGVNLPGAQVDLPGLSEQDVRDLRFGVEHGVDIVFASFVRKASDVAAVRAALGPEGHGIKIISKIENHEGVKRFDEILEVSDGIMVARGDLGIEIPAEKVFLAQKMMIGRCNLAGKPVVCATQMLESMITKPRPTRAETSDVANAVLDGADCIMLSGETAKGNFPVEAVKMQHAIAREAEAAVYHRQLFEELRRAAPLSRDPTEVTAIGAVEAAFKCCAAAIIVLTTTGRSAQLLSRYRPRAAVIAVTRSAQAARQVHLCRGVFPLLYREPPEAIWADDVDRRVQFGIESGKLRGFLRVGDLVIVVTGWRPGSGYTNIMRVLSIS

SEQ ID NO: 6483 - protein, 574 aa, Artificial Sequence
  derived and/or modified sequence
MSIQENISSLQLRSWVSKSQRDLAKSILIGAPGGPAGYLRRASVAQLTQELGTAFFQQQQLPAAMADTFLEHLCLLDIDSEPVAARSTSIIATIGPASRSVERLKEMIKAGMNIARLNFSHGSHEYHAESIANVREAVESFAGSPLSYRPVAIALDTKGPEIRTGILQGGPESEVELVKGSQVLVTVDPAFRTRGNANTVWVDYPNIVRVVPVGGRIYIDDGLISLVVQKIGPEGLVTQVENGGVLGSRKGVNLPGAQVDLPGLSEQDVRDLRFGVEHGVDIVFASFVRKASDVAAVRAALGPEGHGIKIISKIENHEGVKRFDEILEVSDGIMVARGDLGIEIPAEKVFLAQKMMIGRCNLAGKPVVCATQMLESMITKPRPTRAETSDVANAVLDGADCIMLSGETAKGNFPVEAVKMQHAIAREAEAAVYHRQLFEELRRAAPLSRDPTEVTAIGAVEAAFKCCAAAIIVLTTTGRSAQLLSRYRPRAAVIAVTRSAQAARQVHLCRGVFPLLYREPPEAIWADDVDRRVQFGIESGKLRGFLRVGDLVIVVTGWRPGSGYTNIMRVLSIS

SEQ ID NO: 6484 - protein, 599 aa, Artificial Sequence
  derived and/or modified sequence
MSIQENISSLQLRSWVSKSQRDLAKSILIGAPGVPLTTQQCGADPQRGRPREVCSGMEGPAGYLRRASVAQLTQELGTAFFQQQQLPAAMADTFLEHLCLLDIDSEPVAARSTSIIATIGPASRSVERLKEMIKAGMNIARLNFSHGSHEYHAESIANVREAVESFAGSPLSYRPVAIALDTKGPEIRTGILQGGPESEVELVKGSQVLVTVDPAFRTRGNANTVWVDYPNIVRVVPVGGRIYIDDGLISLVVQKIGPEGLVTQVENGGVLGSRKGVNLPGAQVDLPGLSEQDVRDLRFGVEHGVDIVFASFVRKASDVAAVRAALGPEGHGIKIISKIENHEGVKRFDEILEVSDGIMVARGDLGIEIPAEKVFLAQKMMIGRCNLAGKPVVCATQMLESMITKPRPTRAETSDVANAVLDGADCIMLSGETAKGNFPVEAVKMQHAIAREAEAAVYHRQLFEELRRAAPLSRDPTEVTAIGAVEAAFKCCAAAIIVLTTTGRSAQLLSRYRPRAAVIAVTRSAQAARQVHLCRGVFPLLYREPPEAIWADDVDRRVQFGIESGKLRGFLRVGDLVIVVTGWRPGSGYTNIMRVLSIS

SEQ ID NO: 6485 - protein, 747 aa, Artificial Sequence
  derived and/or modified sequence
MNHSPLKTALAYECFQDQDNSTLALPSDQKMKTGTSGRQRVQEQVMMTVKRQKSKSSQSSTLSHSNRGSMYDGLADNYNYGTTSRSSYYSKFQAGNGSWGYPIYNGTLKREPDNRRFSSYSQMENWSRHYPRGSCNTTGAGSDICFMQKIKASRSEPDLYCDPRGTLRKGTLGSKGQKTTQNRYSFYSTCSGQKAIKKCPVRPPSCASKQDPVYIPPISCNKDLSFGHSRASSKICSEDIECSGLTIPKAVQYLSSQDEKYQAIGAYYIQHTCFQDESAKQQVYQLGGICKLVDLLRSPNQNVQQAAAGALRNLVFRSTTNKLETRRQNGIREAVSLLRRTGNAEIQKQLTGLLWNLSSTDELKEELIADALPVLADRVIIPFSGWCDGNSNMSREVVDPEVFFNATGCLRKRLGMRELLALVPQRATSSRVNLSSADAGRQTMRNYSGLIDSLMAYVQNCVAASRCDDKSVENCMCVLHNLSYRLDAEVPTRYRQLEYNARNAYTEKSSTGCFSNKSDKMMNNNYDCPLPEEETNPKGSGWLYHSDAIRTYLNLMGKSKKDATLEACAGALQNLTASKGLMSSGMSQLIGLKEKGLPQIARLLQSGNSDVVRSGASLLSNMSRHPLLHRVMGNQVFPEVTRLLTSHTGNTSNSEDILSSACYTVRNLMASQPQLAKQYFSSSMLNNIINLCRSSASPKAAEAARLLLSDMWSSKELQGVLRQQGFDRNMLGTLAGANSLRNFTSRF

SEQ ID NO: 6486 - DNA, 2244 bp, Artificial Sequence
  derived and/or modified sequence
atgaaccattctccgctgaaaaccgccctggcttatgaatgcttccaggatcaggataacagcacacttgcattaccttccgatcagaagatgaaaactggaacatccgggagacagagggtgcaggagcaggttatgatgactgtgaagcgacagaagtccaagtcctctcagagcagtactctgagtcattcaaatcgaggctccatgtatgacgggctggcagataattacaactacgggaccaccagcaggtcatcttactattctaagttccaggctggtaacggcagctggggttacccaatctacaacggaactctcaaacgagagccggataacagacggttttcgtcatatagccagatggagaattggtctcgccattatccacggggctcatgcaacacaacgggcgcaggcagcgatatctgcttcatgcagaagattaaagcgagccgctcagagcctgatctgtattgcgaccccagggggaccctgcgcaaaggaacactgggttcaaaaggccaaaaaacaacgcagaaccgctattctttctacagcacgtgcagcggccaaaaggcgatcaagaaatgcccagtcaggcccccctcctgtgccagcaaacaggacccagtgtatataccacccatcagctgcaacaaggacctctcctttgggcactcccgagcatcaagcaagatctgtagcgaggatatcgaatgtagtgggttaactattcctaaagctgtacagtatttgtcatctcaggacgaaaagtatcaggccatcggggcttactacatccagcatacctgcttccaggatgagtcagccaaacaacaggtgtaccaactgggcggaatttgtaaattggtagacctgctgagatcgcctaaccagaatgtgcagcaggcagcggcaggagcgctgagaaatctggtcttcaggtccacaaccaataaactcgaaactcggaggcaaaatgggatccgcgaagccgtgtctctgttgcgccgaaccggtaatgctgagatacagaagcagcttactggactcctgtggaacttgtcttccactgacgagctgaaggaggagctgattgccgatgccttaccagtcctcgccgaccgcgtaataatccctttcagtggttggtgtgatggtaacagcaatatgtcgcgcgaagtggtggacccagaggttttcttcaatgcgaccggatgccttcgaaagcgcctcggtatgcgggaactcctggccctggtgcctcagagagccacaagctcccgcgtgaacctctcctcagccgacgctggacgtcagacaatgcggaactattccggattgattgattctctcatggcctatgtgcaaaattgcgtggctgcctctaggtgtgacgacaaaagcgtggaaaattgtatgtgcgtccttcacaacttgtcatataggctcgatgccgaagtgcccacacgataccgccaactggaatataatgctcgcaatgcgtatactgaaaaatcttccactggctgcttctcaaacaagtccgataagatgatgaataacaactacgactgtcctctcccagaagaggagactaatcccaagggctcgggctggctctaccattcagacgccatacggacctacctaaacctcatgggtaagagtaaaaaggacgctaccttggaggcctgtgctggcgccctccaaaatttgaccgcgtcaaaagggctgatgagttctggaatgagccagctgattgggttaaaagagaagggattgcctcagatcgcacgtctcctccagagcggcaacagtgatgtggtccggtccggtgcttcactcctgtcgaatatgtcacggcacccgcttctgcaccgcgtgatgggcaatcaggtcttcccggaagtaactaggctactaacctcccataccggtaatacatcaaatagtgaggacatcctctctagtgcctgttatacagttcggaacctaatggcctcccagccacaattggccaagcagtacttcagcagttcaatgctaaataatatcatcaacctgtgtcgttcatccgcctcacccaaagccgctgaggcagcccgtctgttattgtcagacatgtggagcagcaaagaattgcagggtgtcctgcgacagcagggattcgatcggaatatgctgggcaccctggccggtgccaactcactgagaaactttacaagtcggttctag

SEQ ID NO: 6487 - DNA, 2244 bp, Artificial Sequence
  derived and/or modified sequence
atgaaccatagtcccctgaagaccgcactagcgtacgagtgtttccaggatcaggacaattccacactcgcactgccgagcgatcaaaagatgaagacaggcacgtctggtcgccaacgagttcaagagcaggtaatgatgactgtgaaaagacagaaatctaaatcatcccaatcctctacactctcacatagcaatcgcgggtccatgtacgacggactcgccgacaattacaactacgggaccacatcccgatcctcgtactactccaagtttcaagccggcaacggttcatggggttacccaatttataacggtactctgaaacgggagccagataatcggagattctcctcctacagccagatggaaaactggagtcgacactatccacgcggatcgtgcaatactaccggcgctggcagtgatatctgcttcatgcagaaaataaaggcatctaggtctgaacctgacctctactgtgaccctcgaggcacactcaggaagggaacactgggtagtaagggccagaagaccacccagaatagatactctttctatagtacatgttcaggacagaaggcgattaaaaaatgtccagtcagaccaccgtcctgtgcatcgaagcaggacccagtctatataccaccgatcagctgtaacaaggacctgagctttggtcacagcagggctagcagtaagatatgcagtgaggacatcgagtgctccggattaaccatcccgaaggccgtccaatatctctcttctcaggatgagaagtaccaggcaattggtgcatattatatccagcatacgtgtttccaggacgagtccgctaagcagcaagtgtatcagctggggggcatttgcaagttggtagacctgttaaggtcccctaaccagaacgtgcaacaggcagctgctggtgccctcaggaacctggtgttccgttccacaaccaacaaactggagacacgacgacagaacggaatacgcgaggcagtcagtctcctgagaagaactgggaatgcggagattcaaaagcagttaacaggcctgctatggaatctgagttctaccgacgagcttaaggaggagctcattgcagatgcactgcccgttctcgcagaccgcgtgatcatcccctttagcggctggtgtgatgggaatagcaacatgagccgggaggtagtagaccctgaggtgttcttcaatgctactggatgcctaaggaaacgccttgggatgagagagctactggccctggttccccagcgagctacttcatcccgcgtgaacctatctagcgcagatgccggaaggcagaccatgcgtaactatagtggactgatcgattcactcatggcttacgtgcagaattgcgtcgctgcatccagatgtgacgacaaatcagtcgaaaattgtatgtgcgtgctgcataacctgtcttaccggcttgacgctgaagttcccactcgatatcgccagctggagtataacgcacggaatgcctacacagaaaagtcttctacaggatgtttctcaaacaagagcgataaaatgatgaataataactatgattgtcctttgcccgaagaagaaacaaaccccaagggatcaggatggttgtaccactccgatgccatcagaacttatctgaatctcatggggaaatccaaaaaagacgctacactggaggcctgcgcgggtgccttacagaatttgaccgccagcaagggattgatgtcctctggcatgtcccagctgattggtctcaaagagaaaggcctgccacaaatagcccgcctcctccagagtggaaatagcgatgtggtgaggagtggagcatctctcctcagcaatatgagtaggcatcctctattgcacagggtgatgggcaatcaggtgtttccagaagttacaagactgctgacttcccatacagggaacactagtaactccgaagacatactcagttctgcgtgctacaccgtccgcaacctgatggcgtcccagccacagctcgctaaacaatacttcagttcttcaatgctcaataatatcatcaatctctgtcgcagttctgcatcacctaaggcggccgaggcagcacgtttgctgctctccgacatgtggtcaagcaaggaactccaaggcgttctgcgacagcagggattcgaccggaacatgctgggaacactagccggcgctaactccttgagaaattttaccagccgtttctag

SEQ ID NO: 6488 - DNA, 2244 bp, Artificial Sequence
  derived and/or modified sequence
atgaaccacagccccctgaagacagccctggcctatgagtgcttccaggaccaggacaacagcaccctggccctgcccagcgaccagaagatgaagacaggcaccagcggccggcagagggtgcaggagcaggtgatgatgacagtgaagaggcagaagagcaagagcagccagagcagcaccctgagccacagcaacagaggctccatgtatgatggcctggccgacaactacaactacggcaccaccagccgcagcagctactacagcaagttccaggccggaaatggctcctggggctaccccatctacaacggcaccctgaagcgggagccagacaacagacgcttcagcagctacagccagatggagaactggagccgccactacccccggggcagctgcaacaccaccggggccggcagtgacatctgcttcatgcagaagatcaaggccagccgctctgagccagacctgtactgtgacccccggggcaccctgaggaagggcaccctgggcagcaagggccagaagaccacccagaaccgctacagcttctacagcacctgcagcggccagaaggccatcaagaagtgccctgtgcggccccccagctgtgccagcaagcaggaccctgtgtacatcccccccatcagctgcaacaaggacctgagctttggccacagccgggccagcagcaagatctgcagcgaggacattgaatgttctggcctgaccatccccaaggctgtgcagtacctgagcagccaggatgagaagtaccaggccatcggggcctactacatccagcacacctgcttccaggatgagagcgccaagcagcaggtgtaccagctgggcggcatctgcaagctggtggacctgctgcggagccccaaccagaatgtgcagcaggccgccgccggggccctgaggaacctggtgttccgcagcaccaccaacaagctggagacccggcggcagaatggcatccgggaggccgtgtccctgctgcggaggactggaaatgctgagatccagaagcagctgaccggcctgctgtggaacctgagcagcacagatgagctgaaggaggagctgattgctgatgccctgcctgtgctggccgacagagtcatcatccccttcagcggctggtgtgatggcaacagcaacatgagccgggaggtggtggaccctgaggtgttcttcaatgccaccggctgcctgaggaagaggctgggcatgagggagctgctggccctggtgccccagagggccaccagcagccgggtgaacctgagcagcgcagatgctggccggcagaccatgaggaactacagcggcctgattgacagcctgatggcctacgtgcagaactgtgtggccgccagccgctgtgatgacaagtctgtggagaactgcatgtgtgtgctgcacaacctgagctaccgcctggatgctgaggtgcccacccgctaccggcagctggagtacaatgccagaaatgcctacacagagaagagcagcacaggctgcttcagcaacaagagtgacaagatgatgaacaacaactatgactgccccctgcctgaggaggagaccaaccccaagggcagcggctggctgtaccacagtgatgccatccgcacctacctgaacctgatgggcaagagcaagaaggatgccaccctggaggcctgtgccggggccctgcagaacctgacagccagcaagggcctgatgagcagcggcatgagccagctgattggcctgaaggagaagggcctgccccagatcgcccggctgctgcagagcggcaacagtgatgtggtgcgcagcggggccagcctgctgagcaacatgagccgccaccccctgctgcaccgggtgatgggcaaccaggtgtttcctgaggtgacccggctgctgaccagccacacaggcaacaccagcaacagcgaggacatcctgagcagcgcctgctacacagtgaggaacctgatggccagccagccccagctggccaagcagtacttcagcagctccatgctgaacaacatcatcaacctgtgccgcagcagcgccagccccaaggctgctgaggccgcccggctgctgctgagtgacatgtggagcagcaaggagctgcagggcgtgctgcggcagcagggctttgacaggaacatgctgggcaccctggccggggccaacagcctgaggaacttcaccagccgcttctag

SEQ ID NO: 6489 - DNA, 2244 bp, Artificial Sequence
  derived and/or modified sequence
atgaaccacagccccctgaagaccgccctggcctacgagtgcttccaggatcaggacaattccacccttgcactcccaagtgaccagaagatgaagaccggtacttccggccgccagagagtgcaggaacaagttatgatgaccgtcaaaagacagaagtccaagtccagtcagagctctactctgtctcattctaaccgcgggtccatgtatgacgggttggcagataattataactacggtacaacaagccggagctcttactattcgaagttccaggcaggcaacggaagctggggctaccctatatataacgggactctgaagagagagccagacaacagaaggttctcctcctatagtcagatggagaactggtccagacactaccctagagggagctgtaataccactggagcggggtccgacatttgttttatgcaaaaaatcaaggcgagtaggtccgaacccgatctgtattgtgacccacgcggaactctacggaaggggactcttggcagcaaaggtcagaagaccacgcaaaatcggtactctttttactccacatgcagcggtcaaaaagcaattaaaaagtgccctgtgagacccccctcttgtgcctcaaagcaggatcctgtgtacattcctccaatttcctgcaacaaggatctctctttcggtcactctcgagcctcttctaaaatctgcagcgaggacatagagtgctctggcttaaccatccctaaggccgtgcagtatttatcatctcaggacgagaagtatcaggccataggcgcatactacatccagcatacgtgctttcaggatgagtctgccaaacaacaggtgtatcagctcggcggaatctgtaagctagtggacctattaaggagcccaaaccaaaatgtacagcaggcggcagctggcgccttgcggaacctggtgttccgcagcacgactaacaagctcgagacccgtcgtcagaacgggatacgggaggccgtcagtctcttgcggcgtacgggcaatgcagaaatccagaaacagctgacaggcttgctgtggaatctatcaagcactgatgaactcaaggaggaacttatcgccgatgcccttcccgttttggcagaccgggtcataattcccttttcaggctggtgcgacggcaactctaacatgagccgggaggtggtcgacccagaggttttcttcaacgccaccggctgcctgaggaaaaggctggggatgcgagagcttcttgccttagttcctcaacgggccacatcatcccgagtcaacctctcgagtgccgatgcaggcaggcagacaatgcggaactattctggccttatcgactctctcatggcctacgttcagaattgcgttgccgcaagtcgatgcgatgataagtcggtcgagaactgcatgtgcgtcttacacaacttgagctatcggctggacgccgaagttccgacacgctacagacaacttgagtacaacgctaggaatgcctacaccgagaagagctctacgggatgcttttctaacaaatccgataagatgatgaacaataactatgattgccctcttcccgaagaagaaaccaatcccaagggctcaggatggctttaccatagcgatgctataaggacttacctcaacctgatgggcaaatctaagaaggacgccacacttgaagcatgtgcgggtgcattacagaatctgaccgccagtaaagggttaatgagcagcgggatgagccagctcattggactgaaagaaaaaggcctgccccagatcgcgagactgctccagagcggaaactctgacgtcgtccgcagtggggccagcttgctttcaaacatgtccagacatcctctattacaccgagtgatgggtaaccaggtctttcccgaggtgacgaggctactcacaagccatacggggaatactagcaactcagaggacatcctcagctcagcctgttacaccgtcagaaaccttatggcaagccagccacaactcgccaagcagtacttcagtagctccatgctgaataatattattaacctctgccggagcagcgcgtcgcctaaggccgctgaggcagccaggcttttactgtctgacatgtggtcctccaaagaactgcagggtgtcctgaggcagcagggtttcgatcgcaacatgctgggcaccttagcaggcgccaactctctccgtaactttacatcacgcttctag

SEQ ID NO: 6490 - DNA, 2244 bp, Artificial Sequence
  derived and/or modified sequence
atgaaccacagccccctgaagaccgccctggcctacgagtgcttccaggaccaagacaatagcaccctggcactcccctccgaccagaagatgaagaccgggacttcgggacggcagcgcgtgcaggagcaagttatgatgactgtgaaacgccaaaaatctaaaagtagccaatctagcacattgagtcacagtaataggggtagcatgtacgatggactcgctgacaattacaactatggtacgaccagcaggtccagttactatagcaagttccaggccgggaacgggagctggggctatcccatatataacggaacccttaagcgagagcccgataacagacgattttcatcttattcgcagatggaaaactggtcaagacattaccccaggggttcttgcaacaccactggggcgggttccgatatatgcttcatgcagaaaatcaaagcctcaagatcggaacctgacctctattgtgatcctagaggtacactgaggaaagggacgcttggctctaaaggacagaaaactacacaaaacaggtattcattctactcaacttgcagcggacagaaagcaataaaaaagtgccccgtaaggccaccgtcttgtgcatcaaaacaggatcctgtgtatatcccaccaatctcctgcaataaggatctttcatttggccactctcgtgcaagctctaagatctgttcagaggatatcgagtgtagcggactgacaatcccaaaagcagttcagtatctttcctcccaggacgagaagtaccaggccatcggagcctactatatacagcatacctgcttccaggacgagagcgctaagcaacaggtctaccagctggggggaatctgtaagctggttgatctccttagatccccaaatcaaaatgtgcagcaagccgcagccggggctcttcgtaatctagtcttccggtctactactaacaaattggagacccgaaggcagaacggtatccgggaggccgttagtctgctccggcgcaccggaaatgccgaaattcagaagcagctcactgggctgctttggaacttgagctctactgacgagttgaaggaggaactcattgcagatgctctgccggttcttgccgacagagttattatcccttttagcgggtggtgtgacggcaattctaacatgtctcgggaggtcgtcgatcccgaagtctttttcaatgcaacagggtgtctacgaaaaagattgggcatgagggagctcctggccctcgtccctcagagggcaacaagttcacgtgtgaatctgtcatctgcagacgctggccgccaaacaatgagaaattattccgggctaatcgactcactgatggcatatgtgcagaactgcgtggctgccagtaggtgtgacgataaatcagtcgagaattgcatgtgcgtgttacacaacttgtcttataggctggacgccgaggtgccaacgcgctatcgccagctggaatacaacgcccgaaacgcctataccgaaaagtcgtccacaggttgtttctctaacaaatcagacaagatgatgaataataattatgactgcccactgccagaagaggagaccaaccctaaaggcagcggctggttatatcacagcgatgcgatccggacatacctcaaccttatggggaagagcaagaaggacgccaccctcgaggcctgcgctggtgctcttcagaacctgacagcatctaaagggctcatgagttctggaatgtctcagttgatcggtctgaaggaaaaaggactgcctcaaattgcacgtttgttacagagtggaaactccgatgtcgtaagatctggagcctctctcctgagcaatatgagcaggcatcctcttcttcatcgggtcatgggaaaccaggtgttccccgaggtcactaggctcctgacctcacatacaggcaacacgtcgaattccgaagacattctgtcttctgcttgctatactgtgcggaacctcatggcatcacaaccccagctcgcaaaacaatatttcagcagttcaatgttgaataatattataaacttatgccggtccagcgcatcacccaaagctgctgaagctgctcgcctgcttcttagtgatatgtggtcatctaaggagttgcagggagtgctgcgccagcagggtttcgatagaaatatgctcggaacactggcaggggcaaattccctgcggaactttaccagtagattttag

SEQ ID NO: 6491 - DNA, 5447 bp, Artificial Sequence
  derived and/or modified sequence
gggtggtgcagggcaggggtggtatatcctgtctgacggagggcgggcctcgccagtgccagagagggacgaaccagggtggaagcgccaggagcagctgcagggagccctcacgcggaccacgcactctatggccgtagggagccgctgagagcgagaagagcacgctcctgcccgcccgctgcaccgcacctcgcctcgcctctctgctctcctaggccccggccgcgcgccacccgcctcccgccaccatgaaccactcgccgctcaagaccgccttggcgtacgaatgcttccaggaccaggacaactccacgttggctttgccgtcggaccaaaagatgaaaacaggcacgtctggcaggcagcgcgtgcaggagcaggtgatgatgaccgtcaagcggcagaagtccaagtcttcccagtcgtccaccctgagccactccaatcgaggttccatgtatgatggcttggctgacaattacaactatgggaccaccagcaggagcagctactactccaagttccaggcagggaatggctcatggggatatccgatctacaatggaaccctcaagcgggagcctgacaacaggcgcttcagctcctacagccagatggagaactggagccggcactacccccggggcagctgtaacaccaccggcgcaggcagcgacatctgcttcatgcagaaaatcaaggcgagccgcagtgagcccgacctctactgtgacccacggggcaccctgcgcaagggcacgctgggcagcaagggccagaagaccacccagaaccgctacagcttttacagcacctgcagtggtcagaaggccataaagaagtgccctgtgcgcccgccctcttgtgcctccaagcaggaccctgtgtatatcccgcccatctcctgcaacaaggacctgtcctttggccactctagggccagctccaagatctgcagtgaggacatcgagtgcagtgggctgaccatccccaaggctgtgcagtacctgagctcccaggatgagaaataccaggccattggggcctattacatccagcatacctgcttccaggatgaatctgccaagcaacaggtctatcagctgggaggcatctgcaagctggtggacctcctccgcagccccaaccagaacgtccagcaggccgcggcaggggccctgcgcaacctggtgttcaggagcaccaccaacaagctggagacccggaggcagaatgggatccgcgaggcagtcagcctcctgaggagaaccgggaacgccgagatccagaagcagctgactgggctgctctggaacctgtcttccactgacgagctgaaggaggaactcattgccgacgccctgcctgttctggccgaccgcgtcatcattcccttctctggctggtgcgatggcaatagcaacatgtcccgggaagtggtggaccctgaggtcttcttcaatgccacaggctgcttgagaaagagactgggcatgcgggagcttctggctcttgttccgcaaagggccactagtagcagggtgaacctgagctcggccgatgcaggccgccagaccatgcgtaactactcagggctcattgattccctcatggcctatgtccagaactgtgtagcggccagccgctgtgacgacaagtctgtggaaaactgcatgtgtgttctgcacaacctctcctaccgcctggacgccgaggtgcccacccgctaccgccagctggagtataacgcccgcaacgcctacaccgagaagtcctccactggctgcttcagcaacaagagcgacaagatgatgaacaacaactatgactgccccctgcctgaggaagagaccaaccccaagggcagcggctggttgtaccattcagatgccatccgcacctacctgaacctcatgggcaagagcaagaaagatgctaccctggaggcctgtgctggtgccctgcagaacctgacagccagcaaggggctgatgtccagtggcatgagccagttgattgggctgaaggaaaagggcctgccacaaattgcccgcctcctgcaatctggcaactctgatgtggtgcggtccggagcctccctcctgagcaacatgtcccgccaccctctgctgcacagagtgatggggaaccaggtgttcccggaggtgaccaggctcctcaccagccacactggcaataccagcaactccgaagacatcttgtcctcggcctgctacactgtgaggaacctgatggcctcgcagccacaactggccaagcagtacttctccagcagcatgctcaacaacatcatcaacctgtgccgaagcagtgcctcacccaaggccgcagaagctgcccggcttctcctgtctgacatgtggtccagcaaggaactgcagggtgtcctcagacagcaaggtttcgataggaacatgctgggaaccttagctggggccaacagcctcaggaacttcacctcccgattctaagaagagactgtccaagcaagttaggcttgcaggaagatatgacccagctgagaagccctcaggcctcgctggatggggttttctgtccatcctatgcagtatttgggaaagttcacaagaaactgagaagaaacctaaaaactgtggatagtggaaagatttttagattttttttttccttggggaaactggcaggcaatgggggttagggaggttggggcggtgggggctttcttgagttaaaggggcttatatgtgatgtcaatatttcttcctctgagaaatggtatatatatgtgtataatgtaagtgtgtgcatgcatgtgcgcgtgcatgtgtgtgtgtgtgagtgtcttaaagcataaccacaaactgcaaaaagctaggtaagctattttgttgcagctcataaggtggtgaaaaggactctcctgtgtttcttactcataggcaaggacaacatgtgctttttggtgagctgctcataattcctgaaatgtgtggtgccagggcaagggggccatcactgcagtcaggccctcagaggagtcctgcaggcttcctaccagtggtctccaggggtgcaggagtaactggggctgggccagcctccccacttacaaggctgctttccaggaagggaggtctggtgtatctcatgggagaatctggggtgtctgtaatgtcacccctccagcagcgccacaaggactgaggttgggtaggtgtggggttccagaggacagcaggacactctcgcatactttgccaaatgaggcctgctcagaggagtaggagctgaaagatggtgccttccaccctcttgggctgtgtgcccatcagagcaggctcagcctgcaaaggccctgcattcagaggtcttgtaatctacttgttgcaggagaaagaaggtaaaaaatgatttttttaagaaaagctattttattgcagctctttcccaagagctgttctgggaatggctggtcttcatattcccagtggagaggggaacaagtggggctgggcatatacctattccggcttctagtgggatggagttggggtatagaaattaaccaggaagatgtttccaccaagcctgctgtgagtcaattgagggagtgtttggggtcccaggagacttggacggggggagtttgggtagactaggaaaggaaagtgccatatcagggtaccggtaccggcaagctcacatctcagccaggggccatgccccacttcccctgaccccagctgtcttgtctccactctgtgaaacccacaggggatgtgataaacagggctattaggggtatcagccacgtcgagcccccagactctgtgcacttcagaccagcagcagcaggagggctcccgagggccttatgagaaaacctgtgtggacatcccttggtgtacactaagacagagcagagcccagcgctcccaagccttcctccttccagcttctacctccatgctagcattgctggtgttagagaggaattaacttcctggtctgtgcccttctctagaagaatataagatgctcctcctcctcaccccttctcagcctcctcccaagtcttcctcttctgcaccacccccgagtccaaacccacctcttgccccagcattcaggctggaaaacactgatgtggactcagtatgataactgagatgggggacgccagacatgtgaggacgctgtcctccgagaggtgtccccggctgttagccagctgtgctgtggtgctgtgggtctgtcataccctcccttgcttctgttcacactgggaggcccactcctggctcacctctccctctcagggacccacgtgggagcctggatccctggactgtcctgggcataggtttcaggggcctcctttgttgtcatcagaacccagaggaattcttctcctaaaaaatacgtatggcataccaatctgtgcggggcagtgtcctaagcacttagactacatcagggaagaacacagaccacatccctgtcctcatgcggcttatgttttctggaggaaagtggagacacaagtccttggctttagggctcccccggctgggggctgtgcagtccggtcagggcgggaggggaaatgcaccgctgcatgtgaaccttaccagcccaggcggatgccccttccccttagcactaccctggcctcctgcatcccctcgcctcatgttcctcccaccttcaaagaatgaagagccccatgggcccagcccctgccctgggaaccaggcagccttccagacctcaggggctgaggcagactattagggcagggctgactttggtgacactgcccattccctctcaggccagctcaggtcacccgggcctctgacccaggcctgtcactttgagaggggcaaaactgagaggggcttttcctagagaaagagaacaaggagcttgccaggcttcatgtagccgacacacgtctcaggattttaagtccacattggcctcacactaccagggccaatgcccaaaataaggagttccaatttggggccaaatgaggaaggacacagactctgccctgggatctcctgtgctagcggccaatgacaaatccagtcattggccaccagccacctctgcagtggggaccacactagcagccctgactccacactcctcctggggacccaagaggcagtgttgctgtctgcatgtccaccttggaatctggctgaactggctggcaggaccaagactgcggctggggtgggcagggaagggaagccgggggctgctgtgagggatcttggagcttccctgtagcccaccttccccttgcttcatgtttgtagaggaaccttgtgccggccaggcccagtttccttgtgtgatacactaatgtatttgctttttttggaaatagagaaaatcaataaattgctagtgtttctttgaacttt

SEQ ID NO: 6492 - DNA, 2244 bp, Artificial Sequence
  derived and/or modified sequence
atgaaccactcgccgctcaagaccgccttggcgtacgaatgcttccaggaccaggacaactccacgttggctttgccgtcggaccaaaagatgaaaacaggcacgtctggcaggcagcgcgtgcaggagcaggtgatgatgaccgtcaagcggcagaagtccaagtcttcccagtcgtccaccctgagccactccaatcgaggttccatgtatgatggcttggctgacaattacaactatgggaccaccagcaggagcagctactactccaagttccaggcagggaatggctcatggggatatccgatctacaatggaaccctcaagcgggagcctgacaacaggcgcttcagctcctacagccagatggagaactggagccggcactacccccggggcagctgtaacaccaccggcgcaggcagcgacatctgcttcatgcagaaaatcaaggcgagccgcagtgagcccgacctctactgtgacccacggggcaccctgcgcaagggcacgctgggcagcaagggccagaagaccacccagaaccgctacagcttttacagcacctgcagtggtcagaaggccataaagaagtgccctgtgcgcccgccctcttgtgcctccaagcaggaccctgtgtatatcccgcccatctcctgcaacaaggacctgtcctttggccactctagggccagctccaagatctgcagtgaggacatcgagtgcagtgggctgaccatccccaaggctgtgcagtacctgagctcccaggatgagaaataccaggccattggggcctattacatccagcatacctgcttccaggatgaatctgccaagcaacaggtctatcagctgggaggcatctgcaagctggtggacctcctccgcagccccaaccagaacgtccagcaggccgcggcaggggccctgcgcaacctggtgttcaggagcaccaccaacaagctggagacccggaggcagaatgggatccgcgaggcagtcagcctcctgaggagaaccgggaacgccgagatccagaagcagctgactgggctgctctggaacctgtcttccactgacgagctgaaggaggaactcattgccgacgccctgcctgttctggccgaccgcgtcatcattcccttctctggctggtgcgatggcaatagcaacatgtcccgggaagtggtggaccctgaggtcttcttcaatgccacaggctgcttgagaaagagactgggcatgcgggagcttctggctcttgttccgcaaagggccactagtagcagggtgaacctgagctcggccgatgcaggccgccagaccatgcgtaactactcagggctcattgattccctcatggcctatgtccagaactgtgtagcggccagccgctgtgacgacaagtctgtggaaaactgcatgtgtgttctgcacaacctctcctaccgcctggacgccgaggtgcccacccgctaccgccagctggagtataacgcccgcaacgcctacaccgagaagtcctccactggctgcttcagcaacaagagcgacaagatgatgaacaacaactatgactgccccctgcctgaggaagagaccaaccccaagggcagcggctggttgtaccattcagatgccatccgcacctacctgaacctcatgggcaagagcaagaaagatgctaccctggaggcctgtgctggtgccctgcagaacctgacagccagcaaggggctgatgtccagtggcatgagccagttgattgggctgaaggaaaagggcctgccacaaattgcccgcctcctgcaatctggcaactctgatgtggtgcggtccggagcctccctcctgagcaacatgtcccgccaccctctgctgcacagagtgatggggaaccaggtgttcccggaggtgaccaggctcctcaccagccacactggcaataccagcaactccgaagacatcttgtcctcggcctgctacactgtgaggaacctgatggcctcgcagccacaactggccaagcagtacttctccagcagcatgctcaacaacatcatcaacctgtgccgaagcagtgcctcacccaaggccgcagaagctgcccggcttctcctgtctgacatgtggtccagcaaggaactgcagggtgtcctcagacagcaaggtttcgataggaacatgctgggaaccttagctggggccaacagcctcaggaacttcacctcccgattctaa

SEQ ID NO: 6493 - DNA, 2244 bp, Artificial Sequence
  derived and/or modified sequence
atgaaccatagccccctcaagacagccttggcctacgaatgctttcaagatcaagacaacagcacccttgcattaccttcagatcagaaaatgaagacggggacatccggtagacagcgagtccaagagcaagtgatgatgaccgtcaagcgacagaagtcgaagtcttcacagtcttccacactctcgcactccaatagaggttccatgtatgatggcctcgctgataactacaattatgggaccacttctcgcagctcttactatagtaagttccaggcgggaaacggcagctggggttatccaatctataacggaacccttaagagggaacccgataatcgtcgattctcttcctactctcagatggaaaattggtccaggcattacccaaggggatcttgcaacacaacaggtgccggaagcgatatttgcttcatgcagaagattaaggccagtagatccgagcccgacctgtactgtgacccacgtggcaccctgcgaaaaggcacactaggctccaagggtcaaaagactacgcagaacagatacagtttttacagtacctgcagcggtcagaaagctattaagaaatgtccagtcagaccaccatcctgcgcaagcaagcaagaccctgtctacatcccccctattagttgtaataaggatctttcgttcggtcactcacgggcatcctccaaaatttgttccgaggacattgagtgttctggtttgaccatccctaaggcggtgcaatatttgtcttcacaggacgagaaataccaggccataggtgcctactacatccagcacacatgcttccaggacgagagtgccaagcagcaggtctaccaactgggcggtatttgtaaactagtggatctgctgagaagtcccaaccagaacgtccagcaggctgctgccggagctctgagaaacctcgtattcaggagcaccaccaacaagctggagacccgcaggcagaatggcattcgcgaagcagtatccttgctgcggagaacagggaatgccgagattcagaagcagttaacagggctgctctggaaccttagttctactgatgaactcaaagaggagctgattgccgacgctttgccagtattagctgatcgggtgattatacctttttccgggtggtgtgacggaaattcaaacatgagccgggaagttgtggatccagaagtgttcttcaatgccactggttgtctaaggaagcgcctgggtatgagggagctgctcgcacttgtgccccaacgcgctacttccagtagagtgaacctgtcaagtgccgatgccggtcggcaaaccatgaggaactattccggacttattgatagcctgatggcctacgtgcagaactgcgtggctgcaagcaggtgcgatgataagtcagtcgagaactgcatgtgtgtgctccacaatctatcttatcggcttgacgcagaggtacccacccgataccgacagctcgagtacaacgccagaaacgcctatacagagaaaagtagcaccggatgctttagcaacaaaagtgacaaaatgatgaacaacaactacgactgtcccctaccggaggaggagaccaaccctaaaggctccggatggctctatcactcagatgctatccgcacgtacttgaatctgatgggcaagagtaaaaaggatgctacactcgaggcctgtgccggagcactccagaacctcaccgcaagcaaaggcctcatgtcctcaggcatgtcccaactgattggactcaaagaaaaagggcttccccagatcgcgagattgctgcagagcggtaacagcgacgtggttcgctccggcgcatcgctacttagtaacatgtcacgccaccccctgctgcaccgggtaatggggaaccaagttttccctgaagttacccgcctgctgacaagccacactggtaatacctcaaacagcgaggacatcttgagctctgcctgttataccgtccgaaatctgatggccagtcagcctcagctggccaaacaatatttttcaagcagcatgctcaacaatatcattaatctttgccgaagcagtgcaagtcccaaagcggctgaagctgcccgactgctcctgtccgatatgtggtcttcaaaggaactgcagggtgtcctccggcaacagggcttcgatagaaacatgttaggtacattggctggtgctaacagcctgaggaactttacaagccgcttctag

SEQ ID NO: 6494 - DNA, 2244 bp, Artificial Sequence
  derived and/or modified sequence
atgaaccattcccccctgaaaacagcgctggcctatgaatgcttccaggaccaggataactcaactctggctctgccctctgatcagaaaatgaagaccggcacgagcggccgtcagcgggtccaggagcaggttatgatgaccgtgaagagacagaaatctaagagtagtcagagctcaaccctttctcattctaacagaggatctatgtacgatgggctggctgataactacaattacggcaccactagtagatcgtcttactactcaaagtttcaggcaggcaacgggagctggggttaccccatctataatggcacactcaagcgagagccggacaacagaagatttagtagttattcccagatggagaattggtcgaggcattacccgaggggctcctgcaatactacaggggctgggtcagatatctgctttatgcagaaaataaaggccagcaggtccgaacccgacctgtattgcgatccaagagggactctgaggaagggcaccttaggcagcaagggccagaaaactactcagaataggtattcattttacagtacttgtagtggacaaaaggcaataaaaaaatgtcctgttcgtcccccaagctgcgcctccaaacaagaccctgtgtatatccctcctatcagctgtaataaagacctgtctttcggtcacagcagggcaagctctaaaatatgttccgaggatatcgagtgcagcgggctaacaataccaaaagcggtgcagtatctgtcctcacaggacgagaagtaccaggcaatcggagcctactacatccagcacacatgttttcaagatgaaagcgcaaaacagcaggtttatcagttggggggaatctgcaaactggtcgaccttctcagaagtcccaatcagaatgtgcagcaggctgctgccggtgccttgaggaatctggtgttcagaagcacgactaacaagctcgaaacccggagacagaacggaatcagggaggcagtgtctcttttacgacggactggcaatgcagaaatccagaaacagctgacagggttactgtggaacctaagctccactgacgaactgaaagaggaactgattgcggatgcacttcctgtgctcgcagacagagtcattattccattcagcggttggtgcgacggcaactctaatatgtcaagagaagtggttgatcccgaagttttcttcaatgccacgggatgcctgcgaaagcggttggggatgcgcgagttgctagcactggtccctcagagggccacaagtagtcgggtcaatctgagcagtgctgatgctggtcgacagactatgcggaactacagcggactcattgactcgctgatggcctacgtacagaattgcgttgctgcatctcgatgtgatgacaaatcggtcgagaattgtatgtgtgttcttcacaatctgtcttacagactggatgccgaggtgccaacgcggtacagacagttagagtataatgccaggaacgcttacactgaaaagtccagtacgggctgcttcagcaataagagcgacaagatgatgaataacaactacgactgtcccctccctgaagaggagactaaccccaaaggctccggatggctgtaccattccgacgcgattcgaacgtatttgaacctaatggggaagagcaagaaggatgccaccctggaagcatgtgcaggagccctgcagaacctcacagccagcaaaggcctcatgtcctcaggtatgtcccaactcatagggctcaaagagaagggcttgccccaaattgctagattactgcagagcgggaattccgatgtcgttcggagtggcgcaagcttgctatctaacatgagccgtcacccactgctacatcgggtgatggggaatcaagtattcccggaggtgacacgactgctgactagccacacagggaacactagtaactccgaggatatcctgagctcagcgtgttataccgtgaggaacttaatggctagccagccccagctcgcaaaacaatattttagctcatcaatgctcaataatatcatcaatctatgccgctcatctgcctctcctaaggctgcagaggccgcacgactgctgttgagcgatatgtggtcatcgaaagagctacagggagtactgagacagcaggggttcgatagaaacatgctgggaacacttgccggtgcaaattcactccggaactttacctcacggttctag

SEQ ID NO: 6495 - DNA, 2244 bp, Artificial Sequence
  derived and/or modified sequence
atgaaccacagccccctgaagaccgccctggcctacgagtgcttccaggaccaggacaacagcaccctggccctgcccagcgaccagaagatgaagaccggcaccagcggcagacagagagtgcaggagcaggtgatgatgaccgtgaagagacagaagagcaagagcagccagagcagcaccctgagccacagcaacagaggcagcatgtacgacggcctggccgacaactacaactacggcaccaccagcagaagcagctactacagcaagttccaggccggcaacggcagctggggctaccccatctacaacggcaccctgaagagagagcccgacaacagaagattcagcagctacagccagatggagaactggagcagacactaccccagaggcagctgcaacaccaccggcgccggcagcgacatctgcttcatgcagaagatcaaggccagcagaagcgagcccgacctgtactgcgaccccagaggcaccctgagaaagggcaccctgggcagcaagggccagaagaccacccagaacagatacagcttctacagcacctgcagcggccagaaggccatcaagaagtgccccgtgagaccccccagctgcgccagcaagcaggaccccgtgtacatcccccccatcagctgcaacaaggacctgagcttcggccacagcagagccagcagcaagatctgcagcgaggacatcgagtgcagcggcctgaccatccccaaggccgtgcagtacctgagcagccaggacgagaagtaccaggccatcggcgcctactacatccagcacacctgcttccaggacgagagcgccaagcagcaggtgtaccagctgggcggcatctgcaagctggtggacctgctgagaagccccaaccagaacgtgcagcaggccgccgccggcgccctgagaaacctggtgttcagaagcaccaccaacaagctggagaccagaagacagaacggcatcagagaggccgtgagcctgctgagaagaaccggcaacgccgagatccagaagcagctgaccggcctgctgtggaacctgagcagcaccgacgagctgaaggaggagctgatcgccgacgccctgcccgtgctggccgacagagtgatcatccccttcagcggctggtgcgacggcaacagcaacatgagcagagaggtggtggaccccgaggtgttcttcaacgccaccggctgcctgagaaagagactgggcatgagagagctgctggccctggtgccccagagagccaccagcagcagagtgaacctgagcagcgccgacgccggcagacagaccatgagaaactacagcggcctgatcgacagcctgatggcctacgtgcagaactgcgtggccgccagcagatgcgacgacaagagcgtggagaactgcatgtgcgtgctgcacaacctgagctacagactggacgccgaggtgcccaccagatacagacagctggagtacaacgccagaaacgcctacaccgagaagagcagcaccggctgcttcagcaacaagagcgacaagatgatgaacaacaactacgactgccccctgcccgaggaggagaccaaccccaagggcagcggctggctgtaccacagcgacgccatcagaacctacctgaacctgatgggcaagagcaagaaggacgccaccctggaggcctgcgccggcgccctgcagaacctgaccgccagcaagggcctgatgagcagcggcatgagccagctgatcggcctgaaggagaagggcctgccccagatcgccagactgctgcagagcggcaacagcgacgtggtgagaagcggcgccagcctgctgagcaacatgagcagacaccccctgctgcacagagtgatgggcaaccaggtgttccccgaggtgaccagactgctgaccagccacaccggcaacaccagcaacagcgaggacatcctgagcagcgcctgctacaccgtgagaaacctgatggccagccagccccagctggccaagcagtacttcagcagcagcatgctgaacaacatcatcaacctgtgcagaagcagcgccagccccaaggccgccgaggccgccagactgctgctgagcgacatgtggagcagcaaggagctgcagggcgtgctgagacagcagggcttcgacagaaacatgctgggcaccctggccggcgccaacagcctgagaaacttcaccagcagattctag

SEQ ID NO: 6496 - protein, 810 aa, Artificial Sequence
  derived and/or modified sequence
MEHKEVVLLLLLFLKSGQGEPLDDYVNTQGASLFSVTKKQLGAGSIEECAAKCEEDEEFTCRAFQYHSKEQQCVIMAENRKSSIIIRMRDVVLFEKKVYLSECKTGNGKNYRGTMSKTKNGITCQKWSSTSPHRPRFSPATHPSEGLEENYCRNPDNDPQGPWCYTTDPEKRYDYCDILECEEECMHCSGENYDGKISKTMSGLECQAWDSQSPHAHGYIPSKFPNKNLKKNYCRNPDRELRPWCFTTDPNKRWELCDIPRCTTPPPSSGPTYQCLKGTGENYRGNVAVTVSGHTCQHWSAQTPHTHNRTPENFPCKNLDENYCRNPDGKRAPWCHTTNSQVRWEYCKIPSCDSSPVSTEQLAPTAPPELTPVVQDCYHGDGQSYRGTSSTTTTGKKCQSWSSMTPHRHQKTPENYPNAGLTMNYCRNPDADKGPWCFTTDPSVRWEYCNLKKCSGTEASVVAPPPVVLLPDVETPSEEDCMFGNGKGYRGKRATTVTGTPCQDWAAQEPHRHSIFTPETNPRAGLEKNYCRNPDGDVGGPWCYTTNPRKLYDYCDVPQCAAPSFDCGKPQVEPKKCPGRVVGGCVAHPHSWPWQVSLRTRFGMHFCGGTLISPEWVLTAAHCLEKSPRPSSYKVILGAHQEVNLEPHVQEIEVSRLFLEPTRKDIALLKLSSPAVITDKVIPACLPSPNYVVADRTECFITGWGETQGTFGAGLLKEAQLPVIENKVCNRYEFLNGRVQSTELCAGHLAGGTDSCQGDSGGPLVCFEKDKYILQGVTSWGLGCARPNKPGVYVRVSRFVTWIEGVMRNN

SEQ ID NO: 6497 - protein, 210 aa, Artificial Sequence
  derived and/or modified sequence
RFGMHFCGGTLISPEWVLTAAHCLEKSPRPSSYKVILGAHQEVNLEPHVQEIEVSRLFLEPTRKDIALLKLSSPAVITDKVIPACLPSPNYVVADRTECFITGWGETQGTFGAGLLKEAQLPVIENKVCNRYEFLNGRVQSTELCAGHLAGGTDSCQGDSGGPLVCFEKDKYILQGVTSWGLGCARPNKPGVYVRVSRFVTWIEGVMRNN

SEQ ID NO: 6498 - DNA, 2430 bp, Artificial Sequence
  derived and/or modified sequence
atggagcacaaggaggtggtgctgctgctgctgctgttcctgaagagcggccagggcgagcccctggacgactacgtgaacacccagggcgccagcctgttcagcgtgaccaagaagcagctgggcgccggcagcatcgaggagtgcgccgccaagtgcgaggaggacgaggagttcacctgccgcgccttccagtaccacagcaaggagcagcagtgcgtgatcatggccgagaaccgcaagagcagcatcatcatccgcatgcgcgacgtggtgctgttcgagaagaaggtgtacctgagcgagtgcaagaccggcaacggcaagaactaccgcggcaccatgagcaagaccaagaacggcatcacctgccagaagtggagcagcaccagcccccaccgcccccgcttcagccccgccacccaccccagcgagggcctggaggagaactactgccgcaaccccgacaacgacccccagggcccctggtgctacaccaccgaccccgagaagcgctacgactactgcgacatcctggagtgcgaggaggagtgcatgcactgcagcggcgagaactacgacggcaagatcagcaagaccatgagcggcctggagtgccaggcctgggacagccagagcccccacgcccacggctacatccccagcaagttccccaacaagaacctgaagaagaactactgccgcaaccccgaccgcgagctgcgcccctggtgcttcaccaccgaccccaacaagcgctgggagctgtgcgacatcccccgctgcaccacccccccccccagcagcggccccacctaccagtgcctgaagggcaccggcgagaactaccgcggcaacgtggccgtgaccgtgagcggccacacctgccagcactggagcgcccagaccccccacacccacaaccgcacccccgagaacttcccctgcaagaacctggacgagaactactgccgcaaccccgacggcaagcgcgccccctggtgccacaccaccaacagccaggtgcgctgggagtactgcaagatccccagctgcgacagcagccccgtgagcaccgagcagctggcccccaccgccccccccgagctgacccccgtggtgcaggactgctaccacggcgacggccagagctaccgcggcaccagcagcaccaccaccaccggcaagaagtgccagagctggagcagcatgaccccccaccgccaccagaagacccccgagaactaccccaacgccggcctgaccatgaactactgccgcaaccccgacgccgacaagggcccctggtgcttcaccaccgaccccagcgtgcgctgggagtactgcaacctgaagaagtgcagcggcaccgaggccagcgtggtggcccccccccccgtggtgctgctgcccgacgtggagacccccagcgaggaggactgcatgttcggcaacggcaagggctaccgcggcaagcgcgccaccaccgtgaccggcaccccctgccaggactgggccgcccaggagccccaccgccacagcatcttcacccccgagaccaacccccgcgccggcctggagaagaactactgccgcaaccccgacggcgacgtgggcggcccctggtgctacaccaccaacccccgcaagctgtacgactactgcgacgtgccccagtgcgccgcccccagcttcgactgcggcaagccccaggtggagcccaagaagtgccccggccgcgtggtgggcggctgcgtggcccacccccacagctggccctggcaggtgagcctgcgcacccgcttcggcatgcacttctgcggcggcaccctgatcagccccgagtgggtgctgaccgccgcccactgcctggagaagagcccccgccccagcagctacaaggtgatcctgggcgcccaccaggaggtgaacctggagccccacgtgcaggagatcgaggtgagccgcctgttcctggagcccacccgcaaggacatcgccctgctgaagctgagcagccccgccgtgatcaccgacaaggtgatccccgcctgcctgcccagccccaactacgtggtggccgaccgcaccgagtgcttcatcaccggctggggcgagacccagggcaccttcggcgccggcctgctgaaggaggcccagctgcccgtgatcgagaacaaggtgtgcaaccgctacgagttcctgaacggccgcgtgcagagcaccgagctgtgcgccggccacctggccggcggcaccgacagctgccagggcgacagcggcggccccctggtgtgcttcgagaaggacaagtacatcctgcagggcgtgaccagctggggcctgggctgcgcccgccccaacaagcccggcgtgtacgtgcgcgtgagccgcttcgtgacctggatcgagggcgtgatgcgcaacaac

SEQ ID NO: 6499 - DNA, 2430 bp, Artificial Sequence
  derived and/or modified sequence
atggagcacaaagaggtggtgctgctgctattgttgtttttgaagagcggacagggagaacctctggatgactacgtcaatactcagggagcctcactattctcagtcacaaagaaacagctgggtgccggatctatcgaggagtgcgccgcaaagtgcgaagaggatgaggaatttacctgtcgtgcattccagtaccattctaaggagcagcagtgtgtaataatggcagagaacagaaagtcttccatcataattaggatgcgggacgttgtattgttcgagaagaaagtctacctgagcgaatgtaagactggcaatgggaaaaactacagaggtaccatgagtaagactaagaacggcattacatgccagaagtggagttctacctctccacataggcctcggtttagtcccgctacgcatccgagtgaaggtttggaagaaaactactgccgcaacccagacaatgatccccagggtccgtggtgttacacaacagatccggaaaagcgctatgactattgcgacattcttgagtgcgaggaggaatgtatgcactgctccggggagaattatgatggtaaaatctccaagaccatgtcaggcctcgagtgtcaggcctgggatagtcagtcacctcatgcacatggctacataccttccaaattccctaacaaaaaccttaagaagaactattgcagaaaccctgatcgagaactccgtccttggtgttttacaactgaccccaacaaaagatgggagttatgtgacattccacgctgcacaactcccccaccctctagtggacctacctaccaatgcctgaaggggaccggcgagaattataggggcaacgtggccgtgaccgtgtcaggccacacttgtcaacactggagtgcacaaaccccacatacgcacaaccggaccccagaaaacttcccttgcaagaacctggatgagaactactgtcggaacccagacggaaaaagggccccctggtgccacaccaccaatagtcaggtgagatgggaatattgcaaaatccccagttgtgactcaagccccgttagtacagagcagctggcaccgactgctccacctgaactgaccccggttgttcaagactgttaccatggagacggccagtcataccgcgggacgtccagcaccaccaccactggcaagaagtgccagtcatggagttccatgaccccacacaggcatcagaagacacctgaaaactaccccaacgccggcctcacaatgaactactgccggaacccagatgctgataaggggccatggtgttttaccaccgaccctagcgtcagatgggagtactgtaacctgaaaaagtgttccgggaccgaggcctcggtagtcgcccccccgcccgtcgtgttgcttccggacgtcgagaccccaagcgaagaagattgtatgttcgggaatggaaagggatatcgaggcaaacgcgctaccaccgtcacaggaacaccatgccaagattgggcagcccaggagccacatcggcatagcatattcacccctgagacaaatcccagggcaggattggagaagaattattgccgaaatcctgatggcgacgtgggcggtccatggtgttatactacaaacccccggaagctctacgattattgcgatgttcctcagtgtgctgcgccttcattcgactgcggcaagccccaggtggagccgaagaagtgccccggccgggttgtcggcgggtgcgtggcacacccccattcatggccgtggcaggtgtcgctgaggacaagattcgggatgcacttctgtggtggaactctcatatcccctgaatgggttctgacagcggcacattgcctcgaaaaaagccctaggccgtctagttacaaagtcattttgggcgcccaccaggaagtgaacctggagcctcacgtgcaggagattgaggtatctaggctgtttctggagccaacacgtaaagatatcgctctgctgaagttgagttcacccgccgtcataaccgataaagtcatccctgcatgtctgccctcccccaattatgtcgtcgccgatcgcacagaatgcttcatcaccggttggggggaaacgcagggcacctttggagcagggcttctcaaagaggcacagctccccgtgattgagaacaaagtgtgtaatcggtatgaatttttaaatgggagagtgcaatctacggagctgtgtgctggccacttggccggaggaaccgattcatgccagggtgattccggaggcccactagtgtgtttcgaaaaggacaaatacatactccaaggggtgactagttggggtctagggtgtgcgaggccaaacaagccaggtgtctacgtacgtgtctcacgcttcgttacatggatcgagggtgtaatgagaaacaac

SEQ ID NO: 6500 - DNA, 2430 bp, Artificial Sequence
  derived and/or modified sequence
atggaacacaaagaagttgtcttgttgttgctcctgtttctgaagtctggccagggagagcctctggatgactatgttaatacacagggtgcgagtttgttcagcgtgactaagaagcagctgggggccggaagtattgaggagtgtgcggctaaatgcgaagaagatgaagagtttacctgccgcgcatttcaataccatagcaaagagcagcaatgcgtcatcatggcggaaaaccgcaagagcagcatcattattcgcatgcgggacgtggtgttgttcgagaagaaagtttatttgagcgagtgcaaaacgggcaacggaaaaaactaccgtggtaccatgagcaaaaccaaaaacggaatcacctgccagaagtggagcagcaccagcccacataggcctcgttttagcccagccacccacccgtccgaaggcctggaagagaattattgccgcaatccagacaacgacccgcaagggccatggtgttataccacagaccctgagaagcgctatgattactgtgacattcttgaatgcgaggaggaatgcatgcattgctcaggcgaaaattacgatggcaagattagcaaaaccatgagtggcctggaatgtcaagcgtgggacagtcaatcccctcatgcccacggttatattccttccaagttcccaaacaaaaacctgaagaagaactattgtcgcaacccggatcgtgagctgcgtccatggtgcttcacaacagacccaaacaaaaggtgggagctgtgtgacatcccacgttgcacaaccccaccgccgtcatcagggccgacctaccaatgtctgaaaggcactggagaaaactatcgcggtaatgtggcagttaccgtcagcggacacacctgtcagcactggtccgcccagacaccgcatactcacaaccgcaccccggaaaacttcccgtgcaagaatctggatgagaactactgcaggaacccggatggcaagcgagcaccttggtgccatacgacgaattcccaggtccgctgggagtactgcaagatcccaagctgtgactctagcccagtgagcacggaacagctggccccaaccgcaccaccagaacttaccccggtcgtgcaagattgttatcatggtgatggtcaaagctaccgcggtactagcagcaccactacaaccggaaagaagtgtcagtcttggagcagcatgaccccgcatcgacaccagaagacccccgagaattaccctaatgcgggtctgacgatgaattattgtaggaacccggacgccgataaaggcccctggtgtttcaccactgatccaagtgtgcgatgggagtattgtaacttaaaaaagtgttctggcaccgaggcgtccgttgttgcccctccgccagtggtgctcctccctgatgtggaaaccccttccgaggaggactgtatgttcggtaacggtaagggttataggggtaagagggccaccaccgtgactggcaccccttgtcaggactgggcagcccaggagcctcaccggcacagcatcttcactccggagaccaaccctcgcgcagggctggaaaagaattattgccgaaaccctgatggcgatgttggcggcccttggtgctatactacgaatccacgcaagttatacgattactgtgatgtgcctcaatgtgccgctcctagtttcgactgcggaaaaccccaggttgaacccaaaaagtgtcctggtcgcgttgtcggcggctgtgtggcacatccgcacagctggccgtggcaagtctccctgcggaccaggtttggtatgcacttctgcgggggtactctcatctcgcctgaatgggttttgaccgccgctcactgtttggaaaaatctccacgcccgtccagctataaagttatactgggtgcccaccaagaggtgaacttggagccacacgttcaggagatcgaagtatccagactgtttctggagcctactcgaaaggatatcgcactgctgaaactgagttctcctgcagttatcacggacaaagtcatccctgcgtgcttaccctctccgaattatgtggtggccgaccgcaccgagtgcttcatcacgggttggggcgaaacccaagggaccttcggcgctggtctcttgaaagaagcacaactgcccgttattgaaaacaaagtttgtaatcgttacgaatttcttaatggacgcgtccaatcaaccgagctgtgcgccgggcacctcgcaggcggtacggacagctgtcaaggcgattccgggggtccgctggtttgtttcgagaaagacaagtacatcctgcagggcgtgaccagctgggggctgggctgtgcgcgccctaataaacctggggtttacgtgcgcgtttcacgcttcgtcacctggatcgagggtgtgatgcgcaataat

SEQ ID NO: 6501 - DNA, 2430 bp, Artificial Sequence
  derived and/or modified sequence
atggaacacaaggaagttgtcctgctgcttctcttgttcttgaagtcagggcagggcgagcccctggacgattatgtaaacacgcagggtgccagcctgttttcggtcactaaaaaacaactgggcgcgggctctattgaagagtgtgctgccaagtgcgaggaagatgaggaatttacttgtcgggcatttcaataccactctaaggagcagcagtgtgtcattatggcagagaatagaaagtcatctattatcatacggatgagggatgtggtcctattcgaaaaaaaagtttacctgtccgagtgcaaaaccggcaatggaaagaattacagaggaacgatgtccaagaccaaaaatggcataacatgccagaagtggagctcaacgagcccgcataggcctcggttttctccagcaacccatccctcagaagggcttgaagagaattactgtcgcaatccagacaacgacccccaagggccttggtgttatacaacagacccagagaagaggtacgactattgcgacatactggaatgcgaggaggagtgcatgcactgtagcggtgaaaattatgatggaaagatctccaagaccatgtccggcctggagtgtcaggcgtgggattctcagagtccacacgcccatgggtatatcccctctaagtttccaaacaagaaccttaagaaaaactattgcaggaatccagatcgagaactgcgtccatggtgcttcactaccgatcctaacaagcgctgggagctctgtgacattcctcgatgtaccactccccctccgagtagtggccctacataccagtgtctcaagggtacgggagagaactacagaggaaacgtggccgttaccgtctcaggccacacctgtcagcattggtcggctcagaccccacacacccacaatagaacccccgagaactttccctgcaaaaacttggatgagaattactgtagaaatccggatggaaaacgcgcgccatggtgtcacacaaccaattctcaggtgcgctgggagtattgcaaaataccatcctgtgactcatcaccagtgtccactgagcagctcgcacccacagcgccccccgaattgaccccagtagtgcaagactgttatcacggcgacggccagagttatcggggcacgagctccactaccaccacaggtaaaaagtgccagagctggtcaagtatgacccctcacaggcaccagaagacacccgagaattaccctaacgcaggcttgactatgaactattgccgtaatccagatgcagacaagggcccctggtgcttcacaacagacccgagcgtccgttgggagtattgcaatcttaagaaatgctccggaacggaggcatccgtggttgcacctccacccgtcgtgttactgcctgacgtggagaccccgtctgaggaggattgcatgtttgggaacggaaaagggtatcggggtaagagagctaccactgtaacgggtacaccttgccaggactgggcggcccaggaacctcatagacatagtatcttcacacctgagactaatccacgtgctgggctggaaaagaattactgcaggaatcctgacggggatgttggcggcccgtggtgttacacgactaatccacggaagctgtatgactactgcgacgtaccacagtgtgccgccccatctttcgactgtgggaaaccacaggtggaaccaaaaaagtgcccaggtcgagttgtcggaggctgtgtagcccaccctcattcgtggccttggcaggtgagcctgcgaacccgcttcggaatgcacttctgcggcgggaccctcataagtcccgaatgggtcctgactgctgcccactgtctcgagaagtctccacggccatctagctataaagttatccttggggcacatcaggaggtgaatcttgaaccccatgtgcaggagatcgaggtgagcagactgtttttggagcctacacgcaaggatatcgctcttctaaaactctcatctcctgcagtgatcacggacaaagttattcccgcatgcctaccatctccaaattacgtggtggcggacagaacggagtgttttattactggttggggagaaactcagggtacctttggggccggactgctgaaggaggcccagctaccagttatagagaacaaggtctgtaacaggtatgagtttctgaacggtcgcgttcagtccactgaattatgcgctgggcacctggcgggtgggaccgattcttgccagggtgactccggcggtcctttagtgtgcttcgagaaagacaagtacatcctacaaggagtgaccagttgggggctgggttgcgctaggccgaataaacctggggtgtatgttcgcgtcagccgattcgttacgtggatcgaaggcgtgatgagaaacaac

SEQ ID NO: 6502 - DNA, 2430 bp, Artificial Sequence
  derived and/or modified sequence
atggaacacaaagaagtggtccttcttctcctcttgtttcttaagtctggtcagggggagccactggatgattacgtaaatacacaaggggcctctttgttttccgtgacgaagaaacagctgggagccgggtcaatcgaggagtgtgccgctaaatgcgaagaagatgaggagttcacttgccgggccttccagtaccactctaaggaacaacaatgcgtgatcatggcggaaaatagaaaatcctccatcatcatccgaatgcgtgatgttgtgctgtttgagaagaaagtatacctgagtgagtgcaagactggcaacggaaagaattacagaggtactatgagcaaaaccaaaaacgggataacttgccagaaatggtcaagtacgagtccccaccgaccacgcttcagcccagctacacaccctagtgagggcctggaggagaattactgccgaaaccccgacaacgacccccagggcccatggtgctacactactgaccccgagaagcgttacgactactgcgacatcctagagtgtgaggaagagtgtatgcattgttctggcgaaaactatgacgggaaaatcagcaagactatgtcgggcctcgaatgccaggcctgggacagccagagtccacacgctcacgggtacattccctctaagtttcccaacaagaaccttaagaaaaattactgccggaaccccgaccgggagcttaggccatggtgtttcactaccgaccccaacaaacgttgggaactgtgtgatatccctcgttgcaccacaccgccaccaagtagtggtccaacctatcaatgcctgaaaggcactggggagaactaccgcggcaacgtggcagtaaccgtaagcgggcatacttgtcagcattggagcgcacagacgccacatacacataatcgcacacccgaaaattttccttgcaagaatctcgacgagaactactgtagaaaccccgatggcaaaagggcgccgtggtgccacactacaaattcccaggtccgttgggaatactgtaaaattccttcttgcgactccagtcccgtgagcacggagcagctggcaccaacagctcctccagaactgacaccagtggttcaggactgctatcatggcgacggtcaatcctataggggaacctctagcacaacaactactggcaaaaagtgtcagtcctggagcagcatgacaccccacagacaccagaagactcctgagaactacccaaatgcaggactgacaatgaattattgcaggaatccagacgccgataagggtccatggtgtttcacaacagatcctagcgttagatgggagtactgtaacctcaaaaaatgctctggaaccgaagctagtgtggtcgcgcctccgcctgtggtacttctgcccgacgtcgaaacccccagcgaggaggactgcatgttcggcaatggtaaaggatacagagggaagcgtgctaccactgttacaggtactccctgccaggattgggcagcccaggaaccgcaccggcactcaatctttactcccgagaccaatccccgtgccggattggagaaaaactattgccgtaacccagacggggacgtcggaggcccttggtgctacactactaaccccaggaaattgtacgattactgcgacgttcctcagtgtgccgctcctagcttcgattgtggcaaaccccaggtagaacctaagaaatgcccaggtcgggtcgtggggggctgcgtggctcatccacactcttggccttggcaggtctcgctgcgcactagatttggcatgcatttctgtggtgggacattgatctcccccgaatgggttctaactgctgcacactgcttagagaagagtccgcgcccctcttcatacaaggttatcctgggggcgcatcaagaggtaaaccttgagccacacgtacaagagatcgaagtctctagactgttcttagagccgacgcgaaaagacattgctttactcaagttatcgtcccccgccgtgatcacagataaggtgataccagcctgcctccccagccccaactatgtggtggcagatcgtacagaatgtttcattactggatggggagagactcagggaaccttcggtgccggcctactgaaggaagcacagctgcccgtgatcgaaaacaaggtttgcaacaggtacgaattcctgaacggaagggtccagagcactgaactgtgtgcaggccatttagccggcgggactgatagttgtcagggagactccggaggacctctcgtgtgttttgagaaggataagtatattctgcagggcgtgacctcctgggggctcggatgcgcccgcccaaacaagccgggagtgtatgtcagggtgtccaggtttgtgacctggatcgaaggggtgatgaggaataat

SEQ ID NO: 6503 - DNA, 2430 bp, Artificial Sequence
  derived and/or modified sequence
atggaacataaggaggtggtgctcttattattgctgttcttaaagagcggccagggcgaacctctggatgactacgtaaacactcagggtgcctccctgttcagcgtgaccaagaagcagcttggagcagggagtatcgaggagtgtgccgccaagtgtgaggaagacgaggaattcacctgccgggcattccaatatcacagtaaggagcagcagtgcgttatcatggctgaaaatagaaaaagcagcataattatccggatgcgagacgtggtcctgttcgagaagaaggtgtatctctctgagtgtaaaaccgggaacggcaagaattatcggggaacgatgtccaaaaccaaaaacggaattacgtgccagaagtggtccagcacaagccctcatcgcccccgatttagcccagcaacacatccctctgagggcctggaggaaaactactgcaggaatccggataacgatccgcaaggaccctggtgttacactactgacccagagaagagatatgactattgtgatatcctagaatgcgaagaggaatgtatgcactgctccggggagaattacgatgggaagatctccaagactatgtccgggttggaatgtcaggcctgggactcacagtctccccatgcacacggttacatcccaagtaagttcccaaataagaaccttaaaaaaaattactgcagaaacccagaccgcgaactgcggccgtggtgttttactactgatcccaacaaaagatgggagctgtgtgacattccccgctgcaccacgcctcctccgagttcgggcccaacttaccagtgcctgaagggcactggagagaactacaggggaaatgtggcggttaccgtcagcggtcatacttgtcagcactggtctgctcagacaccccacactcataataggactcctgaaaattttccatgtaagaatcttgacgagaactattgccgtaatcccgatgggaagcgagccccgtggtgccacacaaccaactcccaagttaggtgggagtactgcaaaatcccctcatgtgacagctccccagtgagcaccgagcagctggccccaaccgccccgccagagttgacacccgtggtccaggactgttaccatggcgacggtcagagctaccgtggcaccagttccacaaccactactgggaagaagtgccaatcgtggtcatccatgacccctcaccgccaccaaaaaacccctgaaaactatccaaacgccgggctgacaatgaactactgtcggaaccctgacgccgacaaaggcccgtggtgcttcacgactgacccgtccgtgaggtgggaatattgtaacctgaaaaagtgcagcggcacagaggcttccgtggtcgcaccccctcctgtggtgctgttgcccgatgtcgagacaccttcagaagaagactgcatgttcgggaatggcaaggggtaccgggggaagagagcgacaaccgtgacggggacaccttgccaggactgggccgctcaggaaccacaccggcactctatctttactcctgagactaaccctcgcgcaggcctggagaagaactactgccgtaatcccgatggcgacgtgggtggcccctggtgctacacaaccaaccctcgtaagctgtacgattattgtgacgtcccacaatgcgcggcgccaagctttgactgcggtaagcctcaggtcgagccgaagaagtgcccagggcgggtcgtgggaggctgtgtggcacatccccactcctggccatggcaagtgagtctgagaacaaggtttggcatgcatttttgcggagggaccttaattagccccgagtgggtgttgacggcagctcactgcctcgagaaatcccccagaccgtcctcgtataaggtgattctgggagcccaccaggaggtgaatctggagccccacgttcaagaaatcgaggtctccagactttttctggaaccaacaagaaaagatatcgcgttactgaaactgtccagcccagcagtaatcaccgacaaggtcattccagcatgtcttccctcacctaattacgtcgtcgcagatcgtacagaatgctttattacaggatggggtgagacccaagggacgttcggcgccggattgctgaaagaagcccagctccctgtgatcgaaaataaggtatgcaataggtatgaattcctcaacggacgagtgcagagtactgaactctgtgctggtcacctggccggaggaactgatagttgtcaaggcgacagtggtgggcctctggtatgcttcgagaaggataagtatatccttcagggcgtgacctcatggggcctgggctgtgctagacctaataaaccaggggtttacgtgagggtgagtaggttcgtgacatggatcgaaggagtaatgcgcaataac

SEQ ID NO: 6504 - DNA, 2430 bp, Artificial Sequence
  derived and/or modified sequence
atggagcacaaagaggtcgtgctactactgctcctgttcttgaaatccggacagggtgagccgttagatgattacgtcaacacccagggggcgtcattatttagcgtgactaagaaacaattgggcgcgggaagcattgaagaatgtgccgccaaatgcgaggaagacgaggagttcacctgccgagcctttcagtaccattcaaaagaacaacaatgcgtgattatggccgagaaccgaaaatcttcaattattatccggatgagggacgtggtactatttgaaaagaaagtgtatctttcagagtgtaagaccggcaatggaaagaactaccgaggtacaatgagcaagacaaaaaacggtatcacctgccagaaatggtctagcactagcccgcataggccacgattttcaccagcgacacacccatccgaaggacttgaggaaaattattgccgcaaccctgacaacgaccctcaaggtccatggtgctatacaactgacccagaaaaaaggtatgactactgtgatatcctcgaatgtgaggaggagtgtatgcattgctcgggcgaaaattacgatgggaagatcagcaaaaccatgagtggacttgagtgtcaggcctgggacagtcagagtccacacgcacatgggtatataccctccaaattcccaaacaagaacttgaaaaaaaactactgccgtaaccccgatagggagctgcgcccgtggtgtttcaccacggatcccaacaagcgatgggagctgtgtgacataccaaggtgcaccacgccaccgccatcctcggggccgacttaccagtgcctcaagggaaccggagaaaactaccgggggaacgtggccgttacagtgtccggacacacttgtcagcactggagcgcacaaactccacatactcataatcgaaccccagagaattttccctgtaaaaatctcgatgaaaactactgccgcaatcccgatggtaaaagagcaccttggtgccacactacgaacagtcaggtgaggtgggagtactgtaaaataccctcttgcgatagcagtcccgtgagcacagagcagctggcacccaccgctccccctgaactgacccctgtggtgcaggattgttaccacggagatggacagtcctaccggggtacttcctctaccactactacagggaaaaagtgtcagtcttggagctctatgaccccacacaggcatcagaaaacgcctgagaattaccccaacgcaggtctcacgatgaattattgcaggaaccccgacgctgacaagggcccatggtgttttactacggatcctagcgtgagatgggagtactgcaatctaaaaaagtgcagtgggactgaggcctctgtagttgcccctcctccagtagtgctgcttccggatgtagaaaccccctcggaggaggactgtatgttcgggaatggcaaaggttaccgcggcaaacgagccactaccgtgacgggaactccctgtcaggactgggccgcgcaggagccacatcgacactccatctttacgcctgaaaccaatccgcgcgcaggcttggagaagaactattgtcgaaatcccgacggagatgtgggcggaccttggtgttatacaacaaaccccaggaaactgtacgactattgcgatgtgccccagtgcgctgccccatccttcgactgtgggaaacctcaagtggaacccaaaaagtgtccaggcagagttgtgggcggttgcgtcgctcacccccatagctggccatggcaggtaagtttgaggaccaggttcggaatgcacttttgcggggggacattgatatcaccagagtgggtgctgactgccgcccactgcctcgagaaatcccctcgacccagtagttacaaagtgattttaggcgcacatcaggaggtgaatctagaacctcatgtgcaggagatcgaggtgtcccgactgtttctagagcctacacgtaaggatatcgcgctgctgaagctctcaagtcccgctgttatcacagacaaggtaatcccagcctgtctgcccagccctaattacgttgtggcggatcggacggagtgcttcatcacaggctggggagaaactcagggaacattcggagcagggctgctgaaagaggcccagttacccgtgattgaaaataaagtgtgcaacagatatgagtttcttaatggcagagtccagtccactgagttatgcgccggccatttggcaggcggcacagactcatgtcaaggcgacagtggtggcccactagtgtgtttcgagaaggacaaatacatcctacaaggcgtaaccagttggggtctaggatgtgcaaggccaaacaaaccgggggtgtatgtccgtgtctctcggttcgtcacatggatagagggagtcatgcgcaacaac

SEQ ID NO: 6505 - DNA, 2430 bp, Artificial Sequence
  derived and/or modified sequence
atggaacataaagaggtggtactgctgctgctgctctttctgaagagcggccagggggaaccattagatgactatgtcaatactcagggcgcatcactctttagcgttactaaaaagcagctgggggctggctcaatcgaggagtgcgccgccaagtgcgaggaggatgaagagttcacctgccgggccttccagtaccattccaaagagcagcagtgcgtgattatggccgaaaatcggaagagttcaattatcattagaatgcgggacgtagtgctgttcgagaagaaagtctatctgtctgaatgcaagacagggaacggcaagaactacagggggactatgtctaagaccaagaatgggattacatgtcagaaatggtccagcactagcccacaccgcccccgattttcacccgccacccatccgtccgaaggcctggaggaaaattattgccggaaccccgacaatgatccccagggcccatggtgctacaccactgaccctgagaagcgatacgactactgcgacatcttggagtgtgaagaggaatgcatgcattgctctggggaaaattacgacgggaaaatcagcaagacaatgtctggactcgaatgccaggcatgggactctcaatctccccacgctcatggatacatcccctctaaattcccaaataaaaacctaaagaaaaattactgtcggaacccagaccgagaactgagaccctggtgtttcactacagatcctaataagaggtgggagctttgcgatatcccgcggtgcactacccctcctcccagttctgggcctacctaccagtgcctgaaaggcactggggagaattatagaggcaatgttgccgtgaccgtgtcaggtcacacttgtcagcactggtcagctcagactccacacactcataacaggacaccagaaaacttcccctgcaagaatctggacgaaaattactgccgcaatcccgatggcaagagggcaccatggtgtcacaccaccaactcacaggtgcggtgggaatactgcaagatcccaagctgcgattcttctccggttagtaccgaacagctggcgcccaccgctccccctgaactgacacccgtcgtgcaggactgctaccacggtgacggacagtcatacaggggcacttccagtacaactacaactggtaaaaagtgtcagtcatggagtagcatgacacctcataggcaccagaagacccccgagaattatcctaacgcaggcctaaccatgaactactgtagaaacccggacgctgacaaaggcccatggtgtttcacgaccgatccaagtgtcaggtgggaatactgtaacttgaaaaaatgtagcggaacagaagcctcagtcgtggcccctccgcctgtggtcctgctccctgatgtggaaaccccttcagaggaagattgtatgttcgggaatgggaaagggtatcggggtaagagagccaccaccgttacggggactccttgccaggactgggctgcgcaggagcctcatagacattcaatattcacccccgagaccaatcctcgggctggactcgagaagaattactgtagaaaccctgatggcgatgttggcggtccttggtgttatacaaccaatccccgtaaattgtacgattattgcgatgtgccccagtgtgcagctccttcatttgactgcggcaaaccccaagttgagcctaaaaaatgtccaggtagggtcgtcggaggatgtgttgcccacccacatagttggccctggcaagtttcgctgagaacgagattcggtatgcacttctgtggaggcaccctgatttcccctgaatgggtgttgactgccgctcactgcctcgaaaaaagcccgcggccaagcagctataaggtgatactgggcgcccaccaggaagtgaacctcgagccacacgtccaggaaattgaagtgagcaggctttttctagaaccaaccagaaaggacatcgctctgctgaaactgtcatcgcctgctgtgatcactgacaaggttattccagcgtgtctgccttcccccaattacgttgtggccgataggaccgagtgcttcatcaccggttggggtgaaacacagggtacattcggagctggattattgaaggaagcccagcttccagtgattgagaacaaggtttgtaatcgctacgagtttctgaatggacgggtgcaaagcaccgagctttgtgccggccacctcgccggtggcactgactcttgccaaggggacagcggaggccccctcgtctgttttgagaaggataagtatatcctccaaggcgtgacatcgtgggggctaggatgtgctaggccaaataagccaggcgtgtatgtaagggtttcaagattcgtcacgtggatcgaaggtgtcatgcgcaataac

SEQ ID NO: 6506 - DNA, 2430 bp, Artificial Sequence
  derived and/or modified sequence
atggagcataaggaagtggttctcttgttactgctgttcctgaaaagtggtcagggcgagccactggatgactacgtcaatacccagggggctagcctgttcagtgtaactaagaaacaattgggggcaggcagcatcgaagaatgcgccgccaagtgcgaggaagatgaggagtttacctgcagggcttttcaataccactctaaggagcagcaatgcgtaatcatggcagagaaccgaaagtcgtccatcataattagaatgcgagacgtggtgctgtttgagaagaaagtctatctcagcgagtgtaaaactggtaacggaaaaaactacaggggcacaatgtcaaaaactaagaatggaattacatgtcagaagtggagctcaaccagtccgcaccgacctagattttctccagccacccatcccagcgagggattggaggaaaattactgtcgtaatcctgacaatgatcctcaggggccatggtgttatacaaccgaccctgagaagcgctatgattactgcgacattctcgaatgtgaggaggaatgtatgcactgtagcggggagaattacgacggaaaaatctctaaaacaatgtccggcctcgagtgtcaggcatgggatagccagtccccacatgcccatggctacattcctagtaaatttccgaacaagaatctcaagaaaaattattgcaggaacccggatcgtgagctcagaccctggtgcttcaccactgatcccaataaacgttgggagctttgtgacatcccccggtgcacaacacccccccccagctctggccctacctatcaatgtcttaagggaaccggagaaaattacagaggaaacgttgcggttactgtatccggacacacgtgccaacattggagtgcccagactccacacactcataaccgcacccctgagaatttcccctgcaagaacttggacgagaattattgtagaaaccctgacggcaaacgggccccatggtgccacacaacaaacagtcaggtgcggtgggaatactgtaagatcccaagctgtgattcttccccagtgtctactgagcaactcgcccccacagcaccacctgagctaaccccagtggtgcaggattgctaccacggcgacggacaatcttacagaggaacatcaagtacaactaccaccggaaagaagtgtcagagctggagtagcatgacaccccaccggcaccagaagacccccgaaaattatcctaacgcaggactaaccatgaattactgccgcaaccccgatgctgacaagggcccgtggtgttttaccaccgaccctagcgtgcgctgggaatattgcaacctgaagaagtgcagtgggacagaagcctctgtcgtggctcctcctccagtggtccttctgccggatgtggaaaccccttctgaagaagattgcatgttcggcaacggcaagggatatagggggaaacgggctactacagtcaccggaacaccttgtcaggactgggctgcccaggaaccccaccggcattccatattcacacctgagacaaatcctcgcgcaggcctggaaaagaattattgccgcaaccctgatggcgatgtgggcggtccatggtgctatactacaaatccccggaagttgtacgactattgtgacgtcccacagtgtgctgcaccatctttcgactgcggtaagccacaagttgagcctaaaaaatgtccaggacgcgttgtgggtggctgtgtggctcaccctcattcctggccttggcaagtgagcctcaggacccggttcggaatgcatttctgcggtgggacattgatctctccggaatgggtgctgactgctgcacactgtctcgagaaaagccccagaccttcctcctacaaggtgatcctgggcgctcatcaagaagttaatctcgagccccacgttcaggagatcgaggtttctcgactattccttgagccgacccggaaggatatcgccctcctcaagctctccagtcccgctgttattacagacaaggtgattcccgcatgcctgccttcacctaactacgtcgtggcagaccgcactgagtgttttatcacaggttggggagaaacccagggcaccttcggggcaggccttctgaaagaggcacagctgccggtgatcgagaacaaagtgtgcaaccgctacgagtttctgaacggcagggttcagagcaccgaactttgcgctgggcacctcgctggaggcactgacagctgccagggggatagcggtgggccgctcgtctgcttcgagaaggacaaatacatcctccagggggtgacgagctggggccttgggtgtgcccggcccaataagccgggagtgtatgtgcgagtaagccgctttgtgacatggatcgagggagtaatgaggaataat

SEQ ID NO: 6507 - DNA, 2430 bp, Artificial Sequence
  derived and/or modified sequence
atggaacacaaggaggtggtgcttctcttgctgctgttcttgaaaagcggacaaggtgagcccctggatgactacgttaacacccaaggcgcctccttgtttagtgtgactaagaaacagctcggagccgggagcatcgaggagtgtgctgcgaaatgcgaggaggatgaagaatttacctgtcgcgctttccagtaccatagtaaggagcagcaatgcgtgatcatggccgaaaataggaaatcttctatcattattaggatgcgggatgtcgtcctctttgaaaagaaagtctatttgagcgagtgtaagaccggaaacgggaaaaattatcgagggacgatgagcaaaaccaagaacgggatcacttgccagaagtggtcctccacctccccgcaccgcccccgcttttctcccgcgacacatccatctgaagggttagaggaaaattattgtcgaaatccggacaatgatccgcagggaccctggtgctacaccactgaccccgagaaacgttacgactattgtgatatccttgagtgtgaggaggaatgtatgcactgcagcggggagaactacgacggtaaaatcagtaagacaatgtctggccttgaatgtcaggcatgggacagtcagagcccacatgcacatggctacatccctagcaagtttccaaataaaaatcttaagaagaattattgccgcaatcctgatagagaactaagaccgtggtgcttcacaacagatcctaataagcgatgggaactatgcgatatacctagatgcaccacgcctcccccctcgtctggaccaacgtatcagtgcctgaaaggcacaggcgagaattatcgcggaaatgttgccgtgaccgttagtggccacacttgccagcattggtccgcccagacaccacacacacacaaccggacacccgagaatttcccttgtaagaaccttgacgagaattattgcaggaatcccgatggaaagcgcgctccatggtgccacaccaccaattcccaggtccggtgggaatattgcaaaattccatcttgcgactcctctcccgttagtaccgagcaattggcccccactgccccacccgaactgacaccagtcgtgcaagattgttatcatggtgatggacaatcatacaggggcactagcagtacaacaactacgggcaagaaatgtcagtcctggtcttctatgacgccgcaccgtcaccagaaaacaccagagaattatcccaacgccgggctcacaatgaattactgccgaaatcctgacgcggacaagggaccctggtgttttaccaccgaccccagcgtccgttgggaatactgcaatctcaaaaaatgcagtggtaccgaagcctccgtggtcgcaccaccaccagtggtgctcctccctgatgtggaaacaccaagcgaggaagactgcatgttcggtaatggcaaaggctataggggcaagcgggccacaaccgtgaccggcacaccctgccaggactgggctgcgcaggaacctcaccgccatagcatttttacacccgagaccaaccctcgggcagggctggaaaagaactactgcaggaatccggatggggatgtcggcggaccatggtgctatacaacaaacccaaggaagctttatgactattgtgacgtcccacagtgtgctgcaccgagcttcgattgtggcaagcctcaagtggagcccaaaaagtgtcctggcagggtcgtgggtggttgcgttgcacacccccattcgtggccgtggcaggtttccctgcggacccgcttcggtatgcacttctgtggcggcacactgatttcccctgagtgggtccttactgccgcacattgtttggagaaatcaccccgcccttcgtcctacaaggttattttgggagctcatcaggaagtcaatctggagccacacgtacaggaaattgaagtcagtcgcttattcctcgagccaacacggaaagatattgcactcctcaagttgtcatcacctgccgtgattacagataaagtaatccctgcatgcctaccgagtcccaactatgtggtggcagatcggaccgaatgctttattacgggatggggagagactcaaggaacctttggggcaggactcctaaaggaggctcagctgcctgtgatcgagaataaggtgtgtaacagatacgaatttctgaacggacgcgtccagagtacagagctctgcgctggccatctggccggtggaacagactcatgccagggggactccggcggacctctggtctgctttgagaaggataaatacattctgcagggcgtgaccagttgggggctgggttgtgcaaggcctaataaacctggggtgtacgtcagggtaagccgcttcgtcacctggatcgaaggtgtcatgagaaataac

SEQ ID NO: 6508 - DNA, 2430 bp, Artificial Sequence
  derived and/or modified sequence
atggaacacaaagaagttgtactgctgctactgttattcctcaaatcaggtcaaggagagccactagacgattatgtaaatacccagggggccagcttgtttagcgtcactaaaaagcagcttggcgctggctccatagaggaatgtgcggctaaatgtgaggaagacgaggagttcacttgccgcgccttccagtaccatagcaaagagcagcagtgcgtgattatggcagaaaaccgcaaatcaagcattataatccggatgcgcgatgtggttctgtttgagaagaaggtttacctatccgagtgtaaaactggtaatggcaagaactaccggggaaccatgagtaaaaccaagaacggcatcacatgccagaaatggtcctctacttctccccaccgaccgaggttctcacctgctactcacccttccgagggacttgaggagaactactgtcgcaatcctgataacgatccacagggtccctggtgttatacaacagaccctgagaagagatacgattactgtgatattctggagtgcgaggaagagtgtatgcattgttccggggagaattacgacggtaaaatctctaaaacaatgtccgggctcgagtgccaggcgtgggacagtcaaagtccacatgctcacggttacatcccctctaagttccctaataagaatctcaagaagaactattgcagaaaccctgatcgggagctgcgaccctggtgtttcaccactgacccgaataagcgctgggaattgtgcgatattccaagatgtaccacgcctccaccatcttctggccccacctaccagtgtctaaagggtactggcgaaaattacagaggcaacgtggcagtcacggtgagtgggcatacctgtcagcattggtctgcccagacacctcatactcacaataggaccccggagaactttccctgcaagaacctcgacgagaattattgcagaaaccctgacggtaagcgcgcaccgtggtgccacacaactaatagtcaggttcgatgggagtactgcaaaatcccctcttgcgatagctctccagtctcaactgagcaattggctcctactgccccacccgagcttactcctgtggtccaggactgttatcatggagacggtcagagctacaggggcacttctagtaccacaacgaccggcaagaagtgtcagtcctggagcagtatgaccccgcacagacaccagaagacgccagagaactatcccaatgctgggctcacaatgaactactgccgcaatcccgatgccgataaaggtccctggtgctttacaaccgatcctagtgtccggtgggaatattgcaatctgaagaagtgctctggaaccgaggcaagcgtcgtagcacctccccccgtggtcctcctgccagacgtggagactccgagcgaagaggactgtatgtttggaaatggcaagggctaccgtggtaagagggcaacgaccgtcactggaacgccctgccaggactgggcagcccaggagccccacaggcatagcattttcactcctgaaactaacccgagagcaggcctcgaaaagaactactgccgaaaccccgatggggacgtgggagggccttggtgttatacaaccaaccccagaaagctatatgactattgcgatgtgcctcagtgcgccgcacctagctttgactgtgggaagccccaggtggagcctaaaaagtgccccggaagagtcgtcggcggctgtgttgcccatccccattcctggccttggcaggttagtctgaggacacggtttggtatgcacttctgcggtggcacccttatttcgcccgaatgggtgctaactgccgcgcactgtctggagaaatctccgcgcccctcaagttataaggtcatccttggagctcaccaggaggtgaacctggaacctcacgtgcaagagatcgaggtcagccggctgtttctggagcctacaagaaaagacatagccttactgaagctttcatcaccagcggtgattaccgataaggtcattccagcgtgcctcccttccccaaattatgttgtggccgatcgtacggagtgcttcattaccggctggggtgagactcaggggacgtttggagccgggctgctcaaggaggcccagcttcctgttatagaaaacaaagtgtgtaatcgttacgaatttctgaacggcagggttcagtccactgaactgtgtgcaggccacctggcaggcggtaccgacagctgtcaaggcgacagcggggggcccctggtgtgcttcgagaaggataaatatatcctacagggtgtgacatcttggggactcggatgtgctagaccaaacaaacctggtgtgtacgtccgagtttcaaggtttgtcacatggatcgagggggtgatgagaaataac

SEQ ID NO: 6509 - DNA, 2430 bp, Artificial Sequence
  derived and/or modified sequence
atggagcacaaagaagtagtcctactgcttctactcttcctgaaatctggccagggagagcctctggacgattacgtcaatactcagggtgcaagcttattttccgtcaccaagaagcagttgggcgctggcagcatagaggagtgtgcggccaaatgcgaggaggatgaagaattcacctgcagggccttccaataccattctaaagaacagcaatgtgtcattatggcagaaaatagaaagtccagcataataatacgcatgagggatgtcgtcttgttcgagaagaaagtgtacttgtctgagtgtaaaaccgggaacggaaaaaactatcgcggcacaatgtctaagactaaaaatgggattacctgccagaagtggtcctcaaccagccctcatcgccctcgcttttcaccagctacccatccttctgagggcttggaggaaaattactgccgaaaccccgacaacgacccccaggggccctggtgctacacaaccgaccctgagaagcgatacgactactgtgacatcctcgaatgcgaagaggagtgcatgcactgctccggtgagaactacgatggcaagatctctaagacaatgtccggactcgaatgtcaggcctgggactcacaatcaccccacgctcacggctatattccaagtaaattccctaacaaaaatctcaagaagaactactgccgaaaccctgatcgggagttgcgcccatggtgtttcaccacggatccaaataaaaggtgggagctgtgcgacattccgcggtgcaccactccacccccctcttccgggcccacatatcaatgcttaaagggaactggggaaaactaccgaggaaacgtggccgtgaccgtaagcggccatacctgccaacactggagcgcccagactcctcacacccataatcgcacgcctgaaaacttcccatgcaagaacttagacgaaaactattgccgcaaccccgacggaaagcgagcaccctggtgtcataccaccaacagtcaggtgcgttgggagtactgtaagatccctagctgtgacagctcaccggtgtccaccgaacagctggctcctaccgcaccacctgagctgaccccagtggttcaggattgttatcatggcgatgggcagagttatcgaggaacttcaagtaccacaaccaccggaaaaaagtgccagagttggtctagcatgacaccccacagacaccagaaaacacccgaaaactatcctaacgccgggctcactatgaattactgcaggaatccggacgccgataaggggccgtggtgtttcacaactgatccgagcgtaaggtgggagtactgcaacctgaaaaagtgctccggtaccgaggcctctgtggtggctccgccccccgttgtactgctgccagacgtcgagactccctcagaagaggattgcatgtttggaaacggcaaaggttaccgcgggaaacgagccacaacagtcactggaactccctgccaggattgggccgcacaagagccacaccggcattccatttttacaccggaaactaaccctcgggccgggctggaaaagaactactgccgcaacccagacggtgacgtgggaggcccctggtgctatacgacaaacccaagaaaactctatgattactgcgatgtaccgcagtgtgctgcccccagctttgactgtggtaaaccccaagtagaacctaagaaatgtcctgggcgggtggtcggaggttgcgttgctcatcctcactcctggccttggcaggtgtcactgagaacccggtttggaatgcatttctgtggagggacgttaataagccctgagtgggtgctgacagcagcccactgtctggagaagtcacccaggcctagctcctacaaggttattctgggcgcacatcaggaagtcaatctggagccacacgtccaggaaattgaggtctctagattgtttttagagccaacccggaaagatatcgccttgcttaaactctcctcccctgccgtgatcactgataaggttatcccagcctgtctgccaagcccaaattatgttgtcgctgacagaaccgaatgctttataaccggttggggtgagacccaggggaccttcggagctggccttttaaaggaagcccagttgcccgtgatcgagaacaaggtgtgtaatcggtatgagttccttaatggacgcgtgcagagtacagagttgtgtgcaggacacttggccgggggcacggacagctgtcaaggtgacagcggcggaccactcgtgtgctttgaaaaggacaaatatatcctgcagggggtcactagctggggcctcgggtgtgctcgacccaataaaccaggcgtgtatgtaagagtgagtaggttcgtcacgtggatcgagggcgtgatgcgaaacaat

SEQ ID NO: 6510 - DNA, 2430 bp, Artificial Sequence
  derived and/or modified sequence
atggagcacaaggaagtggttctgctgctgctcctgtttttgaagtctggccaaggcgaacctctcgatgactatgtaaatacccaaggggccagccttttcagcgtgacaaagaagcagctgggagccggcagcatcgaggaatgtgcagccaagtgtgaagaagacgaggagttcacctgtagggctttccagtatcactccaaagagcaacagtgtgtgataatggccgaaaatcggaaaagttctattattatcaggatgagagatgtcgtcctctttgagaaaaaggtgtatctctccgagtgtaagacagggaacggaaagaactaccgcggaaccatgtccaagaccaaaaacggcatcacttgccagaagtggtcatccaccagtcctcataggccaagattcagccctgcaacacatccgtccgaaggactcgaggagaactactgccggaatccagacaacgatcctcaggggccctggtgctacacaaccgaccccgagaaacggtacgactattgcgatattctcgaatgcgaagaggaatgcatgcactgttcaggagagaactatgacgggaaaattagtaagacaatgtccggacttgagtgccaggcctgggactcccagtcaccgcacgcccacgggtacattccatccaagttccctaacaaaaatctgaagaagaattattgcaggaatccagaccgcgagttgagaccatggtgtttcaccacagatcccaacaagagatgggaactttgcgatataccacgctgcactacaccccctccatcttctgggcccacatatcaatgcctcaaagggactggcgagaactatagagggaatgtggcggtgactgttagcggtcacacttgccagcactggagtgcgcaaacaccacacactcacaatagaacccctgaaaacttcccatgcaagaacctcgacgaaaattattgtcgaaacccagatggcaagagagccccctggtgccacactaccaactctcaggtccggtgggagtattgtaaaataccatcttgtgactcaagtcctgtttctactgaacagttggcccctaccgctcctcctgagctcacccccgtggtgcaggattgttaccacggagatggtcagagttatcgcggcacctcaagtacaactacaacaggcaagaaatgtcaaagctggagctcaatgactccccataggcaccagaagaccccagagaactaccccaacgcgggactgacgatgaattactgcaggaacccagacgctgacaagggcccctggtgctttacaactgacccctctgttcggtgggagtattgcaatctgaaaaagtgttccggcactgaagcctccgttgtggcccctccccccgtggtgctgctgccggacgtcgagacaccgtcagaagaagattgcatgtttggcaacggaaaggggtatcgaggaaagagggccactacagttaccggaacaccttgtcaggattgggccgcacaagagccccatagacactcaattttcacgcccgaaacaaacccgcgcgcaggacttgaaaagaactactgtaggaatcccgatggcgacgtgggcggtccctggtgctacacgacaaatcctcggaagttgtatgactactgcgacgtgcctcagtgtgccgctccttccttcgactgtggaaaacctcaagttgagcccaagaagtgcccaggcagagtcgtcggcgggtgcgtggcacaccctcattcctggccctggcaggtgagccttcggactaggttcgggatgcacttctgcggagggacacttatcagccctgagtgggtgctgaccgctgctcactgtctggaaaagtccccaaggccatccagctacaaggtcatcttgggcgcacaccaagaagtcaacctcgaaccgcacgtgcaggagattgaggtatctcgcctgttcctggagccaacccggaaagatatcgccctgctgaagcttagcagtcctgccgtgattactgacaaagtaatccccgcctgtcttcccagcccaaactacgtggttgctgacaggacagaatgtttcatcaccggatggggcgagactcagggcacattcggcgccggcctgctgaaagaggctcaactccccgtgatcgaaaataaagtgtgtaataggtacgagtttctgaacggccgcgtgcagtccaccgagctctgcgccggtcatcttgcgggcggcacagattcttgccagggcgactcaggcgggcccctggtgtgtttcgaaaaagacaaatacattttgcagggcgtgaccagctgggggttgggatgcgcacggcccaacaaacctggggtgtacgtgcgcgtctctcgctttgtgacatggatcgagggagtgatgagaaataat

SEQ ID NO: 6511 - DNA, 2430 bp, Artificial Sequence
  derived and/or modified sequence
atggagcataaggaagtggtactcctcctccttcttttcttgaagtccggtcagggcgagccactggatgattacgttaacacacagggagcttcactgttcagcgtaaccaagaagcagctgggcgctggatcaattgaggagtgcgccgctaagtgcgaggaagatgaggagttcacttgcagggctttccaatatcatagtaaggagcaacagtgtgtgattatggcggagaatcgcaagagctccatcatcatcagaatgagggacgtcgtactgtttgaaaagaaagtgtacctgtccgagtgtaaaacaggcaatggcaagaactaccgcggaacaatgagcaaaacaaaaaacggtattacatgccaaaaatggtcctctacttctccgcacaggcctaggttctctcctgccacacaccctagcgagggacttgaagagaactactgccgcaaccctgacaatgacccgcagggtccctggtgttacactaccgacccagagaagagatacgactactgtgacatccttgagtgtgaagaggaatgtatgcactgtagcggcgagaattatgacggcaagatctccaagaccatgtccggattggagtgccaagcgtgggactcccaatctccgcacgctcatggttacatcccctcaaagttcccaaacaagaacctcaagaaaaattactgcaggaaccctgacagagaacttaggccctggtgttttactaccgaccccaacaagagatgggagctgtgtgacattccccgctgtacgactcctccaccctcctccggccccacatatcaatgtctcaaaggaactggagaaaactaccgcggcaatgtggcggtcactgtctcaggacacacttgtcagcattggagcgcccagactccacatacgcacaataggacccccgagaactttccttgcaaaaatctggacgagaactactgcagaaaccctgatggaaagagggccccttggtgtcacaccaccaattctcaggtcagatgggaatactgcaagataccgtcctgtgacagcagcccagtcagtaccgaacagcttgcacccacagctccccccgagcttacccccgttgtccaggattgctaccatggtgacggtcagagttaccgcggaacctcttctactactactaccggcaaaaagtgtcagtcctggagctccatgacgccccacagacaccagaaaaccccagaaaactaccctaacgctggactcactatgaactattgtaggaaccctgatgcggacaagggaccatggtgcttcaccaccgatcctagtgtgaggtgggagtattgcaatcttaagaagtgctccggaaccgaggccagcgtggtcgctcccccacctgtcgtcctgttgcccgacgtggaaacgccaagtgaggaggactgcatgtttggaaacggcaaaggttacaggggtaaaagagcaaccacagtcaccggtacaccttgccaggactgggctgctcaggagccgcacagacacagcatctttacgcctgaaacaaaccctagggctggactggaaaagaactactgccgcaacccagacggcgacgtgggtggtccctggtgttatacaaccaaccctcgcaagttgtacgactattgcgacgttcctcagtgtgccgccccaagcttcgactgcggcaagccgcaagtcgaacccaaaaagtgccctggccgcgtagttggcggatgcgtcgcacacccccatagttggccgtggcaagtctccttgagaactagattcggaatgcatttctgtggcggaacacttatctcccctgagtgggtgttgaccgccgctcactgcctcgagaagagccccaggcccagttcctataaggtcattctgggagctcaccaagaagttaatctggagccccatgtgcaggaaattgaggttagtcgcctgtttctcgaacccacacgcaaagacatagctctccttaagctttcctctcctgcagtcatcaccgataaggtaatccccgcctgcctccccagtcctaactacgtggtggctgacaggacagaatgcttcattaccggttggggcgaaacccaaggcacattcggagcgggacttttgaaggaggcccagctcccagtaattgagaacaaggtctgcaataggtacgagttcctgaatggaagagtccagagtacagaactgtgcgccggccaccttgccggcggcactgactcttgtcagggcgattcaggaggccccctcgtctgtttcgaaaaggacaagtatattctgcaaggagtaacgtcctggggacttggatgcgctaggccgaataagcccggtgtgtatgtcagggtctccaggttcgttacttggatcgaaggagtaatgaggaacaac

SEQ ID NO: 6512 - DNA, 2430 bp, Artificial Sequence
  derived and/or modified sequence
atggaacacaaggaagtggtcttgcttcttcttctattcctgaagagcggccagggcgagcccctggatgattatgttaacactcaaggtgcttctctgttttcagtgacaaagaagcagttgggagctggttcaatcgaagaatgcgcagcgaaatgtgaggaagacgaagaatttacctgccgggcttttcaataccattcaaaagaacaacaatgcgtcattatggctgagaacagaaaatcttcaataattatccgcatgagagatgtcgtccttttcgagaaaaaagtgtatctcagcgaatgtaagaccggaaacggcaaaaactaccgcggtaccatgagtaaaactaagaacggtattacttgccagaagtggtcgtctactagcccccacagaccaagattctcgcccgccacccatcctagtgagggactcgaggaaaactattgtaggaacccagataacgatccgcagggcccatggtgttacacaaccgatccagagaaacggtacgattactgcgacatcctggaatgcgaggaggagtgcatgcactgcagtggcgaaaactatgacgggaagatcagcaagacaatgagcgggctggaatgccaggcttgggactctcagagccctcatgcccacggctacattccatcaaagtttcccaacaaaaatctgaaaaagaattactgccgaaaccccgatagagagctgaggccttggtgcttcacgaccgacccaaacaaaaggtgggagctgtgcgatatccccagatgcactacccctcccccttcctctggcccaacctaccagtgtcttaagggtacaggtgagaattataggggcaacgtcgccgtgactgtgtctggccacacctgtcagcattggagtgcccagacaccacacacacataataggaccccggagaactttccttgtaaaaacctggacgagaattattgcagaaacccagatgggaagagagctccatggtgccacactaccaatagccaggttagatgggaatattgcaagatcccatcatgcgatagtagccctgtcagcacagagcagcttgctcccaccgctccacctgaacttactcctgtcgtccaagattgctatcacggcgacggccagagctatcgcggcacctcttctaccaccaccacaggaaagaaatgtcagagttggtcttccatgacaccccacagacaccagaaaacgcctgagaactacccaaacgccggactaacaatgaactattgtaggaaccctgacgctgacaaaggcccttggtgctttaccacggatccaagcgttcggtgggagtattgcaacctcaaaaaatgtagtggaaccgaagctagcgtcgttgccccaccaccggtcgtgcttctgcccgatgtggaaacccctagcgaggaagattgcatgttcggcaatgggaagggctatcggggcaaaagggccaccacagttacaggaacgccatgccaggactgggccgctcaggagccacaccgacacagcatttttactccagagacaaatcctagagctggtctggagaaaaattactgtaggaacccagatggagatgtgggaggaccctggtgctacactaccaatcccagaaagctgtacgattactgcgacgtcccgcagtgcgccgctccaagctttgactgcggaaaaccacaggtcgagcccaaaaagtgccccggccgagtcgtaggcgggtgcgttgctcaccctcacagctggccgtggcaggttagtctgaggacacgattcggcatgcacttctgtggaggaactctgatctctcctgagtgggtgctgactgccgcccactgcctcgaaaagagcccacgaccaagttcttataaggtgatcttgggcgcccaccaagaagtaaacctcgagcctcacgttcaagaaatcgaggtgtcccggttgttcctggaacccacccggaaggatatagccttgcttaagctctcttcccctgcggtgatcacagataaggtgatccctgcatgtttgccttctcccaattatgtagtggcagataggactgaatgttttattacaggctggggcgagactcagggaacatttggagctgggctcctgaaggaggctcagctgccagtgattgaaaataaggtctgtaacaggtacgaatttctgaatgggcgggtgcagagtaccgagctctgtgcagggcatttggcagggggaaccgactcctgccagggggatagtggaggacctctcgtctgctttgagaaggataagtatatccttcagggtgtaacatcttggggcctgggatgtgctcgtccaaacaagcccggcgtttacgtcagagtgtccaggtttgtaacctggattgaaggcgtaatgaggaacaac

SEQ ID NO: 6513 - DNA, 2430 bp, Artificial Sequence
  derived and/or modified sequence
atggagcataaggaggtcgtgctactgctgctcctctttctcaaaagtggtcagggtgaacctttggacgactacgtgaacactcagggggctagcttattttcggttactaaaaagcagctcggcgccggaagcatagaagaatgcgctgccaaatgcgaggaggatgaggagttcacatgcagggcttttcagtaccattcgaaagagcagcagtgtgtcattatggctgaaaatcgcaagagcagcattatcataaggatgcgggatgtcgtgctgttcgaaaagaaagtgtatttgtcggagtgcaaaacaggcaatggaaagaactacagagggacaatgtccaagacaaaaaatggaatcacgtgccaaaagtggagttctacatcgccccaccggccccggttttcacccgccacccacccaagcgaggggctggaggaaaattattgcagaaatccggacaatgatccccagggtccctggtgctacaccacagaccccgagaagcgctacgactattgcgacattcttgagtgtgaagaggaatgtatgcattgttctggcgaaaattacgacgggaagatcagcaagacgatgtccggtctcgaatgccaggcgtgggactcccagtctccacacgcacacggatacattccctctaagttccctaataaaaacttaaagaagaattactgccggaacccagatcgggaattaaggccgtggtgcttcactactgatcccaacaaacgatgggagctatgcgatatcccacgctgtactacccctccacctagttctggccccacttaccaatgtctgaaaggcactggagaaaactatagaggaaacgtggcagtcacagtgtccgggcacacttgccagcattggagtgctcagaccccccatacacacaacaggacgcctgagaattttccgtgcaagaatctggacgaaaattactgcagaaaccccgacggaaagcgggcaccatggtgccatacaacaaacagtcaagtccggtgggagtattgtaagattcctagctgcgactccagccccgtttccacggaacagcttgcacctactgctccgccagagctgacccccgtggtgcaggattgttaccacggtgacggccaatcataccgcggcactagctccacaaccaccaccgggaagaagtgccagagctggtcttcaatgaccccacaccgccatcagaagacgcctgaaaattaccccaatgctggcttgaccatgaattactgccgcaaccctgatgcggataagggaccttggtgttttactaccgaccctagcgtgagatgggagtattgcaacctgaaaaagtgtagcgggactgaggcttccgtggtcgcccctcctcctgtggtcctgctgccagacgtggagaccccctcagaggaggattgtatgtttggaaatggcaaaggctataggggaaagagggcaactaccgtgacaggaacaccttgccaagattgggctgcccaagagccgcatagacactccattttcacacccgagactaaccctagggctggcttggaaaagaattactgcagaaacccagacggcgatgttggcggaccttggtgctacacaactaatccaaggaagctgtatgactattgcgacgtgccccagtgtgccgctccctctttcgattgcggaaaaccccaggtggaacccaagaaatgtcctggtcgggtggttggcgggtgcgtggctcacccacactcttggccttggcaggtctcattgaggacacgcttcggaatgcatttctgcggcggaaccctgatcagtcccgaatgggtgctgacggcagcccattgtcttgagaaatccccaaggccatcatcgtataaagtgatactgggcgcccatcaggaggtaaaccttgaaccacacgtgcaggagattgaggtgagccgactgttcctagagcccaccaggaaggacatagccctcctgaagctgtcctctccagcggtgatcaccgataaagtaatccctgcttgccttccgtctccaaattacgtggtagctgacaggaccgaatgttttatcaccgggtggggcgagacgcagggaacgtttggagcagggctgctgaaggaggctcagctgcccgttatcgaaaacaaagtgtgcaaccggtatgaattcctgaatggaagagtccagtcaaccgagttgtgcgccggtcacctggccgggggaacagactcttgccaaggcgattccggtgggcccttggtgtgctttgagaaagacaagtacattcttcagggagtgacgtcttggggactgggatgtgctaggcccaacaaacctggagtctatgtgagggtctctagattcgtgacatggatcgaaggcgtcatgcgaaataat

SEQ ID NO: 6514 - DNA, 2430 bp, Artificial Sequence
  derived and/or modified sequence
atggagcacaaggaagtggtcctcctgctgctacttttcttaaagtctgggcagggtgagcccctagatgactacgtgaacacacagggcgcatcgctgttctctgtcaccaagaagcagctgggcgccggctccattgaagaatgcgctgcaaagtgtgaagaagacgaggagtttacttgtagagcttttcaataccactccaaggagcagcagtgtgttatcatggctgagaatagaaaatcttccataataattcggatgagagacgttgtgttgtttgagaagaaggtgtacctaagcgagtgcaagacaggcaatgggaaaaactacaggggcacaatgagtaagacaaagaacggcattacttgtcagaagtggagctctacgagcccacacagaccgcgattttcccctgcaacgcatccatccgagggcttagaggagaactattgcaggaaccccgacaacgacccgcaaggcccctggtgttacactactgatccagaaaaacgctatgattattgtgatatccttgaatgcgaagaggaatgcatgcactgctcaggggagaactatgacggaaagatctccaagactatgtctggcctggagtgccaggcttgggattcccaatcaccacacgcgcatggatacattccttctaaattcccgaacaagaacctgaaaaagaactactgcagaaatcctgaccgtgagctccgtccctggtgcttcactacagatcctaataaacgctgggaactttgcgacatcccacgctgcaccaccccgcccccttcaagcggacccacctaccaatgcctgaagggcacaggagagaattatagaggtaatgtcgccgtgacggtctccggccacacgtgccagcattggagtgcccagactcctcacacccataataggaccccagaaaacttcccctgtaagaatctggacgagaactactgccggaaccccgatgggaagcgagccccctggtgtcacacgacaaattcccaggttagatgggagtactgtaagatcccaagctgcgactcctcaccagtcagtaccgagcagcttgctccgactgcaccacccgaactgactcccgtagtgcaggactgctatcacggggacggccaatcttacagagggacctccagcactaccactaccggcaagaagtgccagtcatggagtagtatgactccccatagacaccagaaaacccctgagaactatccgaatgcgggactgacaatgaattactgcaggaaccctgacgctgacaaggggccttggtgcttcacaacagacccaagtgtgcgttgggaatattgcaatcttaagaaatgttctggcacagaagcctcggttgtggcaccacctcccgtggtgctccttcctgatgtggaaaccccgtctgaggaggattgtatgttcgggaacggcaagggctatagaggcaaacgggccacaacagtcacagggactccttgtcaggactgggccgcacaggaaccacatcggcattcaatcttcacacccgagaccaaccctcgtgccggactggagaaaaattactgtcggaaccccgatggggacgttggcggcccatggtgctacactaccaacccccggaagctatatgactactgtgacgtgccccagtgtgcagctccatccttcgactgcggtaaaccccaggtggaaccaaaaaaatgtccagggcgcgttgtcggaggatgtgtggctcaccctcattcatggccttggcaggtcagtctgaggacccgattcggaatgcatttctgcggcggcaccttaatttcacccgagtgggtcctgaccgccgcacactgcctcgagaaaagtccgcggccctctagttacaaagttatcctgggggcgcaccaagaggtgaatttggagccccatgtacaggagatcgaggtaagccgactgtttctagagcccacgcggaaagatatcgccctattgaagttgtccagtcccgcggtcattaccgacaaagtgattcccgcctgtctgccgagccccaactatgttgtcgcagatcggaccgagtgcttcatcaccggctggggcgagacacagggcacatttggagctgggttgctgaaggaagcccaactacccgtgattgagaacaaggtatgcaaccgatacgagttcttgaatggcagggtgcagagcaccgaactgtgcgctggacacctggctgggggtaccgactcttgccaaggtgatagtggtggccccttggtctgtttcgagaaagataagtacatcctccagggggtaacctcgtgggggctcggatgtgcacgtcctaataaacccggggtgtacgtgagagtctcaaggtttgtaacatggatcgaaggcgttatgaggaacaac

SEQ ID NO: 6515 - DNA, 2430 bp, Artificial Sequence
  derived and/or modified sequence
atggagcacaaggaggtggtgctgctcctcctgctgttcctgaagtccggccagggagagccgctggacgattacgtcaatacccagggcgcctcccttttttccgtcacgaagaagcaactgggagccggaagcatcgaagagtgcgcggccaagtgtgaggaggatgaggagttcacctgccgtgccttccagtatcattcgaaggagcagcagtgtgtgattatggccgagaatcggaaatctagcattattataagaatgcgagacgtcgtgctgtttgaaaagaaggtatatttgagcgaatgcaagacgggcaatggcaaaaattaccgaggcacgatgtcgaagacgaaaaatggtattacttgccagaaatggagtagtacgagtccccacagaccgcgtttctcgcctgcaacccatccctcagaagggttggaggagaattactgccgcaacccagataatgacccccagggcccttggtgctacacgactgatccagaaaagcggtacgactattgcgatatcctggagtgcgaggaagagtgcatgcattgctcgggcgaaaactatgacggcaagatctcgaagacgatgtccggtctagagtgtcaagcatgggacagccagagcccgcacgcccacggatacattcccagcaagtttcctaacaaaaacctaaagaagaactactgccgcaacccggatcgagagcttagaccgtggtgttttaccactgatcccaacaagcgctgggaactctgcgacattccacgatgcaccacgccaccaccaagcagcggccctacctaccagtgtctcaagggaacaggtgagaactaccgtggcaatgtggccgtgaccgtgtccggccacacgtgccagcactggtccgcccagacgccccacacgcacaacagaacgcccgagaacttcccctgtaagaatttggacgagaattattgccgcaaccccgatggaaagcgcgcgccctggtgtcacacgactaatagtcaggtcagatgggagtattgcaagataccgtcgtgcgattcctccccggtgtccacggaacagctggccccaacagctcccccagagctgactcccgtcgtgcaggattgctaccacggcgatggccaatcctaccgcggcacgtcttccacaacgacgaccggaaagaaatgccagtcctggagctccatgacaccgcaccgccatcagaagaccccggagaactacccaaatgccggcctgacaatgaattattgccgcaatccggatgccgataagggcccatggtgcttcactactgatccatcggtgcgctgggagtactgcaacctgaagaagtgcagcggcaccgaggcgtctgtggttgctcccccgcccgtcgtactcctgcctgacgtagaaacccccagtgaagaggactgcatgttcggtaacggcaaagggtaccggggcaaaagggccaccaccgtgaccgggaccccatgccaggattgggctgcacaggagccccacaggcactcaatatttacccctgagaccaatccgcgcgctggactggagaaaaactactgtcgtaaccccgacggtgatgtaggtggaccctggtgttacacgaccaacccgcgcaagctgtatgattactgcgacgtgccccagtgcgccgctccctcgttcgactgcggaaaaccccaggtggaaccaaagaagtgtcccggccgggtggtaggcggatgtgtggcccacccccattcctggccatggcaggtaagcctgcgaacccgattcgggatgcatttctgcggcggaacactgatatcccccgaatgggtgctgacagctgcacactgccttgagaagtctccccgtccctccagctacaaagtgattctgggtgcacaccaggaggttaacctggaaccacacgtgcaagagatcgaggtgtcgcgattgtttcttgaacctacgaggaaggacattgctctgcttaagctgagttcgcccgctgttatcactgacaaagttattcctgcctgtctgccatcaccgaattacgtagtggcagatcgtacggagtgcttcatcactggctggggggaaacgcaaggaacatttggggcaggcctgttgaaggaggcccaactgccggtcatagagaacaaggtgtgtaatcgatacgagttcctgaatggaagagtgcagagtactgagctctgcgcaggccatctggctggaggcacagattcctgtcagggtgatagtggtggacccctggtatgcttcgaaaaggataagtacattctgcagggcgtcacgtcctggggtttggggtgcgcgcggcccaacaagcccggagtgtacgtgcgcgtgtcccgcttcgtgacatggatagaaggcgttatgcgcaacaac

SEQ ID NO: 6516 - DNA, 2430 bp, Artificial Sequence
  derived and/or modified sequence
atggaacacaaggaggttgtactgctcttgctcctatttctgaagagtgggcagggtgagccccttgatgactatgtaaacacgcagggtgccagtctgttcagcgtgacaaagaaacaacttggtgctgggtctatcgaagaatgcgccgccaagtgtgaagaggacgaggaattcacgtgcagggctttccagtatcatagtaaggagcagcagtgtgtgataatggccgagaatcggaaaagcagcattatcattcgcatgcgcgacgttgtgctgttcgagaagaaagtgtatctatccgaatgtaagaccgggaacggcaaaaattatagaggaacaatgtccaaaaccaagaacggaatcacgtgccagaagtggtcgtcaaccagcccccatcggcctcgtttttccccggctacccatccgtctgaagggttggaggagaactattgccgaaatcctgacaatgatcctcaaggcccctggtgttacactacagacccagagaaacgttacgactactgcgatatcctggagtgcgaggaggagtgcatgcactgttcaggggaaaactacgacggcaagatctcaaagaccatgagcggcctggaatgccaagcctgggactcacagagtccacacgcccacggatacatcccttctaagtttcctaacaagaacctcaagaagaattattgcagaaatccagaccgggaattgaggccctggtgctttactacagaccccaataagcgctgggaactgtgcgacatcccgcggtgtacaaccccaccacctagtagcggtccaacataccagtgtcttaaaggaaccggggaaaactatcggggcaatgtggctgtcacagtttcaggccacacttgtcagcactggagcgcccagactcctcacacacacaacagaacacctgagaacttcccatgcaagaatctcgacgagaattactgtagaaatcccgacggaaagcgtgccccttggtgccacaccacgaacagccaagtgcgttgggaatattgcaaaattccttcctgcgatagcagtcctgtcagcacggaacaacttgcacccaccgctcctccagagttaacgccagttgtccaggactgctatcatggggacggtcaatcttaccgaggcacaagctccaccacaaccaccgggaagaaatgtcagagctggagctctatgaccccccatcggcaccagaagacacctgagaactacccaaacgctggactaacaatgaattattgccgaaaccccgacgcggacaagggcccttggtgcttcactaccgaccctagcgtgaggtgggagtattgtaatctaaagaagtgcagcggcactgaggcttcagtcgtggccccgcccccagttgttctactgcctgacgtggagacaccgtcggaggaggattgcatgtttggaaatggcaaaggatataggggcaagagggccacaacagtgactggcacaccctgtcaggactgggcagcccaggagccacaccgccactccatttttactccagagacaaatccccgggcaggtctagagaaaaactattgccggaatcctgacggtgatgttggcggtccgtggtgctacacaactaatccaaggaaactatatgattactgcgatgtaccccagtgcgcagcaccaagttttgactgcggtaagccccaggttgagccaaagaaatgccctgggcgggtagtgggtggatgtgtcgcccatcctcattcgtggccatggcaggttagcctgaggacaagattcggcatgcacttctgtggcggaaccctgatctctcccgagtgggtactgaccgcggcacattgcctggaaaagtccccgcgcccttcctcctacaaggtgatcctcggcgctcaccaagaagtgaatcttgagcctcacgtgcaagagattgaggtcagtcggctctttcttgagcccacccgcaaagatatcgctctgctgaagttgagttctcctgctgttataaccgataaagttatcccagcatgcctgccctcacccaactatgtggtggcagatcgcacagagtgcttcattaccggttggggggagacccagggaactttcggagccggcctcctaaaagaggcacagctccccgtgatcgaaaataaagtgtgtaaccggtatgagttccttaatggaagggtacagtccaccgaactgtgcgccggccatttggctgggggaactgattcatgccagggcgactcaggaggaccactggtttgtttcgagaaggataaatatattctgcaaggcgtgactagctggggtctgggttgtgcgcgtcccaacaaaccaggagtttatgttagggtatcccggttcgtgacatggatcgagggtgtgatgcgcaacaat

SEQ ID NO: 6517 - DNA, 2430 bp, Artificial Sequence
  derived and/or modified sequence
atggaacataaggaggtagtgcttctcctgctgctgtttctcaagtccggacagggtgagccactggatgactatgtgaatacacagggcgcctcattgtttagcgttaccaagaaacaattgggagcaggttccatcgaggagtgtgctgcaaagtgtgaagaggatgaggagttcacctgtagggctttccaataccacagtaaggagcagcagtgcgtaatcatggctgagaataggaagtcatccatcattatccgtatgagagatgtggtcctctttgagaagaaggtgtacttgtccgaatgcaagaccggaaacggcaagaactataggggcactatgtcaaaaaccaagaatggaatcacatgccagaaatggtcctctactagtccacatagacctcgcttctcacctgcaacccatccatcagagggtctggaagagaattactgtaggaaccccgataacgatccccaaggcccttggtgttatactaccgatcccgaaaagaggtacgactactgcgacatcctggaatgtgaggaggagtgcatgcactgtagtggtgagaattatgatggcaagatctctaagacaatgtctggcttggaatgtcaagcctgggacagccaatcacctcacgctcatggatacattccctctaagtttcctaataagaatttgaaaaaaaattattgtcgtaatcctgatcgtgagctgcgtccctggtgtttcactacagaccctaataagcgttgggaactgtgcgacatcccccgttgcacaacccctcctccatccagtggtccaacataccagtgtctcaagggaacaggcgaaaactaccgcggaaacgttgcagtgaccgtgagcggccacacatgccagcactggagcgctcagacacctcacacacacaacagaacccccgagaacttcccctgcaagaacttggatgaaaattattgcagaaatccagatggaaagcgcgctccatggtgccacaccactaattcacaggtccgttgggaatactgcaagatcccatcatgcgactcctctccagtctctacagagcaactggcacctaccgcaccaccagaactcacacccgtggttcaagactgctaccatggagatggacaaagttacaggggtacctcatccacaactactaccggtaaaaaatgccagtcttggtcttccatgaccccccacagacaccagaagacccccgaaaactatcccaatgccggtctcacaatgaactactgcaggaaccccgatgctgataaaggtccatggtgcttcaccacagatcccagtgttaggtgggagtactgtaacctcaagaaatgctccggtacagaagcttctgtcgtcgcacctccccccgtggtgctgctccccgacgttgaaactcctagcgaagaggactgtatgttcggtaacggcaagggctacaggggaaaacgtgctaccactgttaccggaaccccatgtcaggattgggcagcccaggaaccacatcgtcactcaatcttcacccccgagacaaacccacgtgctggactcgaaaagaactattgtaggaatcctgatggagacgtcggaggcccatggtgttacaccaccaacccccgcaaactctacgactactgcgatgtcccacagtgtgcagctccctctttcgactgtggtaagccccaggtagagcccaagaaatgccccggcagggtcgtcggtggttgcgtggctcaccctcactcctggccttggcaggtttccctgcgtacccgctttggcatgcacttttgtggtggtactttgatctctcccgaatgggtcctgaccgctgcccattgcctggagaagtccccacgtccctcttcctacaaagtaatactgggagcccaccaggaagtgaatcttgaaccacacgtgcaagagatagaggtgagcaggcttttcctggagcccactagaaaggacattgctctcctcaagttgtcttctcctgctgttatcactgataaagtaattcctgcctgtctccccagccctaactacgtggtggcagataggacagaatgctttatcacaggatggggcgagacacaaggaactttcggcgccggcttgctgaaggaggcccagctgcccgtaatcgaaaataaagtgtgcaaccgttacgagttcctcaacggtagagtgcagtctaccgaattgtgtgcaggccatctcgctggaggtactgattcctgccagggcgattctggaggtcctctcgtgtgcttcgagaaagacaagtacatcctccaaggtgtaacctcttggggccttggatgtgccaggcccaataagcctggagtgtatgtcagggtatctcgcttcgtgacttggatcgaaggcgtcatgcgtaataac

SEQ ID NO: 6518 - DNA, 2430 bp, Artificial Sequence
  derived and/or modified sequence
atggaacataaagaggttgtgctgctgctgcttctttttctgaaatccggccaaggggaaccactcgacgactatgttaacacccaaggcgcctccctttttagtgtgacgaagaaacagctgggggcaggatctatagaggagtgtgctgccaaatgtgaagaagatgaagagtttacttgtcgtgccttccaataccacagcaaggaacagcagtgcgtgattatggccgaaaacagaaaatctagtataatcattcgtatgagggacgtggtgctattcgagaagaaagtctacctgtctgagtgtaaaactgggaatggcaagaattaccgaggcactatgtccaaaacaaaaaatggcataacctgccaaaagtggagctccacttctcctcatcgtcccagatttagtcccgcaactcacccttcagaaggccttgaggaaaactactgtcgaaaccccgataatgaccctcaggggccttggtgctacaccacagacccggaaaaacgttacgactattgtgacatcctggaatgcgaagaagagtgcatgcactgctcaggggagaactacgacggtaaaataagtaagactatgagtggcttagaatgtcaggcttgggattcccagtccccccatgctcacgggtacataccttctaagtttccgaataaaaaccttaaaaagaattactgccgcaatcctgatcgagaacttaggccttggtgtttcactaccgatcctaataaacgctgggagctgtgcgacatcccaagatgtaccacacctccccctagctctgggccaacttatcagtgcttgaagggcactggcgagaactacaggggcaacgtcgccgtaaccgtgtctggccatacttgccagcactggtcagctcagacccctcatacacataaccgcacacctgagaactttccttgtaaaaatctcgacgagaattattgccgcaacccagacgggaagcgggcaccctggtgtcataccaccaactcacaggttaggtgggagtactgtaagatcccatcatgtgactcatcccctgtaagtacagagcaactggctcctaccgctcccccggagttgactccagtggtccaggattgctatcatggtgacggtcagtcatacagaggtacgtcatccactaccactacaggtaaaaaatgccagagttggtcctccatgaccccacatcgccaccaaaaaactcccgagaactaccccaacgctggactcacaatgaactactgccgcaaccccgatgccgacaaaggcccatggtgctttacaaccgacccctcggtcaggtgggagtattgcaatctgaagaaatgttctgggaccgaggctagtgtggttgcgcccccccctgtcgtgctgctacctgacgtggaaaccccttcagaggaggattgtatgtttggaaacgggaaggggtaccggggcaaaagggcaaccacagtaacggggaccccttgtcaagattgggcagcacaggaacctcatagacatagcatctttacccctgaaaccaatccccgcgctgggctggaaaaaaattattgccgcaacccagacggcgatgtcggaggcccttggtgctataccaccaatccccggaaattatacgactattgcgacgtgcctcaatgtgcagcaccatcttttgattgtggaaagccgcaggtggaaccaaagaaatgcccgggacgagtagtgggtgggtgtgttgcacatccgcattcttggccctggcaggtaagcttgagaacacgctttgggatgcatttctgcggcggcaccctgatttcaccggagtgggtcctgactgcagcgcactgcctggaaaaatcgccgcggccttccagttataaagtcattctgggtgcacatcaggaagtgaacctggaaccgcacgtgcaggaaatcgaagtcagcagactattcctcgaacctaccaggaaggatatcgcactgctcaagttgtccagtccggccgtgatcacagacaaagtgatccccgcttgtctgccatcacctaactacgttgtcgcagaccgcaccgagtgtttcatcacaggatggggagagacccagggaacttttggtgctggattactcaaagaggcacagctgccagtcattgaaaacaaggtgtgtaaccgatacgaattcttgaatggaagagtccagtctacagaattatgcgccgggcatttggctgggggaacggactcttgccagggggatagtggcggcccactagtgtgctttgagaaggacaaatacatcctgcagggtgtgacctcctggggtctcggctgcgcccggcccaacaagcctggcgtgtacgtgagggtttctcggttcgttacatggatcgagggtgtgatgagaaataac

SEQ ID NO: 6519 - DNA, 2430 bp, Artificial Sequence
  derived and/or modified sequence
atggagcacaaagaagtcgtgctgctcctcctcctctttctcaaatccgggcagggtgagcccctggacgactacgttaatacccagggcgccagcctctttagtgttacgaaaaaacagcttggagccgggagcattgaagaatgtgcggccaagtgtgaggaagatgaagagttcacatgtcgggccttccagtaccactctaaggaacagcagtgcgttattatggccgagaatcgcaagtcgagtatcatcatccgcatgcgagacgtggtgttgttcgagaagaaggtgtacctgtccgaatgcaaaactggcaatggaaaaaattatcggggaactatgagcaagactaagaacggaatcacctgccagaaatggtcatctacctctccccacagacctcgattctccccagccacccacccaagcgaggggctcgaagagaattactgtaggaaccccgacaatgacccacagggcccgtggtgttataccactgaccctgagaagcggtatgactactgtgatatcctcgagtgtgaggaggagtgtatgcattgcagcggagaaaactatgatggaaaaatctctaagacaatgtctggcctcgaatgtcaagcctgggattcacaaagtcctcatgcgcacggttacatcccttccaaattcccaaataaaaacctcaaaaaaaattattgtcgtaatcctgatagggaattaaggccatggtgtttcacaaccgacccaaacaagcggtgggaactgtgtgacatcccccggtgcacaactccccccccatctagcggccccacctatcagtgcctgaagggaacaggcgaaaactaccggggtaacgtggccgtaactgtgagcgggcatacgtgccagcattggagcgcgcagacaccgcacacgcataacaggacccccgagaatttcccatgtaaaaacttggatgagaattattgtaggaacccagacggcaagagggctccctggtgtcacaccacaaattctcaggtgcggtgggagtattgcaaaattcccagctgtgacagctctcccgtctcaactgagcagctagcaccgacagctcccccagagctaactccagtagtacaggattgctaccacggcgacggccagagctataggggtacctcatcaaccactactaccggcaaaaagtgtcaatcctggagctctatgaccccccatcggcatcagaagaccccagagaactaccctaacgccgggctcaccatgaattattgtcgcaatcccgacgccgacaaaggcccttggtgcttcacaacagaccccagcgtcaggtgggagtactgcaacctgaaaaaatgctctggcacagaagcatctgttgttgcaccccccccggtagtacttctcccagacgtggagactccttctgaggaggactgcatgttcggaaatggtaagggataccgaggcaagagagctaccaccgtgactggcacaccctgccaggactgggcagctcaggagccccacaggcatagtattttcacacccgagacaaacccaagggccgggctggaaaagaattactgtcggaatcctgacggggacgtcggcgggccatggtgttacacaactaatcctcggaagctttatgactattgcgacgtcccacaatgtgcagccccatccttcgactgtggcaagccccaggtagaaccgaagaaatgtcctggacgagtggtaggcggctgtgttgcccacccccatagctggccctggcaggtgagtctaagaaccagatttggcatgcacttttgtggcggcacactaatctccccagagtgggtgctcactgccgcccattgcctcgaaaaaagccccaggccctccagctacaaagtgatcttgggggcacatcaggaagtgaatttggaacctcacgtccaggagatcgaagtgtcaagactgtttctcgagccgaccaggaaagatattgcactcctcaaactgtccagcccggctgtcatcacagacaaggttattcccgcatgtcttccaagtcccaattatgtagtagcagacaggaccgaatgcttcataactggctggggtgagactcagggaactttcggagcgggcctccttaaggaggcccagctcccagttatagagaataaggtatgtaatcgctatgaatttttgaatggtcgggtgcagtctacagaactttgtgcaggacacctcgcgggcggaacagactcttgccagggtgactcgggcgggccccttgtttgtttcgaaaaggacaagtatatccttcaaggcgtgacctcctggggattgggttgtgctcggccgaataagcccggagtgtatgttcgggtctcccggttcgtgacatggattgaaggggtcatgagaaacaat

SEQ ID NO: 6520 - DNA, 2430 bp, Artificial Sequence
  derived and/or modified sequence
atggaacacaaagaggtggtactactcctgctgctattcctcaaatctgggcaaggtgagccgctggatgactacgttaacactcaaggagctagcctgttttccgtgacaaagaaacagctgggcgccggatctattgaggagtgcgcagccaagtgtgaagaagatgaggagttcacctgtagagcattccagtaccattccaaagaacaacagtgtgttattatggcagagaaccgaaagtcgtcaatcattattagaatgcgtgacgtagtcctgttcgaaaaaaaggtatacttaagcgaatgcaagacggggaacgggaagaactatcgaggcactatgtccaagaccaaaaatggtattacatgccagaaatggagttctacctctccccataggcctcgtttttctcccgctacccacccttcagaaggattggaggagaactattgcagaaacccagataatgacccccagggaccttggtgttacacaacagacccagagaagaggtatgattactgcgacatcctcgaatgcgaagaggaatgcatgcactgctccggcgagaattacgacggcaagatttctaagaccatgtcaggattggagtgtcaggcgtgggactctcagagtccgcacgctcatggatatatcccttctaaattcccgaacaagaacctcaagaagaattattgtcgaaatccggatagggaactgcggccttggtgttttactactgacccaaacaagagatgggagttgtgcgacattccacgttgcaccacccccccccctagctccgggcctacctatcagtgcttgaaggggacgggagaaaactataggggcaacgtggctgtcacggtgagtggccatacatgccaacattggtcagcacagacccctcacacccacaatagaaccccagaaaatttcccctgcaaaaatcttgacgagaattattgcaggaatcccgatgggaaaagggctccatggtgccacacaaccaactcacaagtcagatgggagtactgcaaaattccttcttgcgacagttcgccagtgtccacagagcaactggcaccaactgcacctcccgaactgacgcccgtagtacaggactgctatcacggcgatggccagtcctacagagggacatccagcacaacgaccactggcaagaagtgtcagtcctggtcttccatgacccctcatcgccaccagaagactcctgaaaactatcctaacgctggattaaccatgaattactgccgaaatcccgacgcagacaaaggaccatggtgtttcaccaccgacccctccgtgcgatgggaatattgcaacttgaaaaagtgttctggtaccgaggccagcgtggtggcgcccccacctgtggtcctgcttcctgatgtagagacgccatccgaggaggattgcatgtttggcaatgggaaaggatatcgcgggaagcgcgcaactaccgtcacagggacaccgtgtcaggactgggcagctcaagaaccccataggcattcaatcttcacacccgagactaacccccgcgcgggactggagaaaaactattgccgtaacccagatggggacgtcggtggaccgtggtgctacacaaccaatccacgaaaactgtacgattactgcgatgtgcctcagtgtgcagcgccgagctttgattgtggtaagccccaagtcgagcccaagaaatgcccaggacgcgtagtaggaggctgtgtagcccatccccatagctggccatggcaggtcagtctgcgaactcggttcggtatgcatttttgtggcggcacccttatttctcctgaatgggttctcactgcagcacattgcctcgaaaaatccccacgaccttccagttataaggtgatattgggagcccatcaagaggttaacctagagccccacgtgcaggaaatagaagtctcacgattatttcttgaacctactcgaaaagatatcgcccttctcaaactctcttccccagcggttattactgacaaggtgattcccgcctgcctgccatctcccaattacgttgtggctgataggacggaatgcttcatcaccggctggggcgaaactcaggggactttcggtgcaggcctccttaaggaggcccaactgccagttattgaaaataaggtttgtaatcgatacgaattcctgaacgggcgagtgcaatccaccgaactgtgtgcgggacacctggcgggaggaacagatagttgtcagggcgattcaggcggtcctctggtctgctttgaaaaagataaatacattttgcagggcgtgacaagttggggactcggctgcgcccgaccgaataaaccaggagtgtacgtgagagtttcccgctttgttacctggatcgaaggtgtgatgagaaataac

SEQ ID NO: 6521 - DNA, 2430 bp, Artificial Sequence
  derived and/or modified sequence
atggagcataaggaagtggtgctgctgctcttgctgtttttgaagagcggccaaggtgagcctctcgacgattacgtcaatacacagggagcctccttattcagcgtaaccaagaagcagctgggcgccggatctattgaggaatgtgccgccaagtgcgaggaggatgaagagttcacctgccgtgctttccaataccattcaaaagagcagcaatgcgtcattatggccgaaaaccgaaaatcatccatcatcatccgtatgcgagacgtcgttttatttgagaagaaggtgtatctgtctgagtgtaaaactggtaatggcaagaattaccgtggcaccatgagcaagaccaagaatggcatcacatgtcaaaagtggtcaagcacatcaccccacagaccccgcttcagccctgctacccaccccagcgaggggctagaagaaaactattgtcggaaccccgacaacgacccccagggtccctggtgctacactacagacccagagaaaaggtatgactactgtgacattctggagtgtgaggaggagtgtatgcactgctccggggagaattacgacggtaaaatctctaaaactatgagtgggctggagtgccaggcctgggactcacagagtccacatgctcacggctacatcccgagtaaattccccaataagaacctcaagaagaactactgtcgaaacccagatcgtgaattgcgcccatggtgtttcaccaccgaccccaacaagagatgggaactatgcgacatcccacgttgtactactccaccaccctcatccgggcctacataccagtgcctcaagggaacaggggagaattatcgaggaaatgtagctgtcacagtaagcgggcacacttgccaacactggtctgcccagacccctcacacccataatcggacacctgagaatttcccatgtaaaaacctagatgagaattactgcagaaaccctgacggaaaacgggctccttggtgtcacacaactaactcccaagtgcgctgggagtattgtaaaattccatcctgcgattcctcaccagtctccaccgagcagctcgctcctacagctcctcccgagcttacccccgtggttcaagattgttaccatggggacggacagtcttacagaggcacaagtagcaccactaccactgggaagaaatgtcagtcatggagctccatgaccccacataggcatcagaagacgccagaaaactaccccaacgccggactcacaatgaactactgcaggaaccccgacgcagataagggaccctggtgtttcaccactgacccgtctgtgagatgggagtactgcaatttgaaaaaatgttcgggtactgaggccagcgttgtggctccgccaccagtggttctgctgccagacgtggagaccccatccgaggaagattgcatgtttggcaatggcaaaggttatcggggcaagcgtgctacaaccgtgactggcaccccatgtcaggactgggcagcacaggagccacataggcactccattttcacccctgaaacaaaccctcgcgcgggcctggaaaagaactactgtcgtaatcccgacggggacgttggcgggccctggtgttataccacaaatccgaggaaactgtatgattactgtgacgttccgcaatgtgcggcaccctctttcgactgtggcaagcctcaggtcgagccgaagaaatgccctgggagggtggtaggtggctgtgtcgcccatccacattcgtggccttggcaagtctcactccggacacggtttggcatgcatttctgtgggggaacattgattagcccagaatgggtactgaccgcagcacattgtctggagaaaagtccgcggcctagctcatataaagtcattttgggggcccatcaggaagtgaacctcgagcctcatgtccaggagattgaagtctctcgtctctttctggaaccgacacgtaaggacattgcccttctgaaactttccagccccgctgtgattacggataaggtgattcccgcatgtctcccctctccaaactacgtggtggctgaccgaacggagtgcttcatcaccggttggggtgaaacacaggggacattcggcgccggcttgctaaaagaggcccagctgcctgttatagagaataaagtgtgcaatcgttatgagttcttaaatgggagagtccagagtacagaattgtgtgcaggccatttagctggcggtacagatagctgtcagggtgattcaggcggccctctggtttgctttgagaaggataagtacatcttgcagggagtgacaagttgggggcttggttgcgcgcgtccaaacaagcccggcgtctacgtgcgggttagtcgttttgtgacctggatcgagggtgttatgaggaataat

SEQ ID NO: 6522 - DNA, 2430 bp, Artificial Sequence
  derived and/or modified sequence
atggagcacaaggaagtcgtgctgctactgctactgttcttgaagtccggacagggagaacccctagatgactacgttaacacccagggagcatctctgttcagcgtgacaaagaaacagctcggggccggtagtattgaagaatgtgctgcaaaatgcgaggaagacgaggagttcacgtgccgggcattccaataccattccaaggagcagcagtgtgttatcatggccgagaaccgaaaatcttccatcattattcggatgcgcgacgtggtcctgttcgaaaagaaggtgtatctctccgagtgcaaaaccggaaatggcaagaattataggggaaccatgtctaaaaccaagaacgggattacctgtcagaagtggtccagcaccagtccccaccggcccaggttttctcctgcaacacacccaagcgagggtctggaagaaaactactgtcggaacccagacaatgatccccagggcccgtggtgctataccacggaccccgagaagcggtacgactactgcgatatcctggagtgcgaggaggagtgtatgcattgtagcggcgaaaattacgatgggaagattagcaaaaccatgagtgggcttgagtgtcaggcctgggattcccagtctccacatgctcacggatacataccctctaaattccctaataagaatctgaagaagaactactgtcggaatcctgatagggagctgaggccatggtgttttacgacagaccccaacaagcggtgggaactgtgtgacatcccacgttgtaccacaccgccaccctcgagtggacccacctaccaatgtttgaaggggacaggcgagaactaccgcgggaacgtggccgtgaccgtgtcaggccatacatgccagcattggtctgcccagactccccatacacacaataggacccccgagaacttcccatgcaaaaacctagatgaaaattactgtagaaatccagacggcaaaagagcgccttggtgtcacactactaacagccaggtccggtgggaatactgtaagatccctagttgcgatagttctcccgtgagcacagagcagctagctcccaccgcacccccagaacttacacccgtggtgcaggattgctaccacggggacggccaatcttaccgggggacctcctctacgactaccacaggaaagaaatgtcaatcttggtcctcaatgacacctcaccggcatcagaagacccctgagaactatccgaatgctgggctgaccatgaactattgccggaatcccgacgcggataagggcccctggtgttttaccacggatccctctgtcaggtgggagtactgtaatctaaagaagtgtagtggcaccgaggccagcgtcgtggccccgcctccagttgtacttctgcccgatgttgagacaccctccgaagaggactgcatgtttggaaacgggaaggggtatcgaggaaaacgcgcaaccaccgttaccggcactccctgccaggactgggccgcgcaggagcctcacaggcacagcatcttcacgccagagacgaacccacgggctgggctggagaaaaattactgccggaacccagacggggacgtcggcggcccatggtgttacacaactaacccgcggaaactctacgactactgcgatgtgcctcagtgcgccgcacctagcttcgattgtgggaagcctcaggtagaacctaagaagtgtcctgggcgggtcgtcggaggatgtgtggcccacccccactcctggccttggcaagtgtccctgcggactagattcgggatgcatttctgtggaggcactcttatttcccccgaatgggttctgaccgcagcccattgtctcgaaaaaagcccacggcctagcagctataaggtaatcctgggagcgcaccaggaggtgaacctcgaaccccacgttcaggaaattgaagtgtcaaggttatttctggagcccacccgcaaggatatagcactgcttaagctctcttctccagccgtgattacagataaagtgattcccgcttgcctgccttcacccaactatgtagtcgcagatcgcaccgaatgcttcattacgggatggggcgagacgcagggaacctttggtgcaggcctactaaaagaggctcagctgcctgtgatcgagaacaaggtttgtaaccgctacgagtttctgaacgggcgagttcagtccacagaactgtgcgccggtcatctcgcaggcgggacagattcttgtcagggggacagcggcgggcccctggtatgcttcgaaaaggataaatacattctccaaggcgtgactagctggggcctgggctgcgcacggcctaataaaccaggagtctatgttagagtctcaagatttgttacttggatagagggggtgatgcgtaataat

SEQ ID NO: 6523 - DNA, 2430 bp, Artificial Sequence
  derived and/or modified sequence
atggagcacaaagaggtcgtactgcttctgcttctttttctcaaatcagggcaaggcgagcctcttgatgattacgtgaacacccagggcgctagtctgttcagtgtaactaaaaagcaactaggagccgggtcaatagaagagtgtgctgcgaagtgcgaggaagatgaagagttcacttgtcgcgctttccaataccactctaaagagcagcagtgcgttatcatggcggaaaatcggaagtcttcgataatcatccgcatgagggatgtggtgctcttcgagaaaaaagtatatttgtccgaatgcaagactggcaatggtaaaaactaccggggaactatgtccaaaacaaaaaatggaataacatgccagaagtggtcatcaactagcccacacaggcctcggttcagtcccgccacccacccatctgaggggctggaggagaactactgtagaaaccctgataatgatccccagggcccttggtgttacaccacggacccagagaaaagatacgattattgcgatattctggaatgcgaagaggaatgtatgcactgcagcggtgaaaactatgatgggaagatcagcaaaacaatgagtgggctggaatgccaggcctgggacagtcagtcaccccatgctcacggatacatcccatcgaaattcccgaacaagaaccttaagaagaactactgcagaaaccccgacagggagctccggccttggtgctttaccaccgatccaaacaaacgctgggaactctgcgatattccgagatgtacaaccccacctcccagcagcggaccaacctaccagtgcctgaagggcacaggagagaactatcgtggaaacgtcgccgtgacggtctctgggcacacttgtcaacattggagtgcgcagacaccacacactcacaacagaactcctgaaaacttcccatgtaagaacctggacgaaaattattgccggaaccctgatggtaaacgcgccccttggtgccatacaacgaacagccaagtgcgctgggagtactgtaaaatcccaagctgcgattcaagtccagtttctactgaacagttagcacccacagcgccaccagagctcaccccagtagtgcaggactgctaccatggcgacggtcagagctacaggggtacttcaagcactaccaccacaggcaaaaagtgccagtcatggagtagcatgacccctcacagacaccagaagaccccagagaactatccaaacgccggccttaccatgaactattgcagaaatccagatgcagacaagggaccatggtgtttcaccactgatccctcagtccgttgggagtactgtaacctcaaaaagtgctcgggcactgaggccagtgtcgtcgctcctcctccagtcgtcctgttgcctgatgtggaaacaccatctgaagaagactgtatgtttggtaacggcaaaggctacagggggaaacgcgccactacagtgacgggcactccatgccaggactgggcagctcaggagccacataggcattccatcttcacacccgagacgaacccacgggctggccttgagaaaaattactgtcgcaacccggacggggacgtcggcggaccatggtgctataccacaaaccctcggaaactgtacgattactgcgacgtccctcaatgtgccgcaccttcttttgattgcggaaagccacaggtggaacccaaaaaatgtcctgggcgtgtcgtcggcgggtgtgtggcacacccacatagttggccctggcaggtgtctctgaggactaggtttggaatgcacttttgcggcggcaccttgatttctccagagtgggttctgaccgctgctcactgcctggaaaaatccccccgaccgtcaagttataaagttatcctgggcgcccaccaggaggtaaacctcgaacctcatgtacaagaaatcgaggtcagccgcctgtttctggaaccaacgcgcaaagatattgctctgctgaaacttagttccccagcagtgataacggataaggttattccagcctgtcttccatctcctaattacgttgtggctgaccgcacggaatgttttatcaccgggtggggcgaaactcagggtacattcggcgctgggctgctgaaggaagcccaattgcctgtgattgagaacaaggtatgtaataggtacgagtttctgaacggacgcgtacagagcaccgagctgtgcgccggacaccttgccgggggtacagattcatgtcagggtgattccggagggccactggtttgcttcgaaaaggacaagtacatcttgcagggggtcacttcttggggcctgggatgcgctcgcccaaacaagcctggggtttacgtcagggtgtcgcgcttcgtgacgtggatagaaggagtcatgagaaacaac

SEQ ID NO: 6524 - DNA, 2430 bp, Artificial Sequence
  derived and/or modified sequence
atggaacataaagaggtggtgctgctgctactgttgttcttgaagtccgggcagggggagcccctcgacgactacgttaacacccaaggcgcctctcttttcagtgtcacgaagaagcagctgggcgctggatctatcgaagagtgcgcagcgaaatgcgaagaggacgaggagttcacctgccgggccttccagtatcactccaaggaacagcagtgcgtgatcatggctgaaaatcgtaaatcttccatcatcattcgtatgagagatgtggtgctcttcgagaagaaggtgtacctctcagagtgtaaaacggggaatggtaaaaattatcggggcaccatgagcaaaacaaagaacggtatcacttgccagaaatggtcctctacgtcaccccaccgcccccgttttagccctgctactcatccctccgaaggtttggaagagaactactgccgcaatcctgataatgatcctcagggcccgtggtgttataccaccgacccagaaaaacgctatgactactgtgatattctcgaatgcgaggaagagtgtatgcactgttccggagaaaactacgatggcaaaatcagcaagaccatgtcaggccttgagtgtcaggcgtgggattcgcaatccccccacgctcacggttacataccgtcaaagttccccaataaaaatttgaagaaaaactattgcaggaatcctgacagagagctgaggccatggtgtttcaccactgatcctaacaagaggtgggagctgtgtgacattcccagatgcactacaccgcctccttcatctggccctacctatcagtgcttgaaggggacgggggagaactatagaggtaacgtggctgtgacggtcagtggccatacatgccagcactggagcgcacagaccccacacactcacaatagaacacccgaaaacttcccctgcaagaacctggacgagaactattgtcgcaaccctgatggtaaaagagcgccgtggtgtcacacaactaattcccaggtccgatgggagtattgcaaaatcccttcatgtgactcaagccctgtgagcacagagcagctggccccaaccgccccacctgagctgaccccagtggtgcaagattgttaccacggagatggccagagctataggggcacatcttctaccactacaacaggtaaaaagtgccagtcatggtcatcaatgactccccatagacaccaaaagacacccgaaaattaccctaatgctggtctgactatgaactactgtcgcaatcctgacgctgacaaaggaccctggtgctttacgacggacccctcagtcaggtgggagtactgcaacctcaaaaaatgcagcggaaccgaagcttctgtggtagctcccccccccgtggtgcttcttcccgatgtggaaacaccatctgaggaagactgtatgtttggcaacggcaaaggatatcgcggcaagcgggcaactaccgtgaccggaaccccttgtcaggactgggccgcccaggaaccacaccgccatagcatctttaccccagagacaaacccaagagcgggacttgagaagaactactgtagaaatcccgacggcgatgtggggggaccctggtgctacactaccaatccaaggaagctctatgattactgtgacgtgccacagtgtgctgccccatcctttgattgtggcaagccccaggtcgaacctaaaaagtgtcccggtcgtgtagtgggtggctgcgtggcccacccacacagttggccttggcaggtgagcctgaggacacgatttggcatgcacttctgcgggggaaccctgatctcccctgagtgggtgctgactgccgctcactgcttagagaagtcaccaagaccaagctcatacaaagtgatcttaggagctcaccaagaagtgaatctggagccccacgttcaagaaatcgaggtgtccagactgttcctggaaccaacccgcaaggacatcgccctcctcaagctgagttctcctgccgtgattacagacaaagtgatccccgcctgcctaccatcacctaactacgtggtggccgatcggacagagtgctttatcacgggctggggagaaactcaaggcacctttggtgccgggctgcttaaggaagcccagcttcccgttatcgagaacaaagtgtgcaatcggtacgaattcttgaacggccgggtgcagtccactgaattgtgcgcagggcacctggcgggcgggactgatagctgtcagggtgactcgggcggtcctctcgtgtgttttgaaaaagacaagtatatcctacaaggcgtgacatcctggggcctggggtgcgcgcgccctaacaagcccggcgtctacgtccgcgtctctcggttcgtgacgtggattgaaggtgtcatgcggaataac

SEQ ID NO: 6525 - DNA, 2430 bp, Artificial Sequence
  derived and/or modified sequence
atggagcacaaggaggttgtccttctcttgttgctgtttttgaaatcggggcaaggggaacctttggatgattatgtcaatacacaaggggcttcgctcttttccgttaccaagaaacagttgggagccggatcaattgaggagtgtgctgcaaagtgcgaggaggatgaagaattcacctgtcgagctttccagtaccattctaaagaacagcaatgcgttatcatggccgaaaataggaaaagcagcataataataagaatgcgtgacgttgttctctttgaaaagaaggtctatctttctgaatgcaagacaggaaatggaaagaactatagaggtaccatgagcaagactaagaacgggattacatgtcagaagtggtccagtacctcccctcataggccgagattctcacctgccacccatccctcagagggtcttgaagaaaattactgccgcaacccggataacgatccccagggtccgtggtgttataccaccgatccagagaaaagatacgattattgtgatatcttagagtgcgaagaagaatgtatgcattgttctggagagaactacgacgggaagatatctaagacgatgtccgggttagagtgtcaggcctgggactcccaaagcccccatgcccatggatatattccatcgaaattcccgaacaagaatcttaagaaaaattactgcagaaacccagatagggagttgcgaccttggtgttttacgactgatcctaacaaacgctgggagctatgcgacattcctagatgtaccactcctccgccatcctcgggcccgacatatcagtgcctaaaaggaacaggtgaaaattatcgtggtaacgtcgctgttaccgtctctggccatacttgccagcactggtctgcacaaaccccccatacacataacaggactcctgaaaacttcccttgtaagaacctagatgagaattactgccgtaacccagacggtaagagagccccatggtgtcatacaaccaatagccaagttaggtgggaatactgcaaaatacccagttgtgacagttcaccagtttcaacggaacagctagctccaaccgctccacctgagcttacccctgtggtacaagattgttatcatggtgatggtcaatcctaccgcggaacgagcagtacgacaaccacaggcaaaaaatgtcaaagttggagttcgatgacgccacatagacaccagaaaacacctgagaattacccaaatgcaggattgaccatgaactattgtcgtaaccctgacgcagataagggaccttggtgcttcaccaccgacccttctgttcgatgggagtattgtaatttgaaaaaatgcagtgggaccgaagccagtgtcgttgcaccgccaccagttgttttgctcccagatgtggaaactccttccgaagaagattgtatgtttggaaatggaaagggttatagaggcaaacgtgcaactactgttacgggcactccatgtcaagattgggctgcacaagagccacacagacatagtattttcacgcctgaaacaaaccctcgagcagggttagaaaaaaattattgtaggaatcctgatggcgatgtcggtggaccgtggtgttatacgacgaatcctcgaaagctgtatgattactgtgatgtccctcaatgtgcggctccctcttttgactgtggcaaacctcaggtagaacctaagaagtgcccgggacgtgtggtaggtggctgtgtggcacatccgcactcctggccttggcaagttagtttgaggacacgattcggcatgcatttttgtggtggtactttgatctcccccgagtgggttctcaccgcggctcattgtttagaaaaatctccgcggccatcatcgtataaggtgatattaggcgctcatcaagaggtcaacctcgaacctcacgttcaggaaatcgaagtctctaggttatttcttgagcctactagaaaggatatcgccctcttgaagctctcgtcaccggctgtgataacagataaagtcatccccgcatgcttgccgagtccgaattatgttgtggctgacagaaccgagtgtttcataactggatggggagaaacacaagggaccttcggcgctggtctcctcaaggaagctcaactccctgtaatcgaaaataaagtttgtaatcgttacgaattcctgaacggaagagtgcaatccaccgaactctgcgccggccatcttgcgggaggaaccgattcttgtcaaggcgactctggaggtccactcgtttgtttcgaaaaggataaatatatccttcaaggtgttacctcttgggggttggggtgtgcacgtcctaataagccgggcgtatatgtcagggtgagcaggttcgtcacttggatagagggggtcatgagaaataac

SEQ ID NO: 6526 - DNA, 2430 bp, Artificial Sequence
  derived and/or modified sequence
atggaacataaggaggttgttctccttctgctcctttttcttaagagtggtcagggtgagcctttagacgattacgttaatacacaaggtgccagcctgttcagcgtcacaaagaaacaactgggtgccggaagcatcgaagagtgcgctgcgaaatgcgaggaggacgaggaattcacctgccgagccttccagtatcattccaaggaacagcaatgtgtgatcatggccgagaatcggaagtcaagtattatcatacgaatgcgtgacgtggtcctgtttgaaaaaaaggtttatctttcagaatgtaaaaccggtaacggcaagaattaccgcggtaccatgtctaagacaaaaaatggtatcacctgtcaaaagtggtcgtccacgtcgcctcacaggccgcgtttctcgccggcaacccatccctcagaggggttagaggaaaactactgtcggaatccagataacgatccacagggcccttggtgctacactactgacccggagaagcggtatgattattgtgacatacttgaatgtgaggaggagtgtatgcattgctctggcgagaactacgatgggaaaatctctaagacaatgtccgggttggagtgccaagcgtgggactcgcagagtccccacgctcatggctacattcccagcaagttccctaacaaaaaccttaaaaaaaactattgtcggaatcccgatcgagaacttcgtccttggtgctttactactgatcccaacaaacgttgggagctctgcgacatcccaaggtgcaccacccccccgccgtccagcggtcccacttatcagtgtctgaaagggactggggaaaattatcggggcaacgtagctgttactgtcagcgggcacacttgtcagcattggtctgcacaaacccctcatacgcataaccgtacgcccgaaaacttcccgtgcaagaacttggatgagaattattgtcgcaaccctgacggtaaacgtgcgccatggtgccatactacgaattcgcaagttcgatgggaatattgcaagatccccagttgtgattcttcgccggtttctactgagcaactggcgcctacggcacccccggaattgactcctgttgttcaggactgttatcatggagacggccaaagttatagaggcacgtcttccactaccactaccggcaaaaagtgccagtcctggtcgtctatgacaccgcatcgccaccagaagaccccagagaactatccgaacgccggtctcaccatgaattattgtcgtaaccctgatgctgataaaggtccttggtgcttcaccaccgatccgagcgttcggtgggagtattgcaacttgaagaagtgttccggaacagaggcctcggttgtcgcaccgcctccggtagtgctgcttcctgatgtcgaaacaccttccgaggaagactgtatgtttggtaatgggaagggctaccgaggtaagcgagccacaaccgtgactggcactccttgccaagactgggcagctcaagaaccacatcgacattccatttttacgccagagacaaacccgcgtgccggattggagaagaactactgtcggaatccagatggcgatgtgggtggaccgtggtgttatacaacgaacccaagaaagctatacgactattgcgatgtgccacaatgcgctgccccttccttcgactgcgggaaacctcaggttgagcccaaaaagtgtccgggccgcgtggtcggtggatgcgtggcccacccccattcttggccttggcaagttagtttgcggacccgcttcggtatgcatttttgtggtggcacactgatttctccggaatgggttcttacggcagcacattgtcttgaaaagtctccccgaccaagctcttataaagtaattctgggggcgcaccaggaggttaatttagaaccccatgttcaagagatcgaggtgtctcgactctttttggagcccacccgcaaggacattgcactgcttaagctatcttcgccagccgttataacggataaggttatcccggcttgtctaccttcccctaactacgtcgttgctgaccgtactgaatgtttcatcaccgggtggggtgagacgcaaggcacctttggcgctggtctgcttaaggaagcccagcttccggtaatcgaaaacaaagtgtgtaaccggtacgaattcctcaatgggcgtgtccagagcacggagctttgcgcaggccatttggctggtggcacggactcctgccagggggattccggtgggccccttgtctgtttcgagaaagacaaatatattttgcaaggagttaccagctggggcttaggttgtgctcgccctaacaaaccaggggtgtatgtgcgagtgagccgttttgtcacatggattgaaggcgtcatgcgcaacaat

SEQ ID NO: 6527 - DNA, 2430 bp, Artificial Sequence
  derived and/or modified sequence
atggagcataaagaagtggttcttttgcttctactttttttgaaaagtggccagggcgaacctctggatgactacgtcaatacgcagggtgcatctctcttctctgtgaccaagaaacagttgggagctggaagtatcgaggagtgtgctgccaagtgcgaagaggacgaggaatttacttgcagggccttccagtatcactctaaagaacagcagtgcgtaataatggccgagaatcgtaaaagctctataataataaggatgcgagatgtcgtcctgttcgagaaaaaggtctatctgtcagaatgtaagaccgggaatggcaagaactaccgaggcactatgtccaagaccaagaacggcattacttgccaaaagtggtcaagcaccagtccacataggccacggttcagccccgctactcacccttctgaagggctggaggagaactattgccgcaatcccgacaatgaccctcaaggaccatggtgttatacgactgatccggaaaagcggtatgattactgcgacatcctggagtgtgaagaggagtgcatgcattgctccggggaaaactatgatggtaaaatcagcaaaactatgagtggccttgagtgccaagcatgggactcccagagcccccacgcccacggttacatcccaagtaagttccccaataagaaccttaagaaaaattattgcagaaatccagatagagaactgcgtccgtggtgctttactacagaccctaacaagagatgggagctgtgtgatatccctaggtgcactacgcctcccccatcttccggcccaacctaccagtgtctgaagggaaccggcgagaattaccggggtaacgtcgccgtcaccgttagtgggcatacatgtcaacactggtccgcgcagaccccccatactcacaaccgcactccagagaattttccttgtaaaaacctagacgaaaattactgtcgtaatcccgatggtaagagggcaccgtggtgccacaccaccaatagccaggtgcgctgggagtattgcaagattccctcctgtgacagcagccccgtgtccacagaacagttggcccctacggctcccccagaactgactccagtcgtacaagattgttaccacggggacggccagtcctatcgcgggacttcgagcacgactacaacagggaagaagtgccagtcctggagctccatgactccgcaccggcatcagaagacgccggagaactatcccaacgctgggcttacaatgaattactgtcgaaatcctgacgccgataaggggccctggtgttttacgacagacccatccgttcgttgggagtactgtaacctgaagaagtgtagcggcacagaggctagcgttgtagcaccacctcccgttgtcctgctgccagacgtcgaaaccccatcggaggaagactgcatgtttggcaacgggaaagggtatcgcggcaagagggccaccactgtgaccgggactccttgtcaggattgggccgcccaggagccacaccgccactcaatctttactccagaaacaaatccacgcgccggacttgaaaagaactactgcaggaatcccgacggcgacgtgggtggcccttggtgttatacaactaatccacgaaaattatatgactactgcgacgtacctcaatgtgcagcccccagtttcgactgcggaaagccacaggtggagccgaagaaatgccccggaagggtggtcggtggttgcgtcgcccatccccactcatggccgtggcaggtgagcctgcggacgcgctttggaatgcacttttgcggaggaactctgatcagccctgagtgggtcctgaccgctgcccactgcctcgagaagagcccacgtcccagctcatacaaagtcattcttggtgcacatcaagaagtcaatctggagccccacgtccaggagattgaggtctccagactgttcctggagcccacccgaaaagatattgcgctgttgaaactgtctagccccgcagtgattaccgacaaagtaattcctgcctgtttgcccagtcccaactacgtcgttgcagatagaactgagtgctttatcactggttggggcgaaacccagggaacctttggcgctggccttctgaaagaagcgcagttgccggtcatagagaataaagtctgcaacagatatgaatttttgaacggccgggtacaatccactgagctgtgtgccggccacctggcaggaggaacggactcctgccagggagacagcgggggcccattggtttgttttgaaaaggacaagtacattctacaaggggttacctcctggggcttggggtgtgcacgcccgaacaaacctggtgtatacgtgagggtgtccaggtttgttacctggattgaaggggtcatgcgtaacaat

SEQ ID NO: 6528 - DNA, 2430 bp, Artificial Sequence
  derived and/or modified sequence
atggagcataaggaagtagtgttgctgcttctcctgtttctgaagtccggacaaggggagccgctggacgactacgtgaatacgcagggagccagcttgtttagtgtgactaagaaacagctcggcgccggatctatcgaagagtgtgcggcgaagtgtgaggaagacgaagaattcacctgtcgcgcttttcagtaccattccaaggagcagcagtgtgtaattatggctgagaatagaaaaagctccatcattatccgaatgcgggatgtggtactcttcgagaagaaagtgtatctgtcggagtgcaagactggtaacggcaagaactaccggggcaccatgtccaagacaaagaacggcatcacctgtcagaagtggtcctccacgtccccgcacagaccaagattttcccccgctacacacccaagcgaggggctggaagaaaactattgccgaaatcctgataatgatccccagggcccttggtgctacacaacagaccctgagaaacgttacgattattgtgatattcttgaatgcgaggaagagtgcatgcactgttctggcgaaaactatgatggcaagatctccaagacaatgtctggcctggaatgccaggcttgggattcacagtccccgcacgcacacggctatatcccaagcaaattccccaataagaatcttaaaaaaaactattgccggaatcctgatagggagctgcgaccttggtgttttactaccgaccctaataaacggtgggaactctgcgatataccacgatgcaccacaccccctccctcatctggcccgacttaccagtgcctgaagggcacaggggaaaactaccgaggaaatgtcgccgttactgtgtcaggtcacacttgtcagcattggtcagctcagactcctcacacccataatcgtacaccagagaacttcccttgtaaaaacctggacgagaactattgcaggaaccccgatggcaagagggctccttggtgtcacacaacgaacagccaggtgcgctgggagtattgcaagattccgagctgcgacagcagcccggtgagtaccgaacagctagcgccgaccgcacccccagaactgacacctgtggtgcaggattgttatcacggtgatgggcagagttacaggggcaccagctccaccacaaccactggcaaaaagtgtcagtcttggagctccatgactcctcatcggcatcaaaagactccagagaactacccaaacgcaggactgacaatgaattactgtagaaatcccgacgccgacaaggggccctggtgctttacaaccgatccaagtgtgcggtgggaatactgcaatctgaaaaaatgttctggcacggaagcatccgttgtggccccacctccagtggtgttgctgcccgatgtcgaaactccaagcgaggaagattgtatgttcggtaacggcaaggggtaccggggaaaacgtgcgacgacagtgaccgggaccccttgccaggactgggcagcccaggagccccaccgtcatagcatctttacccctgaaaccaatcccagagcaggtctagagaagaattactgcagaaatcctgatggggacgtggggggtccttggtgttatactaccaacccacgaaaactgtacgactattgcgatgtaccccagtgtgccgctccttctttcgactgcggcaagcctcaagtggaaccaaagaaatgtcccggccgcgtagtgggggggtgcgtagcgcatccccattcatggccatggcaggtgtctttgcgaacacggtttgggatgcatttctgcggcggtacactgatctcacccgagtgggtgctcacggccgcacattgtctggagaaaagccctcggccgtcatcttataaggtgatactgggggctcaccaagaggtgaatttggagccacatgttcaagaaatagaggtcagcagattgttccttgaacctacacggaaggatatcgctctgctgaagctttcttcacccgctgtaatcactgacaaggtaattccagcgtgtttgccctctcccaactatgtcgtggccgacagaaccgagtgttttatcaccggctggggcgaaacccaggggacatttggcgctggtctgctcaaagaggcccagctccccgtgatcgagaataaagtatgcaacaggtacgagtttctaaacggtcgtgtgcagagcactgaactgtgtgccggtcatctagctggaggtaccgattcttgtcaaggtgattccggcgggcctcttgtgtgctttgaaaaagacaaatacattctccagggagtgacaagctgggggctgggctgcgcgcgaccaaataaacccggagtgtacgtccgagtttcacgctttgtgacctggatcgagggcgttatgagaaacaat

SEQ ID NO: 6529 - DNA, 2430 bp, Artificial Sequence
  derived and/or modified sequence
atggagcacaaggaagtagtgctccttctcctgctcttccttaaatcaggccagggcgaaccacttgatgactacgtcaacacccaaggggcgtctttgttcagcgtgactaagaagcagttgggcgcaggctctattgaagaatgcgctgccaagtgcgaggaagacgaggaattcacgtgtcgagcattccaatatcattcaaaagagcagcagtgcgtgatcatggctgagaacaggaaatccagtattattattaggatgagggatgtggtgttgttcgagaaaaaggtgtacctctccgagtgtaaaacaggcaatggcaaaaactatcggggcaccatgtccaagaccaagaatggtatcacttgccagaaatggagctctaccagcccccaccggccaaggttctctcctgccacccaccccagtgaaggtctggaggagaattactgcagaaaccccgacaacgaccctcagggaccatggtgctacactaccgacccagagaagcgctacgactactgtgacatcctcgagtgtgaagaggaatgtatgcactgttctggcgagaattacgatggtaagatttctaaaaccatgagcggcctggagtgccaggcctgggactcccagagtccccacgcacacggatacattccatcaaagttcccgaataagaacctcaaaaaaaattactgccggaatcctgatagggaactgcgcccatggtgctttacaactgacccaaacaagcgatgggaactgtgcgacattccaagatgcacgactcctcccccctcttcagggcctacctatcagtgcctgaagggcaccggggaaaattataggggcaacgttgcggtgacagtgtctgggcatacctgtcagcactggagcgcccagacccctcatacccataacagaacacccgagaacttcccatgcaaaaatttggatgaaaattattgtaggaatccagacggaaaaagggccccatggtgtcatacaaccaactctcaggtgagatgggagtactgtaagattccatcatgcgacagctcacccgtgtctactgaacagctggcccctactgcccctccagaactcacacccgtagtgcaggactgctatcacggcgatggccagtcctataggggcacttcttccacaaccacaactggaaaaaagtgtcaatcttggagctcaatgactccccaccgccaccagaagaccccagagaactatccaaacgccggcctcacaatgaattattgccgcaacccggatgctgacaaaggcccgtggtgtttcacaacagatccgtctgtccggtgggagtattgtaacctgaagaagtgctccggaacagaggccagtgtagtcgccccgccccctgtggtgctcctccccgacgttgagactcctagcgaggaggactgtatgttcggcaacggaaaaggttacagagggaagagagccacaaccgttaccggcaccccctgccaggattgggccgctcaggagccccaccggcattccattttcacccctgagaccaacccacgcgcaggtctcgaaaagaactattgccggaatcccgatggcgatgtcggcggcccctggtgctatacaacgaatcctcggaaactgtatgactactgcgatgtgccacagtgtgccgctccttcttttgactgtgggaagccccaagtggagcctaagaaatgccctggtcgggtcgtcggcgggtgcgtggctcaccctcacagctggccatggcaggtgagcctcaggacacgcttcggcatgcacttttgcgggggtacgcttatctccccagagtgggtcttgactgcagcccactgtctcgagaagagccctcggccaagttcatataaggtgattttgggtgctcaccaggaggtgaacctcgaaccgcacgtacaggagatcgaggtttctcgactgttcttggagccaactcggaaagacattgccttgctcaagctgagctcacctgctgtcatcactgataaagtaatacccgcctgcctgccgtccccgaattacgtggtggctgaccgaacagagtgcttcatcaccggctggggagaaacacaaggtaccttcggtgcgggcctgctcaaagaagctcagctccccgttatcgaaaacaaggtctgcaaccggtacgaattcctgaacgggcgggtgcagtccaccgagctttgcgctggccacctggcaggcgggacagactcctgccagggagattctgggggtccactggtctgctttgagaaagacaagtacatccttcaaggagtgacttcttggggattgggatgcgccaggccgaataagcctggtgtgtacgtgagggtgtcccggtttgtaacgtggattgaaggtgtcatgcgaaacaac

SEQ ID NO: 6530 - DNA, 2430 bp, Artificial Sequence
  derived and/or modified sequence
atggagcacaaggaagtggttctcttgcttctgctgttcctgaagagtggccagggcgagcctctggacgattacgtgaatactcagggagctagccttttctctgtcaccaaaaaacagctgggcgccggctccattgaggagtgtgcggccaaatgtgaagaggatgaagagttcacatgccgagcatttcaataccactcaaaagagcagcaatgtgtgattatggcagaaaatcgaaaaagttcaatcataattcgcatgcgagacgtcgtgttatttgagaaaaaggtatatctttctgagtgcaaaaccgggaacggaaagaactaccgaggcacgatgagtaaaacgaaaaatggaattacttgtcagaagtggagtagcactagcccgcatcgcccccggttttccccggcgacacatccgtccgagggtctggaggaaaactactgtcgcaaccctgacaacgacccacagggtccttggtgctacaccactgaccctgaaaagcggtatgactattgcgatatactggagtgcgaagaagagtgcatgcactgcagtggggagaactatgacggtaagatttcaaagactatgtctggtctggaatgtcaggcgtgggactctcagtcccctcacgctcacgggtatattcctagcaagtttccgaataagaacttgaagaaaaattattgcaggaaccccgatcgggagttaaggccctggtgtttcaccacagatcccaataaacggtgggaactatgcgacattcctcggtgcacaacaccaccaccaagtagtggcccaacctatcagtgcctgaaagggaccggtgaaaactatcgtgggaatgtggcggtgaccgtgagtgggcatacttgccagcactggagcgcccagacaccacatacccataatcggactccagagaacttcccctgcaaaaacctggacgagaactattgtcggaacccagacggaaagagggcaccgtggtgtcacactactaactctcaggtgcgatgggagtactgtaaaatccccagttgcgattcctcgcctgtcagtacagagcagctggcccccaccgccccccccgagcttacgccagtcgtgcaggactgctatcacggcgacggacagtcctaccgaggaacttcctctactacaaccaccggaaaaaagtgccagagttggagttccatgaccccccatcggcaccagaagactcctgaaaactacccaaatgcaggccttactatgaactattgccgtaatccagacgccgataaaggcccctggtgcttcactaccgaccctagcgtgaggtgggaatattgcaatctgaaaaaatgtagtgggacagaggcttcagtggtggccccgccccctgttgtgctacttccggacgtggagactccatcggaggaagactgtatgtttgggaatggcaaggggtacagagggaaaagagctaccactgtcactggcacaccctgtcaggactgggcagcccaggagccgcatagacattctattttcacacccgagaccaatccacgtgcgggactcgaaaaaaactactgcaggaacccagatggagacgtaggcggtccatggtgctataccaccaatccccgaaagctttatgactattgcgatgtgcctcagtgtgccgctccgtcatttgactgtggtaagccgcaggtggagcccaaaaaatgtcccggaagagttgtcggtggatgcgtggctcatccccatagttggccttggcaggtgagcctgcgcacccggttcggtatgcacttctgtggaggtactttgatctccccggagtgggtgttgaccgcagctcactgtttggagaaaagtccacgtcccagctcctacaaagtaatattgggcgctcaccaagaagtaaacctggagccccacgtgcaggagatcgaggtgagtcggctttttctggagcctacgcggaaggatattgccttgctgaagctctcgtctcctgcggtgatcacagataaagttatccctgcttgtctcccgagcccaaactatgttgtagcagataggaccgaatgtttcataacaggatggggcgagacacagggaactttcggcgccggcctcctgaaagaggcccaactgccagtcattgagaacaaggtctgtaacagatacgagttcctgaatggaagagtccaatccacagagctctgcgcaggccatctggctggtggcaccgattcctgtcaaggagactccggcggacccctcgtatgcttcgaaaaagataaatacatcctgcagggggtgacctcttggggcctgggctgcgccagaccaaataagcctggcgtgtatgtaagggtctcacggtttgttacctggatcgaaggcgtcatgcggaacaat

SEQ ID NO: 6531 - DNA, 2430 bp, Artificial Sequence
  derived and/or modified sequence
atggaacacaaggaggttgttctgctgctgctcctatttctaaaatcaggtcagggggaaccgttggatgactatgtcaatacccagggtgcatctctcttcagcgtcactaaaaagcagctgggggccggcagcatcgaagaatgtgccgctaagtgcgaggaggatgaagaattcacctgtcgggcctttcagtaccacagcaaagagcaacagtgcgtgattatggctgagaaccgaaaatctagtatcatcattcgaatgagagatgtggtgctgtttgagaagaaagtgtatttaagcgaatgcaaaacaggcaatggtaagaattaccggggcactatgagcaaaaccaagaatggtattacttgccagaaatggtcctccacatcccctcaccgacctcgattctctcctgctactcacccatctgaaggcttggaggaaaactattgcaggaatcccgacaacgatccccagggcccttggtgctatacaaccgatcctgagaaacgatacgactactgcgatatcctggagtgcgaggaggagtgcatgcactgttctggtgagaattacgacggcaagatttccaagaccatgtcggggcttgagtgccaggcctgggactcgcaatctccacacgcacacggctatatcccgagcaaattccccaacaagaatcttaaaaaaaactattgtaggaatcccgatcgggagctgaggccctggtgtttcaccactgatcccaataaacgctgggaattatgtgatattccacgatgcacaacgccaccccccagcagcgggcctacctatcagtgcttgaaggggactggcgagaattatcggggcaacgtagcagtgacagtctcagggcacacctgtcagcactggagcgcgcagacgccacacacacacaatcggacacctgaaaactttccttgtaagaacctggatgaaaattactgccggaatcctgatgggaagagggccccatggtgtcataccaccaattcccaggttcgatgggagtattgcaagatcccttcatgcgactcctcccctgtctccacagagcaactcgcacctacagctcccccagaacttacacctgtcgtgcaagattgttaccacggcgacggccagtcgtaccgggggacctcaagtaccaccacaaccggaaagaagtgtcagagctggtcaagtatgacccctcatcgccaccagaaaacacctgagaactacccaaatgccggcttgacaatgaactactgccgcaaccccgacgccgacaaagggccttggtgtttcaccacagacccatccgtgcgttgggaatactgtaatttgaaaaagtgcagtggcactgaagccagcgtggtggctccacctccggtggtattactgcccgacgtggagacacctagcgaggaggactgcatgttcggaaatgggaagggataccgggggaagcgagccactactgtaactgggaccccctgccaagattgggcagcccaggaaccgcaccgacattccatttttactccagaaaccaaccccagagcaggcctcgaaaagaattattgccggaatcctgatggcgacgtaggcgggccttggtgctatacaaccaatcctagaaaattgtacgactactgcgacgtgccacaatgtgcggcaccatccttcgattgtggaaagccacaagttgagccaaaaaaatgccctggtagggtggtgggcggctgcgtggcccatccacacagctggccttggcaggtatcgcttcggaccaggttcggcatgcacttttgtggcggtacactgataagccccgaatgggtcttgaccgctgcccactgcctggaaaagtcacctagacccagctcctataaggtcatcctgggggctcatcaggaggtgaacctggaaccacacgtgcaagagattgaggtgtcaagactgttcctggagccaacacggaaggatatcgccctcctgaagctatcctctcctgccgtgattacagataaggtcattccggcttgccttccttccccgaattacgtggtggccgatcgaactgagtgtttcattacgggctggggcgagacccaggggacattcggtgctgggctgctcaaagaggcacaactaccagtaatagagaacaaggtgtgtaatcgatacgaatttctgaacggcagagttcagtcaaccgagctgtgtgccgggcatctggcaggcgggactgacagctgccagggggactctggcggcccactcgtgtgcttcgaaaaagataaatacattctccagggagttacgtcttggggcctgggctgtgccaggcccaataagcccggggtctacgttcgggtcagtagattcgttacctggattgagggggtaatgaggaacaac

SEQ ID NO: 6532 - DNA, 2430 bp, Artificial Sequence
  derived and/or modified sequence
atggagcataaggaggtcgtgctgcttctcctgctgttcctgaagtccggccaaggggagcccctcgacgattatgtgaacacccagggtgcttctctattttctgttacaaaaaaacagctaggtgccggcagcattgaggagtgcgccgcaaagtgtgaggaagatgaggagttcacctgccgtgcattccagtatcattctaaggaacagcagtgtgtaatcatggctgagaacaggaaatcatcaatcattattagaatgagagacgttgtgctgttcgaaaagaaggtgtatttatctgaatgtaagactggcaacggcaagaactatcgggggactatgtcaaagaccaagaatggtataacttgccagaagtggtcttctactagtcctcaccgtccacggtttagcccagccacccacccttccgagggcctggaagaaaactactgtaggaatcccgacaacgatccccagggtccctggtgctatacaaccgaccccgaaaagcggtacgactactgcgatattctcgaatgtgaagaagagtgcatgcattgtagtggagagaactatgatggaaaaatatctaaaactatgagcggattagagtgccaggcttgggactcccaaagtcctcatgctcacggctacatcccaagtaaatttcctaacaagaacctgaagaagaattactgtcggaatcctgatagagagctccggccatggtgttttactactgacccaaataaacggtgggagctatgtgatatccccagatgcacaactccaccaccctcctctgggcctacctaccagtgcttgaagggaacaggggagaactaccgaggtaatgtcgctgtgaccgtgtccggtcatacctgtcagcactggtctgctcagactcctcacactcataatagaacacccgaaaacttcccttgtaagaacctggatgagaactattgcaggaaccccgatggtaaacgagcaccatggtgccacaccaccaactctcaggttcgctgggagtactgcaagattccatcttgtgacagctcccctgtgtcaacagaacaattggcacctacagctcctcccgaactgacccctgtcgtgcaggactgttatcacggggatggacagtcatacaggggcacaagctcaactacaactaccgggaagaagtgccagtcatggagttccatgacaccacaccgacatcaaaaaacccccgagaactacccaaatgctggcctaacaatgaattactgtcggaatcctgacgctgataaggggccatggtgttttactaccgatccctcagtccgctgggagtactgtaacctgaagaaatgcagtggcacagaggcatcagtcgttgcacccccaccagtagtgctcctgcccgacgtggagacaccaagtgaggaagattgtatgtttgggaacggcaagggctacaggggcaagcgagctactacagtgactggtactccttgtcaggattgggctgcacaggagccacacagacattccattttcacacctgagacaaatcctcgtgcaggcctggaaaagaactattgccggaacccagacggcgacgtgggggggccttggtgttacactacaaacccaagaaaattgtatgactactgcgatgttccccagtgtgcagcaccatcttttgactgcggcaaacctcaggtggagccgaagaagtgcccggggcgggttgttggaggctgcgtggcacatcctcacagctggccatggcaggtcagcctgaggacaagatttggcatgcacttctgcgggggaactttgatcagtccagagtgggtcctgaccgctgcccattgtctcgagaagtccccacggccatcctcatacaaggtcattctgggcgcacatcaggaggtgaacctggaaccccatgtccaggagatagaggtctcaagactgtttttggaaccaacacgcaaggatattgccctgttgaagctgagcagccccgctgtgatcactgacaaggtgatacccgcatgtctaccctccccaaattatgtggtggccgaccggaccgagtgttttatcaccggctggggggaaacccagggtacattcggcgccgggctgctcaaagaagcacagctgcccgtgatagaaaacaaagtgtgtaacaggtatgagtttctaaacgggagagtgcagagtaccgagctatgtgccgggcatttggccggcggtactgattcctgccagggcgattctgggggcccactggtttgtttcgagaaagataaatacattttacagggtgtgactagttggggcctgggatgcgcccggccaaataagcctggcgtgtatgttcgggttagccgctttgttacatggatcgaaggagtgatgcgcaacaac

SEQ ID NO: 6533 - DNA, 2430 bp, Artificial Sequence
  derived and/or modified sequence
atggaacacaaagaagtggtccttctgcttttgctctttcttaaatcaggtcaaggcgaaccgttagatgattatgtgaacacacaaggagcgtcacttttttcagttactaaaaaacaactgggtgccggctcaattgaagagtgtgctgctaaatgtgaggaggacgaagaatttacatgtagagcgtttcagtaccacagcaaagaacagcaatgcgtaatcatggccgaaaaccggaaaagctcaatcattattcgcatgcgggatgtcgtcttgttcgaaaaaaaagtttacctatctgaatgtaaaacaggaaatggcaaaaactatcggggcactatgagcaaaactaagaatgggatcacatgtcagaagtggtcgagcacctctccgcataggcctcgtttctccccggctacgcatccgtctgaaggactggaggagaattattgccgcaaccccgataatgaccctcagggcccttggtgttatacaacagatcctgagaagagatatgattattgtgatatcttagaatgtgaggaagaatgcatgcattgctcaggcgagaactacgatggaaagatttctaagacaatgtcagggctggagtgccaagcatgggatagccaaagtccacatgctcatggctacattccgtcaaaatttcctaacaagaatttaaagaagaattactgccggaacccggatagagagctgcgcccttggtgctttacgactgatcccaacaaacgctgggaactgtgtgatattccgcgttgtacaacaccacctccgtcatctgggcccacctatcaatgcctaaaaggcactggtgagaattatcggggcaacgtggcggtgactgtatcgggacatacttgtcagcattggtcagcccaaactccgcatacacataatagaacaccggagaattttccatgcaaaaatcttgatgaaaattactgcagaaatcctgatggcaagcgagcaccatggtgccacacgacgaatagccaggtacgttgggaatattgcaagattccgtcatgcgactcatcacctgtaagcacagaacagctcgcaccgactgcccctccggaactgacacctgtagttcaagattgctaccatggagacggtcagtcttatagaggcaccagcagtacgaccacgacgggaaaaaagtgtcaatcttggagtagcatgacgccacaccgccatcagaaaacgcctgaaaactatccgaatgccggcttgactatgaactattgtcgaaatcccgacgccgacaagggaccgtggtgtttcactacagatccatcagtacgctgggagtattgcaacctcaaaaaatgctctggcacggaagcatcggtggtggccccacctccggttgtgttgttgccggatgttgaaaccccgtccgaagaagattgcatgttcggcaatggaaagggatataggggtaagcgggcaacgactgtcacaggaacaccatgtcaagattgggctgctcaagaacctcaccggcatagtattttcacaccggaaactaacccgagagcggggcttgaaaaaaattactgtagaaacccggacggcgatgtgggcggtccgtggtgctatacgacgaacccgcggaaattgtatgattattgcgacgtcccgcagtgcgcagcgcctagctttgattgcggaaaaccacaagtggaacctaaaaaatgcccgggacgggtggttggcggttgcgtagctcatccacattcctggccatggcaagtctcccttcgaacgcgttttggtatgcatttttgcggcggaactttgatctcacctgagtgggttttaaccgcagcgcattgcctcgagaaaagcccaagaccatcttcttacaaagtcattcttggtgcgcatcaggaggtgaatctggaaccgcacgtgcaggaaattgaggtgagccggctcttcctagaacctacacggaaggatattgcgctgctgaaactgtcaagtccagccgtaatcaccgacaaggtgattccggcatgtttgccaagtccaaactacgttgtagctgataggacagagtgctttattacgggttggggcgaaactcaaggtacgtttggagccggattattaaaagaagcgcaactgcctgtaattgaaaataaagtctgcaatcgatacgaattcctgaacgggcgtgtccagtccacggaactatgcgccggccacttagctggaggtaccgacagttgccaaggcgattcagggggccctctggtctgcttcgagaaagataaatatatcctgcaaggtgtcacttcctggggacttggttgcgcacgaccgaataagccgggcgtctatgtgcgtgtcagtcgctttgtcacctggattgagggcgtgatgcggaataat

SEQ ID NO: 6534 - DNA, 2430 bp, Artificial Sequence
  derived and/or modified sequence
atggagcataaagaagtggtactcctgctgctgttgttcttaaagtctggccagggagaacctctggatgactacgtcaatacccagggcgcctccctcttctcggtcactaaaaagcagcttggcgcgggcagcatcgaggagtgcgctgcaaagtgtgaagaggatgaagagtttacctgccgcgccttccaataccacagcaaggagcaacagtgcgtcatcatggccgaaaacagaaagtcctccatcatcatccgtatgcgcgacgttgtgctcttcgagaagaaggtgtatctgtcggagtgcaagaccggaaatgggaagaactaccgtggcacaatgagcaaaactaagaacggaataacgtgccagaagtggagctcgacctccccgcaccgtccccgtttcagtccggcgacgcatcccagcgagggccttgaggagaactactgccgcaatcccgataacgacccgcagggcccctggtgctataccactgatccggagaaacgctacgactactgtgatattcttgagtgcgaggaggagtgtatgcattgctcgggcgaaaactacgacggtaaaattagcaagaccatgagtggcctggagtgtcaagcatgggactctcaatccccgcacgcccacggctatattccctccaagtttccgaacaagaacctcaaaaagaactactgccgtaaccccgatcgcgagcttagaccctggtgtttcaccacagatccgaacaaacgctgggagctgtgcgacatcccccgttgtacaaccccgcccccctccagtggccctacgtaccagtgtctgaaaggcactggcgagaattaccgaggtaacgttgctgtgacagtctcgggccatacttgtcagcattggagtgctcagaccccccacacccataatcggacccctgagaactttccgtgtaagaacttggacgagaactactgccgcaaccctgatggcaagcgtgccccgtggtgtcacactactaactctcaagtgcgctgggagtactgcaagatcccctcctgtgattcctctcccgtgtctaccgagcagctcgccccaacggccccgcccgagctgacccccgtcgtccaagactgttaccacggtgatggccagtcctaccgtggcaccagttcgaccaccacaacaggaaagaagtgtcaaagctggtcttcaatgaccccccaccgccaccagaagactcctgagaactacccgaacgcaggcttgaccatgaattattgccgcaatcctgacgccgacaaaggcccctggtgctttacaaccgatccctcggttcgctgggagtactgcaacctcaagaagtgctccggtaccgaggcttccgtagtggcccccccccctgtggtactgctcccggacgttgaaactccttccgaggaggattgtatgttcggcaacggcaaggggtaccgcggcaagagggctaccaccgtcacgggtaccccttgtcaggactgggcagcccaggagccccatcgtcattcgattttcactccggagactaaccctcgcgcgggcctggagaagaattattgtcgtaatcccgatggagatgtaggcggtccgtggtgctacaccacgaatcctcgcaagttgtacgactactgcgacgtgccccagtgcgcggcacctagctttgattgcggcaagccgcaggttgaaccgaagaagtgcccgggccgtgttgtcggcggatgcgtggctcaccctcatagctggccttggcaagtctcattacgaactcgctttggcatgcacttctgcggcggtaccctgatatctccagagtgggtcctcacggccgcgcactgccttgagaagagcccccgcccatcctcgtacaaggtcattcttggcgctcatcaggaagtgaacctggaaccgcacgtccaggagattgaggtgagtagattgttcctggaaccaacccgtaaggacattgccctcttgaagctatcctcacctgccgttatcaccgataaggttatccccgcttgccttccttctcccaactacgtggtcgccgacaggacggagtgtttcatcaccggttggggcgagactcaggggaccttcggcgcgggcctcctgaaggaggctcaactcccggtcatcgagaataaagtgtgcaatagatacgaattcctgaacggccgtgtccagtccactgagctttgtgccggacatctagctgggggcaccgattcgtgtcagggcgattcaggcggacctctcgtctgcttcgagaaggataagtacatcctccagggcgttaccagctggggtctcggttgcgcacgtcccaataagcctggcgtttacgttcgcgttagtcgcttcgtcacctggattgaaggcgttatgcgcaacaat

SEQ ID NO: 6535 - DNA, 2430 bp, Artificial Sequence
  derived and/or modified sequence
atggaacacaaagaagtagtgctcctcctcctattattcctaaaatcgggacaaggcgagcctcttgatgattatgtcaatacccaaggagcgtcgcttttttctgtgactaaaaaacaacttggagctggatcaattgaggagtgtgcagcaaaatgtgaagaggatgaggaattcacgtgccgcgcttttcaatatcacagtaaggagcaacaatgtgtcattatggcggaaaatcgaaaatcaagcatcattatcagaatgagggatgtggtgttatttgaaaaaaaggtgtatttatctgaatgcaaaacaggaaatggtaagaactatcgtgggacaatgtcgaagactaaaaatggaattacatgtcaaaaatggagttctacctcgccgcatagaccacgtttctctccggcaacacacccatcggagggattggaagagaattattgtagaaacccagataatgaccctcaaggaccatggtgctacacaaccgatcctgaaaaacgttatgactattgcgatatactggagtgtgaggaagagtgtatgcactgctcaggggaaaactacgatgggaaaatttcaaaaacaatgtccggtcttgaatgtcaagcatgggacagccaatctcctcatgcacatggttacattccctcgaaattccccaataaaaatctcaagaaaaattattgtcgtaacccggaccgtgaactgagaccatggtgcttcacaactgatccaaataagcgatgggaattgtgcgacattcctcgatgcactactccaccaccaagttctggacccacctaccaatgcttgaaaggaactggtgaaaattacagaggtaatgtggctgtaacagttagtggacatacttgtcaacattggagcgcacaaactccacatacgcataatcggactccggagaactttccttgcaaaaacctggatgaaaattactgtagaaatccagatggaaaacgtgcaccgtggtgccacactacaaattcgcaagtgcgttgggagtattgcaagattccatcttgcgactcatctcctgtcagcacagaacaattggcgccaactgccccacctgaacttactcctgtggttcaagattgttatcatggagatggtcaatcgtatagaggaacatcgagtaccaccaccaccggaaaaaaatgtcaatcttggtcatcaatgacaccacaccgacatcaaaaaaccccagaaaactacccaaacgctggattaaccatgaattattgccgaaatccggatgcggataagggaccgtggtgctttaccaccgatccatctgtccgctgggagtactgtaatcttaaaaagtgttcaggaacagaagctagtgtagttgcaccaccgccagttgttctacttccagatgttgaaacgccgtccgaagaagattgtatgttcggcaatggaaaaggatatcgtgggaaaagggcaacgactgtaactggaactccatgtcaggattgggctgcacaggagcctcatagacattcaattttcacgccagagaccaacccaagggcaggcctcgagaagaactactgcaggaatccagatggagacgtaggtggaccctggtgttacaccaccaaccctagaaagctctacgattactgcgatgtccctcaatgtgcagcgccatcctttgattgcgggaaaccgcaagttgaacctaaaaagtgtccgggtagagttgttggcgggtgcgttgcacacccacactcatggccttggcaagtatcattgcggacgcggttcgggatgcatttctgtggtgggacattgatttcgccagaatgggtgctcacggcagctcattgccttgaaaaaagtccacgtccatcttcatataaggttatcctgggagcacaccaagaagtcaatttggagccacacgtgcaagaaattgaagtgtcaaggctcttcttggagccgacgcgtaaggatatcgccttactgaaattgagttctccagcagtcattacagataaagttattccggcctgtctcccgtccccgaattacgtcgtggctgaccgtacagaatgttttatcaccggatggggtgagacgcagggaacattcggagctggactacttaaggaagcacaactcccagtaattgaaaataaagtttgtaatcggtatgaattcttgaatggaagagtccagtcaacagaattgtgtgcaggacatctcgccggcgggaccgattcatgtcaaggagactctgggggaccacttgtgtgttttgagaaggataaatatatcctgcaaggagtgacttcgtggggactggggtgtgctcgcccaaataaaccaggtgtctacgtaagagtaagccggttcgttacatggatcgagggagtaatgcgaaataat

SEQ ID NO: 6536 - DNA, 2430 bp, Artificial Sequence
  derived and/or modified sequence
atggaacataaggaagtcgtcctcctgttactgttattcctcaagagcggacagggggagccattagacgactatgtcaatactcagggtgccagccttttctcagttactaagaagcagctgggggcgggctcgattgaggagtgcgccgccaaatgtgaagaggacgaagagtttacatgtcgagcctttcaatatcactcaaaagagcagcaatgtgtgatcatggcagagaacaggaagagctccattatcatacgaatgagggatgtagttctatttgagaagaaggtctacctgtcagagtgtaagaccggcaatgggaaaaattaccgaggcaccatgtcaaagaccaagaatgggatcacctgccagaagtggagttctacttccccacaccgacctcggttttcccccgcgactcaccccagtgaggggttggaagagaactactgtcggaaccccgataacgatcctcagggtccctggtgctataccacagatccagaaaagaggtacgactactgtgatattctggaatgcgaggaggaatgcatgcactgcagcggagagaattacgacgggaaaataagcaagaccatgagcggtcttgagtgccaagcctgggatagccaatctccacacgcacacggctatatcccaagcaagtttcccaataaaaatttgaagaaaaattattgccggaaccccgatagggagctccggccgtggtgtttcactacagaccctaataagaggtgggaactgtgcgacatcccccgttgtaccacccccccaccatcgtctggccctacataccagtgccttaagggcactggagagaactataggggtaatgtagctgtgaccgttagtgggcatacttgtcagcattggtccgcccagaccccgcacacacataacagaactcccgagaactttccctgcaaaaacttggatgagaattactgcagaaatcccgatggtaagagggctccttggtgtcacacaacaaactcccaggtaaggtgggagtattgtaaaattccctcctgtgactcgtcccccgtttctaccgaacagcttgcccctacggctccaccagaactgactcccgtggtgcaggattgctatcacggggacgggcagagttacagaggcacctcttcaacaaccacaacgggcaaaaagtgtcagagttggagctccatgacgccccacaggcaccaaaaaacaccagagaactatccgaatgcaggcctcacaatgaattattgtcgaaacccagatgccgacaagggaccgtggtgctttactacagaccccagcgtaaggtgggagtactgcaatctgaaaaaatgcagtggcaccgaagcgagcgttgtggctccccctccagtcgtccttttgccagatgttgagaccccctctgaggaggactgcatgttcggaaatggcaagggttatcgcgggaagcgagccacaacagtgactggcaccccgtgccaggattgggctgcccaggagcctcacagacattccatattcactccagagaccaaccccagagctggcctggaaaaaaactactgccggaacccagacggggacgttgggggcccctggtgctataccaccaatccaaggaaattgtatgactactgcgatgtaccacagtgtgccgcccctagtttcgactgtggtaagcctcaggttgagccaaaaaagtgccctggtcgcgtggtgggaggctgtgttgcgcaccctcacagttggccgtggcaggtgagtttgagaacgcggttcgggatgcatttttgcggcgggacactgatctcacctgagtgggttcttacggcagctcattgcctggaaaaatctcctaggcccagctcatataaggttatcctgggcgctcaccaggaggtcaacttggaacctcacgtgcaagaaatcgaagtgagccgtctgttcctcgaacctaccaggaaagacattgccttgttgaagttgtcatcaccggccgtgatcactgacaaagtcatccccgcctgtctgcccagtcccaattacgtggtcgcagaccgcaccgagtgttttattactggatggggggagacccagggaacctttggcgccggtttgctgaaggaggcacagcttcctgttatcgaaaacaaggtatgtaaccgttatgagttccttaacggtcgggtgcagtcaaccgagctgtgcgctggtcaccttgctggtggaacagacagttgtcaaggcgactcaggtggccccttagtatgctttgagaaggacaaatacatacttcagggggtcacgtcctggggcctcgggtgtgccaggcccaacaagccgggtgtctatgtgcgagtgtcccgctttgtgacttggattgaaggcgtaatgcgaaacaat

SEQ ID NO: 6537 - DNA, 2430 bp, Artificial Sequence
  derived and/or modified sequence
atggagcataaggaggttgttcttctgctgcttttgttcctaaagagcggacaaggagaacccctggatgactacgtcaacacacagggcgccagcctgttctcagttaccaaaaaacagctgggagccggctctatcgaagagtgcgccgccaaatgcgaggaagatgaagagtttacctgccgcgctttccagtatcactcgaaggaacagcagtgcgtgatcatggcagagaatagaaagtccagtatcatcattcggatgcgggacgtggttctgtttgaaaaaaaggtgtatttatcggagtgtaagactggcaacggcaagaattatcgaggaactatgtctaaaaccaagaatggcatcacttgtcaaaaatggtccagtaccagtccccatcgtccccggttttctcctgctactcatccttctgaagggctggaagagaactactgtagaaatcctgataatgacccccaggggccgtggtgctataccacagacccggagaagcgatacgactattgtgatattctggaatgtgaggaagaatgcatgcattgctctggcgagaattatgacgggaagataagcaagacaatgtctgggctggagtgtcaggcatgggactctcagagtccgcatgctcatgggtatattccaagtaagtttcctaataaaaaccttaaaaagaattactgtagaaacccagaccgggagctgcgtccctggtgcttcacaaccgacccaaacaagcggtgggagctctgtgacattcctagatgtactacacctccacctagttccggaccgacctatcagtgccttaaggggactggtgagaattaccgaggtaatgttgccgtgactgtctccgggcatacctgccagcactggagcgcacagaccccgcacacccataatcgtacaccagagaactttccttgtaagaatctcgatgagaattactgccggaaccccgacggcaagcgcgcaccctggtgccacactacaaatagtcaggtgcggtgggaatactgtaagatcccctcctgtgattcttcccctgtgtctaccgaacagctggcccctacagccccccctgaacttactccagtagtacaggactgctaccatggcgatggacaatcatatcggggaaccagctccactacaactactgggaagaaatgtcaatcatggagcagcatgactccccatcgccatcagaagacacccgagaattatccaaatgctggcctgacaatgaactattgtcggaacccagacgctgacaagggaccctggtgctttacgaccgacccctccgttcgatgggaatattgcaatttgaaaaaatgcagcggaaccgaagcttctgtagttgccccaccccccgtggtgctgctcccagatgtggaaactcccagcgaggaggactgcatgttcggcaatgggaaaggatatagagggaaacgggccaccaccgtgacggggacaccctgtcaggattgggccgcccaggagccacataggcatagtattttcacacctgaaaccaaccctcgggccggcctcgagaagaactactgtcgtaaccccgatggggacgtcggcgggccttggtgttataccaccaaccccagaaaattatacgactattgcgacgtgccacaatgtgcagccccaagcttcgactgcgggaaaccccaggtggagcccaagaagtgccccggacgcgtcgtggggggttgtgtggcacacccacattcgtggccctggcaggtctcgctgagaacacgatttgggatgcacttttgcggcggaaccttgatctcccccgagtgggtcctgaccgccgcacattgtctagaaaaatccccaagaccatcttcctacaaggtaatcctcggagctcatcaagaggtcaacttggagcctcacgtacaagagatagaagtttccagactcttcctcgaacccacccgaaaggatatagcactgttaaagctctcctcgcccgcggtgattactgacaaggtcatcccggcttgtttacccagcccgaactacgtcgttgcggatcggacagagtgttttataaccggctggggagagacacaggggacgttcggtgctggtctgcttaaagaagcccagctccctgtcattgaaaacaaggtatgtaacaggtacgaattcttgaacgggagggtacaaagcaccgaactttgcgctggccatctggctggaggaacagattcctgtcagggtgatagtggaggcccgttggtatgcttcgagaaagacaagtacatcctacagggcgtgacaagctggggcctgggatgcgctcggccaaataaacctggtgtatacgttcgtgtctccaggtttgtaacgtggattgaaggtgtcatgaggaacaac

SEQ ID NO: 6538 - DNA, 2430 bp, Artificial Sequence
  derived and/or modified sequence
atggaacacaaagaggtcgttcttctcctgcttctgttcctgaagtccgggcagggggaacctcttgatgactacgtgaacacgcaaggcgcctccttgttcagcgtcacaaagaaacagctgggggccgggtctattgaggagtgcgccgccaaatgtgaagaggatgaggaattcacatgccgcgcgttccaataccactccaaggagcagcagtgcgtgattatggctgagaatcggaagtcctccatcataatccggatgcgggacgtggtcttatttgaaaagaaggtctacctcagcgaatgcaagaccgggaacggaaaaaattatcggggcaccatgagtaagacaaagaacggcataacatgtcagaagtggagttctactagtcctcatagaccacgctttagtcccgccacacacccgtccgagggcttggaggagaattactgcaggaaccctgataatgatccacaggggccctggtgctatacaactgatcctgaaaagcgctatgattactgcgacattctcgagtgtgaggaggagtgtatgcattgttcaggagagaactacgacggaaagatctccaagaccatgtccgggttggagtgccaggcgtgggactcgcagtccccacatgcccatgggtatatccctagtaagtttcctaacaagaacttgaaaaaaaattactgccgcaacccggaccgggagctgcggccatggtgtttcaccactgacccaaataagagatgggaactctgcgacattccccggtgtaccacaccaccaccatcatccgggccaacctaccaatgcctgaagggaacgggggagaactaccggggtaatgtggccgtcacagtgagtggccatacgtgtcaacactggtccgcccaaactcctcatacgcataacaggactccggaaaacttcccttgcaagaacctggatgaaaactattgccggaaccctgatgggaagagagccccatggtgccacacgaccaattcgcaagtgcggtgggagtattgtaagatcccatcgtgtgactcctcacctgtgtccactgaacaactggcaccaactgctcctcctgagctcacccccgttgtccaggattgctatcatggcgatggccagagctaccgggggaccagttccaccaccacaacgggaaaaaagtgtcagagctggagttccatgactcctcaccgccatcagaagacaccggagaactacccaaatgctggactgacgatgaactactgtaggaatcctgacgccgataaaggcccatggtgcttcaccactgatccgagtgtccgctgggaatactgtaatctgaagaaatgctctggaacggaggcaagtgtggtcgcacccccacctgtagtgctcctccccgacgtggaaaccccttcggaagaggactgtatgtttgggaacgggaagggctatagggggaagagggcaaccaccgtcacaggtaccccctgtcaagattgggccgcccaggagccgcataggcactcaatcttcacgcccgagactaaccctcgcgccggactggagaaaaattactgccggaaccctgacggcgacgtgggtggcccatggtgctacaccacaaatccccgaaagctgtatgactattgtgacgtgccccagtgcgccgcaccttcctttgattgtgggaagcctcaagtcgaaccaaaaaagtgtcccggtagggtggtgggcggctgtgtggcacacccgcacagctggccatggcaggtgagtttgcgaacacgcttcggaatgcacttctgcggaggaaccctgatcagccctgaatgggttctcaccgctgctcactgcctggaaaagagcccccggccctctagctataaagtgattctgggtgctcatcaagaggtgaatctcgagccccacgtacaggagattgaggtgagccgcttatttctggagccgaccagaaaggatattgccctgttgaagcttagctctcccgccgtgatcaccgacaaggtcattcccgcttgccttcccagcccgaactacgtggtggcagatagaaccgaatgttttatcacagggtggggagagacgcaggggaccttcggcgcaggcctgctgaaagaggcgcagctacccgttattgaaaacaaagtgtgtaatagatacgagttccttaacggccgggtccagtcaaccgaactctgcgctggccacctggccggagggaccgacagttgtcagggtgatagtggcggacccctcgtgtgtttcgagaaagataaatacattctgcagggggtcaccagctggggtctgggctgtgcccgcccgaacaagcccggagtatatgtccgggtaagtcgttttgtcacttggatcgagggtgtgatgaggaataac

SEQ ID NO: 6539 - DNA, 2430 bp, Artificial Sequence
  derived and/or modified sequence
atggaacataaagaagttgtactactactactattatttctaaaatcgggtcaaggtgaaccgttagatgattatgttaatacgcaaggtgcgtcgttattttcggtaacgaaaaaacaactaggtgcgggttcgatagaagaatgtgcggcgaaatgtgaagaagatgaagaatttacgtgtcgtgcgtttcaatatcattcgaaagaacaacaatgtgtaataatggcggaaaatcgtaaatcgtcgataataatacgaatgcgtgatgttgtattatttgaaaaaaaagtatatctatcggaatgtaaaacgggtaatggtaaaaattatcgtggtacgatgtcgaaaacgaaaaatggtataacgtgtcaaaaatggtcgtcgacgtcgccgcatcgaccgcgtttttcgccggcgacgcatccgtcggaaggtctagaagaaaattattgtcgaaatccggataatgatccgcaaggtccgtggtgttatacgacggatccggaaaaacgatatgattattgtgatatactagaatgtgaagaagaatgtatgcattgttcgggtgaaaattatgatggtaaaatatcgaaaacgatgtcgggtctagaatgtcaagcgtgggattcgcaatcgccgcatgcgcatggttatataccgtcgaaatttccgaataaaaatttaaaaaaaaattattgtcgtaatccggatcgtgaactacgtccgtggtgttttacgacggatccgaataaacgatgggaactatgtgatataccgcgatgtacgacgccgccgccgtcgtcgggtccgacgtatcaatgtttaaaaggtacgggtgaaaattatcgaggtaatgtagcggtaacggtttcgggtcatacgtgtcaacattggtcggcgcaaacgccgcatacgcataatcgtacgccggaaaattttccgtgtaaaaatttagatgaaaattattgtcgaaatccggatggtaaacgtgcgccgtggtgtcatacgacgaattcgcaagttcgttgggaatattgtaaaataccgtcgtgtgattcgtcgccggtttcgacggaacaattagcgccgacggcgccgccggaactaacgccggtagttcaagattgttatcatggtgatggtcaatcgtatcgtggtacgtcgtcgacgacgacgacgggtaaaaaatgtcaatcgtggtcgtcgatgacgccgcatcgtcatcaaaaaacgccggaaaattatccgaatgcgggtttaacgatgaattattgtcgaaatccggatgcggataaaggtccgtggtgttttacgacggatccgtcggtacgttgggaatattgtaatctaaaaaaatgttcgggtacggaagcgtcggttgtagcgccgccgccggttgtactattaccggatgtagaaacgccgtcggaagaagattgtatgtttggtaatggtaaaggttatcgtggtaaacgagcgacgacggttacgggtacgccgtgtcaagattgggcggcgcaagaaccgcatcgacattcgatatttacgccggaaacgaatccgcgtgcgggtttagaaaaaaattattgtcgtaatccggatggtgatgtaggtggtccgtggtgttatacgacgaatccgcgtaaattatatgattattgtgatgttccgcaatgtgcggcgccgtcgtttgattgtggtaaaccgcaagtagaaccgaaaaaatgtccgggtcgtgtagttggtggttgtgtagcgcatccgcattcgtggccgtggcaagtatcgttacgtacgcgttttggtatgcatttttgtggtggtacgctaatatcgccggaatgggtattaacggcggcgcattgtttagaaaaatcgccgcgtccgtcgtcgtataaagtaatactaggtgcgcatcaagaagtaaatctagaaccgcatgttcaagaaatagaagtttcgcgattatttctagaaccgacgcgaaaagatatagcgttattaaaattatcgtcgccggcggttataacggataaagttataccggcgtgtctaccgtcgccgaattatgttgtagcggatcgaacggaatgttttataacgggttggggtgaaacgcaaggtacgtttggtgcgggtctactaaaagaagcgcaactaccggttatagaaaataaagtatgtaatcgatatgaatttttaaatggtcgagtacaatcgacggaactatgtgcgggtcatttagcgggtggtacggattcgtgtcaaggtgattcgggtggtccgctagtatgttttgaaaaagataaatatatattacaaggtgttacgtcgtggggtctaggttgtgcgcgtccgaataaaccgggtgtatatgttcgagtatcgcgatttgtaacgtggatagaaggtgtaatgcgtaataat

SEQ ID NO: 6540 - DNA, 2430 bp, Artificial Sequence
  derived and/or modified sequence
atggaacacaaagaggttgtgctattgttgctactgtttctgaagtctggtcagggcgaacctctggatgattatgtgaacacccagggtgcttcactcttttcagttaccaaaaagcagcttggcgccggtagcattgaggagtgcgccgcaaaatgcgaggaggacgaggaatttacctgtcgagcctttcagtatcactcaaaggaacagcaatgtgtgatcatggcagaaaatagaaagtcctcaataatcatccgaatgagggacgtggttctgttcgagaaaaaggtgtacctgagcgaatgcaaaacaggcaatggaaagaactaccgaggaaccatgtctaagacaaagaatgggattacttgccaaaagtggtcatcaacaagcccacatcgccccagattctcccctgcaacacacccaagcgaggggctcgaagaaaactactgtagaaatcctgataacgaccctcagggcccttggtgctataccactgaccccgagaagaggtatgactattgcgatatcctcgaatgtgaagaggaatgcatgcattgcagcggcgaaaactatgacgggaagatttcaaagaccatgtctggcctggaatgtcaggcctgggattcccagtctccccatgcccacggctatatacctagtaaatttccaaacaaaaatctgaagaagaattactgtagaaatcccgatcgggagctgcgaccgtggtgcttcacaacagaccccaacaaacgatgggagctctgcgacatccctcgatgcacgacccccccacccagttccggccctacatatcagtgcctgaagggaactggcgagaattaccgaggaaatgtcgcagtgacagtgtctgggcacacatgccagcactggagtgctcagacacctcacacacacaataggacccccgagaactttccctgcaaaaacttggatgagaactactgtaggaatcccgatggcaaaagggctccatggtgccacacaaccaactcacaggtacgatgggaatattgcaaaattccctcctgcgattcatcccccgtgtccacagagcagctggctcctactgctcctccagaactgacacccgtcgtacaggactgctatcatggcgacggacagagctatcgagggactagtagcaccactacgaccggaaagaagtgccagagctggtctagcatgactcctcacagacatcagaagacccccgaaaactatcctaatgccggcctgactatgaattactgccgaaatccagacgcggacaaggggccttggtgcttcacgactgaccccagtgtcagatgggagtattgtaatttgaagaagtgtagcgggaccgaggcctctgtggtggctcccccgccggttgtgctgctgccagacgtggaaaccccctccgaagaggactgcatgtttggtaacggcaaaggctatagggggaagcgagcgaccaccgttactggtacaccttgccaggactgggccgcgcaggaaccacacagacactcaatatttaccccagaaacaaacccaagagccggactggagaagaactactgtcgaaatccggatggcgacgtgggaggaccgtggtgttatactacaaatcctaggaagctgtacgactactgtgatgtacctcagtgcgccgcccctagtttcgattgtggcaagcctcaggtcgagcctaagaagtgtccgggtagagtggtcggtgggtgcgtggctcatcctcatagctggccttggcaggtatccctgaggacaaggtttgggatgcacttctgcgggggcactctaatttcacccgagtgggtgttgactgcagctcattgcctagagaagagtccaagaccatcatcatataaagttattctaggggctcaccaggaagtgaacttggaaccgcatgtgcaggaaatcgaagtcagtagattgttcttggaacctacaaggaaggacattgccctgttgaagttgagttctcccgctgtgataacggataaggttattcccgcctgtctacccagccccaactatgtcgtagctgaccgcactgagtgtttcatcactggctggggcgagacacaagggacatttggcgctggacttctgaaggaggcacagttgccggtcatcgaaaataaggtgtgcaatcgatacgaattcttgaatgggcgtgtgcagagcacagagctgtgtgctgggcacctcgcgggtggaacagattcctgtcagggagatagcggaggtccgcttgtctgttttgagaaagataaatacattctgcaaggcgtgacaagctggggccttggctgtgccagaccaaataaaccaggcgtgtatgttcgagtctccaggttcgtgacctggatagaaggcgtgatgaggaataat

SEQ ID NO: 6541 - DNA, 2430 bp, Artificial Sequence
  derived and/or modified sequence
atggagcacaaggaggtagtgctgctcctcctcctgttcctgaaatccgggcagggtgaaccactggacgactacgtcaacacccagggagcgtccctgttctcggtgactaagaagcagctgggcgctggctccattgaagagtgcgcggccaagtgtgaagaagatgaagagtttacctgccgcgcgtttcagtaccactcaaaggaacagcagtgtgtgatcatggcagagaaccggaagtcctccatcatcatccgcatgagagacgttgtgctgttcgaaaagaaggtctacctgagcgagtgcaaaaccgggaacggcaagaactatcgcggtactatgtccaaaacgaaaaacggcatcacttgccagaagtggtcctcgacgtccccacatagacctcggtttagcccggccacccacccgtcggaaggactggaagaaaactactgtcgcaatccagataacgacccacaagggccgtggtgctatactaccgatccggagaaacgctacgattactgcgacattctggaatgcgaagaagagtgcatgcattgcagcggagagaattacgatggaaagatcagcaagactatgtcgggactcgagtgtcaagcatgggactcccaatcgccacatgcccacgggtacatcccatcgaaattcccgaataaaaacctcaagaagaattactgtcgaaacccagatcgggaacttcgaccgtggtgttttaccacggacccaaataagcggtgggagttgtgtgatattccacggtgcactactccacccccatcgagcggtcctacttaccagtgcttgaagggaacgggtgagaattaccgggggaacgtcgccgtgaccgtgagcggacatacctgccagcattggtcagcgcaaacccctcatactcacaacaggacgcctgagaatttcccatgcaagaatcttgacgagaattattgcagaaacccggacggaaaacgggccccgtggtgccataccacgaactcacaggtgaggtgggagtactgcaagatcccgtcctgcgattcaagccccgtgagcaccgaacaactcgctcccactgcccctccggagcttactccggtggtccaggactgttaccacggcgatggacagtcttacagaggcacctcctcgactactaccactggaaagaagtgccagtcgtggtcatccatgaccccccatcggcaccaaaagacccccgagaactacccgaatgcaggtcttactatgaactactgccgtaacccggatgccgacaagggcccctggtgtttcaccaccgacccatcggtgagatgggaatactgcaatctgaaaaagtgctcggggaccgaggcctctgtcgtggccccaccccccgtggtcctccttccggacgtggaaactccgtccgaagaggactgtatgttcggaaacggtaaaggatacagaggaaagcgcgcgactaccgtgaccggtactccgtgccaagactgggccgcacaggaaccgcacagacactcaatcttcaccccggagacgaacccgagggctggcctggaaaagaactattgcaggaaccctgacggagatgtgggaggaccttggtgctacaccaccaacccaagaaagctctacgactactgcgatgtgccgcagtgcgctgcaccgtcgttcgactgcggcaaaccgcaggttgagccaaaaaagtgccctggacgcgtcgtgggaggctgcgtggcccacccgcacagttggccttggcaagtcagcctgcgcacccggttcggcatgcatttttgcggcggaaccctcatctcgccggaatgggtcctcactgcggcccattgtttggaaaagtcgccgcgcccgtcaagctacaaggttatcctcggggctcaccaggaagtgaacctggagccacacgtgcaggaaatcgaagtgtccaggctgttcctggaaccaactcgcaaagacatcgccctcttgaagctgagtagcccggcggtcataaccgacaaggtgatccctgcgtgtctgccgtcacctaattacgtggtggccgaccggaccgagtgcttcattactggctggggagaaactcaggggacttttggcgcaggactgctgaaagaagctcaactgcctgtgatcgagaataaagtctgcaaccgctacgaattcctgaacggccgggtgcaatcaaccgagttgtgcgccggccacctggcggggggaaccgattcgtgtcagggagattccggaggtccgctggtgtgtttcgaaaaggacaaatacatcctgcaaggagtcaccagctggggactcggatgcgcacggcctaataagcccggagtgtacgtccgcgtgtcacgcttcgtcacttggatcgaaggagtgatgcgcaacaat

SEQ ID NO: 6542 - DNA, 2430 bp, Artificial Sequence
  derived and/or modified sequence
atggaacataaggaagtggtactgctgcttctgctgttcctgaaaagtgggcagggggaaccattagatgattacgtgaatacgcagggcgcgtcccttttcagcgtcacgaaaaaacagctaggagccggctctatcgaggagtgcgccgctaagtgcgaggaggacgaagaatttacatgtcgagcctttcaatatcattctaaggagcaacagtgcgtcatcatggcagagaatcgaaaatcatcaatcatcataagaatgagagacgtggtgctgtttgagaagaaggtttatctcagtgagtgtaagacaggcaatgggaagaattacagagggacaatgtctaagaccaaaaatggcattacctgtcaaaagtggtccagtacctccccacacagacctagattctcaccagcgactcatccatctgaaggattggaggaaaactactgtcgcaatccagataacgatcctcagggaccttggtgctacacgacagacccagagaaacgttatgactattgcgacattcttgaatgcgaagaggaatgcatgcattgttcaggggagaactacgatggcaagatttcaaagacaatgagtggattggagtgtcaggcatgggactcacaaagccctcatgctcacgggtacatcccttccaaattccctaataaaaacctgaagaagaactactgcagaaaccccgaccgcgagttgcgaccgtggtgtttcacgaccgaccccaataagagatgggagctctgtgatatcccaaggtgtacgacaccccccccaagcagtggaccaacgtaccagtgcctgaagggtaccggcgagaactatagaggtaatgtcgctgtgaccgtgagcggtcacacatgtcagcactggagcgcgcaaactccccatacacataacagaacacctgagaatttcccatgtaagaatctggacgaaaattactgcagaaatccggacgggaaaagggcaccttggtgccacacaactaactcacaggttagatgggagtattgtaagatcccatcatgcgacagttcacccgtgagcaccgaacagctagcaccgacggcgccgcccgaactgacaccagtcgttcaggactgctaccacggcgacggccagagctaccgcggcaccagtagcaccacaacaacaggcaagaagtgtcagtcttggtcctccatgaccccacaccgacaccagaagacacccgaaaattaccctaatgccggcctgacgatgaactattgtcgcaacccggatgccgacaaaggtccttggtgctttaccacagatcctagcgttagatgggagtactgcaatttaaaaaaatgttcgggaacagaagcatcagtcgtcgccccaccacctgttgtgctgttaccggacgtggaaacaccatctgaggaggattgcatgttcggaaatggaaaaggatatcgaggcaaacgcgcaacgacagtgacaggcactccttgccaagattgggccgcccaggagccccataggcatagtatctttacccccgaaacaaacccccgcgccggtttggaaaaaaactactgcaggaaccccgatggagatgtgggagggccttggtgttacaccacaaacccacgtaaattatacgattactgcgatgtcccacagtgtgcagcgcccagcttcgactgcggcaaaccacaggtggaacccaagaaatgtccagggagggtggtaggagggtgtgtagcacatccacattcatggccctggcaggtgtctctcaggactaggttcggcatgcacttctgtggtggcaccctcatctctccggaatgggtgctcactgccgctcattgcctagaaaagagcccaaggccatcttcttataaggtcatcctcggtgcccatcaggaggtgaacctggagcctcacgtgcaggagattgaggtgtcacgtctttttctcgagcctaccaggaaggatatcgcactgctgaaactgtcatctcctgcagttattaccgacaaggtcattcctgcatgcctcccgtcacccaactatgtcgtcgcagatcggactgagtgtttcataacaggctggggcgagacccaggggacatttggcgcaggcctcttgaaagaggcccagctccccgttatcgagaacaaagtctgtaaccgctatgagtttctgaacggaagggttcagtccacggaattgtgtgcaggacatctcgccggggggacagatagctgccaaggcgacagtggggggcctctggtatgtttcgagaaggacaagtacatcctccaaggggtgacatcgtggggattgggatgtgctcggcctaataagccgggagtctacgtgagggtatctcgattcgtcacgtggatcgagggggtgatgcgtaacaac

SEQ ID NO: 6543 - DNA, 2430 bp, Artificial Sequence
  derived and/or modified sequence
atggagcataaagaggtggtcctcctgctgttactcttcttgaagtctggtcagggagagcctctagatgattatgtgaatacgcaaggcgcatcccttttttcggtgaccaaaaagcagctcggcgccgggagcatcgaggaatgtgctgcgaaatgcgaagaagacgaggaattcacatgccgggcgttccagtatcattctaaggaacagcagtgcgtgatcatggcagaaaatcgcaaatcctctatcatcatccggatgagggacgtcgtactgtttgagaaaaaagtgtacctttccgagtgcaagacggggaacggtaaaaactatagagggactatgagtaaaacgaaaaacggaattacttgtcagaagtggtccagcacgtcgccccaccgaccacgatttagccctgccacacacccctccgaggggctggaagaaaactactgcagaaatcccgacaacgacccccaaggaccctggtgttataccacagatcccgagaaacggtatgattactgtgatatactggagtgtgaagaggaatgtatgcattgttccggggaaaactatgacggcaagatatcaaaaaccatgtccggactggagtgccaggcctgggattcgcagagcccgcacgcccacggttacatccctagcaaatttccaaataaaaatcttaagaagaactactgtcgtaaccctgacagagagctcagaccatggtgtttcacgaccgaccctaacaagcgatgggagctctgcgacatacctagatgcaccacacctcctccatcctctggacctacatatcaatgcttaaaggggacgggggagaattatcgcggcaacgtcgcggtcaccgtgtccggccatacttgccagcactggtctgcacagactccccacacgcacaacagaacaccagagaatttcccctgcaaaaacctggatgaaaattactgcaggaaccctgacgggaagcgtgccccttggtgtcatactaccaattcccaagtcaggtgggaatactgtaagattccaagctgtgattcctcccccgtgagcaccgagcagctggcaccaactgccccaccagagctaactccagtggtacaggactgttatcatggagacggacagtcctaccgggggaccagcagtacaacaacgacaggtaaaaagtgccaaagctggagctccatgactccacaccggcaccagaaaacccccgagaactacccaaacgccggactgaccatgaactactgcaggaaccccgatgcggacaaggggccatggtgtttcaccactgatccctctgtcaggtgggaatactgtaacctcaaaaaatgtagcgggactgaagcctcagtggtggccccacccccagttgtgcttctgcccgatgtcgagaccccctcggaggaagactgcatgtttggtaatggcaagggttatcgaggcaagagggccaccacagtaactggcacaccctgccaagattgggccgctcaggagccccacaggcactcaatctttacccccgaaacgaaccccagagccgggctggaaaaaaactactgtcgaaaccccgacggggatgtcggtggtccgtggtgttacaccaccaatcccaggaagctttacgattattgtgatgtgccacagtgcgccgccccctcttttgattgtggcaaaccgcaggtggagcccaagaagtgccccggacgcgtcgtgggaggttgtgtggcgcatccccacagttggccctggcaggtgagtctacggacgaggtttggcatgcacttttgcggcggcactctaattagcccagagtgggtgttgacagctgcccactgtctggagaaaagcccccggccttcatcttacaaggtaatactgggcgcccaccaggaagttaatcttgaacctcatgttcaggagatcgaagtctccagactcttccttgaaccaactcggaaggacatagccctcctaaaactctcctcccctgctgtaattacagacaaggtgattccggcctgcctcccaagcccaaactacgtcgtggccgataggacagagtgtttcattaccgggtggggagaaacccaggggaccttcggtgctggactgttgaaggaagcccagctccctgtaattgagaataaggtttgcaatagatacgagtttctgaacggccgagtgcagtcaacggagctgtgtgcggggcacttggcaggagggaccgactcttgccaaggagacagcggggggccactcgtctgcttcgagaaggacaagtacatactccagggcgtgacgagctgggggctaggatgcgcacggccaaataagcccggagtatacgttagggtgagtaggtttgtgacatggatcgagggggtgatgcgcaataac

SEQ ID NO: 6544 - DNA, 2430 bp, Artificial Sequence
  derived and/or modified sequence
atggaacataaagaagtcgtacttctccttctcctctttctgaaatccgggcagggggaaccccttgatgattatgtgaatactcagggagctagtctgttcagtgtcacaaaaaaacagctgggggcaggatcaatagaggaatgcgctgctaagtgtgaagaagatgaagaatttacatgtcgtgcattccagtatcattcaaaagaacagcagtgtgtgattatggcagaaaatcgaaaatcctccatcataatccgaatgcgtgatgtggttctcttcgaaaaaaaagtttacctatctgaatgtaaaactgggaacggaaaaaactaccgaggaactatgtcaaagactaaaaatggaataacatgccagaaatggtcctctacatctccccatcgccctcgattttctcctgcgacacacccctcagaagggctcgaagaaaattattgtcgcaacccagataacgaccctcagggaccctggtgttatactacagatcctgaaaaaagatatgattactgtgatattctcgaatgcgaagaagaatgtatgcattgtagtggggaaaattatgatggaaaaatctctaaaactatgtccgggctagagtgtcaggcatgggattctcagtccccccatgctcatgggtatatccccagtaaatttcctaataaaaatctaaaaaaaaattattgcaggaaccctgatcgggaactcaggccctggtgctttacaactgatcctaataaacggtgggaactgtgtgatataccacggtgtactacgccgcccccctcttctggacctacatatcagtgtttgaaagggactggagagaactatcggggaaatgtggccgttactgtgtcaggacatacatgtcagcattggtctgctcagacaccccacacacataaccggacaccagaaaattttccctgcaaaaacctcgatgaaaactactgccgaaatccagatggaaagcgggccccctggtgccacacaactaattctcaggtccggtgggaatattgtaaaatcccctcctgcgatagttcgccagtgtcaactgaacagcttgcaccaacagccccaccagaactgacaccagtggtccaggattgctatcacggagacggacagtcctaccgagggacttcaagtactactacaacaggaaaaaaatgccagtcttggagttctatgactccacataggcaccaaaaaactcccgaaaactatcccaatgccgggctgactatgaattattgtcgaaatcccgatgcagacaaagggccttggtgtttcacgactgatccttcagtccgctgggaatactgtaatctgaagaagtgtagtggaactgaggcatccgtagtcgcgccccctccagtcgtcctgttacctgatgtggagactcctagtgaagaagactgcatgttcggaaacggaaaaggatatagagggaaaagagccactactgtcactgggactccctgccaggattgggcagctcaggaaccccaccgacattctatttttacaccagaaacaaaccctcgagcagggcttgaaaagaattattgcaggaatcctgatggggatgtgggagggccttggtgctacactacgaatccacgcaaattgtatgactattgtgatgtccctcagtgtgccgcccctagttttgattgtgggaaaccccaggtcgaacctaaaaagtgtcccggaagggtagtaggaggatgcgtagcgcatcctcacagttggccatggcaggtgtcactcagaactcgattcggaatgcacttctgcgggggaactctcatttcacccgaatgggtgcttacagccgctcattgcttagagaaatcccctcgtccttcttcctacaaagtgatcctcggggcccaccaggaagtcaatctggaaccccatgtgcaggaaatcgaagtgtctcgcctttttctcgaacctactagaaaggacatagcccttcttaaattaagtagtcctgctgtgatcacagataaagttatccccgcctgcctcccatcaccaaactatgtggtggccgatagaactgaatgttttattactggatggggagaaactcaggggacattcggggccggattgctcaaggaagctcaacttccagtaatcgaaaacaaagtgtgcaacaggtatgaattccttaacggacgagtgcagtccacagaattgtgtgctgggcatctcgctgggggaactgattcctgccagggagattccggaggacccttggtctgtttcgaaaaagataaatatattctacagggagtaacttcctgggggctgggatgcgctagaccaaataaacctggagtttatgtccgagtgtcaagattcgtaacatggatagaaggagtgatgcggaacaat

SEQ ID NO: 6545 - DNA, 2430 bp, Artificial Sequence
  derived and/or modified sequence
atggagcacaaagaggtggtactgcttttgctgctcttccttaagtcaggccaaggggagcccctggatgactacgttaacacacaaggagcgagtctgttctctgtgactaagaaacagctcggcgctggctccattgaagaatgtgccgcgaagtgtgaagaagacgaggagtttacctgcagagcatttcagtatcatagcaaagaacagcagtgtgtgatcatggcagagaatagaaaaagttcaatcattatacgaatgagggacgttgtactttttgagaagaaagtctacctgagtgaatgcaagacaggaaatggcaagaattatagaggaaccatgagtaaaactaagaatggcatcacatgtcaaaagtggagcagtaccagcccccatagaccccggttttcacccgctacacatccttctgaagggctcgaggagaattattgcaggaacccagacaacgatccacagggcccctggtgttataccactgatcccgagaagcggtacgactactgcgatatactggaatgcgaggaggaatgtatgcactgctccggagaaaactacgatggaaaaatctccaagacaatgtccggactcgagtgtcaggcctgggattctcagagcccgcatgcccacggatacattcccagcaagtttccaaataaaaacctcaagaagaactattgtcggaacccagacagggagttgagaccttggtgcttcactaccgaccccaataaaagatgggaactgtgcgatattccccgctgtacaactcctcctccgagcagcggacctacctaccagtgccttaaaggcacgggagaaaattaccgagggaacgtagcagttacagtgtctggacacacgtgccaacattggagcgcccagaccccccatactcacaatcggacgcctgaaaatttcccgtgcaagaacctcgacgagaattattgccggaacccagacggtaagagggcaccttggtgtcacacgacaaactctcaggtccgctgggaatactgcaagatcccgtcttgtgatagttcccctgtcagtactgagcagttggctccaacggccccgccggaactgacaccagtggtgcaggactgctaccacggcgatgggcagagctacaggggcacatcttctaccacaactacaggcaaaaaatgccagagttggagttctatgactccccatagacaccagaagacacccgagaattacccaaatgcagggctgactatgaactattgccgaaatccagacgccgataagggcccttggtgttttacaactgacccttcagtcagatgggaatattgcaacctcaaaaagtgttcaggaacagaggcctctgtggtcgcccctccccctgtggtgctcctgcccgatgtcgagaccccttcagaggaagactgtatgtttggaaacggcaaaggttatagaggcaaacgagcgaccacagtcacgggaacaccctgtcaggactgggctgcacaggaaccgcaccgacactccatttttactcccgagactaatccaagggccggtctcgaaaaaaattattgcagaaatccagacggagacgtagggggcccttggtgctataccaccaatcccagaaagctttacgactattgtgatgtaccacagtgcgccgcaccatctttcgattgcggaaagcctcaggtggaacctaaaaagtgtcctgggagagtagtgggtggctgtgtcgcccatcctcatagttggccttggcaggtctcccttcgcacacgattcggaatgcatttttgcggtgggacactgatatcccctgagtgggtccttaccgcagctcattgccttgaaaaatccccgcggccatctagttataaagtaattctgggagcacaccaagaagtgaatctggaaccacacgtgcaggaaatcgaagtgtcccgactgttccttgagccgaccagaaaggacattgccctgttgaaactctccagtcccgccgtgatcacagataaggtaattcctgcctgcttgccttctcccaactacgtggtagcagacagaactgagtgtttcataacgggatggggcgaaactcaaggaaccttcggagctggactcctcaaagaggcgcagctgcctgttatagaaaataaagtgtgtaacaggtacgagttcctgaatggaagggtgcagagtactgagttgtgtgctgggcacctggcgggaggcactgattcatgtcaaggggattcagggggccccctggtttgcttcgaaaaagacaagtatatacttcagggcgtaacatcttggggtctcggttgcgcaagacccaacaaaccgggtgtgtatgttagagtcagtcggtttgtcacctggatcgagggcgttatgagaaacaat

SEQ ID NO: 6546 - DNA, 2430 bp, Artificial Sequence
  derived and/or modified sequence
atggaacataaagaagtggtgctactactgctcttatttctcaaatcgggacagggggaacctctagatgattacgtgaacactcagggagcctccctcttctccgtgactaaaaaacagcttggggccggaagtatcgaagaatgtgctgcgaaatgtgaagaagatgaagaattcacttgtagggcattccagtatcattccaaggaacagcagtgcgtgattatggctgagaatcgcaaaagttcgatcataattcgaatgcgcgatgtcgtcctcttcgaaaaaaaagtatacttatctgaatgcaaaacagggaacggaaaaaactatcggggaactatgtctaaaacaaaaaatgggatcacatgccagaagtggtcttctacatctccccatcgaccccgcttctctcccgcaactcacccatccgaagggctcgaagaaaattattgcaggaatcccgacaatgatccccaggggccctggtgctacactactgaccccgagaaaagatatgattactgtgatatcttagagtgtgaggaagaatgtatgcattgctccggagaaaactatgatggaaaaatttctaaaacaatgtctgggctcgaatgccaggcatgggattcgcaatctcctcatgcacacggatatattccctcgaaattcccaaacaaaaacttaaagaagaactactgccgcaatcctgaccgcgagctcaggccatggtgtttcactactgatccaaacaaacggtgggagttatgtgatatccccaggtgcacaactccccctcccagttctgggcctacttaccagtgccttaaaggaactggggaaaactatagaggaaacgttgcagtgactgtgtctgggcacacatgccagcattggtctgctcagacaccacacactcataacaggactccagaaaacttcccctgtaaaaacctagacgagaattattgtaggaaccccgatggaaaacgtgccccctggtgccatacaacgaatagtcaggtacgctgggagtactgcaagataccttcttgtgattcctctcccgtgtctacagaacagctggctcctactgccccccctgagctgacacctgtcgttcaggattgctatcacggggacggacagagttacagagggacgtcctccactacgacaacaggaaaaaagtgccagtcttggtcatcaatgacacctcatagacaccagaaaactcctgagaattaccctaacgccgggctcacaatgaattactgtcgaaacccagatgctgataaagggccttggtgcttcactacagatccatcggttcgatgggaatactgtaatctcaagaaatgttctggaactgaggcatccgtggttgcacctcctcccgtggtcctcctcccggatgttgaaacaccttctgaagaagattgtatgtttggaaatggaaaagggtaccgaggaaaaagagccacaacagtaactgggacaccctgccaggattgggctgctcaggaaccacataggcactccatcttcacacccgagactaatcctcgggcaggactagagaaaaactattgtaggaacccagatggagatgtgggagggccgtggtgctatacaacaaatcccagaaaactctacgattattgcgatgtcccccagtgcgccgctccatcttttgattgtgggaaaccacaggtcgaacctaaaaaatgtcctggacgtgttgttggagggtgcgtcgctcacccacattcctggccctggcaggtcagtcttaggactaggttcggaatgcacttttgtggaggaacactaataagtcctgagtgggtgttgacagccgcccattgtctggaaaaaagtccaaggccctcctcctacaaagtaatacttggggctcaccaggaagtaaatctggaaccacatgtccaggaaatagaggtgtctagactcttcctagagccaacaaggaaagatatcgccctgttaaaactctcctcacccgcagtgataacagataaagtgatacctgcctgtctcccctctcccaattacgtagtcgccgataggactgaatgtttcataacagggtggggagaaacacagggaacatttggagccgggctcttaaaagaagctcagcttccagtcatagaaaacaaggtatgcaacaggtacgaattcctcaacgggagagtgcagtccacagaactttgtgcaggacacctggccggggggactgatagttgtcagggagattctggggggcctctcgtatgttttgaaaaagataaatacatacttcagggagttacgtcctggggactagggtgtgccaggcctaacaaaccaggagtgtacgtgagagtatctaggtttgtcacttggatcgaaggggttatgaggaataac

SEQ ID NO: 6547 - DNA, 2430 bp, Artificial Sequence
  derived and/or modified sequence
atggaacataaagaagttgttcttcttttacttttattccttaagtctggacaaggagaaccacttgatgattatgtaaatacacaaggagcatctcttttttctgtaactaagaagcaattgggagcaggatcaatagaagaatgtgctgcaaaatgtgaagaagatgaagaatttacttgccgagcctttcaatatcattctaaagaacaacaatgtgttattatggcagaaaataggaaatcatcaattataattagaatgagagatgtagttttatttgaaaaaaaagtatatctttctgagtgtaaaacaggaaatggtaaaaattatagaggtactatgagtaagactaaaaatggaattacttgtcaaaaatggtcatcaacatcaccacacagaccacgtttttccccagcaactcatccatcagaaggattagaagaaaactattgtagaaatccagacaatgatccacaaggtccttggtgttatactacagatcctgagaaaagatatgattactgcgatattttagaatgtgaagaagaatgtatgcattgtagtggagaaaattatgatggaaaaatttcaaaaactatgtctggattagaatgtcaagcatgggattctcaatcaccacatgcacatggatatattccatcaaaatttcctaataaaaatttaaaaaaaaattattgtcgtaatcctgatcgagaattacgaccatggtgttttacaactgatccaaacaagagatgggaactttgtgacattccaagatgtactactccacctccatcaagtggtccaacatatcaatgtttgaaaggtacaggagaaaattatagaggtaatgttgcagtaacagtttcgggacatacctgtcaacattggtcagctcaaactccacatactcataatagaactcctgagaatttcccatgtaaaaatttagatgaaaattattgtagaaatccagatggaaaacgagctccttggtgtcatactactaattctcaagttagatgggaatattgtaagattccatcatgtgacagtagtccagtttctacagaacaattagcacctactgcaccaccagaattaactccagttgtacaagattgttatcatggagatgggcaatcatatcgtggaacgtctagtactactactacaggaaaaaagtgtcaaagttggagtagtatgacaccacatagacatcaaaaaacaccagaaaattatccaaatgctggattaacaatgaattattgtagaaatccagacgctgataaaggaccatggtgttttacaactgacccatcagttagatgggaatactgtaatttaaaaaagtgttcaggtactgaagcatctgttgttgctccaccaccagttgttcttttaccagatgttgaaacaccaagtgaagaagattgtatgtttggtaatggaaaaggttataggggaaaacgtgcaacaactgttacgggaacaccatgtcaagattgggcagcacaagaaccacatcgacattctatttttactccagaaacaaatccaagagcaggattagaaaaaaattattgtcgaaatcctgatggtgatgtaggaggaccttggtgttatactactaatccaagaaaactttatgattattgtgatgttcctcagtgtgcagcaccaagttttgattgcggaaaaccacaagttgaacctaaaaaatgtccaggacgagttgttggaggatgcgtagctcatccacattcatggccatggcaagtttcacttcgaacaagattcggaatgcatttttgtggaggtacattaatttcaccagaatgggttttaacagctgctcattgtcttgaaaaatcaccaagaccttcgtcttataaagttatattaggagctcatcaagaggttaatttagaaccacatgtacaagaaattgaagtatcaagactttttcttgaaccaactcgtaaagatatagccttacttaaattatcaagtcctgctgttataacagataaagttataccagcttgtttaccttctcctaattatgtagttgcagatagaactgaatgttttataactggatggggagaaacacaaggaacttttggagctggtcttttaaaagaagctcaacttccagtcatcgaaaataaggtgtgtaatagatatgaatttcttaatggaagagtacaatcaacagaactttgtgcaggtcatttagctggtggtacagattcatgtcaaggtgattcaggaggaccacttgtatgttttgaaaaggataaatatatattgcaaggagttacttcatggggattaggatgcgctagaccaaataaaccaggagtctatgttagagtttcaagatttgtaacatggatagagggggtaatgcgtaataat

SEQ ID NO: 6548 - DNA, 2430 bp, Artificial Sequence
  derived and/or modified sequence
atggagcacaaggaggtggtgctcttactcctgctctttttaaagagtggccaaggagagccactagacgattatgttaatacgcagggcgcctccctattctctgtcacaaagaaacagcttggtgccggttcaatagaggagtgcgctgccaagtgtgaagaagacgaggaatttacttgccgtgcgtttcagtatcacagtaaggagcagcagtgtgttatcatggccgaaaaccggaagagctctattattatccggatgcgcgatgtcgtattgttcgagaaaaaagtgtacctgtctgaatgcaaaacaggcaatgggaagaactatcgcggaaccatgtccaagaccaaaaatggaataacatgccagaaatggagctcgacctctccccacaggccacgattttcccctgccactcatccaagcgaaggactggaagagaactactgccgtaatccagacaatgatccccagggcccctggtgttacactaccgaccccgaaaagcggtatgactactgtgacatcttagagtgtgaggaggagtgcatgcattgttccggcgagaattacgatggcaaaataagtaaaacaatgagtggtctagaatgccaggcgtgggactcccagtcaccccacgctcatggctatattccctcaaagtttccaaacaagaatttgaagaagaactattgcaggaaccccgaccgagagttacgcccttggtgcttcacaacagaccctaacaagcgctgggaactgtgcgatatcccgaggtgcaccacaccaccacctagttcaggtcctacatatcagtgcctgaaaggcacgggcgaaaattatagaggtaatgtcgccgtgaccgtctctggacacacctgccagcactggagtgctcaaacaccacacactcacaaccggacacccgagaatttcccctgcaagaatctcgatgagaattactgccgaaatccagatggcaaaagggcgccctggtgtcatactacaaatagccaggtcaggtgggagtactgcaaaatcccctcctgcgactcaagccctgtgtcgactgagcagctggccccgaccgccccaccagagttgaccccagtggttcaggattgttatcatggtgacggacagtcctacagaggaacctcctcaacaaccactaccggcaagaaatgccagtcttggtctagcatgacacctcataggcatcagaagacaccagaaaattaccctaacgccggactgacgatgaactactgccgtaacccagatgctgacaagggtccctggtgcttcaccaccgacccttcggtgaggtgggagtactgcaatctgaaaaaatgcagcgggaccgaggcgtctgttgtcgcccccccaccagtagtgctcttaccagatgtggagacaccttccgaggaggattgtatgtttggtaacgggaagggttatagaggtaagagggccactacagtaacggggaccccatgtcaggattgggccgcccaggagccccataggcactccatttttacgcctgagacaaaccctagggccggactagaaaagaactattgccgcaatcctgatggcgatgtgggtgggccctggtgctacaccaccaatcccagaaaactttatgactattgcgacgtccctcagtgtgccgctcctagcttcgattgcggcaagccgcaagttgagcccaaaaagtgccctggacgcgtagttggcggatgcgtggcgcacccgcacagctggccttggcaagtgagtctccgaacaaggttcggcatgcacttttgcggtggaacgttaatttccccagagtgggtcctgaccgccgcacattgcctcgaaaagtccccacgcccatcgagctacaaggtgatcttaggcgctcatcaagaggtcaacctagaaccgcacgtacaggaaattgaagtgagtagactcttcctggaaccaacgaggaaggacattgctcttctcaagctgagttcccccgcagtaataacagacaaagtgatccccgcttgtctgccctctcctaattacgtagttgcagaccgcacagaatgtttcatcactggttggggcgagacccagggcaccttcggggcaggacttttgaaagaggcccagctgccagtcatagaaaataaagtttgcaatcggtatgaatttctgaatggccgagtccagagtacggagctgtgcgctgggcacctggcgggagggactgatagctgtcagggggactccggggggccgttagtgtgctttgagaaagacaaatacattttacagggtgtgacgagctggggactggggtgcgcgcgccccaacaaacctggagtgtatgttcgtgtgtcgaggttcgttacatggatcgagggagtgatgaggaacaat

SEQ ID NO: 6549 - DNA, 2430 bp, Artificial Sequence
  derived and/or modified sequence
atggaacacaaagaggttgtcctcctgctgctcctcttcctgaaatctggacagggagaacctctggacgattacgtcaatacccaaggggccagcctgttcagcgttacaaagaagcagcttggagccgggagtattgaggagtgcgccgctaagtgcgaggaagacgaagagttcacatgtcgcgcgttccagtaccattctaaagagcagcagtgtgtgatcatggccgaaaatcggaaaagttccatcattattagaatgagggacgtggttttgttcgagaaaaaagtctacctgtccgaatgtaagacagggaatgggaaaaactaccgcgggactatgtctaagaccaaaaacgggattacctgccagaagtggtcatctacttcccctcacaggccccgttttagccctgccacacatccctccgaaggactggaagaaaactactgccggaatccagataatgacccccagggaccctggtgttacactacagatccggaaaagcgttacgactactgtgacattctggagtgtgaggaagagtgcatgcattgcagtggcgaaaattacgacggcaaaatttccaaaacaatgtccggattggagtgccaggcctgggactctcagagcccccacgcccacggctatataccctcaaaattccccaacaagaacctgaaaaagaactactgtcgtaaccccgaccgggagcttcgcccctggtgtttcacgacagaccctaacaaaaggtgggagctgtgcgacatccccaggtgtacaacaccacccccttccagcggcccgacttatcagtgtctgaaggggaccggcgagaattatcgcggcaatgtcgccgtcacagtctcaggtcacacatgccagcactggtcagctcaaacgccccacacccataatcgcacccctgaaaatttcccctgcaagaatttggatgaaaattactgtaggaatcctgatggtaagagagcaccatggtgccacactaccaatagccaggttaggtgggagtattgtaagattccatcctgcgactcctcaccggtgtcaacagagcagctggcccccacggctccaccggaactgaccccagtcgtgcaggactgttaccatggggatggacagagttacagaggcacctcaagtaccacgacaacgggaaaaaagtgtcagagctggtcctcaatgactccccatcggcatcagaagacaccagaaaactacccaaatgcggggctcacgatgaattactgcagaaatcctgacgctgacaaaggcccttggtgtttcaccacggacccctccgttagatgggagtattgcaatttgaaaaaatgtagcggaacagaagcttctgtggttgcaccaccccccgtcgtgttactcccagacgtcgagactccttcagaggaggattgcatgtttggaaatggtaaggggtaccgaggaaagagggcgacaactgtgaccgggacaccctgtcaggactgggcagctcaggagccacatcgacattccatcttcacccctgagacaaatccaagggcagggctggagaagaattactgtaggaaccctgacggcgatgtgggcggtccctggtgctacacaaccaacccaagaaaactgtacgattactgtgacgttccccagtgtgcagcccctagttttgattgcggtaaacctcaggttgagccgaaaaagtgtcctggccgagtagtcggaggttgcgttgcccatcctcattcttggccctggcaggtgtctcttcgcaccaggtttgggatgcacttttgtggtggcaccctcatttcacctgagtgggtgctaaccgctgctcactgcctcgaaaaaagccctaggcctagctcgtataaagttatcctcggcgcacaccaagaggtgaacctggagccccatgtgcaagagatagaagtttctcgtttgtttctcgaacctactcgcaaagacatcgcactactaaagctgtcttcacccgccgtgattaccgataaggtaatcccagcttgtctccctagtcccaactatgtcgttgccgatcggaccgagtgctttataacgggatggggagaaacgcagggcactttcggcgcgggactcctgaaagaggctcagctgcctgtcattgaaaataaggtttgcaataggtacgaatttttgaatggacgcgttcagtccaccgaactctgtgcgggccacttagcaggcgggactgattcttgtcaaggcgactctggtggaccactcgtgtgcttcgagaaggataaatatatcctgcagggggttacatcttgggggctgggatgcgctcgaccaaacaaaccgggggtgtacgtgcgggttagtagatttgtcacctggatcgagggagtgatgcgtaataat

SEQ ID NO: 6550 - DNA, 2433 bp, Artificial Sequence
  derived and/or modified sequence
atggagcacaaggaggtggtgctgctgctgctgctgttcctgaagagcggccagggcgagcccctggacgactacgtgaacacccagggcgccagcctgttcagcgtgaccaagaagcagctgggcgccggcagcatcgaggagtgcgccgccaagtgcgaggaggacgaggagttcacctgcagagccttccagtaccacagcaaggagcagcagtgcgtgatcatggccgagaacagaaagagcagcatcatcatcagaatgagagacgtggtgctgttcgagaagaaggtgtacctgagcgagtgcaagaccggcaacggcaagaactacagaggcaccatgagcaagaccaagaacggcatcacctgccagaagtggagcagcaccagcccccacagacccagattcagccccgccacccaccccagcgagggcctggaggagaactactgcagaaaccccgacaacgacccccagggcccctggtgctacaccaccgaccccgagaagagatacgactactgcgacatcctggagtgcgaggaggagtgcatgcactgcagcggcgagaactacgacggcaagatcagcaagaccatgagcggcctggagtgccaggcctgggacagccagagcccccacgcccacggctacatccccagcaagttccccaacaagaacctgaagaagaactactgcagaaaccccgacagagagctgagaccctggtgcttcaccaccgaccccaacaagagatgggagctgtgcgacatccccagatgcaccacccccccccccagcagcggccccacctaccagtgcctgaagggcaccggcgagaactacagaggcaacgtggccgtgaccgtgagcggccacacctgccagcactggagcgcccagaccccccacacccacaacagaacccccgagaacttcccctgcaagaacctggacgagaactactgcagaaaccccgacggcaagagagccccctggtgccacaccaccaacagccaggtgagatgggagtactgcaagatccccagctgcgacagcagccccgtgagcaccgagcagctggcccccaccgccccccccgagctgacccccgtggtgcaggactgctaccacggcgacggccagagctacagaggcaccagcagcaccaccaccaccggcaagaagtgccagagctggagcagcatgaccccccacagacaccagaagacccccgagaactaccccaacgccggcctgaccatgaactactgcagaaaccccgacgccgacaagggcccctggtgcttcaccaccgaccccagcgtgagatgggagtactgcaacctgaagaagtgcagcggcaccgaggccagcgtggtggcccccccccccgtggtgctgctgcccgacgtggagacccccagcgaggaggactgcatgttcggcaacggcaagggctacagaggcaagagagccaccaccgtgaccggcaccccctgccaggactgggccgcccaggagccccacagacacagcatcttcacccccgagaccaaccccagagccggcctggagaagaactactgcagaaaccccgacggcgacgtgggcggcccctggtgctacaccaccaaccccagaaagctgtacgactactgcgacgtgccccagtgcgccgcccccagcttcgactgcggcaagccccaggtggagcccaagaagtgccccggcagagtggtgggcggctgcgtggcccacccccacagctggccctggcaggtgagcctgagaaccagattcggcatgcacttctgcggcggcaccctgatcagccccgagtgggtgctgaccgccgcccactgcctggagaagagccccagacccagcagctacaaggtgatcctgggcgcccaccaggaggtgaacctggagccccacgtgcaggagatcgaggtgagcagactgttcctggagcccaccagaaaggacatcgccctgctgaagctgagcagccccgccgtgatcaccgacaaggtgatccccgcctgcctgcccagccccaactacgtggtggccgacagaaccgagtgcttcatcaccggctggggcgagacccagggcaccttcggcgccggcctgctgaaggaggcccagctgcccgtgatcgagaacaaggtgtgcaacagatacgagttcctgaacggcagagtgcagagcaccgagctgtgcgccggccacctggccggcggcaccgacagctgccagggcgacagcggcggccccctggtgtgcttcgagaaggacaagtacatcctgcagggcgtgaccagctggggcctgggctgcgccagacccaacaagcccggcgtgtacgtgagagtgagcagattcgtgacctggatcgagggcgtgatgagaaacaactag

SEQ ID NO: 6551 - DNA, 633 bp, Artificial Sequence
  derived and/or modified sequence
agattcggcatgcacttctgcggcggcaccctgatcagccccgagtgggtgctgaccgccgcccactgcctggagaagagccccagacccagcagctacaaggtgatcctgggcgcccaccaggaggtgaacctggagccccacgtgcaggagatcgaggtgagcagactgttcctggagcccaccagaaaggacatcgccctgctgaagctgagcagccccgccgtgatcaccgacaaggtgatccccgcctgcctgcccagccccaactacgtggtggccgacagaaccgagtgcttcatcaccggctggggcgagacccagggcaccttcggcgccggcctgctgaaggaggcccagctgcccgtgatcgagaacaaggtgtgcaacagatacgagttcctgaacggcagagtgcagagcaccgagctgtgcgccggccacctggccggcggcaccgacagctgccagggcgacagcggcggccccctggtgtgcttcgagaaggacaagtacatcctgcagggcgtgaccagctggggcctgggctgcgccagacccaacaagcccggcgtgtacgtgagagtgagcagattcgtgacctggatcgagggcgtgatgagaaacaactag

SEQ ID NO: 6552 - DNA, 2576 bp, Artificial Sequence
  derived and/or modified sequence
gggaaataagagagaaaagaagagtaagaagaaatataagagccaccatggaacacaaagaggtcgtcctcttgctgctcctgtttctcaaatcgggccagggagagcccttggacgattacgtgaacacacagggcgcgagcctgttctcggtaacgaaaaagcagttgggagctggctcaattgaagaatgtgcggcgaaatgcgaagaagatgaagagttcacgtgtcgggcatttcagtatcactcgaaagagcaacagtgcgtgatcatggcagagaaccgaaaatcgtcgatcatcatcagaatgcgggacgtcgtgctgttcgaaaagaaagtgtacctgtcagagtgtaagacgggtaatgggaaaaactataggggcacaatgtcaaagactaagaatgggattacatgtcagaaatggtcgtccacgtcccctcacagaccaagattctcgcctgctacgcatccgtccgagggcttggaggagaactattgtcgcaacccagataacgatccccaagggccttggtgctacaccacagaccccgagaagcggtatgattactgcgatattcttgaatgcgaggaggagtgtatgcactgctccggagagaactacgatggaaagatctccaagacaatgtccggactggaatgtcaggcctgggactcacagtcgccccatgcacacggttacattcctagcaaattcccgaataagaaccttaagaagaattactgccggaacccggaccgagagcttcgcccttggtgtttcacaaccgaccccaacaagagatgggagctgtgtgacattccgagatgtacaacaccaccgccgtcatcgggtccaacctatcaatgtctgaagggaacgggtgagaactatcggggaaacgtcgcggtcacagtgagcgggcacacgtgccagcactggtcggcgcagacaccccacacacataatcggacgccagaaaacttcccttgtaagaatctggatgagaactactgcagaaacccagacggtaaaagagccccgtggtgccatactacgaacagccaagtgcgatgggaatattgtaagatcccgtcgtgcgactcatcgccagtaagcactgaacaacttgcaccgacggctcctcccgagttgacgcctgtggtgcaagattgttaccatggcgatgggcagtcatacaggggaactagcagcaccaccacgacgggcaaaaagtgtcagtcgtggtcctccatgacaccacaccggcaccaaaagactccggagaattacccaaatgcgggtctgaccatgaattactgtaggaaccctgacgcggacaaaggtccatggtgctttaccaccgatccctccgtacgctgggaatactgtaacttgaagaaatgctcggggacagaagcctccgtggtagcccctccgccagtcgtgctgcttcccgacgtggagacaccgtccgaagaggactgtatgtttggtaacggaaagggatatagagggaaaagggcgacgacggtgactgggacgccctgtcaggactgggcagcgcaagagccgcaccgccacagcatctttactcccgaaaccaatccaagggccggacttgaaaagaactattgccggaatccggatggggacgtcggaggtccgtggtgttatactacaaaccctagaaaactctacgattattgcgatgtaccgcaatgtgccgctccctccttcgactgcggaaagcctcaagtcgagcctaagaagtgtcccgggagagtggtgggcgggtgcgtagcccacccgcattcgtggccctggcaggtatcgttgagaacgagatttgggatgcacttttgtggcggtacgcttatctcccctgagtgggtcttgacagctgcgcattgcttggagaagtcccctcggccgtcctcatacaaggtcatcttgggagcccatcaggaggtgaatctggagccccatgtccaagaaattgaggtatcgaggttgtttctcgaaccgacacgcaaggacatcgcactgctgaaacttagctcccctgccgtcatcacagacaaagtcatcccagcgtgcctccccagccccaattacgtagtggcggatagaaccgagtgcttcatcacgggatggggcgagacacaggggacgttcggagctggcctccttaaagaggcccagcttcccgtaatcgaaaacaaagtatgcaaccgctatgagtttctcaatggacgcgtgcagagcacagagctttgcgccggacacctcgcgggagggaccgatagctgccagggtgacagcggagggccgttggtgtgtttcgaaaaagacaagtatatcttgcaaggtgtgaccagctggggacttgggtgcgcgaggcccaataagccgggagtctatgtgagagtctcacgcttcgtcacatggattgagggagtgatgaggaacaactgataagctgccttctgcggggcttgccttctggccatgcccttcttctctcccttgcacctgtacctcttggtctttgaataaagcctgagtaggaag

SEQ ID NO: 6553 - DNA, 2433 bp, Artificial Sequence
  derived and/or modified sequence
atggagcacaaagaggtcgtgttgctgcttctcctgttcttgaagagcggacagggtgagccactggacgactacgtcaacacccagggcgcaagcctgttctccgtgaccaaaaaacaactgggagcaggctctatcgaagagtgtgcagcaaagtgcgaagaggatgaagagtttacctgcagagcattccaataccattccaaagaacagcagtgtgtgattatggcagagaacaggaagagctccattattatacgaatgcgcgatgtagtgttattcgagaagaaggtatacttgtcagagtgcaaaacagggaatggtaagaattacaggggaacaatgtcgaaaacaaaaaatggaatcacctgccagaagtggtcctcgacaagtccccaccgacctagattctctcctgcgactcaccccagcgagggtctcgaggagaattactgccggaatcctgacaatgacccacaaggcccttggtgctatacaacagaccccgagaagcgctacgattattgtgatatcttagagtgtgaagaagaatgcatgcactgtagcggcgaaaattacgacgggaagatctcgaagacaatgtccgggctggagtgccaggcttgggattcccaaagcccccatgctcacggctatattcctagcaagtttcccaacaaaaatctgaaaaaaaactattgccgaaatccggatagagaactgagaccctggtgcttcacgaccgaccccaacaaacgctgggaattatgtgacatccctagatgtacaacaccacctccctcatccgggccgacctaccagtgtcttaaaggaacgggcgaaaactatagaggcaacgtggctgtgaccgtcagcggccacacctgccagcattggagtgcccagactccacacacccataataggacccccgaaaactttccttgcaaaaacttggacgagaactattgcagaaatccagacggcaaaagggccccatggtgccatacaactaactcacaggtcaggtgggagtactgcaaaattccctcctgcgacagctccccagtgtcaacagagcaacttgctcctaccgctccccctgagttgacccccgtcgtgcaagactgctatcacggcgacgggcagagctaccggggcacatccagtacaaccacaaccggtaagaaatgccagtcgtggtcatcaatgacccctcatcggcatcagaaaactcccgaaaattatccgaatgccggcctgaccatgaactattgcaggaatcctgacgcagataagggaccttggtgcttcacgacagacccttctgtgcggtgggagtattgcaacctaaaaaagtgttccggcacagaggcatctgtagtagccccccctcccgtggtcctcctgccagatgtggaaacaccctccgaggaagactgtatgttcgggaatgggaaagggtacaggggtaagagggctactaccgtgacaggaactccgtgccaggactgggctgctcaggagccccataggcattccattttcacacctgagaccaatccacgcgcaggactggagaagaattattgcaggaatcctgacggcgacgtgggtggtccttggtgttataccaccaaccctcggaaactgtatgactactgcgatgttccccagtgcgctgctccttcattcgactgtggaaagccacaagtggagcccaaaaaatgccctggacgcgtggtgggcggttgcgttgcccacccacacagctggccatggcaggtgtcccttagaacccggtttgggatgcacttttgtggaggaacgctgatcagccctgagtgggtcctgacggccgcccactgtctcgagaaaagcccgcggccgagctcctacaaggttatcctcggcgctcaccaggaagtgaatctggaaccacatgtccaggaaatcgaagtgtctagactgtttttagagcccactcgcaaagacatcgccctgctgaagctgtctagtcctgctgtgataaccgacaaagtgatccccgcctgcctcccatccccgaactacgtcgtagcagacaggactgaatgttttatcactggttggggagagacgcagggcacctttggcgccggtctgcttaaggaagcccagttaccggtcatagaaaacaaggtatgtaaccgttacgaatttctgaacgggcgggtgcagtccacagagctttgtgccggtcatctcgctggaggcacagacagttgtcagggtgactctgggggaccactcgtgtgctttgaaaaagataagtacattcttcaaggagtaacgagctggggtttgggatgcgctaggcccaataaacctggggtatatgttagggttagtcgtttcgtgacctggattgagggtgtcatgcggaataactag

SEQ ID NO: 6554 - DNA, 633 bp, Artificial Sequence
  derived and/or modified sequence
cgctttggtatgcacttttgcgggggaaccctgatctcacccgagtgggtattaactgccgcgcactgtctcgagaaaagtccacgaccctctagctataaagtgatcctgggtgctcaccaggaagtgaacctggagccccatgttcaagagatagaggtgtcccgtctttttctggagccgacgaggaaggatattgctcttctgaaactcagttcccccgctgtaattacagacaaggtaattcccgcctgcctgcccagccccaattatgtcgtcgccgaccgcacagagtgttttatcaccggttggggtgagacgcagggcactttcggcgctggactgttgaaggaagcccagttgcccgtgatcgagaacaaggtgtgtaaccgctatgaattcctcaacggcagagtgcagagcaccgaactttgcgccggtcatctggcaggtggaactgattcttgccagggggactccgggggccctctcgtgtgctttgagaaagataagtacatcctgcagggtgtaacgagctggggactcggctgtgccaggccaaataagcctggtgtgtatgtgcgtgtcagtcggttcgttacttggatagagggggtcatgcggaataactag

SEQ ID NO: 6555 - DNA, 2433 bp, Artificial Sequence
  derived and/or modified sequence
atggagcacaaggaggtggtgctgctgctgctgctcttcctgaagagcggccagggcgagcccctggatgattatgtgaacacccagggcgccagcctcttctctgtgaccaagaagcagctgggcgccggcagcattgaggagtgtgccgccaagtgtgaagaagatgaggagttcacctgccgggccttccagtaccacagcaaggagcagcagtgtgtgatcatggccgagaacaggaagagcagcatcatcatccgcatgagagatgtggtgctgtttgagaagaaggtgtacctgtctgagtgcaagacaggaaatggcaagaactaccggggcaccatgagcaagaccaagaatggcatcacctgccagaagtggagcagcaccagcccccaccggccccgcttctccccagccacccaccccagcgagggcctggaggagaactactgcagaaatccagacaatgacccccagggcccctggtgctacaccacagatcctgagaagagatatgactactgtgacatcctggagtgtgaggaggagtgcatgcactgcagcggagaaaattatgatggcaagatcagcaagaccatgagcggcctggagtgccaggcctgggacagccagagcccccacgcccacggctacatccccagcaagttccccaacaagaacctgaagaagaactactgcagaaatccagaccgggagctgcggccctggtgcttcaccacagaccccaacaagcgctgggagctgtgtgacatcccccgctgcaccaccccaccacccagcagcggccccacctaccagtgcctgaagggcactggagagaactacagaggaaatgtggccgtgacagtgtctggccacacctgccagcactggagcgcccagaccccccacacccacaacagaacacctgagaacttcccctgcaagaacctggatgagaactactgcagaaatccagatggcaagagggccccctggtgccacaccaccaacagccaggtgcgctgggagtactgcaagatccccagctgtgacagcagccctgtgtccacagagcagctggcccccacagcccctcctgagctgacccctgtggtgcaggactgctaccatggagatggccagagctaccggggcaccagcagcaccaccaccaccgggaagaagtgccagagctggagctccatgaccccccaccgccaccagaagaccccagagaactacccaaatgccggcctgaccatgaactactgcagaaatccagatgctgacaagggcccctggtgcttcaccacagaccccagcgtgcgctgggagtactgcaacctgaagaagtgcagcggcacagaggcctctgtggtggcccctcctcctgtggtgctgctgcctgatgtggagaccccatctgaggaggactgcatgtttggaaatggcaagggctaccggggcaagagggccaccaccgtgacaggcaccccctgccaggactgggccgcccaggagccccaccgccacagcatcttcaccccagagaccaacccccgggccggcctggagaagaactactgcaggaacccagatggagatgtgggcggcccctggtgctacaccaccaaccccaggaagctgtatgactactgtgatgtgccccagtgtgccgcccccagctttgactgtgggaagccccaggtggagcccaagaagtgccccggccgggtggtgggcggctgtgtggcccacccccacagctggccctggcaggtgtccctgcggacccgcttcggcatgcacttctgtggcggcaccctcatcagccctgagtgggtgctgacagctgcccactgcctggagaagagcccccggcccagcagctacaaggtgatcctgggcgcccaccaggaggtgaacctggagccccacgtgcaggagattgaggtgagccgcctcttcctggagcccaccaggaaggacatcgccctgctgaagctgagcagccctgctgtgatcacagacaaggtgatcccagcctgcctgcccagccccaactacgtggtggccgacagaacagagtgcttcatcaccggctggggcgagacccagggcacctttggagctggcctgctgaaggaggcccagctgcctgtgattgagaacaaggtgtgcaacagatatgagttcctgaatggccgggtgcagagcacagagctgtgtgccggccacctggccggcggcacagacagctgccagggcgacagcggcggccccctggtgtgctttgagaaggacaagtacatcctgcagggcgtgacctcctggggcctgggctgtgcccggcccaacaagccaggagtgtatgtgcgggtgtccagatttgtgacctggattgaaggagtgatgaggaacaactag

SEQ ID NO: 6556 - DNA, 633 bp, Artificial Sequence
  derived and/or modified sequence
cgcttcggcatgcacttctgtggcggcaccctcatcagccctgagtgggtgctgacagctgcccactgcctggagaagagcccccggcccagcagctacaaggtgatcctgggcgcccaccaggaggtgaacctggagccccacgtgcaggagattgaggtgagccgcctcttcctggagcccaccaggaaggacatcgccctgctgaagctgagcagccctgctgtgatcacagacaaggtgatcccagcctgcctgcccagccccaactacgtggtggccgacagaacagagtgcttcatcaccggctggggcgagacccagggcacctttggagctggcctgctgaaggaggcccagctgcctgtgattgagaacaaggtgtgcaacagatatgagttcctgaatggccgggtgcagagcacagagctgtgtgccggccacctggccggcggcacagacagctgccagggcgacagcggcggccccctggtgtgctttgagaaggacaagtacatcctgcagggcgtgacctcctggggcctgggctgtgcccggcccaacaagccaggagtgtatgtgcgggtgtccagatttgtgacctggattgaaggagtgatgaggaacaactag

SEQ ID NO: 6557 - DNA, 2433 bp, Artificial Sequence
  derived and/or modified sequence
atggagcacaaggaggtggtgctgctgctgctgctgttcctgaagtcgggtcagggcgagcctttggatgactatgtgaacacccagggcgccagtctcttctctgttaccaaaaaacaactcggagccgggagtatcgaggaatgcgcagctaagtgcgaagaggatgaagaattcacgtgccgcgcattccaatatcacagcaaggaacaacaatgcgtcataatggccgagaaccgaaagtccagcatcatcattcgaatgcgtgacgtggtgttatttgagaaaaaggtttatctgtccgagtgtaaaacgggcaatggtaaaaactatcgtggcaccatgagtaaaacaaaaaacgggataacttgccaaaagtggtcaagcacatctcctcacaggccgaggttctcacccgccacgcatccatctgaggggcttgaagagaattactgcagaaacccagacaacgacccgcaaggcccatggtgttacacaactgatcccgagaaaagatacgactattgcgatattctagagtgtgaggaggaatgcatgcattgctcaggagaaaattatgacggaaagatttctaaaaccatgtctggcctggaatgtcaagcttgggactctcagtcaccccatgcgcacggctatattcctagcaaatttcctaacaaaaaccttaagaaaaattactgtaggaatcccgacagagagctgcgcccctggtgcttcactacagatccaaacaaacgatgggagttgtgtgatatccccagatgcacaaccccgcctccctcaagtggccccacttaccagtgtttaaaagggaccggagagaactaccgcggcaatgtcgcggtcaccgtgtctggccacacatgtcagcattggtccgcacaaactcctcacacgcacaatcgcactccggaaaattttccttgtaagaacctggacgaaaattactgtagaaaccctgatggcaaaagagctccatggtgccatactacaaatagccaggtgcgttgggaatactgcaaaatccctagttgtgactcctcaccagtgagcacagagcagctagcgccaacagctccccccgagctgacccccgtcgtgcaggattgctaccacggagacgggcaatcctaccggggcacgtccagtacaacaactacagggaaaaaatgtcagagctggtcttcgatgactccccatcggcatcagaaaacacctgaaaactacccaaatgccggactcaccatgaactactgcaggaatcccgacgccgacaaaggcccttggtgtttcacaacagacccaagcgttagatgggagtattgcaacctgaaaaagtgtagtggtaccgaagcatccgtcgttgcaccgccacccgtagtgttactcccggatgtcgaaacgccttccgaagaggactgcatgtttgggaatggcaaaggatatcggggcaaacgtgcaaccaccgtcactgggaccccttgtcaagactgggccgctcaggagccccaccggcatagtatcttcactcccgagacaaaccctcgcgccggactggagaagaattattgtcgaaaccctgatggtgatgtgggagggccctggtgctacacaacaaacccccgcaagttgtatgactactgtgatgtcccgcagtgcgctgcaccttcatttgactgtggtaagcctcaagtggaacctaaaaagtgtcccggaagggttgtaggcggttgtgtggcacatccgcactcttggccctggcaggtcagcttgcgcactcggttcgggatgcacttctgcggcggcaccttgatcagccccgaatgggtcctgaccgcagcgcactgccttgaaaagtccccacggccaagttcctataaggtgatcctcggtgcgcaccaggaggtaaatttggaacctcacgtgcaggaaatcgaagtatcccgactcttcctcgaacctacccgcaaggatatcgcactgttgaagctcagctctcccgccgtcattaccgacaaggtgattcctgcctgccttcctagccccaactacgtggtggcagaccgaacggagtgctttatcaccggttggggggagacacagggaaccttcggagctggtctactcaaggaagcacaattgcctgtgattgaaaataaggtgtgcaatcggtacgagttcctgaatggcagggtccagtctacggaactgtgcgcgggccaccttgcaggcggcactgactcttgccagggggattccggaggtccccttgtgtgcttcgaaaaagataaatacatcttgcagggggtgaccagttggggacttggatgcgctcggccgaacaagcctggagtatatgtccgggtgagccggtttgtgacctggatagagggagttatgcggaacaactag

SEQ ID NO: 6558 - DNA, 633 bp, Artificial Sequence
  derived and/or modified sequence
cggttcggcatgcacttctgcggcggcaccctgatcagccccgagtgggttctgactgccgcccactgcctggagaagagccctcgcccatcttcctacaaagtcattttgggagcccaccaggaggtgaatctagagcctcacgtgcaggagatcgaagtgtccaggctgttcctcgagcctacgcgaaaggacatcgctctgctgaaactctcgagtcctgctgtgattacagacaaggtaatcccagcttgcctgccgtcccccaactatgtggtcgctgaccgcacagaatgtttcattacaggctggggtgagacacagggcacctttggagcagggcttctgaaggaagcgcagctgccggtcattgagaataaggtgtgtaatcggtatgagttcctcaacggccgagttcaatcaaccgagttatgcgccggccatctggccggcggcaccgacagctgtcagggagacagcgggggacccctggtttgtttcgagaaagataagtacattctccagggggtgacctcatggggtctgggttgcgctcgaccaaataaaccaggtgtgtatgtgcgcgtgagcaggttcgtgacatggattgagggtgtgatgagaaataattag

SEQ ID NO: 6559 - DNA, 2433 bp, Artificial Sequence
  derived and/or modified sequence
atggaacataaggaagtggtcctcctgctacttctcttcctgaagagcggccagggcgagccacttgacgactacgtgaatacacagggcgcttctttgttttcagtgacaaaaaaacaactcggcgctggcagcatagaagaatgtgccgcaaagtgcgaggaggatgaagaatttacttgccgggcatttcagtatcacagcaaggagcagcaatgtgtgatcatggcagaaaatcggaaatctagtattatcataagaatgcgtgatgtcgtcttattcgagaaaaaagtgtatctctccgagtgcaaaactgggaatgggaagaactacagagggacaatgtccaaaaccaaaaacggcatcacttgtcagaaatggagctctaccagtccgcatcgtccccgtttttcaccagccactcacccttccgaagggttggaggaaaactactgccgtaaccccgataacgaccctcagggcccttggtgctataccaccgatccagaaaagcggtacgactactgtgacatactggagtgtgaggaggagtgcatgcattgttcgggagaaaactatgatgggaagattagcaagaccatgtcagggctggagtgccaagcctgggactctcagagcccccacgcccacggatatataccctcaaagttcccaaataagaatttaaagaaaaattactgtcggaatcccgatagggagctcaggccctggtgttttaccaccgaccccaacaagcgatgggaattgtgcgacataccccgatgcactacccctccgcctagctctggaccaacttaccaatgcctaaaaggtactggcgaaaattatagaggcaatgttgctgttactgtctccggccatacctgccaacactggagtgcacagactccccatacacataatagaacacccgagaacttcccatgcaaaaaccttgacgaaaactattgccgcaaccctgatgggaaacgcgcaccatggtgccatacaacaaattcccaggtaaggtgggagtattgtaagattccttcctgtgatagctcccccgtgagtacagagcagctcgccccaaccgcccctcccgagctcacaccagttgtacaggattgttatcacggcgacgggcagtcatatcgtggcactagttccaccacaaccacaggaaaaaaatgtcaaagttggagttccatgacccctcatcggcaccagaaaactcctgagaactatccgaacgcaggtttaacgatgaattactgccggaatcccgatgctgacaaggggccttggtgcttcactaccgatccaagtgtgcggtgggaatattgcaacctgaagaaatgctctggtacagaggcaagcgtagtcgcgcctcctcccgtcgttcttctgcccgatgtggagactccttctgaagaggactgcatgttcggaaacggcaaaggctaccgcggaaagcgcgcaacaacggtcacgggcaccccttgtcaggactgggcagcccaagagccgcaccgacacagtatctttacccccgagaccaatccaagggcaggcctcgagaaaaattactgccgaaacccggacggcgacgttggtggcccttggtgctatactaccaatcccagaaagctgtatgactactgcgacgtcccacagtgcgccgcaccctcgtttgattgtggcaagccccaagtcgaacccaaaaaatgccctggtcgagtcgtggggggttgtgtggctcatccccatagttggccctggcaggtgtccttaagaaccagattcggtatgcatttttgtgggggaaccctcatatctccagagtgggttttaacagccgcacattgcctggagaaatctcctagacctagcagctataaagtgatcctgggggcacaccaggaggttaaccttgaacctcacgtccaggaaatagaagtcagtaggctctttctcgagcctactcggaaggatatcgctctgcttaagttgagttctcccgctgtgattacagacaaggtgattcctgcctgcctgccctccccaaattacgtggtggcggaccggacagagtgtttcatcacagggtggggagagacccagggaacatttggagccggattacttaaagaggctcagctaccagtgattgaaaataaagtgtgcaataggtacgaattcttgaatggaagagtgcagtctactgagctttgcgcgggtcacctggcgggtggtaccgactcttgccaaggcgattcgggagggcctctcgtctgttttgagaaggacaaatacatccttcagggcgtgactagctgggggttgggctgtgctcgccctaataaacctggtgtctatgttagagtgagtagattcgtgacctggattgagggagtaatgaggaataattag

SEQ ID NO: 6560 - DNA, 633 bp, Artificial Sequence
  derived and/or modified sequence
agattcggtatgcacttttgtggcggaactctgattagcccagaatgggtcttgaccgccgcacactgccttgagaagtcccctcggcctagctcatacaaggtgatcctcggagcccaccaggaggtgaacctcgagccccacgtgcaagaaatagaggtgtcaaggctgttcttggagccaactcggaaagacattgccctgctaaagctgtcctcacctgccgtaataactgataaagtcatccctgcttgcctgccgagtccaaattacgtggtggctgatagaacagaatgctttattacaggatggggtgagacccaaggaacttttggagccggactgcttaaagaagctcagctgcctgtcattgagaacaaggtttgtaatcgctacgaatttctcaacggaagagtacagtctacagagctgtgcgccggtcacctcgctggagggacagactcttgtcagggtgactccggcggaccactggtctgctttgaaaaagataagtacattttgcagggcgtgacctcatggggccttggatgcgctcggccaaataaaccaggtgtgtatgtacgggtgtcgcgcttcgttacttggattgagggcgtgatgcgcaacaactag

SEQ ID NO: 6561 - DNA, 2741 bp, Artificial Sequence
  derived and/or modified sequence
atgtaagtcaacaacatcctgggattgggacccactttctgggcactgctggccagtcccaaaatggaacataaggaagtggttcttctacttcttttatttctgaaatcaggtcaaggagagcctctggatgactatgtgaatacccagggggcttcactgttcagtgtcactaagaagcagctgggagcaggaagtatagaagaatgtgcagcaaaatgtgaggaggacgaagaattcacctgcagggcattccaatatcacagtaaagagcaacaatgtgtgataatggctgaaaacaggaagtcctccataatcattaggatgagagatgtagttttatttgaaaagaaagtgtatctctcagagtgcaagactgggaatggaaagaactacagagggacgatgtccaaaacaaaaaatggcatcacctgtcaaaaatggagttccacttctccccacagacctagattctcacctgctacacacccctcagagggactggaggagaactactgcaggaatccagacaacgatccgcaggggccctggtgctatactactgatccagaaaagagatatgactactgcgacattcttgagtgtgaagaggaatgtatgcattgcagtggagaaaactatgacggcaaaatttccaagaccatgtctggactggaatgccaggcctgggactctcagagcccacacgctcatggatacattccttccaaatttccaaacaagaacctgaagaagaattactgtcgtaaccccgatagggagctgcggccttggtgtttcaccaccgaccccaacaagcgctgggaactttgtgacatcccccgctgcacaacacctccaccatcttctggtcccacctaccagtgtctgaagggaacaggtgaaaactatcgcgggaatgtggctgttaccgtgtccgggcacacctgtcagcactggagtgcacagacccctcacacacataacaggacaccagaaaacttcccctgcaaaaatttggatgaaaactactgccgcaatcctgacggaaaaagggccccatggtgccatacaaccaacagccaagtgcggtgggagtactgtaagataccgtcctgtgactcctccccagtatccacggaacaattggctcccacagcaccacctgagctaacccctgtggtccaggactgctaccatggtgatggacagagctaccgaggcacatcctccaccaccaccacaggaaagaagtgtcagtcttggtcatctatgacaccacaccggcaccagaagaccccagaaaactacccaaatgctggcctgacaatgaactactgcaggaatccagatgccgataaaggcccctggtgttttaccacagaccccagcgtcaggtgggagtactgcaacctgaaaaaatgctcaggaacagaagcgagtgttgtagcacctccgcctgttgtcctgcttccagatgtagagactccttccgaagaagactgtatgtttgggaatgggaaaggataccgaggcaagagggcgaccactgttactgggacgccatgccaggactgggctgcccaggagccccatagacacagcattttcactccagagacaaatccacgggcgggtctggaaaaaaattactgccgtaaccctgatggtgatgtaggtggtccctggtgctacacgacaaatccaagaaaactttacgactactgtgatgtccctcagtgtgcggccccttcatttgattgtgggaagcctcaagtggagccgaagaaatgtcctggaagggttgtaggggggtgtgtggcccacccacattcctggccctggcaagtcagtcttagaacaaggtttggaatgcacttctgtggaggcaccttgatatccccagagtgggtgttgactgctgcccactgcttggagaagtccccaaggccttcatcctacaaggtcatcctgggtgcacaccaagaagtgaatctcgaaccgcatgttcaggaaatagaagtgtctaggctgttcttggagcccacacgaaaagatattgccttgctaaagctaagcagtcctgccgtcatcactgacaaagtaatcccagcttgtctgccatccccaaattatgtggtcgctgaccggaccgaatgtttcatcactggctggggagaaacccaaggtacttttggagctggccttctcaaggaagcccagctccctgtgattgagaataaagtgtgcaatcgctatgagtttctgaatggaagagtccaatccaccgaactctgtgctgggcatttggccggaggcactgacagttgccagggtgacagtggaggtcctctggtttgcttcgagaaggacaaatacattttacaaggagtcacttcttggggtcttggctgtgcacgccccaataagcctggtgtctatgttcgtgtttcaaggtttgttacttggattgagggagtgatgagaaataattaattggacgggagacagagtgacgcactgactcacctagaggctggaacgtgggtagggatttagcatgctggaaataactggcagtaatcaaacgaagacactgtccccagctaccagctacgccaaacctcggcattttttgtgttattttctgactgctggattctgtagtaaggtgacatagctatgacatttgttaaaaataaactctgtacttaactttgatttgagtaaattttggtttt

SEQ ID NO: 6562 - DNA, 4618 bp, Artificial Sequence
  derived and/or modified sequence
cttagagactgcttgttgggttccatcctcattgctctgagactcttgttgggagtatgaggcttggatcaggggaaggggagttgacattagttcttaaagaattggaataacaaatccatgggtatttctgaaaaaaaaaaaaaaaaaaagaaaggaagctacttggaattgtcccatatttaacattctgctgaccaatcaatttgtcctagttacagaaaaccaccctggacttctcctatgcatttgggcttctcctagggacaccaagagggaggaaggaggggttaggatggtatgaaagattctacttggccaatattattgtaatgcggcattgtgatctctggatttagcatgagttgatagctgactttttctgcagaagcatcttggtggcacctctaactcaaagtccctcgatggagtcagttccagttctccacttctggccccatctggtacacaccactgcctctcactgcccgggctctctatccttgacaggctgccttgaagttgagcccagactgattttcttgcctcagaccccactaccgtgcctgggactcatgcacctttgactcccatggaagggaagtgcagtagtttcccaggtgcaattctggtgtcctcacccacattgaggatgtacaagaatcaggttcttagagattggagaaagaaggaagaatgggaacaagatttttcccaaaggactgtgaggtcccccacctaaccttgatgtgagacaagtgaggttaaccccaagcctggtgagaagcgttcccatcagacacttggaaatcctgaggactgtttcatgcagaaggatatggtttattcaggtttgactcgtgcttgagaaagctagagcctctggtggtgaatgattttaataactatttcctttccaccaacatatacagtacaaataataataagcaaaaataaatagaaacattcagttttgttttgaatagtaggagcagggtaccatcatttctgtagttactcttttagtacaacgatgcatgtctactgtatgtaaggcatactagcagaaattgagctcagcactagagaagatgattgcattctatgccttgcttctttttttaaaaaaaggcttccatagatagattctcagaacagcccatggcaaatgtaaagttatttggaaaacccaggttccagattcactagagcatagaatctctggttggttgggaaggaatttcctcttacagttgttactaataattgtatgaacaattatttaaaatattaacatttacatttgtgaagaccttgaagggctggagacaacagagaagcatttttgaataccctctgcagcccctgcactgttgtaggcattggtggatggtaccaaagatgggacactgtccctacctccagagaccctgtgggctggctacagagagaaggcagggaggaggaaaagaagaataaagtcatatgtttaagtcacccccacggccgttggttagtcatgggaggctccccagaggagctgtcctgaagctggctgacagaaggcaacatttcaacttaggacagtaatccttgctacatacaatcacatacacacacacacacacgtgcacacacagagactcacatggaaaaataaacctttgtgcctttcagcagtgatgacaattatggttttcagtaaactttacatggtttagatggtgatggtgatgatgatgattatgggaaggatggcatcatgttctaaacatactgcatggagtcagaataacaatgacaaataaccatttgtcccaatcaaggttttctcagaaaatatctcattctgatgctaaactataccagtctgtttgatcacttctccaacaaaataattacaaagtgcttatattttcttgaaaagagagggtcctgtgttgtctactaccacttttgaaacttagagaaaatgttccaaaagatgatgattttactatttagttcggcctttaagatgtcaaaaactcagtgcttggaatttgtctcgaattacaccacaaaattgctaccttgtctcaaatgggatttctttcccaccttgtgccacagcggccccttcatttgattgtgggaagcctcaagtggagccgaagaaatgtcctggaagggttgtaggggggtgtgtggcccacccacattcctggccctggcaagtcagtcttagaacaaggtaagaacaggcccagaaacgatttatactgtccctccacgtaagccctgcaaaacccttctacatttacataaaatccacacagctgaggcatcagcacctgcctctaagttttctgaaggaggaaaaaagctacaaaaattaatatatgtatatatacatatatatttttataggttctctactgtgaaaatgacaaaaattgctgtctttttcttgatctgggcagctccatcaaaatctgtaggcacagtgatttgcaccaagttccaatattgctggaaaatactgaagatgctctgaggatttctatggatatccattgtctcattgtcagatgaaaagagggggaagtttttagaaatgtgacactttctgggttgggagagcaaggacaaaattatctccagtctatcacaggcacagattctttttctttggacactttcgtgaatcattgaattcaatgcagaggctactcatccattcgcaaacaaaaaaattctaggtcatgatccccataaatgaagagtgatcagtccaatcccagggaacctggacattttgggtattgtttcagtggaacatgcctttcataagttccattttcttgggtatctcttaggaagcaagcataggaaacaggcccatccgtctgcctgttttgcttcctcatctcacttctacacgagggtgcctgtgctcaattgctgttttcccctaaagagactcttttccataagtttgtgaaatgccatcgacaaacctgatcgcattgcatttcactctgctgttgagtcgatttttctttattttatcatttagtaactccttgctctacagagctttcaccttccacatatttcagattcattctttcctaaactatgtggtggtctacgtcctcactgacttatcaacatgctaccatcatgcacttcctatctctattcctcttctttaaatttggttccaaatggctcacaccattattctgagctattacctgcctacgcagtcctagaaagtaagtgattcaggaaacattccccaaaagtaaagtttctcaggtaagatcagaagactcccatgagtcactgctgctcaggatcacatctggctccttgaagagtgattcatcagaccttacatagatcttgtcataaaaatgaaagaggcctcgggggaaggtcttgggctggtggcttctgttggagtcctgggctgtggggtgaaagccgtggctgtagagcttcatgcggagttacttagctttgctctcctgtggacaggccatgcctgtgcctcccccaagcatcggaaaaattggcatagatgggcccttctcaaaaatcccactcctggagcactggccaaaattactaccatcctgatgctgggcttgcagtcctttcctttgggaatatgaacatggtcaaaattaagtgaacgtgtctttctggctttctgtacaatggagcagaacaaagtatcaatttaactaaaatttgaactaaatcctctttccaggtttggaatgcacttctgtggaggcaccttgatatccccagagtgggtgttgactgctgcccactgcttggagaagtccccaaggccttcatcctacaaggtcatcctgggtgcacaccaagaagtgaatctcgaaccgcatgttcaggaaatagaagtgtctaggctgttcttggagcccacacgaaaagatattgccttgctaaagctaagcagtcctgccgtcatcactgacaaagtaatcccagcttgtctgccatccccaaattatgtggtcgctgaccggaccgaatgtttcatcactggctggggagaaacccaaggtacttttggagctggccttctcaaggaagcccagctccctgtgattgagaataaagtgtgcaatcgctatgagtttctgaatggaagagtccaatccaccgaactctgtgctgggcatttggccggaggcactgacagttgccagggtgacagtggaggtcctctggtttgcttcgagaaggacaaatacattttacaaggagtcacttcttggggtcttggctgtgcacgccccaataagcctggtgtctatgttcgtgtttcaaggtttgttacttggattgagggagtgatgagaaataattaattggacgggagacagagtgacgcactgactcacctagaggctggaacgtgggtagggatttagcatgctggaaataactggcagtaatcaaacgaagacactgtccccagctaccagctacgccaaacctcggcattttttgtgttattttctgactgctggattctgtagtaaggtgacatagctatgacatttgttaaaaataaactctgtacttaactttg

SEQ ID NO: 6563 - DNA, 553 bp, Artificial Sequence
  derived and/or modified sequence
actctcatgtaagtcaacaacatcctgggattgggacacactttctgggcactgctggccagtcccaaaatggaacataaggaagtggttcttctacttcttttatttctgaaatcaggtcaaggagagcccctggatgactatgtgaatacccaggggccttcactgttcagtgtcactaagaagcagctgggggcaggaagcagagaagaatgtgcagcaaaatgtgaagaggacaaagaattcacctgcagggcattccaatatcacagtaaagagcaacaatgtgtgataatggctgaaaacaggaagtcctccataatcattaggatgagagatgcagttttatttgaaaagtaaatgtatctttcagagtgcaagactgggaatggaaagaactacagagggacgatgtccaaaacaaaaaatggcatcacctgtcaaaaatggagttccacttctccccgcaaacctagattctcacctgctacacacccctcagagggactggaggaatccagacaacgatgcgcaggggccctggtgctatact

SEQ ID NO: 6564 - DNA, 2430 bp, Artificial Sequence
  derived and/or modified sequence
atggagcacaaggaagtggtgttgttgctccttctgtttctgaagtccggccagggcgaacctctcgatgactacgtgaacacccaaggagcgtcgctgttttcggtgacgaagaaacaactgggtgcaggctcaattgaagaatgtgccgcaaaatgtgaagaggatgaagaatttacttgtagagcctttcaataccattccaaggagcagcagtgtgtgattatggcggagaacagaaagtcgtcgatcataattcgcatgagagacgtcgtcttgttcgagaaaaaggtgtacctgagcgaatgtaagacggggaacggaaagaactaccgagggaccatgtccaagacgaagaacggtatcacctgtcaaaagtggtcatcgacctcgccacatagacctcgcttttcccctgccacccatccatccgaaggactcgaggaaaactactgtcgcaatcccgacaacgaccctcagggaccttggtgttacaccaccgaccctgaaaaacgttacgactactgtgatattctcgagtgtgaagaagagtgtatgcattgttccggggagaactacgacgggaagatttctaagaccatgtcgggtttggaatgccaggcttgggattcacagtcccctcacgcacatggatacattccatcgaaatttcctaataagaacctcaagaagaattactgcagaaacccggatagggagcttcgtccatggtgttttaccactgatcccaataagcgttgggagctgtgtgacatccctaggtgcacgactcccccaccctcctcgggtcccacctaccaatgccttaaggggactggtgagaattaccggggcaacgtcgcagttacggtatcggggcacacctgtcaacattggtcggcacaaacccctcacacccataatcgtactccagagaattttccttgtaagaatcttgacgaaaactattgccgtaatcctgacggcaagagagcaccttggtgccatactaccaatagccaggtcagatgggaatattgcaaaataccctcatgtgactcctcacctgtctccactgaacaactggcacctactgcccctccagagttgacccccgttgtgcaggactgctaccacggagacggacaatcgtaccggggaaccagctcgactactaccactggtaagaaatgtcaatcctggtcctccatgacgccacaccggcatcaaaagaccccggaaaactatccaaatgcagggctgaccatgaactattgtcgaaatccggatgctgataagggtccttggtgtttcaccaccgatccaagcgtgcgctgggagtattgtaaccttaagaaatgcagcggtaccgaagcgtctgttgtcgcaccaccccctgtggtgcttctgcctgatgtcgaaaccccatcagaagaagattgtatgtttggcaatggaaagggataccgtggaaaacgggccactacggtgactggaactccttgccaggattgggcagcacaggaaccccacaggcattcaatctttaccccagagactaatccgcgggcagggctcgagaagaactactgtagaaatcccgatggggatgttggaggtccatggtgctacaccaccaaccctcgtaagctgtacgactactgcgatgtgcctcagtgtgcagctcctagctttgattgtgggaagcctcaggtcgagcctaagaaatgtcctgggcgcgtggtcggtggctgcgtcgcgcatccgcattcctggccctggcaagtgtccctgagaactcgattcggtatgcacttctgcggaggaacgctgattagtcccgaatgggtactgactgcagcccactgcctggagaaatcacctaggccgagcagctacaaggtgatccttggggcccaccaagaggtgaatctggaacctcatgtccaagagatcgaagtcagcaggctgttcctggaacccacccggaaggatattgcgcttttgaagctgtcatccccggcagtgattacggataaggtgattccagcatgcctgccatcccctaattacgtggtggcagatcgcactgaatgcttcattaccgggtggggtgaaactcagggtacgttcggcgccggactgctcaaggaagcccagcttcctgtgatcgagaataaagtgtgcaacaggtacgaatttctgaacggccgcgtgcaatccaccgaactttgtgcaggacatctggccggaggtaccgattcatgtcagggtgatagcggaggaccgcttgtgtgcttcgaaaaagacaagtacatccttcagggggtaacgtcgtggggactgggatgtgcacggccaaataagccaggtgtctacgtccgggtcagcagatttgttacttggatcgagggagtgatgcggaacaat

SEQ ID NO: 6565 - DNA, 2430 bp, Artificial Sequence
  derived and/or modified sequence
atggagcacaaagaggtcgttctgctgttgttgctgttcttgaagagcggacagggggaacctttggacgattacgtcaacactcagggagcgagtctcttctcagtcacgaagaagcaactcggtgcgggcagcatcgaagagtgcgccgctaagtgtgaggaagatgaagagtttacttgtcgggcgttccagtatcactccaaagagcaacagtgcgtgatcatggcagagaacagaaagtcctccattatcattcggatgagagacgtcgtgttgtttgaaaagaaggtgtacctgtccgagtgtaagacgggcaacggaaagaattaccgcggtaccatgtctaagaccaagaacggaatcacctgccagaagtggtcgagcacttccccgcacaggccacggttctcaccggcgacgcacccatcggaagggctggaagagaattactgtcggaacccagacaatgatcctcaaggtccatggtgctacaccaccgacccggagaaacggtatgattattgcgacatcctggagtgcgaagaagaatgtatgcattgttcgggtgagaattacgacggtaaaatctcaaaaaccatgtccgggctcgagtgtcaggcttgggatagccagagcccgcatgcccacgggtacatcccatccaagttccctaataagaacctgaaaaagaactactgtagaaatccggaccgggaactgaggccatggtgcttcacgacggatcccaacaagagatgggaattgtgcgacattccacggtgtactactccgcccccatcatccggaccaacgtaccagtgtctcaaaggaaccggagagaattaccgtggcaacgtggcagtaaccgtgagcggccacacttgccagcactggtcggctcaaactccgcatacgcacaatcgcactccagagaatttcccgtgcaagaacctggatgagaactactgccgcaaccctgacggcaaacgggctccatggtgtcatacgacgaacagccaggtgcgctgggagtactgcaagatcccaagctgcgattcatccccagtctcaactgagcaactggccccgactgcgcccccagagttgactcccgttgtccaggactgctaccatggagatggccaatcgtaccgcggcacgtcgtccaccaccactactggaaagaagtgccagagctggagctcaatgaccccgcaccgacatcaaaagactcccgagaactacccgaacgccgggctcaccatgaactactgtcggaatccggacgcagataaaggcccgtggtgctttaccacggacccgtccgtcagatgggaatactgcaacctcaagaaatgctccgggaccgaagcgagcgtggtggcacctccgcccgtggtcctgctcccggacgtggaaaccccaagcgaagaggactgcatgttcggtaacggaaaggggtacagaggaaagcgggcaacgactgtgaccggaacgccgtgccaggactgggcggcgcaagagccgcatcggcattctatcttcaccccggagactaacccgcgcgccggcttggaaaagaattactgccggaatccagacggagacgtggggggaccgtggtgttacactaccaatccaaggaagttgtacgactactgcgatgttccgcagtgcgctgccccgagcttcgattgtggcaagccacaggtggaacccaagaagtgcccagggcgagtggtgggaggatgcgtcgcgcacccgcattcctggccgtggcaggtcagcctgcggaccaggttcggaatgcacttttgcggaggaaccctgatttcgccggaatgggtgctcactgccgcacactgtcttgaaaagtctcctcgcccgtcctcctataaagtgatcctgggcgctcaccaggaagtgaacctggagccacacgtgcaagagattgaagtctcacggctcttccttgagcccaccagaaaagacatcgctctccttaagctgtcaagcccagccgtgatcactgataaggttatcccagcttgcctgccgtcaccaaactacgtggtggctgacagaaccgagtgctttatcaccggttggggggaaacccaaggaaccttcggagccggactgctgaaggaggcccaactgccggtgatcgagaacaaagtgtgtaatagatatgaattcttgaacggccgcgtgcaatcgactgagctgtgcgccggccacttggcgggtggtaccgacagctgccagggagattccggcggacccctggtctgcttcgaaaaggacaaatacatcctgcaaggagtcactagctgggggctgggctgcgcacgccccaataaacctggagtgtatgtgagagtgtccaggtttgttacttggatcgaaggagtgatgcgcaacaat

SEQ ID NO: 6566 - DNA, 2430 bp, Artificial Sequence
  derived and/or modified sequence
atggaacataaagaagtggtgttgctccttctactgttcctcaaatcaggacagggagaacctctcgacgactatgtgaatacacagggagcgtccctgttctctgtcactaaaaaacaacttggagctggaagtatagaagagtgtgccgcaaaatgtgaagaggatgaagaattcacatgtcgcgccttccagtatcactccaaagagcagcagtgtgtgataatggcagaaaataggaaatcctctataataatacgaatgagggatgttgtgctcttcgaaaaaaaagtatacctgagtgagtgtaaaactgggaatggaaaaaactatcgcggaacaatgtctaaaacaaaaaatgggattacttgtcagaaatggtcatcaacttccccacatcggcccagattctctcccgctactcatccctcagaagggcttgaagaaaactattgcagaaaccccgataacgatcctcaagggccatggtgttatactacagatcccgagaaaaggtatgattattgtgatatcctagagtgcgaagaagaatgcatgcactgctctggggaaaactacgatggaaaaatttccaaaacaatgagtggattagaatgtcaggcttgggactcacagagtccccacgctcatggatatatccctagtaaattccctaataaaaacctgaaaaaaaattattgtcgcaatcccgatagggaactcaggccatggtgtttcactactgatcccaataaacgatgggaactctgcgatattccgcggtgtacaacacctcctccatcctccggaccaacataccagtgtctgaaaggaacaggggaaaactatcgcgggaacgtcgccgtgactgtatctggacatacttgtcagcattggtcagcccaaactccccatactcacaatagaacaccagaaaattttccttgtaaaaacctggatgaaaactattgccggaatcccgatgggaaaagagccccatggtgccacactactaactctcaggtgagatgggagtattgtaaaatcccttcctgcgatagttctcccgtgtccacagaacagctcgcccctacggctccacccgaacttacacctgtggtgcaggattgctatcacggggatggacaatcctatcggggaacttcgtcaactactacaacaggaaaaaagtgccagtcttggtctagtatgactccgcaccggcatcagaaaacaccagaaaactaccccaatgccggactgactatgaattattgcagaaatcccgatgctgataaaggaccctggtgtttcacaacagatccatctgtcaggtgggaatattgcaatctgaaaaaatgctccgggactgaggcatctgtcgtggcgccacctcctgtagttctcctgcccgatgttgaaactccaagtgaagaagattgcatgtttgggaatggaaaagggtataggggaaaaagagccactacagtgacaggaactccctgtcaggattgggcagcccaggaaccacaccgccattcaatatttactccagagacaaaccctcgcgctgggctagaaaaaaactactgcaggaatccagatggagatgtgggaggaccttggtgttatactacaaatccacgcaagctatatgattattgcgatgtgccccaatgtgctgccccctcattcgattgtggaaaaccacaggtagaacccaagaaatgccccgggcgggtggtgggggggtgtgtggctcatcctcactcctggccttggcaggtatccctccggacgcgcttcggaatgcacttttgtggagggactctcatctcaccagaatgggtccttacggcagcacactgtttagaaaaaagtcctaggccctcttcatacaaagtgattctgggggcacaccaggaggtgaatcttgagccccatgtgcaggaaatcgaagtatccagactgttcttggagcccactcgaaaggacattgcacttttaaagctttcctcacctgctgtcataacagataaagtgatacctgcttgcctcccctcacctaactatgttgttgcggataggacagagtgtttcatcactggatggggggaaacacagggaacattcggagccggattgctgaaagaagcccagttgcccgtaatcgaaaataaagtttgcaacagatatgaatttttgaacggaagggtgcagtctactgaactgtgcgcgggacatctggctggaggaacagattcgtgccagggggattccggggggcctctcgtgtgtttcgaaaaagacaaatatatactacagggagtaacaagttggggactcgggtgtgcccggcccaacaaaccaggggtgtacgtaagagtaagtaggttcgtgacttggatagaaggggtgatgagaaataac

SEQ ID NO: 6567 - DNA, 2430 bp, Artificial Sequence
  derived and/or modified sequence
atggagcataaagaagtcgtgctcctccttctgctgtttctgaagagcggtcagggagaacctcttgatgattatgtcaacactcagggggcatcattgttttcagtgaccaagaagcagctgggagccgggtccatcgaggaatgtgcagccaagtgtgaagaagatgaggaatttacgtgcagggcatttcaataccactccaaggaacagcaatgcgtgataatggcagagaaccggaagtcaagcatcatcatcagaatgagggatgttgttctgttcgaaaagaaggtgtacctttccgagtgcaagactggaaatggtaaaaactaccgcggaacgatgagcaagactaagaacggcattacttgtcaaaaatggtcatcgacttccccccatcgcccgcggttttcccctgctacccatccgagtgagggactggaagaaaactattgccggaaccctgataacgatccacaaggaccctggtgctacactacggatcccgagaagagatatgattattgcgacatactcgaatgcgaggaagaatgcatgcactgttcgggggaaaactatgacggaaagatttctaagaccatgtcgggtcttgagtgtcaggcatgggatagccagtcgccgcacgcccacggttacattccttcgaagtttccaaacaagaacttgaaaaagaattactgtagaaacccagatcgagaactgcggccatggtgcttcactaccgaccctaacaagagatgggaactttgcgacattcctagatgcactacccctcctccatccagcggcccaacttaccagtgtctgaaaggaaccggcgagaactacagaggtaacgtcgccgtgaccgtgtcgggacatacctgtcagcattggtcagctcaaacccctcacactcacaatcgaactcctgagaactttccatgtaagaatctcgacgagaactactgtaggaaccctgatggaaagagagccccttggtgccatactactaactctcaagtgagatgggaatactgtaagattccatcgtgtgattcgtcaccagtctccactgagcaacttgcaccaactgcgccaccagaacttactcctgtggtgcaggactgttaccacggagacggccagtcgtacagggggaccagctcaaccactaccaccggaaagaaatgtcaaagctggtcctcaatgaccccacacagacatcaaaaaaccccggagaactaccctaacgccggccttactatgaactattgcagaaatcccgacgcagataagggcccatggtgttttactactgaccctagcgtgagatgggagtattgcaatctcaagaagtgttcgggtaccgaagcatcggtggttgcacctcccccggttgttctcctgcctgacgtcgaaactccttcagaagaggattgtatgttcggtaatgggaagggatacagagggaagagggccaccactgtgacgggaaccccatgtcaagattgggccgcgcaagaaccccaccgtcactcaatctttacccccgaaaccaacccacgggcaggtcttgaaaagaactactgtcgcaaccccgacggggacgtggggggaccctggtgttacactactaacccacgcaaactctacgactactgcgatgtgccccaatgtgcagcaccctcattcgactgtggcaaaccacaagttgaacctaaaaagtgtcctggaagggtggtgggcgggtgcgtcgctcatccccactcctggccttggcaagtgagcctgaggacccgttttggcatgcacttttgtggaggtacccttatttctcctgaatgggtcctgactgccgcacattgcctggaaaagtctccacgacctagctcctacaaggtgattttgggagcacaccaggaagtcaaccttgaacctcatgttcaggaaattgaagtgtcacggctttttcttgagcctactcggaaagatattgctctgctgaaactttcctcgcctgccgtcattactgataaagtgatccctgcatgcctgccttcgccaaactacgtcgtggcagatagaactgagtgttttatcaccggatggggtgagactcaagggacgttcggagcggggctgctcaaggaggcacagctcccagtcatcgagaataaagtgtgcaaccgttacgagttccttaatggacgcgtgcaatccaccgagctttgtgcgggacatctggcaggtggtaccgattcatgtcagggagattcaggtggaccgcttgtgtgttttgaaaaggataagtatattctccagggagtaacttcatggggcttgggatgcgcaaggcctaataagcccggggtgtacgtgcgagtctcccgatttgtgacctggattgaaggagtcatgagaaacaac

SEQ ID NO: 6568 - DNA, 2430 bp, Artificial Sequence
  derived and/or modified sequence
atggagcacaaggaggtagtgctcctactgctcctgttcctcaagtcgggtcaaggtgagcccttagacgactatgtaaacacgcagggagcgagcctgttcagcgtgaccaagaagcagctcggcgcgggttctatcgaggagtgtgccgccaagtgtgaagaagatgaggagttcacatgtcgcgcctttcagtaccacagcaaggagcagcagtgcgtgatcatggccgagaaccgaaagagctccataattattcgtatgcgcgatgtcgtgcttttcgagaagaaagtctacctctcagaatgtaagacgggaaatggaaagaactaccgcgggaccatgtcgaagaccaaaaatggtatcacctgccagaagtggagctccaccagccctcaccgaccgcgcttcagtcctgccacccatccgtctgagggcttagaggaaaactactgccggaacccggacaacgatccccaggggccgtggtgttacaccaccgaccccgaaaaacgctacgattattgcgatatcctcgaatgtgaggaagagtgcatgcattgcagcggggagaactacgacggcaaaatctccaaaacgatgagtggtctcgaatgccaggcttgggattcccagtctccccacgctcacggctacatcccctctaaatttccgaacaaaaacctcaagaagaattactgccgtaaccccgatcgcgagcttcggccctggtgtttcaccactgaccccaacaagcgttgggagctctgtgacattccccggtgtaccactcctcccccgagttctggccccacttaccagtgcttgaaggggaccggggagaactaccgcggaaacgtcgcggtcactgttagcggccacacgtgtcagcattggtccgctcaaaccccgcatacgcacaatcgcaccccggaaaatttcccatgtaagaacctggatgagaactactgccggaatccggatggtaagcgtgcgccctggtgccacaccaccaatagccaggtacgttgggaatactgcaagatcccctcctgtgactctagtcccgttagtacggagcagctggcgcccacggctcccccggagctgacaccagtcgtccaggactgctaccacggagatggtcaatcttatcgcgggacctctagcaccacaactactggcaaaaagtgccaatcctggtcgtctatgacgcctcatcgacatcagaagactcctgagaattaccccaatgccggcctgaccatgaactactgtcgcaatcctgatgctgacaagggtccctggtgcttcacaactgatcctagtgtgcgttgggagtactgcaacctcaaaaagtgttccggaaccgaggcttccgtcgtcgcccctccacccgtcgttctgcttcctgatgtcgagacccctagtgaggaagattgcatgttcggcaacggtaagggctaccgtggcaagcgtgcgacgacggtcacgggcaccccatgtcaggactgggctgcgcaggagcctcaccggcattccatcttcacccctgagaccaaccccagagcgggtttggaaaagaattactgcaggaatcctgatggtgatgtgggcggcccgtggtgctatacgactaatccacggaagctctatgactattgtgatgtccctcagtgtgcagcaccatctttcgattgtggtaagcctcaagtggagcccaagaagtgccctggccgcgtcgtcggcggatgcgtcgcccacccccattcgtggccgtggcaggtgtcccttcgtacgagattcggtatgcacttttgcggcggaactctcatctctcccgagtgggttctaaccgccgctcattgtttggagaagtctccacgccccagttcctacaaggttattctcggtgcacaccaagaggtcaacctggaaccgcacgtccaggagatcgaggtgtctaggctcttcttggaacctacccggaaggatattgccctcctcaagctcagctccccggcggttattaccgataaagtcatcccagcctgccttccgtccccgaattatgtcgtcgcggatcggactgagtgctttatcaccggctggggcgagacccagggcaccttcggtgctggcctgctcaaggaggcccagcttcccgtaattgagaacaaggtctgtaaccgctatgaattcctcaatggcagggtgcaaagtactgagttgtgcgcaggtcacctggcaggtggaacagattcctgccagggcgactccggcggacctctcgtctgctttgagaaggataagtacatccttcagggtgtaacctcctggggtctgggttgcgccaggccaaacaagcccggcgtctacgttcgcgtgtcccggtttgtcacctggattgagggggttatgcgcaataac

SEQ ID NO: 6569 - DNA, 2430 bp, Artificial Sequence
  derived and/or modified sequence
atggaacataaagaagtggttctcctcctgctcctgtttctgaagtctggccaaggggagcccttggatgattatgttaatactcagggagcttcgctgttcagcgtgacaaaaaaacagctgggagccggctcaatcgaggaatgcgcggccaaatgcgaggaggatgaagaatttacgtgtcgcgcttttcagtatcactccaaggagcagcagtgtgtgatcatggccgagaatagaaagagttctatcattatccgaatgcgcgacgtagtgttgtttgaaaagaaggtctatctgtccgagtgcaagacggggaatgggaaaaattaccgaggcacaatgtcaaagactaagaacggaatcacctgtcagaaatggagtagtactagcccacacagaccgcgcttttccccagccacacacccttctgagggtctggaggagaactattgtagaaatccggacaatgacccgcagggtccgtggtgttacactaccgatcccgaaaagcgctacgactactgcgatattctggagtgtgaggaagagtgcatgcactgttccggtgaaaactacgatggcaagatctccaagacaatgagcggactggagtgccaggcctgggatagccagtctcctcatgctcatggctatatccctagcaagttccctaacaaaaatttaaaaaaaaactattgcagaaaccccgatcgggagctccggccatggtgcttcacaaccgatcccaacaagcggtgggagttgtgtgatattccgcgctgtacaactcctccacccagttctggccctacgtatcagtgtctgaaaggtacaggggagaactatcggggcaatgtagctgtgaccgtatcaggacatacttgtcaacattggtcggcccaaacacctcacactcacaataggacacccgaaaatttcccctgtaagaatctcgatgagaactattgtcgcaacccagatggaaaacgcgcaccttggtgccacacgacaaatagtcaggtgcggtgggagtactgtaagatcccgtcgtgcgattcctccccagtctctaccgagcagcttgcccctaccgccccgcctgagttaactcccgtagtgcaggactgttaccacggagacggccagtcttacaggggaacatcctccacaaccaccacaggcaaaaaatgtcaaagctggtcgtctatgaccccgcatagacaccagaaaacccccgaaaactaccctaacgctggtctgacaatgaattactgtaggaatccggatgcggacaaggggccttggtgctttaccaccgacccttcggttaggtgggagtactgtaacctcaaaaagtgttcaggaacagaagccagtgttgtggctccaccccccgtagttctgctgccagacgtagagaccccttccgaggaggattgtatgttcggcaatggtaaaggctatcgcggcaagcgggcaactaccgtcacaggaaccccttgccaggactgggccgcccaagagccacacaggcactccatcttcactccggagaccaatccacgagccggactcgaaaaaaactattgcaggaacccagacggggatgtcggcgggccctggtgctatactacaaatcctaggaagctgtatgattactgcgatgttcctcagtgtgccgctccttctttcgactgcggtaaacctcaggtggagcccaagaagtgtccaggtagagtcgtcggaggttgcgtggcgcacccccacagttggccctggcaggtgagcctcagaacccgattcggtatgcacttctgtggaggcaccctgatatcccccgagtgggttctgacagcggcccattgccttgaaaagtccccccggccctcgtcatacaaggtgattctgggtgctcaccaggaagtgaacttggagcctcacgtgcaggaaatcgaagtgagtaggctttttctggaaccaacccggaaggatattgccctcctgaaattaagttctccagcagttatcacagacaaggtgatacctgcctgcctgccttcacctaattacgtcgttgccgacagaaccgagtgtttcatcacagggtggggcgaaactcaggggacatttggggcagggctgctgaaagaagcacagctccctgtcatcgaaaataaggtttgcaatagatatgagtttctgaatggaagagtacagagtaccgaactctgcgccggccatctcgctgggggcacagacagttgtcagggtgatagcggcggacccctggtgtgttttgaaaaagacaaatacatcctgcaaggggtgacttcctggggcctgggatgcgctcgtccaaacaaaccgggtgtctacgtgagagtctccaggttcgtgacttggatcgagggtgtgatgcgcaataat

SEQ ID NO: 6570 - DNA, 2430 bp, Artificial Sequence
  derived and/or modified sequence
atggagcacaaggaagtcgtgctgcttcttcttctttttctcaagtccgggcaaggtgagcccctggatgattacgtgaacacgcagggcgcaagccttttttcggtgactaagaagcaactcggggccggttcgatagaagagtgcgcagctaagtgcgaagaagatgaggaattcacttgtagagcttttcaataccactcaaaggaacagcaatgcgtgattatggccgaaaatcgaaaatcctcgatcattatcagaatgagagatgtggtgctgtttgagaagaaggtctatctttcagaatgcaagacgggtaacggcaaaaactacaggggcactatgtcaaagactaagaacggaattacctgtcagaagtggagcagcaccagtccgcacaggccaaggttctcgccggcaacccatccgtccgaagggctcgaagaaaactactgtcgaaatccggataacgatccacagggtccgtggtgttacaccaccgacccggaaaagcgctacgattactgcgacattctggagtgtgaagaagaatgtatgcattgttcaggggagaattatgacggaaagatctctaaaaccatgtccggacttgagtgtcaagcatgggactcgcagtcccctcatgcgcatggctacatccctagcaagttccctaacaaaaaccttaagaaaaactactgcagaaacccggaccgggaattgcgtccttggtgttttaccaccgatccgaacaaacgctgggagctgtgtgatattcccaggtgtactacgcctcccccctcgtccggtcctacttatcaatgcctcaagggcaccggagaaaactaccgagggaacgtggccgtgaccgtctcaggtcatacttgtcaacattggtcggcacaaactccacatactcataatcgtactcccgaaaactttccctgcaaaaatctggatgagaactactgtagaaacccggatggaaaacgggccccttggtgtcacaccacgaactcacaagtgagatgggaatactgtaagattccttcctgcgattcctcaccagtctcaactgagcaactggcgcccaccgctccccctgagctgacgccagtggtccaagactgttaccacggcgacggtcaatcgtataggggaaccagctccactaccaccactggaaagaagtgtcagtcgtggtcgtccatgactccacatcgacatcagaaaactccggagaactaccctaatgccgggctgaccatgaactactgccgaaatcctgacgccgataaagggccttggtgcttcaccacggatccatcggttcggtgggagtactgcaaccttaagaagtgttcaggaaccgaagcatccgtcgtggcgcctcctccggtggtgctcctgccggatgtggaaaccccatctgaggaggactgcatgtttgggaatggaaagggatacaggggaaagcgcgcaactaccgtgactggaaccccttgccaggattgggcagcccaggaaccgcatagacactccattttcactccagaaacgaatcctcgagccgggttggagaagaactattgtcggaaccctgatggagacgtggggggaccatggtgttacactaccaatccgcggaagctgtacgactactgtgatgtcccacaatgcgcagctccatccttcgactgcggaaagcctcaagtggaacctaagaaatgtcctggaagagtcgtgggtgggtgtgtggcacacccacacagctggccttggcaggtatccctcagaacccgattcggtatgcacttctgtggaggcactcttatatcgcccgaatgggtgctgactgcagcacactgccttgaaaagtcgccgaggccaagcagctacaaggtgattcttggagctcatcaggaagtgaacctggagcctcatgtgcaggagatagaggtgtcaagactgtttttggagccaaccagaaaggatatcgcgctcctcaagctctcctcgcctgccgtgattactgataaagttattcccgcctgtctcccttcacctaattacgtggtggcggatagaaccgaatgctttatcaccggctggggggagactcaagggacttttggagcgggtctgcttaaagaagcacaactccccgtgattgagaataaggtctgtaatcgatacgagtttcttaacggtcgggtgcaatccacggagctgtgtgcaggacatctggcaggtggaaccgactcttgtcagggggattcagggggcccacttgtctgcttcgaaaaagacaagtacatacttcaaggtgtcacctcctggggcctgggctgtgcacgtccaaacaagcctggtgtgtacgtgcgagtctcaagatttgtgacgtggatcgaaggtgtgatgagaaacaac

SEQ ID NO: 6571 - DNA, 2430 bp, Artificial Sequence
  derived and/or modified sequence
atggaacataaggaggtcgttctcttactgctcttgtttctcaagagtgggcagggggagccactggatgactacgtcaatacccagggggcttctctgttcagcgtgactaagaagcaactgggagcagggagcattgaggaatgcgcggccaaatgcgaggaagatgaggagttcacttgtcgagccttccagtaccacagcaaagaacaacaatgcgtgatcatggcagagaaccggaagtcgagcatcatcataaggatgagggatgtagtactctttgaaaagaaggtgtatctgtccgagtgcaaaaccgggaacggcaagaattaccgcggtacaatgtcaaagacgaagaatggcatcacatgtcagaaatggtcctcaacctcgccccaccgtccccgtttttcacctgcaactcatccttccgaaggactagaagagaactattgtagaaatcccgataatgatccacaagggccgtggtgttatacaactgatcctgaaaagcgctacgactattgcgacatcctggagtgtgaagaggagtgtatgcactgctccggagaaaattatgacggaaaaatatccaagacaatgtccgggctggagtgccaggcttgggactcccaaagtccccacgctcacggctatatcccaagtaaatttccgaacaagaacttgaagaaaaattactgcaggaaccccgacagagaactgaggccctggtgtttcacaacagatcctaacaagaggtgggagctgtgcgacatccccagatgtaccacaccccctccatccagtgggcccacatatcaatgtttgaaagggaccggagaaaattatcgaggcaacgtggccgtaaccgtctcaggccatacatgccagcattggtccgcccagacgcctcacacccacaataggacacccgagaactttccatgcaagaacttggacgaaaactactgcaggaaccctgacggtaagcgtgccccttggtgtcacacaacgaattctcaggtccggtgggagtattgcaagataccttcctgcgacagttccccagtaagtacagaacagctggcacctaccgcgcctcccgagctcaccccagtcgtgcaggattgctaccacggagacggacaatcataccgcggtacgtcctcgaccacaaccactggaaaaaagtgccagtcatggagttccatgactccgcataggcatcagaagaccccggaaaactaccccaacgccggcctgactatgaattactgccgaaatccggacgcagacaaggggccgtggtgtttcaccactgatccaagcgtccgatgggaatattgtaacctgaaaaagtgttcgggcacggaggcttctgttgtagccccgccccccgtggtcctgctgcccgacgttgagaccccttcggaggaagattgtatgttcgggaacggcaagggctacaggggtaaacgggccaccactgtcaccgggactccttgtcaggattgggcagctcaggagcctcacagacattctatatttacacctgaaacgaatccaagagcagggctggaaaaaaactactgccgcaaccccgatggggacgttggaggaccatggtgctataccacaaatccccgaaagctatatgactattgtgacgttccacagtgtgctgccccaagctttgattgtggcaagcctcaagtggagccaaaaaagtgcccgggcagagttgtgggcggttgtgtggctcatccccatagctggccttggcaggtgagcctccgcacgcgatttggtatgcacttttgtggaggaaccctaatatcacccgagtgggtgctgaccgccgcccattgcctggaaaaatccccaagaccctcttcttacaaggtgattctgggggcacatcaggaggttaatctggaacctcacgttcaggagattgaagtgagtcggctattcctagagccaacccgcaaggacatcgcgctattaaaactatccagtccggctgttatcaccgacaaggtaatccctgcgtgcttgccaagcccaaattacgttgtagctgataggacagaatgcttcattacgggctggggcgaaacacaaggcacgttcggggcgggcttgctgaaagaggctcagctgcctgtcatcgaaaacaaagtgtgtaatagatacgaatttctcaacggacgcgtccagtccaccgagctgtgcgctggccatctcgcaggcggaacagatagttgtcaaggagactcagggggcccccttgtctgtttcgagaaggacaaatatatcttacagggagtgacgagctgggggctgggatgtgcccgtccaaacaagccaggcgtctacgttcgcgtgtctcggttcgtgacctggattgaaggggtgatgaggaacaat

SEQ ID NO: 6572 - DNA, 2430 bp, Artificial Sequence
  derived and/or modified sequence
atggaacataaagaagtggtgctgctgctgttactcttcctgaaatcagggcagggggagcccctggacgactatgttaatacacagggagcctcgctgttttctgtgaccaaaaaacagctaggggcggggtccatcgaggaatgcgcagccaaatgtgaggaggatgaagagttcacctgccgagccttccagtaccacagtaaggaacagcagtgcgtcatcatggcggaaaataggaaatcttctatcataatacgaatgagagatgtggtgctattcgaaaagaaggtgtacctgtcagagtgcaaaaccggcaatggaaagaactaccgcggcactatgtccaagaccaaaaatggcataacgtgccaaaagtggtcgagcaccagtcctcaccggccgcgcttctcacccgcgacacatccttctgagggattagaagagaattattgtaggaacccagacaatgatccccaggggccatggtgttacacaactgatcctgagaagaggtatgattactgcgacatcctagagtgtgaggaagagtgtatgcactgctctggagagaattacgatgggaagatttcaaagacaatgagtggcctcgaatgccaggcttgggactcacagagcccacatgctcatgggtatatcccttcgaagttcccaaacaagaacctgaagaagaattattgcaggaaccctgacagggagctgcggccgtggtgctttaccacagatccaaacaaacgatgggaactgtgcgatattccccggtgcaccacaccacctccaagctcaggccctacctatcagtgcctcaaaggaactggcgagaactaccgcggaaacgtggcggtcaccgtctccggccacacatgtcagcattggtccgcgcagactccgcacacccataaccgaaccccagagaattttccctgcaagaacctagacgagaattattgcaggaaccccgacgggaagcgggccccttggtgccacaccaccaactcccaggtgcggtgggagtactgtaagatcccgagctgcgatagttctcccgtgtctaccgagcagctggcaccaacggctccgcccgaactgacacccgtggtgcaagattgctaccacggggatggccagtcataccgggggacctcgtcaactaccactacaggaaaaaagtgccagtcttggtcgtcaatgactccccatcgccatcagaaaactccagaaaattatcctaacgccggactgaccatgaattattgtcgcaatcctgacgccgacaagggtccatggtgctttaccacggatccctccgtacggtgggagtactgtaacctgaaaaaatgctcaggcaccgaagcttcagtcgtcgctcccccacccgtcgtactactgccagacgtggagactccgagcgaggaggattgtatgttcggcaatgggaagggatatcggggcaaaagagcgactaccgtaactggcacaccttgccaggattgggctgcccaggagccacatcgacactccattttcacacccgaaaccaatccgagggcagggttggagaagaattactgtaggaaccctgacggggatgtgggaggaccttggtgctacaccactaaccccaggaaactatatgactattgtgatgtgccacaatgtgccgctccgtcattcgattgtggaaagccccaggtagagcccaagaagtgtccaggaagggtagtgggaggctgtgtcgcacatccacactcctggccctggcaggtaagcctcaggaccagattcggcatgcacttctgtggggggacacttatcagtcctgaatgggtattaactgccgcccactgtcttgagaaatcaccgaggccgtcttcctataaggttatcctcggtgcgcatcaagaggtgaacctcgagccccacgtccaagaaatcgaggtctctagactatttctggaacctactcgaaaggacatcgccctcctgaaactgtcctccccagccgtcattacagacaaggtcatacccgcgtgtctaccctcccctaattatgtggtggcagacaggaccgagtgcttcatcacggggtggggcgaaacacaaggcactttcggagcgggactactcaaagaagcccagcttccagtgatcgagaataaagtctgtaatcgttacgaattcttgaatggaagggtgcagagcaccgaactctgtgccggccacttagcaggcggcaccgactcatgccagggggacagcgggggccccctggtgtgttttgaaaaggacaagtacattttgcagggggtgacctcctggggcctaggatgtgctagacctaacaaacctggcgtttacgtgcgggtgtcaagattcgttacatggattgaaggcgtgatgcgtaacaac

SEQ ID NO: 6573 - DNA, 2430 bp, Artificial Sequence
  derived and/or modified sequence
atggagcataaggaggtcgtcttgctcctgctcctgttcctgaagtcgggacagggagaaccactggacgactacgtcaacactcagggggcaagcctgttctcggtcaccaaaaagcagctcggcgcaggatcgatcgaggaatgcgctgcaaaatgtgaagaggacgaagagttcacctgcagggcctttcagtatcactcgaaggaacaacaatgcgtgatcatggccgaaaaccgcaagtccagcatcatcattcggatgcgggacgttgtgctctttgaaaagaaggtgtaccttagcgaatgcaaaaccggaaatggaaagaattaccggggcactatgagcaagaccaagaatggcatcacttgccagaaatggtcgtcgaccagccctcacagaccccggttcagcccggctacccatccgtcggagggattggaagaaaactactgccgcaacccagataacgacccgcaagggccgtggtgctacacgacggacccggaaaaaagatatgattactgcgatatactggagtgcgaagaggaatgtatgcactgttccggggagaactacgacggaaagatcagcaagacgatgagcggactggaatgtcaagcctgggactcccagtccccgcacgcacatggttacatcccttcgaaattccccaataagaatctgaagaagaattactgccgtaacccggatcgcgaactgcgcccgtggtgcttcacgaccgatccgaacaagagatgggagctttgcgatattccacggtgcacgacccctccgccatcctccggaccgacctaccaatgcctcaagggaacgggtgagaactatcgtggaaatgtggctgtgactgtgtccggtcacacgtgccagcattggagtgcacagactcctcatactcacaacaggaccccggaaaacttcccttgcaaaaacctggacgaaaactattgcagaaatcccgacggaaagagagcgccatggtgccataccaccaattcgcaggtgaggtgggagtactgtaagatcccatcatgtgactccagcccagtgtccaccgagcagctggcgccaaccgcccctccagaattgacgcccgtggtccaggactgctaccacggagacggccaaagttacagaggaacctcatcaactaccaccactggaaaaaagtgccagtcgtggagctcgatgactccacatcgacaccaaaagactccagaaaactacccgaatgctggactgacgatgaactactgccggaatcctgatgccgacaaaggaccctggtgtttcactacggatccgtctgtcagatgggaatactgcaatctgaaaaagtgctcaggcactgaggctagcgtcgtggctcctccgccggtggtgctgctcccggatgtggaaactccatcagaggaggattgtatgtttgggaacggaaaggggtaccgcggaaagcgcgctaccactgtgaccggaactccctgccaagactgggcggcccaggaaccacaccgccactccatctttaccccagaaactaacccccgggcaggcctggagaagaactactgcagaaacccggacggtgatgtcggaggtccctggtgttacaccactaatcctcggaagctgtacgattattgcgacgtcccgcagtgcgccgcaccctcatttgattgcggcaagccacaagtcgaaccgaagaagtgcccgggtagagtggtcggcggctgtgttgcacacccgcattcatggccttggcaagtttccctcagaacccggttcgggatgcatttctgcggcggaactttgatatcaccggagtgggtcctgactgctgcgcactgtctcgaaaagagcccacgcccgagcagttacaaggtgattctcggggctcaccaggaggtgaacctggaaccacacgtccaagagattgaagtgtcccgcctcttccttgaacccacccgcaaagatatcgcccttctgaaactgtcctcccctgccgtgatcactgacaaagtgatccctgcatgtctgccgtccccaaattacgtggtggctgaccgcactgagtgtttcatcactggatggggagagacgcaggggacctttggagccggtcttttgaaggaggcacagctccccgtgatcgaaaacaaggtctgcaaccgctacgaattcctcaacggaagggtgcagtcgaccgaactgtgtgccggccaccttgcaggagggaccgactcctgccaaggcgactcgggcggaccgcttgtgtgcttcgagaaggacaaatacatccttcagggggtgacctcctggggactggggtgcgcacgtcccaacaaaccaggggtctacgtgcgggtgagccggttcgtaacttggatcgagggcgtcatgaggaacaac

SEQ ID NO: 6574 - DNA, 2430 bp, Artificial Sequence
  derived and/or modified sequence
atggaacacaaagaagtggtgcttctgctgctgctgtttctgaaatcaggccaaggagagccattggatgactacgttaacacccagggggcctcactcttttcggtgactaaaaagcagctgggcgccgggtcgatcgaagaatgtgcggctaaatgtgaagaagatgaagaatttacctgtcgcgctttccaataccattctaaggaacagcagtgcgtgattatggcagaaaacagaaaatcatcgatcatcattagaatgcgggatgtcgtcctttttgagaaaaaggtgtacctgtccgaatgtaagactggaaacggaaagaactacaggggaacgatgtccaagactaagaacgggataacttgccaaaagtggtcctcaaccagcccccatcgacccaggttctccccagcaacccacccctcggaaggactcgaggaaaactactgtaggaacccagataacgatccacaaggcccctggtgttacaccaccgatccggaaaaaaggtacgactattgtgacatcctggagtgcgaagaagaatgcatgcactgttcaggagaaaactatgacggaaaaatctcaaagactatgtcaggacttgagtgtcaagcctgggacagccagtcgccacatgcacatggttatatcccgagcaagttccccaacaagaatctgaagaagaactactgccgaaatccagatagagaacttcgcccctggtgcttcaccactgatccaaacaagagatgggagctttgcgatattcctagatgtactactccacctcctagcagcggacccacttatcaatgtctgaagggaactggtgaaaactacagaggaaatgtggcagtcacggtgtcgggtcatacctgtcagcattggtcagcacaaactcctcatacccataacagaaccccggaaaactttccttgcaaaaacctggacgagaattactgtagaaatcctgatgggaagagagcaccttggtgccatacgacgaactcgcaagtgcgctgggaatactgcaagatcccgtcgtgtgatagctcacctgtgtcaaccgagcagctggcaccaactgctcctcccgagcttactcctgtcgtccaggattgctaccacggtgatggacagagctaccgggggaccagctcgaccaccaccaccgggaagaagtgtcaatcgtggtcctctatgacccctcaccggcaccaaaagaccccagaaaactacccaaatgccggcttgactatgaattactgtcggaatcctgatgccgacaaaggaccttggtgctttaccaccgatcctagcgtccggtgggagtactgtaaccttaagaagtgttcaggaactgaagcatcggtggtggcaccgcctccagtcgtgttgcttccagatgtcgaaaccccttccgaagaagattgtatgtttggtaatggtaaaggttaccggggaaaacgagcaacgaccgtgactggtaccccgtgccaagactgggccgcacaggagccacaccggcattccatcttcacccccgaaaccaacccacgtgcaggtctggagaagaactattgtcgcaacccggacggggacgtgggaggaccctggtgctacactactaacccaagaaagttgtacgattactgtgatgtcccacaatgcgcagcaccctcctttgattgtggcaagccacaagtggaacctaaaaagtgccccggacgggtggtgggaggatgtgtggcccatccccattcttggccttggcaggtgagcttgcggactcgttttggaatgcacttttgcggcgggaccctgatttcaccagagtgggtgcttacggcagcacactgtcttgagaagtcaccgcggccgtcatcctacaaggtgatccttggtgcacaccaagaggtcaacctcgaaccacatgtgcaggagattgaggtgtcgcgtctgttccttgaaccaacccgtaaggatatcgcactgctgaagctcagctccccagccgtcattaccgataaagttattccggcatgcctgccttcgccaaactacgtcgtggcggaccgtaccgagtgtttcatcactgggtggggtgaaacccagggtactttcggtgccggccttctcaaagaggcgcaactgcccgtgattgagaacaaagtgtgcaatcgctacgaattcctcaacggacgtgtccagtcaactgagctgtgtgcggggcatcttgctgggggaaccgattcctgtcagggagactccggtggaccactcgtttgctttgaaaaagataagtacatccttcaaggcgttacgtcatggggcctcggttgtgcccgccctaataagcctggtgtttatgtgagggtgtcaaggttcgtgacctggattgaaggtgtcatgagaaataac

SEQ ID NO: 6575 - DNA, 2430 bp, Artificial Sequence
  derived and/or modified sequence
atggagcacaaagaagtcgtgctgctcctgcttctgtttcttaaaagcggacagggagaaccgctggacgactacgtgaacactcagggggcatcgctgttttcagtgaccaagaagcagctgggcgcaggttcgattgaggaatgtgccgcgaagtgtgaagaggacgaagaattcacctgccgggccttccaataccattcaaaggaacaacagtgcgtcatcatggcggaaaacaggaagtcctccataatcatcagaatgagagacgtcgtgcttttcgagaaaaaagtgtacctgtccgagtgcaaaaccggaaacggtaagaattacaggggaacgatgtccaagactaagaacggaatcacgtgtcagaaatggagcagcacttcgccgcaccgcccgcggttctcgccggccactcatccatccgagggtttggaggagaactactgccgcaatccagataacgacccccagggtccctggtgctatactactgacccggaaaagagatacgattactgcgacatattggaatgtgaagaagaatgtatgcattgctcgggcgagaactatgacggcaaaatctcaaagactatgtcgggactcgagtgccaggcttgggattctcagtccccacatgcgcacggatacatcccaagcaagttccccaacaagaatctcaagaagaactattgtcgtaacccggaccgcgagcttagaccctggtgttttactaccgacccgaacaagcgttgggaactgtgcgacatcccgcggtgcactactcctcccccgtcgtccggaccgacttaccagtgcttgaaaggaactggagagaattatcgcggaaacgtggcagtgactgtgtcaggacatacctgccaacactggtcagcgcagacccctcatacccataacaggactcctgagaacttcccttgtaagaacctcgatgagaattactgccgaaatccagatggaaaacgggccccttggtgccacaccaccaactcccaagtcaggtgggaatactgcaagattccgagctgcgattcgtcgccagtctccaccgagcagctggcgccaaccgcaccaccggaactgaccccggtggtccaggactgctaccacggggacggacaatcgtataggggcacctccagcaccactacgactggaaaaaagtgccaatcgtggtccagcatgactccacacaggcaccaaaagaccccggaaaactacccgaacgccggcctcacgatgaactactgcaggaatccggacgcggataagggcccgtggtgcttcacgaccgaccccagcgtgagatgggagtactgcaatcttaagaagtgtagcggtaccgaagcctcggtggtggccccgccgccggtggtgcttctccccgatgtggaaacgccgagtgaagaggactgcatgtttgggaacggaaagggataccgcggcaagcgcgccacgaccgtcaccgggactccatgtcaggactgggctgcgcaagaaccccaccgccacagcattttcactccggaaactaatcctcgagcgggcctggaaaagaattactgcaggaacccggacggagatgtgggcggaccctggtgctacaccaccaatcctagaaagctgtatgactactgcgatgtccctcagtgcgcggcgccatctttcgattgtgggaaaccacaggtggagcctaagaaatgcccgggaagggtggtcggaggctgcgtcgcccatccgcactcgtggccatggcaggtgtcgctgagaacgcgtttcggcatgcacttctgcggcggcaccctgatctcgcctgagtgggtcctgactgcggctcattgtttggagaagtcacctagaccgagcagctacaaggtcatcctgggggcccaccaggaagtgaatttggaacctcatgtccaagaaatcgaggtgtcgcggttgtttcttgaaccaacccgcaaagatatcgctctcctgaaactctcctccccggctgttatcactgataaggtgatccccgcatgcctgccatccccaaactacgtggtggccgatcgcactgaatgctttatcactgggtggggggaaacccaaggaactttcggagccggattgctgaaggaggcgcagctgcctgtgatcgagaataaggtgtgtaaccgctacgaattcctcaatggtagagtgcagtccactgaactgtgtgcgggccacctggcgggagggaccgactcgtgtcaaggagattccggaggacctctggtatgtttcgagaaagataagtacatactgcaaggcgtgactagctggggcctcgggtgcgctcgcccgaacaagcctggggtgtacgtccgggtgtcgcgcttcgtgacttggatcgagggcgtgatgagaaataac

SEQ ID NO: 6576 - DNA, 2430 bp, Artificial Sequence
  derived and/or modified sequence
atggagcataaggaggtggttctgctgctcctcctgttcctgaagagcggacaaggagaaccgctggacgactacgtcaacacccagggagcttcgctgttcagcgtcactaagaagcagcttggagcgggaagcatcgaagagtgcgctgcaaaatgtgaggaggacgaagagttcacgtgccgagccttccagtaccacagcaaagaacaacagtgcgtgatcatggccgaaaataggaagtcctcaatcatcattagaatgcgggacgtcgtgttgttcgaaaagaaggtgtacctctccgagtgcaaaaccggaaacggcaagaattacagaggaaccatgtcgaaaactaagaacggaatcacctgccagaagtggtcctcgacgtccccacaccgaccacggttctcgccagccactcacccgtcagagggactggaggagaactactgtcggaaccctgataacgacccgcagggcccgtggtgctacactaccgatccagagaagaggtacgactactgcgacatcctcgaatgtgaagaagaatgtatgcactgctcgggggaaaactatgacggaaagattagcaagaccatgtccgggttggaatgccaggcgtgggattcgcagtcccctcacgcgcatggatacatcccatcgaaattccccaataagaacctcaagaagaattattgccgtaatcctgaccgggaactcagaccttggtgcttcacgactgatcctaacaaaagatgggaactgtgcgacattccgcgctgtactaccccaccgccgtcatccggacccacctaccaatgccttaagggcactggtgagaactacagagggaacgtggctgttaccgtgagcggacatacctgccagcactggtccgcccagactccgcacacccacaaccggaccccagagaattttccgtgcaagaatctcgacgaaaactactgcagaaatccagatggcaagcgcgcgccgtggtgccatactactaacagccaagtgcggtgggaatactgtaaaatcccgagctgcgattcgtctccggtcagtaccgagcagctggcgccaaccgctccgccggagcttactccggtggtacaggactgctaccacggagatggccagtcgtaccgcgggacctcatcgaccaccactactggaaaaaagtgccagtcatggtcctccatgacccctcatcggcaccaaaagaccccagaaaattacccgaacgcaggcctgaccatgaactattgccggaatcctgacgccgacaaaggaccgtggtgttttaccaccgacccatccgtgagatgggagtactgtaacctgaagaagtgctcgggtactgaagcctcagtggttgcgccacccccagtggtgctgctcccagatgtcgaaactccatcagaggaagattgcatgttcggcaacggaaaaggctacagggggaagagggcaactaccgtgacgggtacgccgtgccaggattgggctgcccaagagccgcaccgccattccatctttacgccggagactaatcctcgggccggtctggaaaagaattactgcaggaacccggacggcgacgtcgggggtccctggtgttacaccactaacccccgcaagttgtacgactattgcgacgtgcctcaatgtgcagccccatcgttcgattgcggaaagcctcaggtggaaccgaagaagtgtcccggacgcgtggtgggaggttgcgtggcgcatccccacagctggccctggcaagtgtccctgcggacgcgctttgggatgcacttctgtggcggaactctgatctcgccggagtgggtgctcactgcagcccattgccttgagaaaagcccccgcccgtccagctacaaagtgatccttggagcccatcaggaagtcaatctcgaacctcacgtccaagaaatcgaagtgtcgcgtctctttctggaaccgaccagaaaggacatcgcactgctcaagctgtctagtcctgccgtcatcaccgacaaggtcattccggcctgtctcccgagccctaactacgtggtcgccgaccggactgagtgcttcatcactggatggggcgaaacccaaggcactttcggagcgggcttgctgaaagaggcccaactgcctgtgatagaaaacaaggtgtgcaaccggtacgaatttctgaatggccgcgtgcagtcgaccgagctgtgtgcaggtcatctggctggagggaccgattcctgccagggcgattcaggtggaccactggtctgcttcgagaaagataaatacatcctccagggagtgacctcatggggattgggatgcgcgcgcccgaataagccgggggtctacgtgcgcgtctcacgcttcgtgacttggatcgaaggcgtgatgcgcaacaac

SEQ ID NO: 6577 - DNA, 2430 bp, Artificial Sequence
  derived and/or modified sequence
atggaacataaggaggttgttttactgctgcttttgttcctgaaaagcggccaaggagagccattagacgactatgtgaacacacagggcgcgagcctgttcagtgtcacgaagaaacaactgggggccgggtctatcgaggaatgcgccgcaaagtgcgaggaagacgaagaattcacatgtcgcgcctttcagtaccactctaaagagcaacagtgtgtgatcatggccgagaacagaaagagcagtatcatcatcagaatgagggacgtggtcctctttgaaaaaaaggtttatctgtccgaatgtaaaaccggaaatggcaaaaattacagaggcactatgagtaagacgaagaacgggattacctgccaaaaatggagctctacaagcccacaccggccgcggtttagtcccgcaacccacccatcggaaggactcgaggaaaactactgcagaaatcccgataacgatccacagggcccctggtgctatactacagaccccgagaagaggtatgactattgtgatatcctcgagtgtgaggaggaatgcatgcactgttccggtgagaattatgacggtaagatcagtaaaactatgtcaggactggaatgccaggcctgggattcacagtctccgcatgctcacgggtacattccatccaagttccccaataagaatctaaagaaaaattattgtcgcaaccctgatcgcgagctgaggccatggtgttttactaccgaccccaacaaaaggtgggaactttgcgatatacctagatgcacaactccccccccatccagcggaccaacctaccagtgtctgaaagggacaggtgaaaactaccgaggcaatgtcgcagtgaccgtttccggacacacatgccagcattggtcagcccaaaccccccacacccacaatcgaacccccgagaatttcccatgtaagaacctggatgaaaattactgcagaaaccccgatggaaaaagagcaccctggtgccatactactaacagtcaggtgcggtgggaatactgcaagatcccgtcctgtgattcaagccccgtcagcacagaacaactggcacccaccgcacctccggaactgacacccgtagttcaggattgctatcacggtgacggccagtcctaccgtgggacctcttcaactacgaccacaggaaagaaatgccagagctggtcttcaatgaccccccacaggcatcagaaaacccctgagaattaccccaacgcaggcctaacaatgaactactgccgcaatcctgacgcagataagggcccctggtgctttaccacggatcccagcgtccgatgggagtattgcaatctcaaaaagtgtagcggaactgaggcttctgtggttgctcctcctccggtcgttctgctgcccgatgtcgaaacaccatccgaagaagactgcatgtttggcaacgggaaagggtatcgcggcaagagagctacaaccgttaccggaactccgtgccaggactgggccgcacaggagccacataggcactcgattttcaccccagaaaccaatccaagagctggtctcgagaaaaactactgtcgtaatccagatggggacgtaggaggtccctggtgttatacaacaaaccctagaaagctgtatgattactgcgatgtgccccaatgtgctgctccgtccttcgactgtggaaaaccacaagtcgaacccaagaaatgtcctggtagggtcgtgggggggtgcgtggcacaccctcactcttggccctggcaggtgagtttgcgcacccgcttcggcatgcacttctgtgggggaacactgatcagcccggaatgggtactgaccgccgcgcactgccttgaaaagagtccccgaccttcctcttacaaagttattctcggggcccaccaggaggtgaatctggagcctcacgtccaggagatcgaagtcagcagactttttctagaaccaacgcggaaggatatcgccctgctgaaactcagctcccccgctgtcatcaccgataaggtgattcctgcatgcctcccttccccaaattacgtcgttgcagatcggactgagtgttttattaccggctggggagagactcaagggaccttcggcgctggactgttaaaggaagcacagctaccagttattgagaataaagtgtgcaatcggtatgaattccttaatggacgtgtccagagcacagagctatgcgccgggcatcttgccggcggtactgatagctgccagggggatagcgggggccctctggtgtgtttcgaaaaggataaatatattctgcagggcgtcacgtcttggggcctcggatgcgcaaggcctaacaaaccaggggtctatgtgcgagtgagccgcttcgtgacttggattgaaggagtcatgagaaataat

SEQ ID NO: 6578 - DNA, 2430 bp, Artificial Sequence
  derived and/or modified sequence
atggaacacaaagaggtggtacttctgctcctgctgtttcttaagtcgggccaaggagaacctctggatgactacgtgaacactcagggcgcaagtctattttccgtgaccaaaaagcagctgggtgccggtagcattgaggagtgtgcagccaagtgtgaagaggacgaggagtttacatgtcgagccttccagtatcatagcaaggagcagcagtgcgttattatggcagagaatcgaaaatcttcaattatcatacgcatgagagatgtcgtccttttcgaaaaaaaagtgtacttgagcgagtgtaaaacaggtaatggcaaaaattatcgcggaactatgagcaaaactaagaacggtattacttgccagaagtggtcatctacaagcccacacaggcctagattctccccagccactcacccgagtgagggcctcgaggaaaattactgtaggaacccggataacgaccctcaagggccatggtgttatacaactgacccagagaaacgatacgactattgcgacattttggaatgcgaggaagaatgcatgcactgttcaggggagaactacgatgggaaaatttcaaaaaccatgagtggcctggaatgtcaggcttgggattcacaatcgccgcacgctcacggttatatacctagcaaattcccaaataagaacctaaagaagaattactgtcggaatcccgaccgggagcttcgcccttggtgtttcacaaccgatccaaacaagaggtgggaactatgtgacattccaaggtgtacaactccaccaccaagctctggacccacctatcagtgccttaaaggtacaggggagaattatagaggaaacgtagctgttaccgtctccggacacacttgccagcactggagcgcacagacgccccatacgcataacaggacccccgagaacttcccttgtaaaaatctggacgaaaattactgtcggaaccctgacggcaagcgggccccgtggtgccacacaacaaactcacaggttagatgggagtattgtaagatccccagctgtgattcctcacccgtgtccacagagcagctggcgccaaccgcgcccccagagctgacccctgtggtccaagactgttaccatggagacgggcagtcttacagggggaccagcagcaccactaccacaggaaagaagtgccaatcttggtcctctatgacgccacatcggcatcagaagacacccgaaaattatccaaatgcaggcctgaccatgaattactgtagaaaccccgacgcagataaggggccttggtgcttcactaccgatccgtctgtcagatgggaatactgcaatctgaaaaagtgtagtggcacagaagcgagcgttgtggcaccccctccagttgtactgctgcccgatgtggagacccccagcgaggaagactgtatgttcgggaatggcaaagggtatcgaggcaaaagagccactacggtgaccggcacaccatgccaagattgggccgcgcaggaaccccaccggcactcaatcttcacgcctgagactaacccaagggcaggtctggaaaagaattattgccggaacccagatggagacgtcggagggccttggtgttatacgacaaatccccggaagctgtatgactactgcgacgttccccagtgtgcggctccttcattcgactgcggtaagcctcaggtggagcctaagaagtgtcctggcagagtagtaggcggctgtgttgctcatccccacagctggccatggcaagtcagcctacgtactcgcttcgggatgcatttttgcgggggcacactcattagtcctgagtgggttctgacagctgcacattgcctcgagaaatcaccacggccaagttcctacaaggtgatccttggcgcacaccaggaagtcaatctggagcctcatgtacaagaaatcgaggtttcaaggctattcttggagcctactcggaaggatatcgcactgctgaagttgagctcccccgctgtgatcacagataaggtgatcccagcttgccttccgagcccaaactacgtggtggcagatcggacagagtgttttattactggatggggagaaacccaaggaaccttcggcgcggggttattgaaggaagcccagttgccggtgatcgaaaacaaggtctgcaatagatatgagtttctgaacggacgggtccagtcaaccgagctgtgtgcaggtcacctcgcaggcggaaccgattcctgccagggtgactccggtggcccactagtatgctttgaaaaggataagtacattctgcagggggtgacatcctggggcttaggctgcgcccgccctaataagccaggggtgtacgtcagggtcagccgcttcgtgacgtggattgaaggtgtgatgaggaataac

SEQ ID NO: 6579 - DNA, 2430 bp, Artificial Sequence
  derived and/or modified sequence
atggagcacaaagaggtggtgctcctactccttctattcctaaaatcaggacagggggagccccttgacgattacgtcaatacacagggagcatcattattctcagtgacaaaaaaacagctaggagctgggtccatcgaagagtgtgctgccaaatgtgaagaagatgaagagttcacatgcagggcattccagtatcatagtaaggaacagcagtgcgtcataatggcagaaaaccgcaaatcttctattatcatccggatgagagatgtagtactctttgaaaaaaaggtttatctctctgaatgtaaaactggaaatggaaaaaactatcgggggacaatgtctaagacaaagaacgggatcacatgccaaaaatggtcatcaacatccccacatcggccacgattcagtcctgccacacacccatctgaaggattagaagaaaactactgccgaaatccagataatgaccctcaggggccatggtgttatacaacagatccagaaaaaagatatgattattgcgatattctggaatgcgaggaagaatgtatgcattgttctggggaaaactacgatgggaagatctctaaaacaatgtcagggctcgaatgccaggcctgggatagtcagtctccacacgcccacggatatattccttctaaattccctaataaaaatctgaagaagaactattgtagaaacccagatagggaattacgaccttggtgtttcacaactgatcctaacaaaaggtgggaactatgtgatatccccaggtgcactactccacccccttcttccgggcccacataccagtgtctaaaagggacaggagaaaattatagaggaaacgtcgcggtgactgtctctgggcatacatgccagcactggagtgctcagactccccatacacataatagaactcccgaaaattttccatgtaagaacctagatgaaaattattgccggaatcccgatgggaaaagggctccttggtgccatacaactaactcccaggtcaggtgggaatattgcaaaattccatcttgtgattcatctccagtgagtactgaacagttagcacccactgctcctcccgagctaactcctgtggtacaagattgttatcacggagatgggcagagttataggggaacttcttctacgactactacagggaaaaaatgtcagtcttggtcctccatgacaccacataggcaccagaaaacacccgagaactaccctaacgctggactaactatgaactactgccgcaaccctgatgccgataagggaccatggtgctttacaacagatccttctgtccggtgggagtattgtaatctcaaaaaatgcagtgggacagaagccagtgtggttgcaccccccccagtggttcttctacccgatgtcgaaactccaagtgaagaggactgtatgttcgggaatggaaaaggatataggggaaaacgagccacaacagtcactgggactccctgccaggattgggctgcacaggaaccccatcgacacagtatcttcactccagaaacaaacccccgggcaggacttgaaaaaaactattgtcgcaatcccgatggagatgttggaggaccatggtgttacacaacaaaccctagaaaattatatgattattgtgatgtgcctcagtgcgcagctccatccttcgattgtgggaaacctcaggtggaaccaaagaaatgtcctggaagagtagtcggaggatgcgtagcccacccccactcatggccatggcaggtctcgctcaggactagattcgggatgcatttttgtgggggaactctgatttcacctgaatgggtccttactgctgcacactgtctggaaaaatccccaaggccctccagttacaaggtgatcctaggggcccatcaggaagtaaatttagaaccacacgtccaggaaatcgaagtgtcacgcctgttcctagagcctactcgaaaagatatagccctcctgaaattgtcctcgccagctgtcatcacagacaaagtgatacccgcttgtttgccctccccaaactacgtcgtggccgatcggacagaatgctttatcacaggatggggagaaactcaggggacatttggagcagggctgctcaaagaggcacagttacctgtgatcgaaaacaaggtctgcaacaggtatgaattcctaaacgggagagtgcagtctactgaactctgtgcagggcacctggcgggagggactgattcttgtcaaggagattctggggggccactcgtctgtttcgagaaagataaatatatcttgcaaggagttacttcttggggattgggatgtgctcggcctaataaaccaggggtttatgtccgcgtatctcggtttgttacttggatagaaggggtaatgcgcaataac

SEQ ID NO: 6580 - DNA, 2430 bp, Artificial Sequence
  derived and/or modified sequence
atggagcacaaggaagtggtgcttctcctgctattgtttctgaagagcggccagggagaacctctcgatgactacgttaacacacagggagcttctctgttttcggtcacaaaaaagcagctgggagcgggttctatcgaggaatgcgcagcaaaatgtgaggaggatgaggaatttacctgcagggccttccaatatcactcaaaggaacaacaatgcgtgattatggctgagaatagaaagagctcaatcatcatcagaatgcgtgacgttgtgctatttgaaaaaaaggtgtacctgtctgagtgcaaaacagggaacggcaagaactacagaggaactatgagcaaaaccaagaacgggattacttgtcagaagtggtcatcaacctctccgcacagaccaaggtttagtcctgccacccacccttctgaaggactcgaggagaactattgtcggaatccagacaacgatccgcagggaccctggtgttatacaaccgatccagagaagcgctatgattactgtgacattctggagtgtgaggaggagtgcatgcattgcagcggtgagaattatgatgggaaaattagtaaaactatgtcagggctggagtgtcaagcttgggacagccagagcccacacgcccatgggtacataccttcaaaattcccgaacaaaaacctgaagaaaaattattgcaggaacccagacagggaattgagaccttggtgctttacaaccgaccccaacaaacgatgggagctgtgtgacatcccccgctgcacaacaccaccgccttctagtggaccgacataccaatgcttgaaagggacaggcgaaaactacaggggcaacgttgctgtcactgtctccggacatacatgtcagcactggtccgcccagacccctcatactcataaccggacaccggagaacttcccatgcaaaaaccttgatgagaactattgccgaaacccagatggcaagagagcaccatggtgccacacaactaactcacaggtcagatgggaatattgtaaaattccatcatgcgatagcagccctgtgagcaccgaacaactagcaccaactgctccaccagaactgacacctgtcgtgcaggactgctatcatggagacggccaaagctatcgcggaaccagtagcaccacaacaacaggcaaaaagtgccaaagctggagtagtatgaccccgcaccgtcaccaaaagactcctgagaattaccctaatgccggattaaccatgaactactgcagaaacccagacgctgataaaggtccatggtgtttcacaacagaccctagcgtccggtgggagtactgcaatctcaagaagtgctccggcactgaggcctcggtggtggcccctccacctgtggtgttactcccagacgtggaaacaccgtcagaggaagactgcatgttcggtaacggcaagggatataggggaaaaagagcaacaacagtcaccgggaccccatgccaggattgggcagcccaggaaccccacaggcacagcatttttacccctgaaacaaacccacgagccggccttgagaagaactactgtcgtaacccagatggggacgttggagggccctggtgttatactaccaacccacggaaactgtacgactactgtgacgttcctcagtgcgccgccccgagcttcgattgcggaaaaccacaggtcgagccgaaaaaatgccctggaagagtcgtgggggggtgcgtcgcgcaccctcactcgtggccgtggcaagttagtttgcgcactagattcgggatgcatttttgtggaggcaccctgatcagcccagaatgggtacttaccgctgcccactgcctggagaagagcccccgcccttccagctataaagtgatcctgggtgcccatcaggaggtgaatctcgagcctcacgttcaagagattgaagtgtctcgactcttcctcgaacccacacgtaaagacatcgcactccttaagctttcttcaccagcggtcatcaccgacaaagttattcccgcatgtttgccatcccctaactatgtggtggctgatcggaccgagtgctttattacggggtggggagagacccaagggacttttggggctgggctgcttaaggaggcgcagctgcccgtgatcgagaataaggtgtgtaacagatacgagtttctgaacggaagggtgcagtcaacggaattatgcgccggacatttggctggaggcactgactcttgtcagggggatagtggcggcccactggtgtgtttcgagaaagacaagtatatcttgcaaggcgtcacatcctgggggctgggatgtgcgagacccaataaaccaggagtctatgtgagagttagcaggtttgtgacttggatcgaaggggttatgcgcaataac

SEQ ID NO: 6581 - DNA, 2430 bp, Artificial Sequence
  derived and/or modified sequence
atggaacacaaggaagtcgtcctgctcctgcttctcttcctcaagagcggacaaggagaacctcttgacgattacgtgaacacccaaggcgcaagtctgttcagcgtgacgaagaagcaactgggcgccggatctattgaagaatgcgctgccaaatgcgaagaagatgaggagtttacgtgtcgggcatttcagtaccactcgaaggagcagcagtgcgtgatcatggccgagaatcgcaaatctagcatcatcatccgcatgagagacgtcgtgttgtttgagaagaaagtctacctcagcgagtgtaaaactggtaacggaaagaattacagaggcaccatgtccaaaactaagaacggtatcacttgccagaagtggagctcgacctcgcctcaccgtcctaggtttagccctgcaacccacccgtcggagggccttgaagagaactactgtagaaacccggacaatgatccgcaaggcccatggtgttacaccactgatcctgaaaaaaggtatgactattgtgatattctcgaatgcgaggaggaatgtatgcattgctcgggtgagaactacgatggaaaaatctccaagaccatgtcgggactggaatgccaggcctgggattcccagtccccgcacgctcacggatacattccgagcaagttcccgaacaagaatctgaagaaaaactactgccgaaacccggaccgagagctgcggccgtggtgctttaccactgatccgaacaagagatgggagctgtgcgacatccctagatgcactacgcccccgcctagtagcggcccgacctaccaatgcctgaagggaactggcgagaactaccggggtaacgtggccgtcaccgtctccggacacacctgccagcactggtcagcccagaccccacatacgcataaccggaccccagagaatttcccgtgcaaaaatctcgatgaaaactattgtcggaaccccgatgggaaaagggccccgtggtgccacaccacgaacagccaggtgaggtgggagtactgcaagatcccttcatgcgactcatcccccgtgtccaccgaacagctggcgcctaccgcaccgcccgagctgacccccgtggtccaggactgttaccacggagacggacaatcctacagaggaactagctcgactaccacgaccggcaaaaagtgccaatcgtggtcatctatgactccgcataggcatcaaaagactcctgaaaactacccgaacgcgggtctgacgatgaactactgccgcaacccagatgcggacaagggaccatggtgtttcactactgatccatcagtccgctgggaatactgcaatttgaagaagtgctcgggaacggaggcttccgtagtggctcctccgccggtggtgctcctcccagacgttgaaactccatcggaggaggactgcatgttcggaaatggtaaaggataccggggaaaacgcgcgaccaccgtcaccggaaccccatgccaggactgggcagcccaagaaccccatagacatagcattttcactcccgaaactaatccacgcgcgggtcttgaaaagaattactgtcggaatccggacggagacgtcggtggaccgtggtgctacaccacgaatccacgcaagctgtacgactactgtgacgtgccacagtgcgctgcaccttcattcgattgtggtaagccccaagtagagcctaagaagtgtccaggacgggttgtcgggggctgtgtcgcgcatccacatagttggccttggcaagtgtcgttgcggacccgcttcggcatgcacttctgcggaggaaccctgatctcgccagaatgggtgcttaccgccgcgcattgcctggaaaaaagtccgcgcccgagctcatataaggtgatcctgggagctcaccaggaagtgaacctggaaccccacgtccaagaaatagaggtgtccagactcttcttggaacccactcgaaaagatatcgcgctcctcaagctgtcatcgccagcagtcatcaccgacaaggtcatcccggcgtgcctccccagccccaactacgtggtggccgacaggactgagtgctttatcaccggatggggcgaaactcagggcaccttcggtgcggggctcctgaaggaagcccagcttccggtgatcgagaataaagtgtgcaatcggtacgagtttttgaacgggcgcgtgcagtccactgaactgtgcgccggacatctcgccggaggaactgactcttgccagggagactccgggggaccactggtgtgcttcgagaaggacaagtatattcttcagggggtcacctcctgggggctgggctgcgctcggccgaataagccgggagtctacgtgcgcgtatcgaggttcgtcacttggatcgagggcgtgatgcggaataac

SEQ ID NO: 6582 - DNA, 2430 bp, Artificial Sequence
  derived and/or modified sequence
atggagcacaaagaggtggtcctgctgctgctattatttctgaagtctgggcagggcgagcctttggatgactacgtgaacacacagggcgctagcttgttctcagtgacaaagaagcaacttggggctgggtcgatcgaggaatgcgccgctaagtgtgaggaggatgaagaattcacctgccgggctttccaataccacagcaaagagcaacagtgcgtaatcatggcggagaatagaaaaagctctatcattatccggatgcgggatgtggtgctgttcgagaagaaagtgtacctcagcgagtgtaagacaggaaatgggaagaactaccgcggaactatgagcaaaaccaagaacggaatcacttgtcagaagtggtcttcaacgagtccccatcgaccccggttcagtccggcaactcacccgagtgaggggctcgaggagaactattgcaggaatcctgacaacgatcctcaggggccctggtgctatacgaccgaccctgaaaaaaggtatgactactgcgatatactagagtgtgaggaggaatgtatgcattgctctggagagaactacgacggcaagattagcaaaaccatgagcggactcgaatgccaggcgtgggatagccagtccccccatgctcacggttacattccgtccaagtttcctaataaaaacctgaagaagaactactgcagaaaccccgatcgcgaactgagaccctggtgctttactaccgatcccaataagaggtgggaactgtgtgacattccgcgttgtaccacacccccaccttcctccggacccacttaccagtgtttgaaaggcacaggggaaaactacagggggaacgtcgctgtcactgtgagcggccatacctgccagcactggtcggcccagacgccccatacccataacagaaccccagagaatttcccgtgcaagaacttagatgagaattactgccgtaatcctgacgggaagcgggccccttggtgccacaccacaaacagccaagtgcgttgggagtactgcaagattcccagttgcgattcttcacctgtctctaccgaacagcttgccccaacagctccgcccgagctgacccccgtcgtgcaggactgctatcatggcgacggacagagttaccggggaacgtcatcaactacaaccaccggcaagaagtgccagtcctggtcatccatgaccccgcacaggcaccagaaaactcccgaaaattacccgaatgccggccttaccatgaattattgtcgcaatcccgacgccgataaaggaccctggtgtttcaccacagatccatctgtccgatgggagtactgcaacctgaagaagtgtagtggaaccgaagcctcggtggtggctccccctccagtcgtgctgctccccgacgtggagaccccaagcgaggaagactgcatgttcggcaacggcaagggttacaggggaaaacgggcgactaccgtaacaggcacaccctgtcaggattgggcggcccaggagccccatcggcacagtatcttcacgccagagacaaatcctcgtgccggtctagagaagaactattgcaggaaccccgacggagacgttggcggaccctggtgctacacaaccaacccccggaagctgtatgattactgtgatgtgccgcagtgcgccgcacctagcttcgattgtggaaaacctcaagtggagcccaagaaatgtccagggcgggttgtgggaggctgtgtcgcgcacccccactcctggccctggcaggtgtctttacgtacaagattcgggatgcacttctgcggaggcaccctgatcagccccgaatgggttctgaccgctgcgcactgcctggagaagagccctcgcccgtcgtcatataaagtgattcttggggcacatcaggaggtgaatttggagccccatgtccaggaaattgaagttagtaggctgttcctggaaccaacccgcaaggatatcgcactgctgaaactcagctcgcccgccgtaatcaccgacaaggtcatacccgcctgtctgccatctccaaattatgtggtggccgataggacagagtgcttcatcacggggtggggcgaaacccagggcacttttggcgccggcctgctcaaagaggctcagctccctgtgatcgaaaataaagtctgtaacagatatgagttcttgaacggcagggtacagagcaccgagctgtgtgccggacacctggccggcggcactgacagttgccaaggcgattccggaggccccctggtttgttttgagaaggacaaatacatcctgcagggggttacaagctggggcttggggtgcgccaggccgaacaagcctggcgtttatgtgagggtgagccggtttgtgacttggatcgaaggagtcatgcgcaacaat

SEQ ID NO: 6583 - DNA, 2430 bp, Artificial Sequence
  derived and/or modified sequence
atggaacacaaggaggtagtcctgctgctgttactcttcctcaagagcggacagggagaacctctggatgactatgtgaatactcagggcgcaagcctcttctccgtcacaaagaagcaactcggcgcaggtagtattgaggagtgtgctgcaaaatgcgaggaggacgaagagtttacttgtcgcgcatttcagtatcatagcaaggagcagcagtgcgtgataatggccgaaaatcggaagtcatctattatcataagaatgcgggatgtcgtactattcgagaaaaaagtctacttgagcgaatgcaagaccggtaatggtaagaattatcggggtacaatgagtaaaaccaagaacggcatcacgtgccagaagtggtccagtacttccccccaccgccctcggttcagtcctgcgacacacccctccgaaggactcgaggagaactactgccggaatcctgacaatgacccacaaggcccctggtgctacactaccgatccggagaagcgctacgattattgtgatattttggaatgtgaggaagagtgtatgcactgctctggagaaaattacgatggaaagatttctaagaccatgagtgggctcgagtgccaggcctgggacagccagtcacctcatgcccatgggtatattccgtctaaatttccaaacaagaacctcaagaagaattactgcagaaaccctgacagagagctgcggccctggtgcttcacgaccgatccgaacaagaggtgggagctctgcgatattccgcggtgtactacgccacccccttcctccggccctacttatcagtgtctcaaggggaccggggagaactacaggggaaatgtggcggttactgtctccggtcacacttgtcagcactggagcgctcagacaccacacacccataaccgcacccccgaaaattttccatgcaagaacctggatgagaactattgcagaaacccagacggaaaacgcgcaccatggtgccacactacaaactctcaagtgagatgggaatattgtaagataccatcctgtgactcttcacccgtttctaccgaacagctcgcccctactgcccctcctgagttgacacccgttgtgcaggactgttaccatggtgacggtcagtcttacagggggacctcttctactaccaccaccggcaaaaagtgtcagagctggtccagcatgaccccccatcgtcatcaaaagacacccgagaattaccccaacgccggtttaacaatgaattattgcaggaaccctgacgccgataagggtccttggtgttttactactgatccaagcgtacgctgggaatattgcaacctcaagaaatgttctggaaccgaggcgagcgtagttgcccctcctccagtagtacttcttcctgatgtcgaaaccccttccgaggaggactgcatgtttggtaacgggaagggatatcgcggtaaaagagccactacagtgacgggcactccatgccaggactgggccgcacaagagccccatcgacacagtatcttcacccccgagacaaacccgagggcaggattggaaaagaactactgccggaaccccgatggggacgtggggggcccatggtgctacaccacaaaccctaggaaactctatgattattgcgacgtaccccaatgcgccgcgcccagcttcgattgcggaaagccacaagtcgaacccaaaaaatgtcctgggcgggttgtgggaggctgtgttgctcatccacactcttggccgtggcaggttagccttagaacacggttcggcatgcacttttgtggcgggactctgattagtcccgaatgggtactgacggctgctcactgtctggagaagagtccaaggcctagctcctacaaggtgattctgggggctcatcaggaggtaaacctcgagccacacgtgcaagagatagaggtgtctaggcttttccttgagccaacaaggaaggacatcgcccttctcaagctttcttctcctgccgtgattactgacaaggttatcccagcttgtctaccatcgccgaactacgtggtagccgatcgtactgagtgttttatcactggatggggcgagacccaaggcacattcggcgccgggctcctgaaagaagcccagctccccgtgatcgagaataaggtgtgcaatcggtacgagtttctgaacgggagggttcagtcaactgaactgtgtgccggacatcttgcaggtggcaccgattcttgccagggagacagcggcgggccactggtgtgcttcgagaaagacaagtacatcctccagggggtgaccagctggggactggggtgtgcacgtcctaataagcccggcgtttatgtgagagtgtctcggtttgtgacttggattgaaggcgttatgcgaaataat

SEQ ID NO: 6584 - DNA, 2430 bp, Artificial Sequence
  derived and/or modified sequence
atggaacataaagaagtagtattactactactattatttttaaaatcgggtcaaggtgaaccgttagatgattatgtaaatacgcaaggtgcgtcgttattttcggtaacgaaaaaacaactaggtgcgggttcgatagaagaatgtgcggcgaaatgtgaagaagatgaagaatttacgtgtcgtgcgtttcaatatcattcgaaagaacaacaatgtgttataatggcggaaaatcgtaaatcgtcgataataatacgaatgcgtgatgttgtactatttgaaaaaaaagtatatttatcggaatgtaaaacgggtaatggtaaaaattatcgaggtacgatgtcgaaaacgaaaaatggtataacgtgtcaaaaatggtcgtcgacgtcgccgcatcgtccgcgattttcgccggcgacgcatccgtcggaaggtttagaagaaaattattgtcgaaatccggataatgatccgcaaggtccgtggtgttatacgacggatccggaaaaacgttatgattattgtgatatattagaatgtgaagaagaatgtatgcattgttcgggtgaaaattatgatggtaaaatatcgaaaacgatgtcgggtttagaatgtcaagcgtgggattcgcaatcgccgcatgcgcatggttatataccgtcgaaatttccgaataaaaatttaaaaaaaaattattgtcgtaatccggatcgtgaattacgtccgtggtgttttacgacggatccgaataaacgttgggaactatgtgatataccgcgttgtacgacgccgccgccgtcgtcgggtccgacgtatcaatgtttaaaaggtacgggtgaaaattatcgaggtaatgttgcggttacggtatcgggtcatacgtgtcaacattggtcggcgcaaacgccgcatacgcataatcgtacgccggaaaattttccgtgtaaaaatctagatgaaaattattgtcgtaatccggatggtaaacgtgcgccgtggtgtcatacgacgaattcgcaagttcgttgggaatattgtaaaataccgtcgtgtgattcgtcgccggtttcgacggaacaactagcgccgacggcgccgccggaattaacgccggtagtacaagattgttatcatggtgatggtcaatcgtatcgaggtacgtcgtcgacgacgacgacgggtaaaaaatgtcaatcgtggtcgtcgatgacgccgcatcgacatcaaaaaacgccggaaaattatccgaatgcgggtttaacgatgaattattgtcgaaatccggatgcggataaaggtccgtggtgttttacgacggatccgtcggttcgatgggaatattgtaatctaaaaaaatgttcgggtacggaagcgtcggttgttgcgccgccgccggtagttttattaccggatgttgaaacgccgtcggaagaagattgtatgtttggtaatggtaaaggttatcgtggtaaacgtgcgacgacggttacgggtacgccgtgtcaagattgggcggcgcaagaaccgcatcgtcattcgatatttacgccggaaacgaatccgcgagcgggtttagaaaaaaattattgtcgaaatccggatggtgatgtaggtggtccgtggtgttatacgacgaatccgcgtaaactatatgattattgtgatgtaccgcaatgtgcggcgccgtcgtttgattgtggtaaaccgcaagtagaaccgaaaaaatgtccgggtcgtgttgtaggtggttgtgtagcgcatccgcattcgtggccgtggcaagtatcgttacgtacgcgatttggtatgcatttttgtggtggtacgttaatatcgccggaatgggtactaacggcggcgcattgtttagaaaaatcgccgcgaccgtcgtcgtataaagttatactaggtgcgcatcaagaagttaatttagaaccgcatgtacaagaaatagaagtatcgcgtctatttttagaaccgacgcgtaaagatatagcgttattaaaattatcgtcgccggcggtaataacggataaagtaataccggcgtgtctaccgtcgccgaattatgtagtagcggatcgtacggaatgttttataacgggttggggtgaaacgcaaggtacgtttggtgcgggtttattaaaagaagcgcaattaccggttatagaaaataaagtttgtaatcgttatgaatttctaaatggtcgtgtacaatcgacggaactatgtgcgggtcatctagcgggtggtacggattcgtgtcaaggtgattcgggtggtccgttagtatgttttgaaaaagataaatatatactacaaggtgtaacgtcgtggggtttaggttgtgcgcgaccgaataaaccgggtgtttatgttcgagtatcgcgttttgttacgtggatagaaggtgtaatgcgaaataat

SEQ ID NO: 6585 - DNA, 2430 bp, Artificial Sequence
  derived and/or modified sequence
atggaacacaaggaggtcgtgctgctgttgttgctttttctgaagagtgggcaaggcgagccgctggacgattatgttaacactcaaggcgcaagtcttttctctgtgactaaaaaacagttgggggcggggagcatagaagaatgcgcagccaaatgtgaggaggatgaggagttcacttgtcgcgcctttcaataccactctaaggaacaacagtgcgtgattatggctgaaaataggaagagctcgataatcattcgtatgagagacgtggtgctgtttgagaagaaggtctatctttccgaatgtaagacaggaaatggcaagaattacagggggaccatgtcaaagactaagaacggaattacgtgtcagaaatggtcctctacatcccctcaccgcccccggttctcacctgcaactcatcctagtgagggactagaagagaattattgcagaaatccagataacgatcctcagggaccttggtgttataccaccgatccagagaagcggtatgattactgcgacattcttgaatgcgaggaggaatgtatgcactgttccggagagaattacgacggcaagatttccaaaaccatgtccggtcttgagtgccaggcctgggactcccagagtccgcacgcccacggttatattccttccaaatttcccaacaagaatttgaaaaagaattattgtaggaatccagaccgggaactcagaccttggtgctttacaacagaccccaataagcggtgggagctgtgtgatattcctagatgcacgactcccccacccagttccggacctacatatcagtgtctaaaaggaacaggggagaattatcgggggaacgtcgcggtcaccgtaagcggtcacacgtgccagcactggagtgcgcagacaccacatacccacaacaggaccccggaaaatttcccctgtaaaaatttagatgagaactattgcaggaatcccgacggcaagcgggctccctggtgccacacgaccaactcacaagtcagatgggagtactgcaaaattcccagctgcgactcttcaccagtgtccaccgagcagctcgccccaacagcccccccggaacttacgccagtcgtgcaggactgctatcacggggatggccagagttatcgtggtacctcaagcacgaccactacaggaaagaaatgtcagagctggtcctccatgacaccccaccgtcatcaaaagactcccgagaattaccctaatgccggcctcacaatgaattactgtcggaaccccgacgcagataagggaccatggtgtttcactacggacccttctgtcagatgggagtactgcaatctgaagaaatgcagcggaactgaggcctctgtcgtagcaccccctcccgtggtattgctgccagatgtagagacaccatctgaagaagactgcatgttcggtaatgggaaggggtacaggggcaagcgggcgaccactgttaccggtaccccgtgtcaggattgggctgcccaggagcctcatcgccactctatcttcacgcccgaaactaaccctcgagcgggcctcgaaaaaaactattgcagaaacccagatggagacgtgggcggaccatggtgctatacaaccaatccacgcaaattatacgattactgtgatgtcccacagtgtgcagccccttctttcgactgtggtaaaccccaggtggagcccaaaaaatgcccagggcgcgtcgtgggagggtgcgtggctcacccccactcttggccctggcaagtgtctctgcgcacccggtttgggatgcatttttgtggtggaaccctaatttcgccagagtgggtcttgaccgccgcacactgtttggagaagagccctcggccctcctcctataaggttatcttgggcgcacaccaagaagtcaacctggagccccatgttcaagaaatcgaggtcagccgactgttcctcgaacctacccgtaaggacatagccttgctcaagctctcctcaccagccgtgattactgacaaggtgataccggcatgcctgccatccccaaactacgtggtggccgaccgcacagaatgcttcatcacgggatggggcgagacgcaaggtacattcggcgccggactgctgaaagaagcacaactcccagttatagaaaataaggtgtgtaacaggtacgaatttctcaacggcagagtgcaatctaccgaactttgcgccggccatcttgcaggcggaacggattcttgccaaggcgattcagggggaccgctcgtgtgtttcgagaaggataaatacatcctgcagggcgtaaccagctggggtctagggtgcgcccgccctaacaagcctggggtgtacgtgcgggtgagcagatttgtgacctggatcgaaggtgtaatgagaaacaac

SEQ ID NO: 6586 - DNA, 2430 bp, Artificial Sequence
  derived and/or modified sequence
atggaacacaaggaggtcgtgctcctgcttcttctgttcctgaaatctggtcaaggggaacctctggatgattacgtgaacacccagggcgcgtccttgttttcagtgaccaaaaagcagctcggagcggggtcgatcgaagaatgcgcggcaaagtgtgaggaagatgaagagtttacttgccgtgcgtttcaataccatagcaaggagcaacagtgcgtgattatggcagagaaccgtaagagtagcatcattatccggatgcgagacgtcgtgctctttgaaaagaaagtgtacctgagcgagtgcaagaccggtaacgggaagaactaccggggaaccatgtctaagaccaagaacgggataacttgtcaaaaatggagctcaacttcccctcatcgtcccagattttcgccggctacgcacccatccgagggcctggaggagaactactgtcgtaacccggataacgaccctcaagggccctggtgttacactactgacccagagaagagatacgattattgtgacatattggaatgtgaagaagaatgtatgcattgttcaggtgagaattacgatgggaagatctcgaaaaccatgagcggtttggaatgtcaagcatgggactcacagagcccacatgcacacggatacattccatcaaaattcccaaacaagaatctcaagaagaactattgccggaaccccgatcgggagctcaggccttggtgttttactactgacccgaataagagatgggaactgtgcgatataccgcgctgtacgacccctccaccatccagcggccctacctaccaatgccttaagggcactggcgaaaactaccgcggcaatgtggctgtgaccgtcagcggacacacttgtcaacactggagtgcccagacccctcatactcataatagaacccctgaaaactttccgtgtaagaacctggatgaaaactactgcagaaaccctgatggaaaaagggctccatggtgccatacgaccaacagccaggtgagatgggaatattgcaagataccgtcgtgcgattcgtcgcctgtgtccaccgaacagcttgcaccgactgctccaccagaactgacccctgtggtgcaggattgctaccatggagacggacagtcctaccggggcacttcgtccactactactacgggaaagaagtgtcaatcgtggtcctcaatgactccacaccgacaccaaaagacccccgagaactaccccaatgcaggacttaccatgaattactgtcgcaaccctgacgcggataagggtccgtggtgcttcactacggacccttcggtcagatgggagtactgtaatctgaagaaatgttccggcactgaagcctcggtggtcgctccgcccccggtcgtgcttcttcccgatgtggaaaccccatcggaggaggattgtatgtttggaaacggaaagggttatcgcggtaagcgagccaccactgtgactggtactccttgtcaggattgggcagcacaggagcctcataggcattccattttcactcctgaaaccaacccacgcgccggacttgagaagaattactgcaggaatccagatggtgatgtgggtggcccttggtgctacaccaccaatcctaggaagctgtacgactactgcgacgtgccacaatgtgcagcgccatccttcgattgtggtaagccacaggtggagcccaagaagtgtcccggtagggttgtcggagggtgtgtggctcatccccattcgtggccttggcaagtctcccttagaactcgatttggtatgcacttttgtggaggaactctcatttcaccagagtgggtcctgaccgcagcacactgtctggaaaagagccccagaccctcaagctataaagtcatcctgggcgcccatcaagaggtgaacctcgaaccacacgtgcaagagattgaagtctcccggctctttctggaacccactcgcaaggacatcgcacttctcaaactgagctcgccagcagtgattactgataaggtgattcccgcatgtctcccttcccctaactacgtggtggcagatcgaaccgagtgtttcataaccggatggggtgaaacccaaggcacgtttggtgccggactcctgaaagaggcccaattgccagtcattgagaataaagtgtgcaaccgctacgagtttcttaacggtcgggtgcaatcaacggaactgtgtgcaggccatcttgcaggtggtaccgactcctgtcagggggactccggaggtcccctggtgtgctttgaaaaggataagtacatcctccagggagtgacctcgtggggtttgggatgtgcacgacccaacaaacctggagtgtacgtgagagtgtcccgctttgtgacttggatcgaaggagtgatgagaaacaac

SEQ ID NO: 6587 - DNA, 2430 bp, Artificial Sequence
  derived and/or modified sequence
atggagcataaggaagtagtgctgttgctcttgctcttcctaaagtcaggacagggcgaacctctcgatgactacgtcaatacccagggagcttccctgttctctgttactaagaagcaattaggagccggctctattgaagaatgcgccgctaagtgtgaagaagacgaagagttcacttgcagggccttccaataccactccaaggaacagcagtgcgtgatcatggcggagaaccgaaagagcagcattatcatccgtatgcgcgatgtggtgctcttcgaaaagaaagtttacttgtcggaatgcaagaccggtaacgggaagaattaccgcggaacaatgtcaaagacgaaaaatgggatcacctgccagaagtggtcatcgactagcccacatcgacccaggtttagcccagcaacccatccctcggagggcctggaggagaactattgccgtaatccagacaacgacccgcagggtccctggtgttatacaaccgatcctgagaaacgctacgattattgcgacattctggagtgcgaagaagaatgtatgcactgctcgggcgaaaactacgacggtaagattagcaagactatgagtggactggagtgtcaggcttgggactcacagtctcctcatgctcatggctacattcctagtaagttccccaataaaaacctgaaaaagaactattgcagaaaccctgaccgggagctccgcccttggtgcttcacgacagaccctaataaacggtgggaactctgcgatattccacgatgtacaactccgccgccctcctccggaccaacttaccaatgtctgaaagggaccggcgaaaactatagaggtaacgttgctgttacagtgtccgggcacacgtgccagcactggtcagcccagactccgcatacacataaccggacacccgagaatttcccgtgtaaaaatcttgacgagaattactgtagaaatccagacgggaaacgggcaccatggtgccacacaaccaactcccaggtacgttgggagtattgtaaaatcccaagctgtgactcctcaccagtgtcaacagaacagttggcacccactgccccccctgaattaacacccgtggtccaggattgctaccacggcgacgggcaatcctacaggggaacaagctcaacgaccacgaccggtaaaaagtgtcaaagctggtcatccatgacaccgcaccgacatcagaaaacgccagagaattaccctaacgctggcctaacgatgaattactgtagaaacccagatgctgataagggcccctggtgtttcaccacagatccatcagttagatgggaatactgtaatctgaagaagtgcagcgggaccgaagcttcagtagtggcaccgccacctgtcgtgcttctccctgacgtcgagacaccgtcagaggaagactgtatgttcgggaatggaaaaggctaccggggcaaaagagccaccacggtgactggcaccccgtgtcaagattgggccgcccaggagcctcacagacatagcatctttactcccgagaccaatcccagagccgggttggagaagaactactgtcggaaccctgacggcgatgttgggggcccgtggtgctataccaccaacccacgaaagttatatgactattgtgatgtcccccaatgtgcggccccctcgttcgattgtggtaagccgcaggtggaacccaagaagtgtccaggacgggtggtggggggatgcgtcgctcacccacatagctggccatggcaggtgtccttaaggacacgctttggcatgcacttctgtggaggtactctgatctcccctgagtgggttcttacagctgcccactgcctagaaaaatcgcccaggccttcctcttacaaggtgattttgggcgcccaccaggaggtgaacctggaaccccacgtccaagaaatcgaagtatctcgcctctttctggagcccactcgaaaagacatcgctctcctgaaactgagctctcctgcggtgatcacggacaaggttattcccgcttgcttgcctagccctaactacgttgtcgctgacagaactgaatgcttcatcaccggatggggggagacccaaggtaccttcggagcaggtttgctgaaggaagcgcagcttcctgtgatagagaataaagtatgtaacagatatgaattcttgaacggccgggtgcagtccactgagctctgtgctggacacttagccgggggcacagactcttgtcaaggcgattctggtgggcccttggtgtgtttcgaaaaagacaagtatattctccagggagtaacctcctgggggctgggatgtgcccgacccaacaagcctggggtgtatgtccgagtctctagattcgttacatggattgagggtgtaatgcgtaacaat

SEQ ID NO: 6588 - DNA, 2430 bp, Artificial Sequence
  derived and/or modified sequence
atggagcacaaagaagtggtgctgctgctcctgctgtttctgaagagcggacaaggtgaaccgctggatgactacgtgaatacccagggggcctcgctgttttccgtgactaagaagcagttgggggcgggatcaatcgaggaatgtgcagccaagtgcgaggaagatgaagagttcacctgccgcgcgttccaataccactccaaagagcagcagtgcgtgatcatggcggagaacagaaaatcctcaataatcatcaggatgcgggatgtggtgctgttcgagaagaaggtgtacctgagcgagtgcaagacggggaatggaaaaaactatcgcggaactatgtcgaaaaccaaaaacggaatcacctgccagaagtggtccagcacttcgccacatcgcccacgcttcagcccagctactcacccatcagaagggctcgaggagaattactgcaggaatccagacaacgatccacagggtccttggtgctatactactgatccggaaaagcgctacgattactgtgacatcctcgaatgcgaagaggagtgtatgcattgctccggagaaaactacgacggaaagatcagcaagacgatgtccggcctcgaatgccaggcatgggactcgcagtcgccacacgcacacggatacatcccgtccaagttcccaaacaaaaaccttaagaagaactactgcagaaacccggatcgcgaactgcgcccctggtgttttaccaccgatccaaacaagcgctgggagctgtgcgatatcccccggtgtactacccctcccccttcctccggacctacttaccaatgcctgaaagggactggagagaattaccgtggcaatgtggcggtcactgtgtccggccacacttgtcaacactggtcagctcagacccctcatactcataataggaccccggaaaacttcccgtgcaaaaatctggacgaaaactactgccgcaaccccgacggaaagcgcgcgccatggtgccacaccactaattcgcaggtgcgctgggaatactgcaagatccccagctgcgattcttcgccagtgtcgaccgagcagcttgcgcctactgccccgcctgaactgactccggtcgtccaagactgctatcacggagacggacagagctaccgcggaacttcgtcaaccacgaccaccggaaagaagtgccagagctggtcctccatgactccgcatcggcaccaaaagacccctgagaactaccctaacgcaggattgaccatgaactactgccgtaatccggatgccgataagggaccgtggtgctttaccaccgacccatccgtgcgctgggagtactgcaacctcaagaagtgctccggaacggaggcatcggtcgtggcaccgccgccggtcgtgctgctgccggacgttgagacgccatcggaagaggattgtatgttcggtaacggaaagggataccgcggcaaacgagcaactactgtcactggcactccgtgtcaggactgggccgctcaggagccgcaccgccactccatcttcacccctgaaaccaacccccgcgctggactggaaaagaactattgtcggaatcccgacggagatgtgggaggcccgtggtgctatacgactaacccgagaaagctgtacgactactgcgacgtgccgcaatgtgcggctccttcgtttgattgcggtaagccgcaggtggagccgaaaaagtgtcctgggcgggtggtggggggctgcgtcgcccaccctcactcctggccgtggcaagtgtcccttagaacgaggttcggaatgcatttctgtggaggaaccctgatcagccctgaatgggtgctgaccgcggcacactgcctggagaagtcacctagaccttccagctacaaagtgatcctgggagctcatcaagaggtcaacctcgagccgcatgtgcaggaaatcgaagtgtcccgcctcttcctcgaaccaactcggaaggacatcgccttgctgaagctgtcgtcgccggcggtgatcactgacaaggtgatcccggcttgcctccctagccctaattacgtggtcgccgacagaactgagtgctttatcactggctggggcgaaactcaaggaactttcggagcggggctgcttaaagaagcacaattgccagtgattgagaataaagtgtgtaatcgctacgaattcctgaatgggagagtccaatctactgaactgtgcgcaggccatctcgcgggaggcaccgacagctgccaaggagatagcggaggtccactcgtctgctttgaaaaggacaagtatattctccaaggagtgacttcgtggggtctgggatgcgcacgcccgaataagcctggggtctacgtccgcgtctccagattcgttacttggatcgaaggcgtgatgaggaataac

SEQ ID NO: 6589 - DNA, 2430 bp, Artificial Sequence
  derived and/or modified sequence
atggagcacaaggaagtggtcctgctgctgctattattcctgaagtctgggcagggcgaacctctggacgactacgtgaatacccagggcgcctctctgtttagtgttacaaaaaagcagctgggggctggtagcatagaggagtgcgctgccaagtgtgaggaggacgaggagtttacatgtcgcgcattccagtaccactccaaggagcagcaatgcgtcatcatggctgaaaatcggaagtccagtatcatcatacgcatgcgcgatgtggttttgttcgagaagaaagtatatctgtcagagtgcaagaccggaaatggcaaaaactaccggggcaccatgtcaaagactaagaacgggatcacctgccagaaatggagtagcacatcacctcatcggccccggttctcgcccgcaactcaccccagtgagggactcgaggagaattactgtaggaaccccgataacgacccgcaggggccttggtgttatacgacagatcctgagaaacggtatgattattgcgatattcttgagtgcgaggaggagtgtatgcactgctctggagagaactacgacggaaaaattagcaaaacgatgagtggattggaatgtcaggcttgggacagccagtccccccatgcacatggttacatcccctcaaaattccctaataaaaatctgaaaaaaaactactgtcgtaacccggatagggagctgcgaccgtggtgtttcacgacggaccccaataaaaggtgggagctctgcgacatcccccggtgtactacaccgcctcctagctcagggcccacataccagtgtttgaaaggcaccggggagaattaccgaggcaatgtggcggtgacagtgagcggccatacatgccagcattggagtgcacagaccccccacactcacaaccgaacacccgaaaatttcccctgtaaaaatctcgatgagaattattgccggaatcctgatggcaagagagctccttggtgtcataccaccaattcacaggtccgttgggaatattgcaagataccctcttgtgattcttcaccagtctccaccgaacagctggcacccaccgccccccccgagctcacgcccgtggtccaagattgctatcatggagacggccagagttaccgtggcacaagtagcacaacaaccacgggaaagaagtgtcagagctggagcagtatgaccccacaccgccatcaaaagactcctgagaactacccaaacgccggcctaactatgaattactgtagaaaccctgatgctgataagggcccttggtgtttcaccaccgatccatctgtgcgctgggaatactgcaatctgaaaaaatgctctggtacagaagcaagcgtagtggctccgcctcctgtggtactactacctgacgtggaaaccccatcggaagaggactgcatgttcggcaatggaaagggctatcggggcaagagggcaactaccgtgaccgggactccctgtcaggactgggcggctcaggagccacacaggcatagtatcttcacccctgagaccaaccctcgtgcgggtctggagaaaaactattgcaggaatcctgacggcgatgtagggggcccgtggtgctatactacaaaccctcgaaaactttatgattactgtgatgtgccccagtgcgcagccccatcattcgattgtggaaagccacaggtcgaacccaaaaaatgtccaggaagggtagtaggtggttgcgttgcccatccccactcctggccttggcaagtgtccctgcggaccagatttgggatgcatttctgtggagggacgttgatcagtcctgagtgggtcctgaccgctgcacactgtttggagaagtctccgaggcctagttcatacaaggtgatccttggcgcccaccaggaagttaaccttgagccccacgtgcaagagatcgaagtcagccgccttttcctggaaccaactaggaaggatatcgccttgctcaaactgtcatccccagcagtcattactgacaaggtgataccagcttgcctgccttctcctaattacgtggtagctgacagaactgaatgtttcatcaccggctggggagagacccaaggtaccttcggcgctggcttgctcaaagaggcccagctacctgtaattgaaaataaggtatgcaacaggtacgaatttctgaacggcagggttcagtcaactgagttatgcgcaggacatcttgctgggggcacggatagctgccagggtgatagcggggggccactcgtttgcttcgagaaggataagtatatcttgcagggcgttacaagctgggggctcggatgcgcccgccctaacaagcccggcgtgtatgtgcgggtgagcaggtttgtgacgtggatagagggggtcatgcgaaacaat

SEQ ID NO: 6590 - DNA, 2430 bp, Artificial Sequence
  derived and/or modified sequence
atggagcacaaggaggtggtgctcctgttgcttctgtttttgaaatcaggacagggtgaacctctcgacgattacgtgaacacacagggagcctcactcttttcagtgaccaaaaagcagctcggtgccgggtctattgaagaatgcgccgcaaagtgcgaagaagatgaggagttcacttgtcgggcctttcaatatcattccaaggaacagcagtgcgtgatcatggccgagaatcggaagagcagtatcatcatcagaatgcgggatgttgtgctgttcgagaagaaggtttatctttctgaatgtaagaccggaaatggaaagaattacaggggcacaatgtctaaaaccaagaacggaattacgtgtcagaagtggagctctaccagccctcacagacccaggtttagccccgccactcacccctcagagggcttggaggagaactactgtagaaacccagataatgacccccagggcccatggtgttacacaaccgacccggagaaacgctacgactactgtgacattctggagtgcgaagaagagtgcatgcattgctcaggcgagaattatgacggaaagattagcaaaaccatgtccggcctggagtgtcaggcatgggattcccaatctccccatgctcacggctatatcccatccaagtttcctaataaaaatctgaagaaaaactattgtagaaaccccgacagagaactgagaccttggtgtttcacaaccgaccctaacaagcgatgggagctgtgtgacatcccaagatgcacaactcccccccctagttccggccccacatatcaatgcctcaagggtaccggagaaaattaccgggggaacgttgcagtcacagtgagtggacacacctgtcaacattggagtgcacaaacaccgcatactcacaatcgaactcccgagaattttccttgtaagaatctggatgaaaactactgtagaaatccagatggaaaacgcgccccctggtgtcacacgacgaatagccaagtaaggtgggaatactgtaagatcccttcctgtgactcaagccccgtgtcaaccgagcagctcgcacccacagcacccccggagctgacccccgttgtgcaagactgctatcacggagatgggcaatcctatcgggggacctctagcaccacaacgaccgggaagaaatgccaaagctggtcttctatgacaccccaccgccaccagaaaacccctgagaattaccctaacgccggactgacgatgaattattgcagaaaccccgacgctgacaaaggaccatggtgctttacgacggatccaagcgtgcgctgggagtactgcaacctgaagaagtgttctggcacagaggccagtgtcgtcgctcctccaccagtcgtgctgttgccagacgtcgaaacacccagtgaggaggattgtatgtttggcaacggaaagggctaccgggggaagagggccaccacggtgaccggtactccttgtcaggattgggcagcacaggaaccacatagacacagtatattcacgccagaaacaaaccccagagccggtctcgagaagaactactgccgcaaccctgacggcgacgtgggaggcccctggtgttacaccactaacccaaggaaactgtacgattattgtgacgtgccccagtgtgccgcgcccagttttgactgtgggaaaccgcaagtcgaacctaagaaatgcccaggacgggtggtgggcggatgcgtagcacatccacatagctggccctggcaggtgtcactgaggacacgattcggcatgcatttctgcggcggtactctcatctctccagagtgggtactgactgcggcccactgcctggagaagtcccctaggccctcaagctacaaggtcattcttggggcccaccaagaggtgaatttggagccacacgtgcaagaaatagaagtaagtagactgtttctggaaccaactagaaaggatattgcactgctcaagttgtcaagtccagcagtgattacggataaggtcatccccgcgtgtctgccctcccctaactacgtcgtggccgacaggaccgaatgttttataacaggatggggtgagactcagggcacattcggcgcagggctcttgaaggaggctcagttgcccgtgattgaaaataaagtgtgcaacaggtacgagttcttgaatggccgagtgcagtctacagagctgtgcgcaggccaccttgcagggggcaccgattcatgccaaggggatagtgggggacctttggtgtgcttcgagaaagataagtatattctgcagggggtcacatcttggggcttgggctgtgcccgccccaacaagccaggcgtgtatgtccgcgtttcccgcttcgtgacatggatcgaaggcgtgatgcggaataac

SEQ ID NO: 6591 - DNA, 2430 bp, Artificial Sequence
  derived and/or modified sequence
atggagcacaaggaagtcgtgctgctgttgctcctgttccttaagtcggggcaaggagaaccgttggacgattacgtgaatactcaaggagcctcactgttctccgtgaccaaaaagcaactgggagcaggaagcatcgaagagtgcgcggccaaatgcgaagaggacgaggagttcacttgtagggcctttcaataccactccaaagagcagcagtgtgtgatcatggcggagaatcgcaagagctcaatcatcatccgcatgcgcgatgtcgtgttgtttgaaaagaaggtgtacctgtcggaatgcaaaactggaaacgggaagaactacaggggaactatgtccaagaccaaaaacgggatcacctgccaaaagtggtccagcacctcgcctcaccgcccgcgcttctcaccggctacccacccgagcgaaggacttgaggagaattactgccgaaatccggataatgatccacaaggcccctggtgctacactaccgatccggaaaagcggtacgattactgcgacattctcgagtgcgaagaggagtgcatgcattgttcaggcgaaaactatgatggtaagatttctaagaccatgtccggcctcgagtgccaggcatgggactcgcaaagccctcatgcgcatggctacattccatccaagttcccaaataagaacttgaaaaagaactactgccggaaccctgaccgggagcttcgcccctggtgtttcaccacggatccaaataagaggtgggaactctgcgacatcccgagatgcaccaccccaccgccctcatccggaccgacctatcagtgtttgaaaggaaccggagagaactatcggggcaacgtcgccgtgactgtctcaggacatacttgccagcattggagcgcccaaactccacacactcacaaccgcactcccgaaaacttcccatgcaagaatttggacgagaattactgtcgtaatccagatgggaagcgcgcaccgtggtgccacaccacgaattctcaagtgcgatgggaatactgtaagatcccaagctgtgacagctccccagtgtcgaccgaacagctcgcacctactgccccgcctgaactgaccccagtggtgcaggactgctaccacggagatggtcaaagctaccggggaacttcttcgacgacgacgaccgggaaaaagtgccagtcgtggagctcaatgacgccgcaccgccatcaaaaaacgccagaaaactacccgaatgctggcctcaccatgaactactgtaggaacccggatgcggataagggtccgtggtgcttcactacggatccgtcagtgcggtgggaatactgcaatctcaagaaatgctccggcacggaagcctccgtggtggcccctccaccagtggtgctccttccagacgttgaaaccccttccgaagaggactgcatgttcggaaacggtaaaggttacagaggaaagagagcaactactgtcaccggtactccgtgccaggactgggcagcacaggaaccccaccgccatagcatcttcacccccgagacgaatccgcgcgctggcctcgaaaagaattactgcagaaaccctgacggggacgtgggaggcccgtggtgttacaccacgaaccctcgcaagctgtacgactactgcgacgtgccgcagtgcgcagccccctcgtttgactgcgggaaacctcaggtcgagcctaaaaagtgccccggaagggtcgtcggcggctgcgtggcccatccgcatagctggccttggcaagtgagccttaggactcggttcggaatgcacttctgtggtggcaccttgatcagccctgagtgggtgctgactgctgcacactgcctcgaaaagtcgccgcgaccttcttcctacaaggtgatactgggagcccaccaggaagtcaacctggagccgcacgtgcaggaaatcgaagtttcgagactgttcctggagcccactcgcaaagacatcgctctgctcaagctcagctcaccggccgtgatcactgacaaggtgattcccgcatgtctgccgtccccgaactacgttgtggcggaccgcactgagtgttttatcaccggctggggggaaacccagggaacgttcggcgctggactgctgaaggaagctcagctcccggtgattgaaaacaaagtctgtaacaggtacgagtttctgaacggtcgtgttcagtcaactgagctgtgtgctggacacctggcgggaggaactgactcgtgccagggagattccggaggccctctcgtttgctttgagaaggacaagtatatactgcagggggtcacgtcatggggcctgggatgcgcccggcctaataagccaggagtctacgtgcgagtgtcccgcttcgtgacctggatcgaaggtgtcatgcgcaacaac

SEQ ID NO: 6592 - DNA, 2430 bp, Artificial Sequence
  derived and/or modified sequence
atggaacacaaggaggtggtgctgctgctcctattgttcctgaaatccggccagggagagccactcgatgactatgtgaacacacagggggcaagcctcttcagcgtaaccaaaaaacagcttggtgctggctctattgaagagtgcgctgcgaaatgtgaagaggatgaggagttcacatgccgcgcattccaataccacagcaaggagcaacagtgcgtgatcatggctgaaaacagaaagtcatcaataataatcaggatgcgggatgtggtactcttcgagaagaaagtctacctcagcgaatgcaagacaggcaatggaaaaaattaccgtgggaccatgagtaaaacgaagaatggaattacttgtcagaagtggtccagtacgagtccacaccggccaagattcagcccggctactcatcccagcgaaggactagaggagaactattgccggaaccctgacaatgacccacagggaccttggtgttataccactgaccctgagaagcgctacgactactgtgacatcctcgaatgtgaggaagaatgtatgcactgttctggagagaattacgatggcaagatcagcaagacaatgagtggtcttgaatgccaggcctgggattcacagtccccgcatgcgcatggctatatacccagtaagtttccaaacaagaatctaaaaaagaattattgtaggaaccctgaccgggaattgaggccctggtgtttcacaacggacccaaacaagcggtgggagctctgtgatatacctagatgcactactccacctcccagcagcggcccgacttatcagtgcctcaagggcaccggagaaaactacaggggcaacgtcgctgtcactgtgagcggtcacacatgccagcactggtcagcacagactccccacacgcataaccgcacacccgagaacttcccatgcaaaaacttggacgaaaactattgcaggaaccccgacggcaagcgcgcaccttggtgtcatacaacgaattcccaggtcaggtgggaatactgcaaaataccttcctgcgactcgtccccggtctcaaccgaacaacttgcgcccaccgccccaccagagttaaccccagttgtccaagactgctatcacggtgacggtcagtcctatagaggaacatcatccacgacgactacagggaagaaatgccagagctggtccagcatgacgccacataggcaccagaagaccccagagaattaccccaacgctggcctgacaatgaattactgtagaaaccccgacgctgataagggaccctggtgctttacgacggatccctctgtgcggtgggagtactgtaatctgaaaaagtgcagcggaacagaggcaagtgttgtggctccaccgccggtggtgctcttgcctgatgtcgaaacaccaagcgaagaggactgtatgttcggaaatggtaagggatacagaggtaagagagcgaccaccgtgaccggcacaccctgccaggactgggccgcgcaggaaccccaccgacactcaattttcaccccagagacgaatccccgcgcaggcctggagaagaactactgtcgaaaccctgacggcgatgtgggcggcccttggtgctacaccaccaacccaagaaaactttatgattactgcgacgtgccacagtgtgccgccccatcttttgactgtggcaagcctcaggtcgagcctaaaaaatgccctggtagagtcgtgggcgggtgtgtcgcccaccctcattcctggccctggcaggtgagcctgcggacccgcttcgggatgcatttttgcggcggtaccctaataagtccagaatgggtcctcacagctgcgcattgtctggaaaaatccccccgcccaagcagctacaaggtgattctcggggcgcatcaggaggtgaatctagagcctcatgtgcaggagatcgaggtttcacgactgtttctggagcccaccaggaaagatatcgcccttctgaagctgtccagccctgcagttataacagataaggtgatcccagcgtgcctgccgagcccaaattacgtagtggcggatcgcactgaatgcttcattaccgggtggggggagacacaagggaccttcggtgccggactcctgaaggaggctcaactgcctgtcatcgagaataaggtgtgcaaccgttatgagtttttaaacgggcgcgtacagtctactgagctgtgtgccgggcatctcgcaggcggcacggattcttgccagggggacagcggcgggcctttagtgtgctttgaaaaagacaagtatatactccagggagttacgtcttggggcctggggtgtgctcgtccaaataaacctggagtttatgtccgtgtgtcacgctttgtaacttggatcgagggcgtcatgcgcaacaac

SEQ ID NO: 6593 - DNA, 2430 bp, Artificial Sequence
  derived and/or modified sequence
atggaacacaaggaggtggtgcttctgctcctcttgttccttaaaagcggacagggagagccactcgatgattacgtcaacacccagggggcctcactgttctccgtgaccaagaaacaactgggcgctggaagcatcgaggagtgcgcggctaagtgcgaagaagatgaggaattcacctgcagggcctttcagtaccactcaaaggagcaacaatgcgtcattatggcagagaacagaaagtcgtcgatcatcattcgaatgcgggacgtggtcctctttgaaaagaaggtgtatctgtcggaatgcaaaacgggcaatggaaagaattaccggggaactatgtccaaaaccaagaacggaatcacctgccagaagtggtcgtcgacgtcaccacaccggccgcggttctcgcccgccacgcacccatcggaaggcctggaagagaattactgcagaaaccctgacaacgacccacaggggccatggtgctacaccactgaccccgaaaagcgctatgactattgcgacatcctcgaatgtgaggaggagtgtatgcattgctcgggggagaactacgatggaaagatctcaaagaccatgtccggactggagtgccaggcttgggactcgcagtcgccgcatgcgcacggttacattccatcgaagttccctaataagaacctgaaaaagaactactgccgaaatcccgaccgggagctccgcccgtggtgcttcactactgacccgaacaaacgctgggaactgtgcgatatcccgcggtgcactacccctccaccttcctctggcccaacgtaccaatgtcttaagggaaccggagagaactaccggggtaatgtcgccgtgactgtcagcggacacacctgccagcactggtccgcacagacccctcacacgcataaccgaactccagaaaactttccgtgcaaaaatctggacgagaattactgtaggaatccagatggaaagagggccccttggtgccacactaccaactcccaggtgcgctgggaatactgcaagattccgtcgtgcgactcgtccccggtgtctactgagcagttggcgccgactgccccacctgaacttaccccggtcgtccaagactgctatcatggggacggacagagctaccgcggtacctcctcaaccaccacgaccggtaagaagtgccaatcgtggtcatccatgaccccacataggcatcaaaagactcccgagaattacccaaacgccggactgacgatgaactactgcagaaatccggatgccgataagggaccatggtgtttcaccaccgacccgtccgtgagatgggagtactgcaatctgaagaaatgttccggtaccgaggccagtgtcgtggcacccccgccggtcgtgctgctccctgatgtggagacgccgtcagaagaggactgcatgtttggaaatggcaagggctaccggggcaagcgcgcgactactgtcactggaactccatgccaagactgggccgcgcaggagccgcaccgccattcgatcttcacccctgaaactaatccgcgagccggcctcgagaagaactattgtcggaacccggatggagatgtggggggaccgtggtgctacacgactaacccgcggaagctgtacgactactgcgacgtgccgcaatgtgcggccccgtctttcgactgcgggaaaccccaggtcgaacccaagaagtgcccaggaagggtcgtgggcggatgtgtcgcccacccgcactcctggccgtggcaggtgtctcttcgcactaggtttggcatgcatttctgcggaggaactctgatctcgccggaatgggtgctgaccgcggcccactgtctcgagaagagccctaggccatcgtcctataaagtgatcctcggcgcccaccaggaggtgaacctggaacctcacgtgcaggaaatcgaagtcagccggctcttcctggagccaacccggaaggatatcgcgctgctcaaattgtcctccccagcggtgattaccgataaggtgatccctgcgtgccttccgtcaccgaattacgtcgtcgccgaccggactgagtgcttcatcactggctggggagaaacccagggaaccttcggcgctggcctgctcaaagaagcacagctgcctgtgattgaaaacaaagtgtgtaatcggtacgaatttctcaacggcagagtgcagtcgaccgagctctgcgcgggacatctggccggcggcacggattcatgccagggagattctggaggaccgctggtgtgtttcgaaaaggacaaatacatcctccagggagtgacctcatgggggctgggatgtgctcggcctaacaaaccgggagtctacgtgcgcgtgtcgcggttcgttacctggatcgaaggagtcatgaggaacaac

SEQ ID NO: 6594 - DNA, 2430 bp, Artificial Sequence
  derived and/or modified sequence
atggaacacaaggaggtcgttctcctcctgctgctgtttctaaagtctggccagggggagcccctggacgactacgttaatacccagggagccagcctgtttagtgtgactaagaaacagcttggggctggctctatcgaggagtgtgccgccaaatgtgaggaagacgaagagtttacgtgtcgtgctttccagtatcatagcaaggaacaacagtgcgtcatcatggctgagaaccgaaagagctctataatcattcggatgagggacgtggtgctgtttgaaaagaaggtctatttaagcgagtgcaaaaccgggaatggtaaaaactatcggggcaccatgtctaaaacaaagaacggcatcacctgccagaagtggtctagcacctctccccataggccccggtttagtcccgctactcacccgagcgaaggtctcgaggagaactactgcagaaaccctgataatgatcctcagggtccttggtgctacacaactgatcctgaaaagcgatacgactattgtgatattttagagtgcgaggaagagtgcatgcactgctctggagagaactatgatggcaagatctccaagacgatgtcaggattggagtgtcaggcatgggattcgcagtcgcctcatgcgcacgggtatatcccaagcaaatttccaaataagaatttaaagaagaactactgccgcaacccagatcgggagctccgaccttggtgttttacaaccgaccccaataagagatgggaactctgtgatatccctaggtgtactaccccacccccctcctcaggccctacatatcaatgtcttaaggggaccggagaaaactatagaggaaacgtcgcagtgacagtgtctggtcatacttgtcagcattggagcgcccaaacgcctcacacccacaatcgcaccccggaaaattttccgtgtaagaatctggacgaaaattattgcaggaatccggatggaaagagagctccctggtgccataccactaactctcaggttcgttgggaatactgtaaaattccttcatgcgattcgagccccgtgtccacggagcagctggccccgaccgccccaccagagctaacccccgtggttcaggactgctaccacggcgatggccagagttatcgtggcacaagttctacaacaactacggggaaaaaatgccagtcttggtcaagcatgactcctcacaggcatcagaaaactcccgagaactaccctaacgccggtctcacaatgaactattgcaggaaccccgacgccgataagggcccatggtgctttaccacggatccatcggtccgctgggaatactgcaacctgaagaagtgttctgggaccgaagcctcagttgttgccccccctcccgtggtgctccttcccgatgtggagacaccatctgaggaagattgtatgttcggcaacgggaagggctatcgcggcaaacgagcaacaacagttaccgggactccttgtcaggattgggccgcgcaagaacctcaccgacacagtatcttcacccctgagacaaatcccagggcaggccttgaaaaaaattattgtcgaaatcccgatggtgacgtgggtggaccatggtgttacactaccaatcccaggaaactatacgattactgcgatgtgccgcagtgcgcagccccctcgttcgattgtgggaaaccacaagttgagccaaagaaatgtcccggccgagtagtgggcggctgcgttgcgcacccgcactcttggccctggcaggtaagcctgaggactagatttggcatgcatttctgtggggggacccttatttccccagaatgggtgcttacggccgctcattgcttggagaaatctccccggccgtccagttacaaggttatccttggcgctcatcaagaagtgaacctggagcctcacgtgcaagagatagaagtgtcccgactgtttctggagccaacgaggaaagacatcgcccttctaaaactttcgagccctgctgtgataaccgataaggtaatcccagcttgtttgccgtcaccgaattatgtggtcgccgacaggacagaatgtttcatcactggctggggcgagacacaggggacatttggcgccggcttgctcaaggaggcccagctgcctgtgatcgagaacaaggtgtgtaacagatacgaatttcttaatggccgagtgcagtctacagaactgtgtgccggacatctggcagggggaaccgattcatgccagggagattcgggtggtccactggtgtgctttgagaaggacaagtacatccttcagggagttaccagctgggggctgggctgcgcccgacccaataaaccgggagtgtacgtgagggtctcgagatttgtgacctggattgaaggagtgatgcgcaataat

SEQ ID NO: 6595 - DNA, 2430 bp, Artificial Sequence
  derived and/or modified sequence
atggaacataaggaagtcgtgctcctgcttctgctgtttctcaaatctgggcaaggtgagccccttgacgattacgtcaacacccagggagcatcgcttttttccgtgaccaaaaagcagctcggtgcaggctcgatcgaagagtgtgccgcaaaatgtgaagaagatgaagaattcacttgtagagcattccagtaccattccaaagaacaacaatgtgtgatcatggcagaaaaccgaaagtccagcatcataattcggatgcgggacgtggtgctcttcgaaaagaaggtgtacctctccgaatgtaagaccggaaatggtaagaactacagaggtactatgtccaagactaagaacgggattacttgtcaaaaatggtcaagtacgtcacctcacagacctcgatttagccccgcaacgcacccttccgaaggcctcgaggaaaactattgtcgcaatccggacaatgatccacagggtccttggtgctacacgactgacccagagaagcgctacgattactgcgatatcctcgagtgtgaggaagaatgcatgcactgctcgggcgagaactacgatggaaagatcagcaaaactatgtccggactggaatgtcaggcttgggattcgcagtcgcctcatgcgcatggttacataccttccaaattccctaacaagaacctcaagaagaattactgtcgcaaccctgacagggaattgaggccatggtgttttacgaccgaccctaataagaggtgggaactgtgcgatatccctcgatgtactacccctcctccaagcagcggacctacctaccagtgccttaagggtactggcgaaaactaccgtggtaatgtcgcagtcacggtgtcgggacacacttgccaacattggtccgcgcagaccccgcatactcacaacagaacccccgagaactttccatgtaaaaacctggacgaaaactactgtaggaacccagatggaaagcgtgcaccatggtgtcatactactaactcccaagttaggtgggagtactgtaagattccttcttgcgactcttcgccggtgtcgactgaacaactggctccaactgcaccccccgaactgaccccagtggtgcaggattgctaccatggggatgggcagagctatcgtgggacctcctccactaccactactggaaagaaatgtcagagctggagctctatgactccccatcgacaccaaaaaaccccagagaattacccaaacgcgggccttaccatgaactattgcaggaacccagacgcggataaagggccttggtgctttactaccgacccaagcgtgagatgggaatactgcaatctcaagaagtgtagcggaaccgaagcgtctgtcgtggctcctccccccgtcgtgctccttccggacgtggagacgccttcggaggaggactgcatgttcgggaacggaaagggttaccgtggaaagcgagcaacgaccgtgaccggaactccttgtcaagattgggccgcacaagagccccataggcattcgatctttaccccggagactaaccctcgagcaggtttggaaaagaactactgtagaaatcccgatggagatgtaggtggaccttggtgctataccactaaccctcgcaagctgtacgattattgtgatgtgcctcaatgtgcagccccctccttcgattgtggaaaaccacaggtggaaccaaagaagtgtcctgggagggtcgtcggcggttgtgtggcccacccccactcgtggccatggcaagtatcactgcggaccaggtttggaatgcacttttgtggaggtactctgatctcgccagagtgggtgcttactgcagcacactgtcttgagaagagccctcgaccttcctcatacaaagttattctgggcgcccatcaagaagtcaacctcgaacctcatgtgcaagaaatcgaggtgtcaagactgtttctggaacctacccgtaaagatatcgcactgctgaaactttcctccccagccgtgattacggataaagtgatccctgcctgtctgcccagcccaaattacgtggttgcagatcgcaccgaatgctttatcactggctggggtgagactcaggggacgttcggagccggactgcttaaagaagcccaattgcccgtgatagaaaacaaagtgtgcaatcgatacgaatttcttaacggtcgggtccaatcgaccgaattgtgtgccggtcatctggcagggggcaccgacagctgtcagggtgattccggtggacccctggtgtgcttcgagaaagacaagtacattctgcaaggcgtcacctcctggggacttggatgtgcacgccccaataagccgggggtgtacgttcgtgtgtcgcgttttgtgacttggattgagggagtgatgagaaacaac

SEQ ID NO: 6596 - DNA, 2430 bp, Artificial Sequence
  derived and/or modified sequence
atggagcacaaagaggtggtgttgcttctcctgctttttctgaagtcgggtcagggagaaccacttgatgactacgtcaatacgcagggtgctagccttttttccgtcaccaagaaacaactgggtgcaggaagtatcgaagaatgtgccgcaaagtgtgaagaggacgaggaatttacctgcagagcattccaataccattcgaaagaacagcaatgcgtcattatggcagagaatagaaagtcatcgatcattatcagaatgcgcgatgtggtgctgtttgagaaaaaagtctatctctccgaatgtaagacgggcaatgggaagaattacaggggtactatgagcaagactaaaaacggaatcacttgtcagaagtggtcgtccacttccccgcataggccaagattttcaccagcaactcatccttcggaagggctggaggaaaactattgccgtaacccagataacgacccccaagggccatggtgctacaccactgacccagagaagcgatatgattactgtgacatactcgaatgtgaagaggagtgtatgcattgcagtggagaaaactacgacggtaagatttcaaaaactatgagtggactcgaatgtcaggcatgggattcccagtccccacatgcgcatggctacattccttccaaattcccaaacaagaatctcaagaagaactattgcagaaatcctgatagagaacttagaccgtggtgttttactaccgatcctaacaagaggtgggagctgtgtgatatccctagatgtactactcccccgccaagctcgggcccgacctaccagtgcctgaagggcaccggagagaactatagaggcaacgtggcagtcaccgtctcaggccacacttgtcaacactggagcgcacaaacgccacacacccataaccggactcccgaaaactttccctgcaagaacttggatgaaaactactgcaggaatcccgacggaaagagggcaccttggtgtcataccactaattcgcaggtgagatgggagtactgcaagattccatcctgtgatagctctcctgtgtcaaccgagcagctcgcccctacggccccgcctgagcttaccccagtggtccaagattgctaccacggagacggacagagctatcggggaacctcgtcgactactacgactgggaaaaagtgtcagtcgtggtcctcgatgaccccgcaccgacatcaaaaaacccctgaaaactaccctaacgcaggtcttactatgaattactgtcgcaacccggatgcagataaaggaccatggtgtttcaccaccgaccctagcgttcgatgggaatactgcaatcttaagaagtgttctggaaccgaagctagcgtggtggccccacctcctgtggtgctgctgccagatgttgagactccatcagaagaagattgtatgttcggtaacgggaaaggatacagaggtaagcgtgctaccaccgtgaccggtactccctgtcaagactgggcggcacaggaacctcatcgccacagcatctttactcctgaaacgaaccctcgcgcaggcctcgagaaaaactattgtagaaatcccgacggcgatgtaggcggaccttggtgctatactaccaatccacgcaagttgtacgattactgtgatgtccctcagtgcgccgcacctagcttcgattgtgggaagccgcaagtggaacccaagaagtgtccgggtagggtcgtcggaggctgcgtggcacatcctcattcatggccttggcaggtgtcccttcggacccgctttgggatgcatttttgtggcggtacgctcatcagccctgaatgggtgcttaccgcagcacactgccttgaaaaatcgcccaggcctagctcgtacaaagtgatcttgggagcgcaccaagaagtgaacctggaaccacatgtgcaagagatcgaagtcagcagattgttccttgaacctacccgcaaggacattgcactccttaagctgagcagccccgcggtcataactgataaggtcatccccgcatgccttcctagccctaattacgttgtggcagaccggaccgagtgcttcataaccggctggggtgaaactcaaggaactttcggagcaggactgcttaaggaggcacaactcccggtgattgaaaacaaggtgtgtaaccggtacgagttcctgaacggacgcgtgcaatccaccgagttgtgtgccggtcatttggcgggtggtaccgactcctgccaaggtgattcaggaggccccctggtgtgcttcgaaaaagataagtacatactgcagggcgtaaccagctggggacttggttgcgcaagacctaataagcctggtgtgtacgtgcgcgtgtcgaggtttgtcacttggattgaaggagtgatgcggaacaac

SEQ ID NO: 6597 - DNA, 2430 bp, Artificial Sequence
  derived and/or modified sequence
atggagcacaaggaagtggtcttgctgcttttactttttcttaaaagcggccagggcgaacccctcgacgactacgtcaacacccagggtgcgtcactgttttccgtgacgaagaagcagttgggggccgggagcatcgaagagtgtgcagctaaatgcgaagaggacgaggaatttacttgccgagcgttccagtatcactctaaagaacaacaatgcgtcatcatggctgagaatcgcaagagcagcatcattatccgaatgcgagacgtcgtcctgtttgaaaaaaaagtttatctttccgaatgtaagaccggcaacggtaaaaactacaggggcactatgagcaagaccaagaatgggattacttgtcagaaatggtcaagcacctcgcctcatcgcccccgtttctctcccgcaacacatccgtctgagggactggaagaaaactactgtcggaaccctgataacgatccccaaggcccctggtgttacacaacagatccagaaaaacgttatgattactgcgatattctggaatgtgaagaagagtgtatgcactgctccggagaaaactatgatggcaagatctcaaagactatgtccggtctggaatgccaggcctgggactcacaatctcctcatgcgcacggatatataccttcaaaatttccgaacaagaatcttaaaaagaattattgtaggaatcccgaccgggaactcaggccctggtgttttactaccgacccaaataagcgctgggagttatgtgacataccaaggtgtaccaccccccctccctcatcaggccccacttatcaatgcctgaaaggcactggcgagaattacaggggaaacgtggcggtcacagtgtctggccatacctgtcagcattggagtgcccagacgccccatacccataatcggacccctgagaactttccctgtaaaaacctagacgaaaactactgcaggaaccccgacggaaaaagggctccctggtgtcacaccacaaatagtcaggtgcgttgggaatattgcaagattcccagctgcgactcatcaccagtgtccacggagcagctcgcccctactgcccctcctgaactgactcctgttgtccaggactgctatcacggcgacggccagagctaccggggcacttcctctacgaccactaccggaaagaaatgtcaaagttggtctagtatgacaccacaccggcaccagaaaacaccagaaaattatcctaatgcgggcctcacaatgaactactgtcgcaatccagatgctgacaaaggcccctggtgctttactacagatccctccgtcaggtgggagtattgtaacctgaagaaatgctctggtacagaggcatcggtggtggctccaccccctgtagtgcttcttccggatgtggaaacaccatcggaagaggactgtatgttcggaaatgggaaaggctatagggggaaacgtgccacaaccgtgaccggcactccttgccaggactgggcagcccaggagcctcaccgccattcaatatttacgccagagaccaatccgagggcaggattggagaagaactactgtagaaatcctgacggtgacgtcggcgggccctggtgctacacgactaatccacggaagttgtacgattactgtgatgtgccccagtgtgcggccccgtcatttgattgcggaaagccccaggtggagccaaagaaatgccccggaagagttgtgggcggctgtgttgctcaccctcattcttggccctggcaggtgtcattgcggactagattcgggatgcacttctgcgggggcaccctcatctcacctgagtgggttctaaccgccgcccattgcctcgaaaagagccccaggcccagctcctataaggtcattttaggcgctcaccaggaggttaatctggagcctcacgtgcaggagattgaggtatcccgcctgttcttggaaccgacccggaaagatattgccctgctaaagctgtcttcgcccgccgtaatcacggataaagtcatccctgcttgtcttccaagcccaaattacgtggtggctgacagaaccgagtgcttcatcacaggttggggcgaaacgcagggaaccttcggtgccgggctccttaaggaggctcaactgcctgtgatcgagaataaagtgtgcaaccgatacgagttcctgaatggccgtgttcaatctacagaactctgtgctgggcatctagctggaggcactgattcctgccagggcgattcaggaggccctctggtgtgtttcgagaaggataagtacatcctgcagggggtaaccagctgggggctcggctgtgctagacccaacaaaccgggcgtatatgttcgtgtatcccgctttgtaacttggatcgagggggttatgcgtaataac

SEQ ID NO: 6598 - DNA, 2430 bp, Artificial Sequence
  derived and/or modified sequence
atggaacataaggaggtcgttctgctgctcctgctgttcttaaagagcggccaaggcgagccactagatgattacgtaaatacccagggcgcttctcttttcagcgtcaccaagaaacagctgggagccgggtctattgaggaatgcgccgccaaatgcgaggaagacgaggagtttacctgtcgtgccttccagtaccattcaaaggagcagcagtgcgtcatcatggcagaaaatcgtaaatcctccatcattattcgtatgagagacgtggttctctttgagaagaaggtctatctgtcagagtgcaagacaggtaacggcaaaaattacaggggtactatgtctaaaacaaaaaacggcatcacctgtcaaaagtggagctccacaagcccccaccggccacggttttcccccgcgacacatccatccgagggccttgaggaaaactattgcagaaatccggataatgacccacagggaccatggtgctacaccacagatccagagaaacgctatgactactgcgatattctggagtgcgaagaagaatgcatgcattgtagtggcgagaactatgacggcaaaatatctaaaacgatgtccggcctcgaatgccaggcttgggatagccagtctcctcacgctcatggttacatccctagcaagtttcctaataagaacctgaaaaagaactactgccgcaatcctgatagggaactccgcccttggtgtttcacaaccgacccgaacaagaggtgggagctatgcgacatccctagatgcactaccccccccccgtcgagcggacctacatatcaatgcctgaaggggaccggagagaattataggggtaacgtggccgtcacggtgtcgggacatacctgtcagcactggtcagcccagacgcctcacacccacaacagaacaccagagaatttcccctgcaaaaatctggacgaaaattattgccggaaccccgacgggaaacgcgccccatggtgccacacaacgaattcacaggtgaggtgggagtactgtaagataccctcttgtgactctagcccagtgtctacagagcagttagcacccaccgccccccctgaactgaccccggtggttcaggactgctaccacggagatggacagagctaccgggggacatctagtactaccaccactggcaaaaaatgccagtcatggagctcaatgacacctcaccggcaccagaagacaccagagaattacccaaatgccggattgacaatgaattactgtaggaaccctgacgcagacaagggcccatggtgctttactaccgatccatctgttcgatgggagtactgcaacctgaagaagtgttctgggaccgaggctagtgttgtcgccccgccgcccgttgtgctgttgcctgacgtggagacacccagcgaggaggactgcatgttcggcaatgggaagggctaccggggaaaacgggccactacggtcaccggaaccccatgccaggattgggcggctcaggagccgcacagacactcaatctttactcccgagaccaacccccgggccggcctggagaagaactactgtaggaatccagatggagatgtgggtggtccctggtgttatacaacaaaccctaggaagctctacgactactgcgatgtgcctcagtgcgctgcaccctccttcgactgtggaaagcctcaggtcgagcccaagaagtgcccagggcgggtggtgggaggctgtgtggcgcatcctcacagctggccgtggcaggtgtccttgcgcaccagatttgggatgcacttttgcggcggcacattgatcagccctgaatgggtcctaaccgctgcccactgccttgaaaaatcacctcgaccttcttcctataaggtgatcctgggcgcacatcaagaggtcaaccttgagccacatgtgcaggaaatcgaggtgagcagactctttttggagcccacacgcaaggatatcgcccttctgaagttgtcctctccggctgtgattaccgataaagtgatccccgcttgccttccttcaccaaattatgtcgtagcggaccggactgagtgctttataacaggatggggcgagacacagggaaccttcggagccggtctactgaaggaggcccagttgcccgtgatcgagaacaaggtatgcaaccggtatgagttcctgaatggccgggtacaaagcaccgagctgtgcgcaggacacctagcagggggaactgacagctgccagggcgacagcggagggcctctggtgtgtttcgaaaaagacaagtacatccttcagggagtgacttcctggggcctcggatgcgcccggccaaacaagccgggtgtgtacgtgcgtgtaagtcgattcgtcacatggattgagggggtgatgcgcaataat

SEQ ID NO: 6599 - DNA, 2430 bp, Artificial Sequence
  derived and/or modified sequence
atggaacataaggaagtggtgttgctgctgctcctttttctgaagtcaggacagggggagccattggatgattacgtcaatacccaaggggcatcccttttttccgtgaccaaaaagcaacttggagcagggtccatcgaagagtgcgcagccaagtgtgaggaagatgaagaatttacttgccgcgcatttcaataccattcgaaggaacaacagtgcgtcattatggcagaaaacagaaagagctcgataatcatcagaatgcgagatgtcgtgctgtttgagaagaaagtctacctctccgaatgcaaaactggcaatggcaagaattaccggggtaccatgtccaaaaccaagaacggcattacttgtcagaagtggtcatccaccagcccacatcgcccacgcttcagccccgctacgcatccatccgaaggtctggaggagaattactgtagaaaccccgacaatgatccccaggggccatggtgctacacgactgatccagaaaagaggtacgactactgcgacattctcgaatgcgaggaggaatgtatgcattgttcgggagagaactacgatggtaagataagcaagactatgtccggacttgaatgccaggcatgggattcacagtctccacacgcccatggatacattccgtcaaagtttcccaacaagaatctgaagaaaaactactgtaggaacccagaccgggaacttcgcccttggtgttttaccaccgaccccaataaacgatgggaactttgtgatattcctagatgcaccactcctcccccctcatcgggaccgacctaccaatgtctgaagggaaccggagaaaactaccgaggcaacgtggcagtcacggtatctggacatacgtgtcagcattggtcggcgcagaccccacatacgcataatcgaacgcctgaaaacttcccctgcaagaatcttgatgagaactattgtcggaatcccgacggtaagagagcaccctggtgccacactacgaattcacaagtcaggtgggaatactgcaaaattccgagctgtgatagctcccccgtcagcaccgaacaactcgcacctaccgcgcccccggaacttacccctgttgtgcaagattgctaccatggtgacgggcagtcctaccgtggaacctcctcgaccactaccactgggaagaaatgccaaagctggtcgagcatgactccacaccgtcaccaaaagacccccgaaaactacccaaatgcaggactcaccatgaactattgtagaaacccggatgctgacaaaggtccgtggtgtttcactaccgatcccagcgtgagatgggagtactgcaacctcaagaagtgctccggaaccgaggcctcagtagttgcgccaccaccagtggtcctcctgcccgacgtggaaaccccatcagaagaagattgtatgttcggaaacggaaaaggctaccgcgggaaaagagcgaccacggtgaccggtaccccttgtcaggattgggcagcacaagaacctcaccggcattcaattttcactccggaaactaaccccagagcaggattggaaaagaactattgccgaaatccagatggtgatgtcgggggtccatggtgctatactacgaaccctcggaaactctacgactactgtgatgtgccccaatgtgcagccccctcatttgactgtggaaaaccccaggttgaaccgaagaaatgtcctggtagggtggtgggtggttgtgtcgcacatcctcattcatggccctggcaggtgtcgctcaggaccagatttggtatgcacttttgtggaggaaccctcatttcccctgagtgggtcctgaccgccgcacattgtcttgagaaatcccctcgaccgtccagctacaaagtgattcttggtgcccaccaagaagtgaaccttgaaccacacgtccaggaaatcgaggtgtccagattgttccttgaaccaacccgaaaggatattgcccttctgaaactgtctagcccggctgtgattactgataaagtgatcccagcttgccttcctagccctaactacgtcgtcgccgatcggactgaatgctttatcactggttggggtgaaactcaagggacttttggggcaggacttctcaaagaagcgcagcttcctgtcatagagaacaaagtgtgtaatcgctacgaatttctgaacggccgcgtccaaagcacggaactgtgtgccggacaccttgcgggaggaactgactcatgccaaggagattcgggaggaccgcttgtgtgctttgagaaggataagtacatcctccagggggttacctcctgggggctgggctgcgcgcgtcctaacaagcctggagtgtacgtccgtgtctccaggttcgtgacttggattgaaggtgtgatgcgcaataac

SEQ ID NO: 6600 - DNA, 2430 bp, Artificial Sequence
  derived and/or modified sequence
atggagcacaaggaggtggttctcttgctgttgctctttttaaagtcaggtcagggggaacccctcgacgattatgtcaacactcagggagccagcttgttcagcgtgaccaagaagcagctgggtgcgggttctattgaagaatgcgcagctaagtgcgaggaagatgaggaattcacctgcagggcatttcaatatcactctaaagagcagcagtgcgtgatcatggcagagaacaggaagagctccataataatccgaatgagagacgttgtgctgttcgagaaaaaggtatatctgtccgagtgcaagaccggtaacggcaagaattatagaggaacgatgagtaaaaccaagaatggcataacctgccagaagtggagttccacatcacctcacagaccaagattctctccagcaacccacccctccgagggactggaggagaactactgtcgcaatccggataacgaccctcaagggccctggtgttatacgactgatcctgaaaagaggtacgattattgtgatatcttggagtgcgaagaagaatgtatgcactgtagcggggaaaattatgacggcaaaatctccaaaaccatgagcggtttggagtgtcaagcctgggatagccagagcccacatgctcacgggtatattcccagcaaattcccaaataagaatttgaagaagaactattgtcgtaatcccgacagggagctgagaccatggtgttttaccacagacccaaataagcgatgggagctgtgtgatattccaaggtgtacaacgccccctccaagcagcggccctacatatcagtgtcttaagggaacaggggagaattatcggggtaacgtggctgtgactgtcagtggacatacatgtcagcactggagtgcacaaactccgcacacacacaatagaacaccagagaatttcccttgcaagaacctagatgagaattactgtaggaaccctgatggaaagagagctccctggtgtcatacaactaacagccaggtaagatgggaatactgtaaaattccctcctgcgacagcagtccagtctccacagaacaattggcccctacagcaccccccgagctgaccccagtggtccaggattgctaccatggggatggccagtcctatcgcgggacaagtagtaccacgacaactggcaaaaaatgtcagtcttggtctagcatgaccccgcatcgacaccaaaagacccccgaaaactatcccaatgctgggctgacaatgaactactgtcgtaatccagatgccgataagggtccttggtgtttcacaacggatccatccgtgagatgggagtactgcaatttgaaaaagtgcagcggcaccgaagcttccgtggttgctcctcctcctgttgttctactcccagacgtggagacaccctccgaggaagactgtatgtttggcaacgggaaagggtaccggggtaagcgggctaccacggtgaccgggacaccttgtcaggattgggcagcacaggagccacatcgtcattccattttcacacccgaaacaaaccctagagccggtctggagaagaactactgcaggaatcctgatggcgacgtgggaggcccttggtgctacacaacaaatccgaggaagttgtacgattattgtgacgtgccgcaatgcgccgcgccctcatttgactgtggtaaaccacaagtcgagcctaagaaatgcccgggccgagtagtaggcggatgtgtggcccacccccactcgtggccctggcaggtgtctctaaggacacggttcggcatgcatttctgtggtggaactttgatttctcccgagtgggttctgaccgccgcgcactgcttggagaaatccccccggccctcctcctacaaggtgattctcggcgcacaccaggaggtcaatctcgaacctcacgttcaggagattgaagtttctcgcctcttcctcgaacctacgcgaaaggatatcgctctgctcaagctctcatcccccgctgttattacggacaaagtcattcccgcatgcctgcctagcccaaactacgttgtggcagaccggaccgaatgtttcattacagggtggggggaaacgcaaggcaccttcggtgcagggttgctcaaagaggcccagctcccagttatcgaaaataaggtgtgcaatcgctatgagttcttgaacggcagagtccagagtaccgaactatgtgctggacatctcgcaggcggcacagattcttgtcagggtgactcaggtgggccactcgtctgttttgaaaaagataagtatatcctgcagggtgtgaccagttgggggttagggtgcgcgcggccaaataaacccggcgtgtatgtcagggtgtcgagattcgttacatggatcgagggagttatgaggaacaac

SEQ ID NO: 6601 - DNA, 2430 bp, Artificial Sequence
  derived and/or modified sequence
atggagcacaaagaagtagtgcttcttttgctgctgttcttgaagtccggccagggagagccactcgatgactatgtcaatacccagggcgcctcactgttttctgtgaccaagaaacagctgggtgctggcagcatagaagagtgcgccgccaaatgcgaagaagatgaagaattcacttgtagagcatttcagtatcacagcaaagagcagcagtgtgtgatcatggctgaaaataggaaaagctccataataatcaggatgcgcgacgtcgtgctctttgaaaagaaggtgtatttatctgaatgcaagaccggaaacgggaagaattacagggggacaatgtcaaagactaagaacggcataacttgccagaaatggtcctccactagcccccaccgtcctcggttctccccagcaactcacccaagcgaaggactggaggaaaactactgtcgaaaccctgacaatgatcctcagggtccatggtgttataccacagacccagagaaaagatatgactactgcgatatcttggagtgcgaagaagagtgcatgcattgctcaggtgagaattacgatgggaagattagcaagacaatgagcggtctagaatgtcaagcctgggactcccaaagtccccacgcacatggatacatccccagcaaattcccaaacaaaaatttaaagaaaaactactgtcgtaaccccgaccgggagctcagaccttggtgcttcactacggacccaaacaaacggtgggagttatgcgacattcctagatgtactactcctcctcccagttccggcccgacttatcagtgtctgaaggggactggtgagaactaccgaggaaatgttgcagttacagttagcggccatacgtgtcagcactggtccgcacagactccgcacacccacaatcgaactccggagaacttcccatgtaagaatctggacgagaattactgtaggaatcccgatggcaaacgcgctccatggtgccacacgacgaattcccaggtgcggtgggagtactgcaagatcccatcatgcgattccagtcccgttagtaccgagcagttagcccctactgcaccccccgagctcactcctgtcgtgcaggactgctaccacggcgatgggcaaagctatcggggtacctcctcaacaacaaccacgggaaaaaaatgccagtcttggtcgagtatgaccccccatcgtcatcagaagacacctgaaaactaccccaatgccggattgaccatgaattattgcaggaaccccgatgccgataaggggccatggtgttttactaccgacccctcagtgcgatgggagtattgcaacttgaagaagtgctcgggtacggaggcatctgttgtagcccctcctcctgtggttctgctgccagatgtagaaacaccaagtgaggaggattgcatgtttggaaatgggaaggggtatcgaggaaagcgggcgacaacggtgaccggtacaccatgccaggattgggcggcccaggaaccccaccggcacagtatctttacgccggagacgaatccaagagcaggcctggaaaaaaattactgtaggaatccagacggtgacgttgggggaccatggtgctataccaccaatcctcgcaagctgtacgattactgtgatgtgccgcaatgcgctgccccatctttcgactgcggcaagcctcaggtcgagccgaagaagtgtcctggacgagttgtcgggggatgcgttgcacacccacacagctggccctggcaggtctccttgaggacccggtttggcatgcacttctgtgggggtacgctgatctctccagaatgggttctcactgcagcgcattgcctagagaaatcaccaagaccttcaagctacaaggtgatcctgggtgcgcaccaggaggtcaacctggaacctcacgtccaagaaatcgaagtctcaagactcttcctagaacccaccaggaaagatatcgcgctgctaaaactgtcttcgccggccgtgatcaccgacaaggtcatccccgcgtgtctccccagcccaaactacgtggtcgcagataggacagagtgtttcataacggggtggggggagacccaaggaacctttggggcggggctgctgaaggaggcccagctgcctgtgattgagaataaagtatgcaaccgatacgagttcctgaacggccgagtgcagagtacggagctgtgtgcaggccatcttgccggagggacggacagttgtcagggcgatagcggggggcctcttgtgtgctttgaaaaggacaagtacattcttcagggtgtaacctcatggggccttggatgcgctcggccaaacaagcctggcgtatacgtgagggtttccagattcgtgacctggatcgaaggcgttatgcgaaacaac

SEQ ID NO: 6602 - DNA, 2430 bp, Artificial Sequence
  derived and/or modified sequence
atggagcataaggaagtcgtgctcctcctgcttctattcctcaagtccgggcagggagagccacttgacgactacgtgaatacccagggggcttcattgttttccgttactaaaaaacagctgggagccggatccattgaggaatgtgcggctaaatgcgaagaggatgaagaattcacatgtagagcgttccagtatcatagcaaagaacagcagtgcgtgattatggctgagaataggaagagttcgataatcatccgaatgcgcgacgtagtgctatttgagaaaaaagtgtacctgtcagagtgcaaaactgggaatgggaagaactaccgtggcaccatgagtaagaccaaaaatggcattacttgccagaaatggtcctctacatctccccacaggcccagattcagccctgcaacacatccttctgagggtttggaagagaactactgtcggaatccggacaacgatccacagggcccatggtgttacacaacggatcccgaaaagagatacgactactgtgacatccttgagtgtgaggaggagtgcatgcactgctcaggcgaaaactacgatggaaaaatttcaaagactatgtccggtctcgaatgtcaagcctgggattcccagagcccgcacgctcacgggtatatcccttcaaagtttccgaacaaaaatttgaagaagaattattgccggaatcctgatagagagctccgaccgtggtgtttcactacagaccctaataagaggtgggagttgtgcgacattccgaggtgcacaaccccgcccccgtcttccgggcccacctatcagtgccttaagggcaccggcgagaactacagagggaatgtggccgtaaccgtgtcggggcacacctgtcaacactggtctgcgcaaacccctcatacgcacaacagaacgccagagaactttccctgcaaaaatctcgacgagaactactgcaggaaccccgatggcaagagagcaccttggtgtcatacaaccaattctcaggtacgttgggagtactgtaaaatcccctcttgtgactcctctccagtgagcaccgagcagctagccccgacagcacccccagaactaacgcccgtagtccaggactgttatcatggcgatggccagtcttatcgtgggacttcatcaacgactaccacaggtaagaagtgccagtcttggtcatccatgacgccacataggcatcagaagacacctgagaactaccccaatgccggtctcacaatgaattactgccgaaatccggacgcagacaagggaccatggtgcttcacgacagatccttctgtcaggtgggagtattgtaatctcaagaagtgttctgggactgaagcatctgtggtggcccctccgcctgtggtactgctcccagatgttgaaactccttctgaggaggactgcatgtttggaaatggaaagggctatcgtggcaagagagcaaccacggtgactggaacgccctgtcaagattgggcggcccaggaaccacatcgtcacagcatcttcacaccagaaactaacccacgcgcaggcctggaaaagaactattgtaggaaccctgatggagacgttggcggaccgtggtgttacacaactaacccgcggaaactctacgattattgcgacgtgccccagtgcgccgccccgtccttcgactgtggaaaacctcaggtggagccgaaaaagtgcccagggagagtcgtaggtgggtgtgtggctcatccacattcatggccatggcaagtgtctctgagaacacggttcggtatgcacttctgtggaggtactctgattagccctgaatgggtgcttaccgccgcccattgtctggaaaagtccccgaggccttcaagctacaaagtcatcctgggagcgcaccaagaggtgaacctggagccccacgtacaggaaatcgaagtgagccggctgttcctggaacccaccaggaaagatattgcactcctcaagctgtcatcccccgctgtcattacggacaaggtcatacctgcctgcttaccgtcccctaattatgtcgttgccgatcgcactgagtgcttcatcactgggtggggagagacgcaaggtactttcggggccggccttttaaaggaagcacaactccccgttatcgagaataaagtttgtaaccgctacgagtttctgaacgggcgcgtgcaaagtacagaactctgtgcgggccacttggcgggaggtaccgatagttgtcagggagattctggaggcccacttgtttgtttcgagaaagacaagtacatcttacagggagttaccagctgggggctgggttgtgctaggccaaacaaacccggggtgtacgttagggtgtctaggttcgtgacctggattgaaggagtaatgagaaacaat

SEQ ID NO: 6603 - DNA, 2430 bp, Artificial Sequence
  derived and/or modified sequence
atggagcacaaggaagtagtactcctcctcctgctgttcctgaaatcaggccagggcgaacctctcgatgactacgttaacactcagggagcttcgttgttttccgtgaccaaaaaacaactgggagcggggtccatcgaggaatgcgccgccaagtgtgaggaggatgaggaattcacctgtagagccttccaataccacagcaaggaacagcaatgtgtgatcatggctgaaaaccggaaaagcagcataatcattcggatgcgcgatgtggtgctgttcgagaagaaggtgtatctgagcgagtgcaaaacggggaacggcaagaattacaggggaactatgtcgaaaactaagaatggcattacttgccagaaatggagcagtacttccccacatcgaccgcggttttccccagcaacccacccgtctgagggtctggaagaaaactactgcagaaaccctgacaatgacccgcaaggtccatggtgttacaccactgatcctgaaaagcgatacgattattgtgatatcctcgaatgtgaagaagagtgcatgcattgttcgggagagaattacgacggcaaaatcagcaagactatgtcggggctggaatgtcaagcctgggactcgcagagcccccatgcccacgggtatatcccttccaagtttcctaataagaatctgaaaaagaactactgccgcaatccggaccgcgagctccggccttggtgcttcactactgatccgaataagagatgggaactgtgcgacatcccccgttgtaccactcctcccccgtcgtcaggtccaacctaccaatgcttgaaaggaaccggtgagaactacagggggaacgtggcagtgactgtgtcgggtcatacttgccagcattggtccgctcaaactccacacacccataacagaacccctgaaaacttcccgtgtaagaatctggatgagaattactgcaggaaccctgacgggaagcgcgctccctggtgccacaccactaatagccaggttagatgggagtactgtaaaatcccatcctgtgactcgtcgcccgtctccaccgagcagctggcaccaaccgctccgccggaactcacgcccgtggtgcaagactgctaccacggagacggacagtcctaccgcgggacttcatcgactaccacgaccggaaagaagtgccagagctggtcctcgatgaccccgcaccgacaccagaaaacccctgagaattatcctaacgccggcctcactatgaactactgcaggaatccagatgcagataagggaccgtggtgcttcaccaccgacccaagcgtgcgctgggagtactgcaatttgaagaagtgcagcgggacggaagcgtcagtggtggcgccgccgccggttgtgctcctccctgacgtcgaaactccgtcggaggaagattgcatgttcggaaatggtaagggatatcggggtaaaagagcgaccaccgtcaccggcactccgtgccaggattgggccgcgcaggagccccaccgccattcaatctttaccccagaaacgaaccctagagccgggctcgagaaaaactactgtcgaaaccctgatggcgatgttgggggaccatggtgctataccaccaacccgcggaagctctacgactactgcgacgtgccgcaatgcgctgcgccgtcatttgactgcggaaaaccccaggtggaaccaaagaagtgccccggacgggtcgtggggggttgtgtcgcccacccgcattcatggccatggcaagtgtcgctgcggacccgcttcggaatgcacttctgtggaggcactcttatcagccccgagtgggtcctgaccgccgcacactgcctggaaaagagccctcgcccgtcgagctacaaggtgatcctgggtgcccatcaggaggtcaatctcgagccgcatgtgcaggaaatcgaggtgtctaggcttttcctcgaaccaactcgcaaggacatcgcgctcttgaaactctcatcgcccgcggtcatcacggataaggtcattcctgcgtgcctgccaagcccaaactacgtggtggcagacaggacggagtgcttcatcaccggctggggagaaacccagggaactttcggcgccggtctgctgaaggaggcccagctccccgtgatcgaaaacaaagtttgtaaccgatatgaattccttaacgggcgcgtccaatcaaccgagttgtgcgctggccacctcgctggcggaacggattcgtgccagggcgactcaggcggccccctggtctgcttcgaaaaggacaagtacattctgcagggtgtcacctcatggggcctgggctgcgcacgcccaaacaagccgggagtctacgtgagggtgtcccgctttgtgacttggatcgaaggggtaatgcggaacaac

SEQ ID NO: 6604 - DNA, 2430 bp, Artificial Sequence
  derived and/or modified sequence
atggagcataaggaggttgttcttctcctgctccttttccttaagagcggacaaggggaacctctcgacgattacgtgaacactcaaggcgcatccctcttcagcgtcacgaagaagcaactcggagcaggctcgattgaggaatgcgcggcaaaatgcgaggaagatgaagaattcacttgtcgagcgtttcagtaccattccaaggaacaacagtgcgtgataatggcagagaaccgcaagtcatccatcatcatcagaatgcgcgatgtggtgttgtttgaaaagaaagtgtacctctccgagtgcaagactggtaatggtaagaattacaggggaactatgtcgaaaactaagaatggtattacttgtcagaagtggtcgtcgaccagccctcaccggccccggttttcccctgccacccatccatccgaaggacttgaggaaaactattgcagaaatccagataacgacccccaaggaccatggtgttacaccaccgatcctgaaaagcgttacgattactgtgatatacttgagtgcgaagaagagtgtatgcattgttccggagagaattacgatggaaaaatcagcaaaaccatgtccggactcgagtgtcaggcatgggactcgcagtctcctcatgcccatgggtacattccttccaagttcccaaacaagaatcttaagaaaaactactgtaggaacccggatagagaactgaggccctggtgctttactactgacccaaacaagaggtgggagctgtgcgacattcctcgctgtactactccacccccttcaagcggacccacctatcagtgtctcaagggtactggagaaaactaccggggaaatgtggcagtgaccgtgtcagggcacacctgccaacattggtcggcacaaaccccccatacccacaacaggacgcctgaaaactttccctgcaagaaccttgacgagaactactgtagaaaccctgacggaaagagagctccttggtgtcatacgaccaatagccaggtccgttgggagtactgcaagattccttcatgcgacagctcccccgtgtcaaccgaacaactggcaccaacggcaccaccagaacttactccagtggtgcaggattgttaccacggagacggacagtcataccggggtacgtcatcgaccaccaccaccggcaagaaatgtcaatcatggtcctccatgactcctcatagacatcaaaagactcccgaaaactaccctaacgctggccttaccatgaactactgtcggaatcctgatgccgataaggggccttggtgtttcaccactgacccaagcgtacgctgggaatactgtaacctcaaaaagtgctctggtactgaggcctccgtggtggcaccacctcctgtcgtgctcctccccgatgtcgagactccatccgaagaagattgtatgtttggaaatgggaaggggtaccgtggtaaaagagccactactgtcaccggaacgccctgtcaagactgggctgcgcaggaaccacacaggcatagcatctttactccagagactaacccccgcgcaggtctggaaaagaactattgtaggaaccctgacggggacgtgggtggaccttggtgttacactacgaacccacgaaaattgtacgactactgcgacgtgccacaatgtgccgcaccatcctttgactgtggaaagcctcaagtggagccaaagaagtgtcccggtcgcgtggttggaggttgtgtggcgcacccacattcgtggccctggcaggtgagccttagaacgcgctttggtatgcatttttgtgggggaactctgattagcccagaatgggtgctcaccgcagcccactgtcttgaaaagtcgccacggccttcctcgtacaaggtgattctgggcgctcatcaagaggtcaaccttgagccacacgtgcaagaaattgaggtgtcacggctttttcttgaacctacccgcaaggatatagcgcttttgaaactgtcctcgcctgccgtgattaccgataaggtgatccctgcgtgtctgccttcaccaaattacgtggtggcagatcgcaccgaatgctttatcaccggatggggcgaaacccaaggaaccttcggtgccggtctgcttaaagaggcgcagctgcccgtcatcgaaaacaaggtgtgtaaccggtacgaattccttaacggccgcgtgcaatctaccgaactttgtgcaggccatcttgcaggtggcactgactcatgtcagggggattccggaggacccctggtctgttttgagaaggacaagtacatcctgcaaggagtgacttcctggggacttgggtgtgcaagaccgaacaagcctggagtgtacgtgcgagtctcgcgtttcgtgacctggattgaaggggtgatgcggaacaac

SEQ ID NO: 6605 - DNA, 2430 bp, Artificial Sequence
  derived and/or modified sequence
atggagcataaagaggtcgtgctcctactgttgttatttcttaagtcaggtcaaggagaaccacttgatgattatgttaatacgcagggcgcatctctgttttccgtgactaaaaaacaattaggggcaggctcaattgaagaatgtgctgcaaaatgtgaggaagatgaagaattcacgtgccgtgcgtttcaatatcatagcaaagaacagcaatgcgtcatcatggctgaaaacagaaagtccagtatcataattcgcatgcgggacgtggtgctgtttgagaaaaaggtttacctgtccgaatgcaaaacaggaaatggtaaaaactacagaggaacgatgagtaaaacaaaaaatggaataacgtgtcaaaaatggtcttcgacatctccgcaccgcccaagattttcgccggcaactcatcctagcgaaggcctggaagaaaactactgcagaaatccagataacgatccgcagggaccatggtgttacacgacggatcctgaaaaaaggtacgactactgcgatatattagaatgcgaggaagagtgcatgcactgctcaggagagaattatgatgggaagattagtaaaacaatgtcaggcttagaatgccaagcctgggactcccagtcacctcatgcccatggttatatcccctcaaaatttccgaataaaaatctgaaaaaaaactattgtagaaatccggatcgcgagctacgtccgtggtgctttacaactgatccaaacaaaagatgggaactgtgtgacatccctcgttgtacgacgcctccgccgtctagcggacctacttatcaatgtttgaagggaacgggagagaattatcgcggcaacgtagcagtcactgtatccggtcatacttgccagcattggtctgctcaaacacctcacactcataatcgtacccccgagaactttccctgcaaaaatctggatgaaaactactgtcgtaaccctgacgggaagagggcaccgtggtgtcatacaacaaattctcaggttcgttgggaatattgcaaaataccgagctgcgatagctcacctgtatcaacagaacaattagccccgacggcgccacccgaactgacccctgtcgtccaggattgttaccacggcgacggacaaagctaccgtggcacgtcctcaacaacgacgacagggaaaaaatgtcagagctggagctcgatgacaccacatcgccatcaaaaaactcctgagaattatccaaacgcgggtctgactatgaactattgtcggaatccggatgctgacaaaggcccatggtgttttacaacagatccgtcagtgcgttgggaatattgtaatctgaaaaaatgcagcggcaccgaggcctctgttgtcgcgcctccacctgttgtgcttcttcctgacgtggaaactccgtctgaggaagactgtatgtttggaaatggaaaagggtatcgaggcaagcgcgcgaccacagtgacgggcacgccatgccaagattgggccgcacaggaaccgcatcgccatagcatcttcacaccggaaacaaatccacgcgccggtctggaaaagaattactgtcgtaacccggacggagatgtgggcggcccttggtgctatacaaccaatcctcgcaaattgtatgactattgtgacgttccacaatgcgccgcaccgtcatttgattgtggcaaacctcaggtcgagccgaaaaagtgccccggccgcgtcgtcggcggctgtgtggctcacccacattcatggccatggcaagtctcactgcgtactcgttttggcatgcacttttgcggtggcacattaatttcgccggaatgggtcttaacagcagcccattgcctggaaaagtctccgcgccctagttcctataaagtcatcctgggagcacatcaggaagttaatctcgagcctcatgtgcaagaaatagaagtgtctcgattatttcttgaaccgacgagaaaggatattgcactgctgaaattatcctcccccgcggttataacagataaggtgataccagcgtgtctgccgtcaccgaattatgttgtggcggatcgcacggaatgctttattacgggatggggagaaacacaaggcacgtttggtgcaggtcttttaaaggaggctcaattgccggtcatcgagaacaaagtttgcaatcggtatgaatttcttaacggccgcgttcagtcaacagaactttgcgcaggtcaccttgccggcggtacagattcgtgtcagggcgattcaggtggcccattagtttgtttcgaaaaggataagtacatactgcagggagtgacgtcatgggggttaggctgcgcccgtcccaataaaccaggagtatatgtaagagtgagccgctttgtgacgtggatcgagggagtcatgcgcaataat

SEQ ID NO: 6606 - DNA, 2430 bp, Artificial Sequence
  derived and/or modified sequence
atggagcataaggaggtggttctactcttactcctttttctgaaatctggccagggtgaacccctggacgactatgtgaacacccagggagcaagcctgttttctgtgaccaagaaacaactgggcgctgggtcgatcgaagagtgtgcagccaagtgcgaggaggatgaggaatttacatgccgggcatttcagtaccactccaaagagcagcagtgtgtgatcatggccgagaatcggaaatcctccataatcatccggatgagggatgtcgtcctctttgagaaaaaagtttacttgagcgaatgtaagacaggcaacggcaaaaattatcgagggacaatgagcaagacaaaaaacggaatcacctgccagaaatggtcgtctaccagcccgcacagacctcgcttcagtccagccacccatccttctgagggcctcgaggaaaactactgcagaaatcccgataacgacccccaaggtccttggtgctacaccactgatccagagaagcgatacgattactgcgacattttagagtgcgaggaggagtgcatgcactgtagtggcgagaactacgatggcaagatatccaagacgatgagcggtctggaatgtcaagcttgggattcacagagcccccatgctcacggatacataccatctaagtttcctaataagaatctgaagaagaactattgtcggaacccagacagagagctacggccttggtgttttactactgacccaaataaacggtgggagttgtgcgatatccctcggtgtaccacccctcctccttcatctgggccaacttaccagtgccttaaaggcaccggggaaaattatagggggaatgtagctgtcactgttagcggacacacttgccaacattggtcagcccagacccctcacacacacaatcgcaccccagaaaattttccttgtaagaacctggatgaaaattattgccgtaaccccgacgggaagagggcaccatggtgtcatactaccaactcccaggtgcggtgggaatattgcaagatccccagctgcgacagctcacctgtctctacagagcagctggcccctacagccccccctgaactgacccccgtggttcaggactgctatcacggtgacggccagagttatcgcggtacctcatctaccactactaccggtaaaaagtgccaaagctggagctcaatgaccccgcacaggcaccagaaaactccggagaattatcccaatgctgggttgacaatgaactattgtcgaaatccggacgccgacaaaggtccctggtgcttcacaacagatccatcagtccgatgggaatactgtaatttgaagaagtgcagcgggacagaggcctccgttgtcgctccgccgccggtcgtacttctgccagacgtggagactccatcggaagaggattgtatgttcggaaatggcaagggataccgcggcaagagagccactactgtgactggaacgccctgccaggattgggcagcgcaagaaccccatcgacattctattttcacacctgagactaacccccgggcaggactggagaaaaactactgtagaaaccccgatggagacgtgggcggtccctggtgttacaccacgaaccctcgaaaactctacgactactgcgacgttccccagtgcgccgctcccagctttgactgtggaaaaccccaggttgagcctaagaaatgtcctggcagagtggtcgggggatgcgttgcccatccccatagttggccatggcaagttagtttgcgcaccaggtttggaatgcatttttgcgggggcactcttatctcaccggaatgggttctcacagccgcgcattgtcttgagaaatcacctcgtccgtcttcctacaaggtgatcctcggtgcccaccaggaggtaaacttggaaccccatgttcaggaaatagaggtaagcagactctttttggaacccactagaaaggatattgcgcttcttaaattgtcttcaccggccgtgattactgacaaagtgattcccgcttgtctcccatcacctaattatgtcgtcgctgatagaactgagtgtttcataaccggttggggcgaaacacagggcacctttggcgctggcctgctgaaagaggcccagctgccagtgattgaaaataaagtgtgcaacagatatgaatttctgaacgggcgggtgcagtctactgagctgtgcgcgggacacctggcaggaggaactgactcttgccagggtgactctggaggaccccttgtgtgtttcgagaaagacaagtatatcctgcagggggtgacgtcctgggggctagggtgcgccagaccaaacaagcctggtgtctacgttagagtttctaggtttgtcacctggatagagggggtgatgcgcaacaat

SEQ ID NO: 6607 - DNA, 2430 bp, Artificial Sequence
  derived and/or modified sequence
atggagcataaggaagtggtattgctgttactgctatttctgaagagtgggcagggggagccactggacgattacgtaaatactcagggggcttcactgttctctgtcaccaaaaagcagctcggggctgggtctatcgaggagtgtgcggcgaaatgtgaggaggacgaggagttcacgtgtcgcgcctttcagtaccactccaaggagcaacagtgtgtgattatggctgaaaaccgcaaatcctccattatcatccggatgcgggacgtggtcttgtttgaaaagaaggtctacctcagcgagtgcaaaactggcaacgggaagaattatagaggaaccatgagcaagacgaaaaatggaattacttgtcagaaatggagcagtacatcgcctcacagacctcgtttctcccccgccacacatccaagcgagggcttggaagagaactactgtagaaatcccgacaatgacccccagggtccttggtgttataccacggacccagagaaacgctacgattattgtgacattttggaatgtgaggaggaatgtatgcattgcagtggggagaactatgacgggaaaatttccaagactatgtcgggtctagagtgccaggcatgggactctcagtccccccatgcccacgggtatataccttccaagttccccaataagaacctcaagaagaactactgcagaaatcctgaccgagagctccgcccatggtgtttcaccaccgaccctaataagcggtgggagttatgtgatatacccagatgcaccacacctcctcctagctcagggcccacctatcagtgtctcaaagggacgggcgaaaattatagaggtaacgtggccgtgacggtgagcggccacacatgccagcattggtcagcccagaccccacacacacacaatagaactcctgagaacttcccatgtaagaacctggatgaaaattactgccgaaatccagacgggaaacgcgctccttggtgtcatacaaccaattctcaggttagatgggaatattgcaagattccctcttgcgattctagccccgtctctaccgagcagctggccccaaccgcaccacccgaactgactcctgtcgtgcaggactgctaccacggagacggtcagtcataccggggcacctctagcacaaccacaactggaaaaaagtgccaatcttggtctagcatgactccgcaccgccaccaaaagacccccgaaaactaccctaacgcaggccttacaatgaactactgtaggaatccagatgccgacaaggggccctggtgtttcaccaccgaccctagcgttcggtgggaatactgcaatctgaagaaatgcagtgggacggaagcatcagtagttgccccaccaccggtggtgctactgccggacgtggagacaccgtcagaggaggattgtatgttcgggaacgggaagggttacagaggcaaacgggctacaaccgtgaccggtacaccatgccaggactgggctgcacaggagcctcaccgtcattccatattcactccagaaaccaatcctcgtgctggactggagaaaaactactgtcgcaatccagatggtgatgtaggcggcccctggtgttatactaccaatccaagaaagctgtacgattactgcgacgttccgcagtgtgcggcaccgtccttcgactgtggtaagccccaggtggaacccaagaagtgccccggccgggtggtcgggggatgcgttgcgcatcctcactcctggccgtggcaagtttccttgcgaacaaggtttgggatgcatttctgtggcgggacattgatctctccggagtgggtgttgactgctgcccattgcctggagaagagcccacgaccatctagttataaagttatactcggcgctcaccaggaagtcaatctggagcctcatgtgcaggagattgaagtgtctcgcctctttctggagccaacacggaaggacatcgccctgctcaaactctcgtccccagcagtgattacggacaaggtaattccagcgtgtttaccatctccgaattacgtggtggcagaccggacagagtgtttcatcactggctggggtgaaactcagggaacttttggggcaggcctgctaaaagaagcccagctcccggtcatagaaaataaggtgtgcaatcgatacgagttccttaatgggcgagtgcaaagcacagaactttgtgcaggacacctcgcagggggcactgactcttgtcagggggattctggaggtccacttgtgtgttttgagaaggacaagtatattctgcagggtgttacctcttgggggttaggctgtgcacggcccaataaaccaggggtgtatgtgagagtgtcacgcttcgttacctggatcgagggcgtcatgcgaaacaac

SEQ ID NO: 6608 - DNA, 2430 bp, Artificial Sequence
  derived and/or modified sequence
atggaacacaaggaggtagttttgctcttgctgctgttcctgaaatccggacagggcgaaccccttgatgactatgtgaacacgcagggggccagtctgttttcagtgacaaagaaacagctcggagccggcagcatagaggagtgtgcagccaagtgtgaagaggatgaagagtttacatgcagggcttttcaataccacagtaaagaacagcagtgtgtaatcatggcagaaaaccgaaagtcatctatcattattaggatgcgcgatgtggtgctgttcgagaaaaaagtttatctcagcgagtgcaagacaggcaacggcaagaattatagaggcacgatgtctaaaaccaagaacgggataacatgccagaagtggagctcaacatctccccatcgccctagattcagcccagccacacatccctccgagggtttggaagagaattactgcaggaatccagacaacgacccccagggcccatggtgttacactacagacccggaaaagaggtacgattactgcgacattctggagtgcgaggaggagtgcatgcattgttcaggcgagaactacgacgggaagataagcaagaccatgtccggtctggagtgtcaggcctgggacagccaaagcccacacgctcacggctatatcccctcaaaatttcctaataagaacctcaagaaaaactactgccggaaccctgacagggagctgcgcccttggtgttttacgactgatccaaataaacggtgggagctgtgtgacattccaaggtgcacaactccaccaccctccagtgggccgacctaccagtgcttgaaaggaactggcgagaactaccggggaaacgtcgcagtcaccgtcagtggccacacgtgtcagcattggtcagctcagaccccgcacactcataatcggacccctgagaattttccctgtaagaatctggatgagaactactgcaggaaccctgatgggaagagagcaccctggtgtcatacaactaacagccaagttaggtgggaatattgtaagatcccaagctgcgactcttctccagtgagtactgaacaacttgctccaacggcccctccagagttgactcctgtggtgcaggactgctaccatggcgacgggcaaagttaccgcgggacaagctcaaccacaacaaccggtaaaaagtgtcagtcctggtctagcatgacaccacaccggcaccaaaagactccagagaactatcccaacgcaggactgaccatgaactactgtagaaacccagacgcagacaaaggtccctggtgctttacaaccgacccttccgtgcggtgggagtactgcaatctcaagaaatgctcaggcaccgaggccagtgtagtagctccccctccggtggtcctgctgccagacgtggagaccccctctgaggaggattgcatgtttgggaacggcaagggctatcggggcaagcgggctactaccgtaactggtacgccatgccaagattgggctgcccaggagccccaccgacacagtatcttcactccagaaacaaaccctcgcgccggactggaaaagaattactgccgcaacccggatggagatgtaggagggccctggtgctacacgaccaacccaaggaaactttatgactactgtgacgtccctcaatgcgcagccccgtcctttgattgcgggaaaccacaggtcgagcccaaaaagtgtccggggagagtggttggcggttgtgtggctcacccccactcctggccctggcaagtttccctgaggacccgattcgggatgcatttctgcggtgggactcttatcagccctgagtgggttttgactgctgcgcactgtctggagaagtcacccagaccaagctcctacaaggtcattcttggcgcccaccaggaggtcaacctcgagccccatgttcaggagatcgaagtaagccggctgtttctcgagcccacacgcaaggacatagcattgctgaagctttccagcccggcagtgattacggataaggtaatacctgcctgcctgccgagccccaactacgtggtcgccgacagaacggaatgcttcattactggctggggcgagacacagggcacatttggcgccgggctgctcaaagaagcgcagttgcccgttatcgagaataaagtgtgtaacaggtacgaattcctcaatggaagggtgcaaagcacggaactgtgtgccggccaccttgctgggggaaccgactcatgtcaaggtgactctggaggacccctggtctgttttgaaaaagacaagtacattctgcagggtgttaccagctggggcttgggctgcgcgcgcccaaacaagcctggtgtgtacgttcgagtttctcgattcgttacatggattgaaggcgtcatgagaaataat

SEQ ID NO: 6609 - DNA, 2430 bp, Artificial Sequence
  derived and/or modified sequence
atggagcataaggaagtggtgctgctcttgctgctgtttcttaagtcgggtcaaggagagcctcttgacgattacgtcaatactcagggcgcttcattgttttcagtcactaagaagcagcttggcgccggcagcattgaagagtgtgcagccaagtgtgaagaagatgaagaatttacgtgcagggcattccagtaccactcgaaagaacagcagtgtgtcattatggcagaaaaccggaaatcgagcattatcattcgtatgagagatgtcgtgctgtttgaaaagaaggtctatctttcggaatgtaagaccggaaatggaaaaaactaccggggaaccatgagcaaaactaagaatgggattacctgccaaaagtggtcctcgactagccctcatagaccaaggtttagcccagccacccaccctagcgaaggacttgaggagaactactgtcgtaatcctgataacgatccacaagggccctggtgttacacgaccgatccagaaaagcgctacgactattgtgatatcctcgaatgtgaagaagaatgcatgcactgttcgggtgaaaactacgacggcaagatcagcaagactatgtcgggccttgagtgccaagcgtgggattcgcagagcccccatgctcacggttacattccttccaagtttcctaataagaacctgaagaaaaactactgccggaaccccgacagagaactcagaccatggtgctttaccaccgaccctaacaaacgatgggaactctgcgatatccctagatgcaccaccccgccaccatcttcaggacctacctaccagtgcctcaaagggaccggagagaactaccgtgggaatgtggccgtgaccgtcagcggacatacctgtcagcattggtccgctcagactccacacacgcacaatcgcacgcccgaaaactttccttgcaagaacctggatgaaaactactgtcgaaacccagatggtaagagagcaccgtggtgtcacaccaccaacagccaagtacgttgggagtactgcaaaattccgtcctgcgattcctcaccagtgtctaccgaacaactggccccaacggcgccccctgagcttactccagtggtgcaagattgttaccatggcgacgggcaatcgtatcgaggcacctcgtcgactactacgaccggtaagaagtgtcaatcctggtcgtcgatgaccccacatcggcatcagaaaacgcctgagaactacccaaacgcaggacttaccatgaattactgccggaatcctgacgctgataaggggccctggtgctttactaccgatccatcggttcgctgggagtattgtaacctcaaaaagtgttcgggaaccgaagcctcggtggtggcacccccaccagtcgtgctcctgccggatgtggagactccgtcggaagaggattgcatgtttggtaacggcaagggatacagaggtaaacgcgcgacgaccgtcaccggaactccatgtcaggactgggccgcacaagaaccccataggcactccatattcacccctgaaactaacccacgggcaggtcttgaaaagaactattgtagaaatcctgatggagatgtcggtggtccttggtgctacactaccaacccacggaagctctacgattactgtgacgtgccccaatgcgcagccccgagctttgattgcggaaaaccccaggtcgaacctaagaagtgccctggtagagtggtgggcggctgtgtggcacatcctcatagctggccgtggcaagtgtcgctgagaacccggtttggaatgcatttttgtggaggaactctgatttcgcctgaatgggtgctgacggcagcacactgtcttgagaagagccctcgccctagcagctacaaggtcattctcggcgcccaccaggaagtgaatctcgagccgcacgtgcaagagattgaggtgtcgcggctgtttttggaaccgacccgaaaagacatcgcgctcctcaagctctcatcccccgccgtgattactgacaaggtgatcccggcatgtctgccatcgcctaactacgtcgtggcagatagaacggaatgtttcataaccgggtggggagaaacccaaggtacctttggtgccgggttgctgaaggaggcgcagcttcccgtgatagaaaacaaggtctgtaacaggtacgaatttctgaatgggcgcgtgcagagcaccgagctgtgcgcaggccaccttgctggcggtaccgattcatgtcagggtgatagcggagggcctctggtttgttttgaaaaagataagtacattctgcaaggagtgactagctgggggctcggttgtgctcgaccaaacaagcctggagtctacgtgagggtatcgagattcgtcacctggatcgaaggagtgatgcgcaataac

SEQ ID NO: 6610 - DNA, 2430 bp, Artificial Sequence
  derived and/or modified sequence
atggagcataaggaggtggtactgctccttcttctgtttctcaaaagcgggcaaggagaacccctggacgattacgtgaacacccaaggcgcatcgctttttagcgtgactaagaaacaactcggggctggctcgattgaggaatgtgcggcaaaatgtgaagaggatgaagagttcacctgtagggcattccagtaccattcgaaagaacaacaatgtgtgataatggcggaaaaccgtaagagctccataatcatccgaatgcgggatgtcgttctgttcgaaaagaaggtgtacctttccgaatgtaagactggaaatggcaagaactaccggggaacgatgtcaaagacgaaaaatggaattacctgccagaagtggtccagcacgtcaccccatcggcccagatttagccccgcaacccatccaagcgaagggctggaggaaaactactgccgcaacccggataatgatcctcagggtccatggtgctacactaccgatccagagaaaaggtacgattactgtgatatccttgaatgtgaggaggaatgtatgcattgttcaggcgagaactacgacggaaagatctcgaaaaccatgtcaggacttgaatgccaggcatgggattctcagagcccccatgctcacggttacattccttccaaattcccaaataagaaccttaagaaaaactactgtcgtaatccagacagggaactccgtccttggtgttttactacggacccaaataagagatgggaactctgtgatattccaaggtgcactacccctcccccatcctccggtcctacttaccagtgcctgaagggaaccggtgaaaactacagaggaaacgtcgcggtcacggtgtcgggccacacctgtcagcattggagcgcacagacccctcatactcacaacaggactcccgaaaacttcccctgcaaaaacttggatgaaaactattgtaggaaccctgacggtaaacgcgccccgtggtgtcacacgacgaattcgcaggtccgttgggagtactgtaagattcccagctgtgattcgtcgccagtgtcgaccgaacagcttgcgcctactgctccccccgagctgactccggtcgtgcaagattgctaccacggtgatgggcaatcatatcgagggactagctcgactacgactactggtaaaaagtgtcagagctggtccagtatgaccccacatagacatcaaaagacccctgagaactatcccaatgccggtctgaccatgaactattgccggaacccagacgcagacaaggggccgtggtgtttcaccaccgatccgtcagtgcgttgggaatactgtaacctgaagaaatgttcaggtactgaagcaagcgtggtcgcacctccacctgtcgtccttctgcctgatgtggagactccatcggaagaagattgcatgttcggcaacggtaaaggataccgggggaagcgagccactacggtgaccggtactccgtgtcaagattgggctgcacaagaacctcataggcactctatcttcactcctgaaactaatcctcgcgcgggattggaaaagaactactgcaggaacccagatggcgacgtgggagggccctggtgctataccactaacccaagaaagctgtatgattactgtgacgtgcctcaatgtgctgcaccatcatttgactgcgggaaaccacaggtcgaaccgaagaaatgccccgggagagtcgtcggaggttgtgtggcgcaccctcactcctggccctggcaagtgtccctgcggacccgctttggaatgcatttttgtggtggtaccctgatctcaccagaatgggtgcttaccgcagcgcactgtcttgaaaagtcgccacgaccttcatcgtacaaggttattcttggcgcgcatcaagaagtgaaccttgagccacatgtgcaggaaattgaagtctcgcggctgttcctcgagcctaccaggaaggacattgcactgctgaaactgtccagccctgcggtgattactgataaggtgatccccgcatgccttccatcccctaattacgtcgttgcagatcgaactgagtgcttcattactgggtggggtgagacgcaaggaacttttggcgcagggctccttaaagaagcccagctgccagtgattgaaaacaaagtgtgtaatcggtacgagtttctcaacggtagagtgcaatccaccgagctgtgtgcaggccatctcgcagggggcaccgattcgtgccagggtgattccggtggtcctttggtgtgctttgagaaagataagtatattctccagggagtgacttcctggggtttgggctgcgcccgtccaaataagccgggtgtctacgtgagggtgtcgcgttttgtgacttggattgaaggtgtgatgcgcaacaac

SEQ ID NO: 6611 - DNA, 2430 bp, Artificial Sequence
  derived and/or modified sequence
atggaacataaagaggttgtactacttcttcttcttttccttaaaagtggacagggtgagccgctcgatgattatgtgaatacccaaggggcctccttgtttagcgttaccaagaagcaattaggagctggcagtatcgaggagtgcgccgccaaatgcgaagaggacgaggaattcacctgcagggccttccaatatcattccaaagagcaacagtgcgtgattatggcggaaaacaggaaatcctcaattattatccgtatgagggatgttgtattgttcgagaagaaggtatacctttcagaatgcaagaccgggaacgggaagaattacagaggaaccatgagcaaaactaagaacggaataacatgtcaaaagtggtcctccacatccccccatcgcccaagattttcaccagctactcacccgtccgagggtcttgaagagaactactgccggaatcctgataacgatccacagggtccttggtgttacaccactgatccagagaagaggtatgattattgtgatatccttgaatgcgaggaggagtgcatgcattgcagtggtgagaattatgacggcaaaatttcaaagactatgtctggcttggagtgccaggcttgggactcccagtcaccgcatgcccacggttatattccctccaaatttcctaacaagaacttgaaaaagaattattgtagaaatccagacagagagttgcgcccgtggtgctttactactgatccgaacaaaagatgggaactttgtgacattccaaggtgtaccaccccccctccttcttcaggtccaacttaccagtgtttgaaaggaacaggagagaattatagaggtaacgtcgctgtcacagtttctggtcatacctgccaacactggtccgctcaaactccacatactcacaaccgtacccctgaaaacttcccatgtaaaaatctggacgaaaactattgtagaaaccctgatggaaaacgagcaccgtggtgccatacaacaaactctcaggtacgttgggagtactgtaagattcctagctgtgattccagtcctgttagtacggagcaactcgcacctacagcccctccagagcttaccccagtggttcaggattgctatcacggtgacggccaaagctatcgaggcaccagcagcacgacaaccactggaaaaaagtgccaaagttggtcatccatgactccccatagacatcagaagacgccagagaactatccgaacgctggattgacaatgaattattgcagaaacccagatgccgataaaggaccatggtgctttaccacagatccatctgttcggtgggagtactgcaatctcaaaaaatgctcggggactgaagcgtctgttgttgccccccctcctgtcgtgttgcttccagacgtcgagaccccgtccgaagaagactgcatgtttggcaatggtaaggggtaccgtgggaaaagggctactactgtaactgggacaccatgtcaagattgggctgcacaagagcctcatcgccacagtattttcactccagagaccaatcctagagcagggctcgagaaaaactattgtaggaacccagatggcgacgtgggaggtccatggtgttatacaacgaacccacgtaagttgtatgactattgtgatgttcctcaatgtgccgctccgagctttgactgcggtaagccgcaggtggaacctaaaaaatgcccaggacgagttgtcgggggatgcgttgcacatccacattcctggccatggcaggtttcacttagaactcgtttcggcatgcatttctgtggtggtactctaatttcaccggagtgggtcctcacagcagctcattgtcttgagaagtctccaagaccatctagctataaggtgatcttgggtgcacaccaagaagtcaatttggaacctcacgttcaagaaatcgaggttagtaggctgttccttgaaccaactcgtaaagatattgctttgttaaagttatcgagtcccgccgtgattaccgataaggtgatccctgcttgccttccctctcccaattacgtcgttgcagaccgaaccgaatgttttataacaggttggggagaaacccaagggactttcggggccggtcttctgaaagaagcacaattgcccgttattgaaaataaagtatgtaataggtatgaattccttaacggtcgtgtccagagcaccgaactctgtgcaggacatcttgctggcggaacagattcgtgtcagggcgactccggcggtcctctagtctgtttcgaaaaggataagtacatacttcagggagtcactagctggggcctagggtgtgcacgaccaaacaagcctggtgtttatgtacgtgtgtctcgatttgttacttggatcgaaggtgttatgcggaacaat

SEQ ID NO: 6612 - DNA, 2430 bp, Artificial Sequence
  derived and/or modified sequence
atggaacacaaagaggttgtgctgcttctgctgctgtttcttaaatcggggcagggagagccactggatgattacgtcaacactcagggcgcatccctcttttcggtgactaagaagcaactgggcgcaggatccattgaagaatgtgcagctaaatgtgaggaagatgaggaatttacgtgtcgggctttccagtaccattcgaaggagcagcaatgtgtgatcatggccgaaaatcgcaagtcctcgattatcatacggatgcgggatgtggtgctttttgaaaagaaagtctacctttcggagtgcaagactgggaacggaaaaaactacagaggtaccatgtcaaagacgaagaatggaataacttgtcaaaaatggtctagcaccagccctcatagaccacggttttcgccagcgactcatccctccgaaggactggaagagaactattgtagaaaccctgataatgacccccaaggcccttggtgttacactaccgatcccgaaaagcgatatgactactgtgatattcttgagtgtgaggaagagtgtatgcactgctcgggcgagaactacgacgggaaaatctccaagactatgtctggtttggaatgtcaagcatgggactcccagtctccacatgcacatggatacattccctctaagttccctaacaaaaatctcaaaaagaattactgtaggaaccctgatagggaactgcgaccttggtgctttactactgatcccaacaagcggtgggagctgtgcgatattccacgttgtaccacgcctcctccttccagcgggccaacctaccaatgtctcaaggggacgggggagaattacagaggtaacgtcgcggtcactgtgagcggacacacttgtcaacattggtccgcccaaacccctcatacccacaatcgaacgccagaaaacttcccatgcaagaaccttgatgagaattactgccgcaatcctgacggcaagcgcgcaccttggtgtcataccactaactctcaagttcgctgggaatactgtaagatccccagctgcgactcatcgccggtgtcaaccgaacagctcgcgcctaccgcacctccagaattgaccccagtggtgcaggattgctatcatggtgatggacaatcatacagaggaacctcttcaactaccaccactggtaagaagtgccagtcatggtcatcaatgacccctcacagacaccagaaaactccagagaactaccccaatgcgggacttactatgaactattgccgcaatccagatgccgacaagggtccctggtgttttacgaccgacccctcagtgagatgggaatactgcaatcttaagaaatgctccggtaccgaagcatcggttgtggcccctcccccggtggtgcttctgcccgatgtggaaacgccatccgaagaagattgtatgtttggaaatggaaaagggtatagagggaagcgggccactactgtgactgggaccccttgtcaagattgggcagcccaggagccacataggcattcaattttcactccagagacgaacccacgtgcaggactcgaaaagaactactgtcggaaccccgatggagacgtcggtggcccttggtgctacactacgaacccgcgtaagctgtacgactactgcgacgtcccgcaatgtgcagccccttcgtttgactgtggaaaacctcaggtggaaccaaagaaatgcccaggtagagtggtcggaggatgcgtggcccatcctcattcctggccttggcaagtctcccttcgcaccagattcggcatgcacttttgcggtggtactctcatatctcctgagtgggtgctgaccgcagcgcattgtttggagaaaagcccccgaccgtcatcgtacaaggtgatcctcggagcgcaccaggaggtgaacttggaaccccacgtccaggagatcgaagtgtcgagactgttcctcgaaccaaccagaaaggacattgcccttctgaagctgtcgtcacccgcagtgattaccgataaggtgattccagcatgtctcccatcacctaattacgttgtcgctgacagaactgaatgttttatcactggttggggtgaaactcagggaaccttcggagccgggctgttgaaggaggcacaacttcctgttatcgaaaacaaggtgtgtaaccgttacgagttcctcaacggcagggtgcagagcaccgaactttgtgcaggtcatcttgccgggggtactgactcatgtcaaggtgactccggaggaccacttgtgtgcttcgaaaaagataagtacattctgcaaggagtgacttcgtggggcctcggttgcgcacgaccaaataagccaggagtctacgtccgtgtttctaggtttgtgacttggattgaaggagtcatgcgcaataac

SEQ ID NO: 6613 - DNA, 2430 bp, Artificial Sequence
  derived and/or modified sequence
atggagcacaaagaagtagtgttgttgctgctcctgtttctcaaatcaggtcagggtgagccgctggacgactacgttaacacccagggtgcgagcctcttcagcgtgacgaagaaacagctgggtgccggcagtatcgaagaatgcgccgccaagtgtgaagaagacgaggagttcacttgtcgcgcattccagtaccactcaaaggagcagcaatgcgtcattatggcggaaaaccgcaaatcctctattattatacgcatgagggacgtcgtgctgttcgagaagaaggtctacctgagcgagtgtaagaccggtaacggaaaaaactataggggaacgatgagtaagacgaaaaacggaatcacttgccagaagtggtcctccacgtcaccacacagacctagattcagtcccgccacacaccccagcgaaggcctggaagagaactactgtcgcaatccggacaacgatcctcaaggtccctggtgttatactactgatcctgagaaaagatatgattattgcgatattcttgagtgcgaggaggaatgtatgcactgttctggtgagaattacgacggcaaaatctctaagaccatgagcggccttgagtgccaggcgtgggacagccaatcacctcacgcacatggatatattccttcaaaattcccgaataagaatctgaagaagaattactgcaggaaccctgatcgcgagctgcgcccctggtgcttcaccactgacccgaataaacgctgggaactctgcgacattccgagatgcacaaccccccccccatcttcaggacctacctaccagtgtctgaagggaacaggagagaactaccgcggtaacgtagccgttaccgtgtccggccacacatgccagcactggagtgcccagacccctcatacccataatcgcacacccgaaaactttccatgtaagaatttggatgaaaactactgtcgcaacccagatggtaagagggccccttggtgtcacacaaccaatagccaggtgcgctgggagtactgcaagataccctcatgtgactctagtccggtctctaccgagcagctcgccccgaccgcacctccggagcttacccccgtggtgcaagattgctaccacggtgacggacagtcctaccgcggaacgtcttctacaacaactaccggcaagaagtgtcaaagctggtcctcaatgacaccacatcgccatcagaaaacgccagagaattacccaaacgccggtctgaccatgaactactgtcgcaatccggacgcggacaaaggcccctggtgctttaccaccgaccctagcgttaggtgggagtactgcaacctcaagaagtgcagcggtaccgaagcttctgtagttgcacctcctcccgttgtgctcctccccgacgtggaaacgccttcagaggaggactgtatgtttggtaacggtaaaggttatagaggaaagagagccaccacagtcactggaacaccatgccaggattgggccgcgcaggaaccccacagacactctattttcactccggagactaaccccagagctggcctggaaaagaactattgcaggaaccccgacggagatgtgggaggtccctggtgctacaccaccaatcctcgcaaattgtatgactactgtgatgttccccagtgtgccgctccttctttcgattgtggtaaaccccaggtagaaccaaagaagtgccccggacgcgtggtgggaggctgcgttgcccacccccactcatggccttggcaggtgtctctcagaacacgcttcggcatgcatttttgcggtggcaccctgatcagtccagagtgggtcctgacagccgcgcactgccttgaaaagagtccaaggccatcatcctacaaggttatactgggagcccaccaggaggtcaacctggaaccgcacgtgcaggaaattgaagtgtccaggctgtttctggagccaactaggaaagatattgccctcctgaaactgagttcccctgcagttataactgacaaggtaattcctgcctgtctgccaagccccaactacgtggtggccgacaggactgagtgttttatcactggctggggagagacccagggtaccttcggtgcaggcctcctgaaggaagcccagctgccagtgatagagaacaaggtctgcaacaggtacgagttcctgaacggcagggtgcaatctactgagctttgtgcgggccatcttgctggtggtaccgattcatgccagggtgacagtggaggtccactggtttgcttcgagaaggacaagtacatcctgcagggtgtcacatcctggggcctcggctgcgcaagaccaaacaagcccggagtttatgtaagggttagcaggtttgtgacatggatagagggagttatgaggaacaac

SEQ ID NO: 6614 - DNA, 2430 bp, Artificial Sequence
  derived and/or modified sequence
atggagcacaaagaagtagtgctccttctcctattgttcttgaaaagtggacagggagaaccacttgacgattacgttaatacacagggcgcatccttgttcagcgtgacgaagaaacagttgggagctggtagcatcgaagagtgcgctgcgaagtgtgaagaagacgaggaattcacctgcagggcgtttcaataccatagtaaagagcagcagtgtgtgatcatggcagaaaacagaaagagctccattataatccgcatgagagatgtggtgctctttgagaaaaaggtctatcttagtgaatgtaagacaggaaatggcaaaaactaccggggcacgatgtctaagacaaaaaacggcattacatgccagaagtggtctagcaccagcccccaccgccccaggttcagcccagccacccatcctagcgaggggctggaggagaactactgcagaaaccccgacaacgatccccaaggcccttggtgctataccacagatcctgaaaaaaggtatgattactgcgatatactcgagtgcgaggaagaatgcatgcattgcagcggagagaactatgacggaaaaatctctaagactatgtctggattagagtgccaggcctgggactctcaatcacctcatgctcacggatatatcccttctaagttccccaacaagaatctgaaaaaaaattactgccgcaacccggaccgggaacttaggccctggtgctttacaacagaccctaataagaggtgggagttgtgcgatatcccacgctgtaccacacctcccccgtcttctggtcctacatatcaatgcctgaaaggaaccggcgagaattaccggggtaacgtggccgtgactgtgagcggacacacctgtcagcattggagtgcccagactccgcacacgcacaatcgcacaccagaaaacttcccctgcaaaaatctcgacgagaactactgcagaaatccagatggcaaaagggctccatggtgccatactacaaacagtcaagttcgctgggagtactgtaaaataccaagctgcgacagctctccagtgagcacagagcagctcgcaccgaccgcacctcctgaacttacccctgtagtgcaggactgctatcatggtgatggtcagtcctaccgcggaactagttcaaccaccaccaccgggaagaaatgccagtcatggtcaagcatgacccctcaccggcatcagaaaactccggaaaattatcctaacgcagggcttacaatgaactattgtagaaacccagatgcagacaaaggcccatggtgcttcacaacagacccgagcgtgcggtgggaatactgcaacttgaagaaatgcagcggaaccgaggccagcgttgtggcacctccaccagtggtcctccttccagacgtggaaaccccatccgaggaagactgtatgttcggcaacgggaaggggtatcgcggtaaaagggctactactgttactggaactccctgccaagattgggcagcccaggaacctcaccggcactctatattcacccctgaaaccaatccacgcgctgggctcgagaagaattactgccggaaccctgacggtgatgtgggcggaccttggtgctacacaacaaaccctcgtaaactttatgattactgtgacgtgcctcagtgtgctgcacccagcttcgattgcggcaagccacaagtggaacctaagaagtgccctggcagagtggtggggggatgcgttgcccaccctcactcttggccatggcaggttagcctcaggaccagatttggaatgcacttttgcggaggtacactgatcagtcctgaatgggtactcactgctgctcactgcctggagaaaagtccgcgccctagcagctataaggttatcttgggagcgcatcaggaagtcaacctcgaacctcatgtgcaagagatcgaggtgagcaggctgtttcttgagcccactaggaaagacatcgctctgcttaagctgtcttctcctgcagtgatcacagacaaagtgattcccgcctgcctaccttctccaaactatgtagtggccgataggaccgaatgcttcatcaccggatggggtgaaacacagggcacatttggcgcaggattgctgaaagaagctcaattgccagtcatagagaacaaggtctgcaacaggtacgagtttctgaatggtagagttcaaagcaccgagttgtgcgccggccatctcgcaggtggaactgacagctgtcagggtgactctggggggcctcttgtctgtttcgagaaggacaagtacatcctgcagggcgtcactagctggggcttgggatgtgcccgcccaaacaaaccgggcgtctacgtgagggtgtcccgttttgtgacctggatcgagggcgttatgaggaacaac

SEQ ID NO: 6615 - DNA, 2430 bp, Artificial Sequence
  derived and/or modified sequence
atggagcacaaggaggtcgtactactgttgctgctctttctcaagtcaggtcagggagaacccctggatgactatgtgaacacacagggggcctcactcttttctgttaccaaaaaacagctcggagctgggtccatcgaagaatgtgctgccaaatgcgaggaggacgaggagttcacttgcagagctttccaataccacagcaaagaacagcagtgcgtgatcatggccgaaaaccgcaaaagctccatcatcatcagaatgagagatgtagtgctgttcgaaaagaaggtgtatcttagcgaatgcaaaaccggaaatgggaaaaactaccggggcaccatgtcaaagacaaagaatggaatcacctgtcaaaaatggtccagtacctccccccatcggccgcgcttcagcccagcaacacacccgagcgagggattggaagagaactactgtcgtaaccctgacaacgacccacaaggaccctggtgctatacaactgacccagaaaaacgctacgactactgcgacattctggaatgcgaggaggagtgcatgcactgcagtggcgagaactatgatggtaagatcagtaaaaccatgtcggggctcgagtgccaggcttgggattctcagtcgccacacgcacacgggtacatcccatctaagttccccaataagaacctgaagaagaactactgtaggaatcccgaccgagagcttaggccctggtgcttcaccacagatccaaacaagcggtgggaactctgcgacatccctcgctgtactacaccacctcctagctccggtcctacttaccagtgcctcaaaggaaccggcgagaattaccggggtaatgtagccgtgacagtcagcgggcacacttgccaacactggtcagctcagacgccccacacgcataaccggacccccgagaattttccgtgtaaaaatctggatgagaactattgccgaaatccggacggaaaacgggcgccatggtgccacactacaaatagtcaagtgcgatgggagtattgtaaaatcccttcctgtgacagttctcctgtttctaccgaacagttagctcccaccgccccgccagaactgacccccgtggtgcaagactgttaccacggcgacggccaatcatatagagggacatcgagcacaactacaaccggcaaaaaatgccagtcgtggagctcaatgacaccacacaggcaccaaaagacaccggaaaattatccgaacgcaggcctcactatgaactattgtcgtaaccctgatgccgacaagggtccgtggtgtttcaccaccgatccatcagtcagatgggagtactgtaacctgaagaaatgttccggcaccgaggcttctgtcgtggcccccccgcccgtggttctcctgcctgacgtggagacccctagcgaggaagactgtatgttcggcaacggcaagggatacagaggaaaaagagccaccaccgtgactggtaccccctgccaggattgggctgcccaggaaccccatagacattctatcttcacgcccgagaccaacccccgtgccgggttagagaagaactactgccgcaaccctgatggtgacgttggtggaccctggtgctataccaccaaccctcgcaagctgtatgactactgcgatgttccacagtgcgcagccccttcattcgattgtggaaagcctcaggtagaaccaaagaagtgtcctggtcgagtcgtcggcggctgcgtggcccatccccactcttggccttggcaggtgtcactgcgaaccagattcgggatgcacttttgcgggggcacactcatctcaccagagtgggtgctcaccgccgctcactgcctcgagaaatcccctcggccaagttcttacaaagtaattctcggggcacatcaggaagtaaacctcgaacctcatgtgcaagagattgaggtatcaagactcttccttgaacctacacgtaaggatatcgccctcctgaaactgtcctcgccggctgtcataaccgataaggtgattcctgcctgccttccctccccaaactacgttgtagcagatcgaactgaatgtttcattaccggctggggagaaacacaggggacattcggagccggtctgttgaaggaagcacaactgccagtcatcgagaacaaagtctgcaaccggtatgagttcctgaatgggcgggtgcaatctacagagctgtgcgctgggcatctggccgggggaaccgattcttgccaaggcgattctggaggtcctctggtatgctttgagaaggataaatacattctccagggggtcacttcctggggcctgggctgcgctcgacctaacaagcccggagtatacgtgagagtgtcccgatttgtcacatggattgaaggagtgatgaggaacaat

SEQ ID NO: 6616 - DNA, 2430 bp, Artificial Sequence
  derived and/or modified sequence
atggagcataaggaagtggtcctgcttttgctcctgtttctcaagtcgggacaaggggaacctcttgatgattatgtgaatactcaaggggcctccctgttctcagtgactaaaaagcaactcggtgccggaagcatcgaagagtgtgcagcaaaatgcgaagaggacgaagagtttacctgtagagctttccagtaccactccaaggaacaacaatgcgtgattatggccgaaaacaggaaatcgagcatcattatccgaatgagagacgtggtgctcttcgagaagaaagtctacctttcggaatgtaagaccggcaacggaaagaactataggggaaccatgagcaagaccaaaaacggcattacctgccaaaagtggagctcaacctcgccccatagaccaaggttttccccggcaactcacccttccgagggtcttgaagaaaactattgtcgcaaccccgataacgatcctcagggcccatggtgctataccaccgatccagaaaagagatacgattactgcgacatcctcgaatgcgaggaagagtgtatgcattgttcgggagagaactacgacggaaagatatctaaaacgatgtcagggctcgagtgccaggcatgggattcacaatcgccgcacgcccacggctacataccgagcaaatttccaaacaaaaaccttaagaagaactactgtagaaaccctgatcgggagctcaggccgtggtgttttaccacggaccccaacaagcggtgggaactctgcgatattcctcgctgcaccacccctccgccatcatccggccctacttaccagtgtcttaagggtactggagagaattacaggggcaacgtggcagtgactgtgtcaggccacacttgccaacattggtcggcacagaccccccatacccataaccgtactccagagaacttcccttgcaagaatctggatgaaaactactgcaggaaccccgatggtaagagagccccttggtgtcataccactaattcccaagttcgctgggaatactgtaagattccatcgtgtgatagcagcccggtcagcaccgaacagctggcgccaactgcaccacccgagctcaccccggtggtgcaagattgttaccatggagatggtcaaagctaccgcggaacttcgagcactaccactaccggaaagaaatgtcaatcctggtcaagcatgacgcctcacagacaccaaaaaactccagaaaactatccaaacgcaggactcaccatgaattactgtcgtaatccagacgcagacaagggaccctggtgctttaccactgacccatcggtgcggtgggagtactgtaacctgaaaaagtgttccggtactgaagcatccgtggtcgcgccgccgcctgtggtgctcctgcctgatgtggaaactccgagcgaggaggattgcatgtttggtaatggtaagggatacagggggaagcgtgccactaccgtgactggcaccccctgtcaagactgggcagctcaggaaccacatcgccatagcatctttactcccgaaaccaacccaagagccggtctggagaagaattactgtagaaatcccgacggtgacgtcggcggaccctggtgttatacgaccaatccaaggaagttgtacgattattgcgacgtgccccaatgtgctgccccaagttttgattgcggaaagccccaggtcgaaccgaaaaagtgtccaggacgggtggtgggcggatgtgtggcccacccacactcgtggccttggcaagtgagcctgcgcacccgattcgggatgcacttctgtgggggaaccctcatctcgcctgagtgggtcctgaccgcggcacattgtcttgaaaaatcccctcgccctagttcatacaaggtcatactgggtgctcaccaggaggttaacctggagcctcatgtacaggaaattgaagtgtccagactttttctggaaccaactcggaaagacatagccctgcttaaactttccagcccagcagtgatcaccgataaggtgatacctgcctgcttgccatcaccaaattacgtcgtcgccgacaggactgagtgtttcataactggttggggagaaacccaagggactttcggtgctggacttctgaaagaagcacagctgccagtcattgaaaacaaggtgtgtaacagatacgagtttctgaatggacgggtgcaatcgaccgaactttgcgccggacacctggcgggtggaactgattcctgtcaaggagattccggtggaccactcgtgtgttttgagaaggataagtacatccttcagggagtgacgtcgtgggggctgggttgtgcccggcccaacaagcctggtgtgtatgtgagagtgagcagattcgtgacttggatcgaaggtgtcatgaggaacaac

SEQ ID NO: 6617 - DNA, 2430 bp, Artificial Sequence
  derived and/or modified sequence
atggagcacaaggaggtggtgctgctcctgctgctgttcctgaagtccggacagggtgagccgctcgatgactacgtgaacacccagggcgcctcgctgttcagcgtgaccaagaagcaactgggagccggatccatcgaggagtgcgccgccaagtgcgaagaggacgaggaattcacttgccgggcctttcaataccactcgaaggaacagcagtgcgtgattatggccgaaaatagaaagtcctcaatcattatacgtatgcgggacgttgtgctgtttgagaaaaaagtgtacctgagcgaatgcaagaccggcaacggaaaaaactacaggggaaccatgtcgaaaactaagaatggaatcacttgtcagaagtggtcgagcactagcccccataggccacggttctcacctgccacccatccttcggaaggactcgaggagaactactgcaggaaccccgacaatgatccacaggggccctggtgttacactaccgacccggagaagcggtacgactactgcgacatcctggaatgcgaagaagaatgcatgcactgttccggcgagaattacgacggaaagatctcgaaaaccatgtccggcctcgagtgtcaagcctgggactcacagtcaccacatgcacatggctacattccctcgaagtttccaaacaagaacctcaagaaaaactattgcagaaaccccgatcgcgagctcagaccttggtgttttactacggatcctaacaagcggtgggagctgtgcgatatcccgcgctgtactacgcctccgccgagctcagggcccacctaccagtgcctcaagggaaccggagaaaactaccgcggtaacgtcgcggtgaccgttagcggacacacgtgccagcattggtctgcccagacgccacacacccacaacaggacccccgagaatttcccgtgtaagaatctcgacgagaactattgtagaaatccagacggaaaacgagctccttggtgccataccaccaattcccaggtccgctgggaatactgcaagatcccgtcgtgcgattccagtccggtgtcgaccgagcagctggcaccgacggctccgcccgaactgaccccagtggtgcaggactgctaccatggcgatggacagtcctaccgcggaacttcgagcactactaccaccggtaagaagtgccagagctggtcaagcatgactccacaccgtcatcaaaagactccggagaactacccaaacgcagggctcaccatgaattactgccggaatcccgatgcggataagggaccgtggtgctttaccaccgatccgtcggtaaggtgggagtactgtaacctgaagaagtgctcgggaactgaagcgagcgtcgtggcaccgccgccggtcgtgctgctcccggacgtggaaaccccgtcggaagaagattgcatgttcggcaatgggaagggctaccggggcaaacgcgccaccaccgttacgggtactccatgccaggattgggcagcacaggaacctcatcggcactccatcttcacgccggaaaccaatccaagagcaggactcgagaagaattactgcagaaaccctgatggcgacgtggggggaccctggtgctataccactaatccacggaaactgtacgattactgtgacgtgcctcaatgcgctgcaccatcattcgattgcggcaagccacaggtggagccaaagaaatgcccgggaagagtggtcggtggctgcgtggcccatcctcattcttggccttggcaagtttcactgcggactagattcggaatgcacttctgcggaggcacgcttatttcaccggagtgggtgcttacggcagcgcactgcctggagaaaagcccgcggccgagctcatacaaggtgatcctgggtgcccatcaggaggtgaacctggaaccacatgtgcaggagattgaggtgtcgaggctcttcctggaaccaactcgcaaagacatcgcgttgctcaaactgtcgtcacctgccgtgatcaccgataaagtcatcccagcctgcctgccctcgccgaactacgtggtggccgaccggaccgaatgtttcatcaccggatggggtgagactcaggggacgtttggagcaggactcttgaaagaggcccagctccctgtgattgagaataaagtgtgcaatcgctatgagtttctgaatggacgagtgcagtcaaccgagttgtgcgcaggccaccttgcgggaggcactgacagctgccagggagattccggaggcccgctggtctgtttcgagaaagacaagtacatccttcagggagtgacttcgtggggcctgggctgtgcgcgcccaaacaagcctggggtctacgtgcgggtgtccagattcgtcacttggatcgagggcgtgatgcgcaataat

SEQ ID NO: 6618 - DNA, 2430 bp, Artificial Sequence
  derived and/or modified sequence
atggaacataaggaagtcgtccttcttcttctgctgttcttgaagagcggccaaggcgagccgctggacgattacgttaacacccaaggcgccagcttgttcagcgtgaccaagaagcagctgggtgcaggttccatcgaagaatgcgcggcaaagtgtgaagaggatgaagaatttacttgtcgcgccttccaataccattcaaaggaacaacagtgcgtcattatggcagaaaatagaaagtcgtcaatcattattcggatgagagacgtggtgctgtttgaaaagaaggtgtacctgagcgagtgtaagaccggtaatggcaaaaactacagaggtactatgtccaagaccaagaatggaattacctgtcaaaagtggtcctcaaccagcccacaccggccacgcttttcaccagcaacccatcctagtgaagggctggaagagaactattgcagaaaccctgataatgatccacaaggcccatggtgctacactaccgatcccgaaaagagatacgactattgcgatatcctcgaatgcgaagaagaatgtatgcattgctcaggggaaaactacgatgggaagataagcaaaaccatgtcaggacttgaatgtcaagcatgggacagccagtcgccacatgcacacggttacataccctccaaatttcctaacaagaatctcaagaaaaactactgcaggaacccagatcgggaacttcggccttggtgtttcactactgacccgaataaacgttgggaactttgtgatataccacggtgcaccactccaccaccgtcgagcggacctacctaccagtgtctgaagggaactggtgaaaactatcgcggaaatgtcgcagtcacggtgagcggacatacttgccaacactggtccgctcagaccccacatacgcacaaccgcactccggagaactttccctgcaagaacctggatgagaactactgtagaaacccagacggtaagagagcaccgtggtgccatactaccaacagccaggtccgttgggagtactgtaagatcccttcctgtgatagctcacccgtctcgacggagcaactggcacctactgcacccccagaacttaccccagttgtgcaagattgctaccatggggacggacagtcctaccgcgggacttcatcgaccaccactaccggaaagaagtgtcaatcgtggagctctatgaccccccatcgacatcaaaaaaccccagaaaactacccaaacgccggactgaccatgaactactgtcggaatccagacgctgacaaggggccctggtgttttactactgatccttccgtccggtgggaatactgcaacttgaagaagtgctccggtaccgaggcgagcgtcgtggcacctccacccgtggttttgctcccagacgtggaaactccttcagaggaggattgtatgtttggcaatggaaagggataccgggggaagagggcaactacggtgactggtactccttgtcaagactgggccgcacaagagccacacaggcattcgattttcactccggaaaccaatcctagggcgggactggaaaagaactattgccgtaatcctgacggggatgtgggtggcccatggtgttatacgaccaatccgcggaaactttacgactactgtgatgtgcctcagtgtgcggcaccttccttcgactgtggaaaacctcaggtggagccgaagaaatgcccaggacgagtggtggggggatgcgtcgcccatcctcactcctggccttggcaagtgagcctgcggactcggttcgggatgcacttttgtggaggaactcttattagccctgaatgggtcctgactgcggcacattgcctcgagaaatccccacgcccctcatcgtacaaagtgattcttggggcacaccaggaggttaaccttgaaccacatgtgcaggaaattgaggtgtcgcgccttttcctggagccaacccggaaggatattgctctgcttaaactttcgtcccctgctgtgattactgataaagtcattccagcctgcctgccttcacctaactacgtggtggccgatcgtactgaatgctttatcactggatggggcgaaactcagggtacttttggcgcaggtttgcttaaggaagcacaactgccagtaatcgagaataaggtgtgtaaccggtatgaatttctgaacggcagagtccaatccaccgaactttgcgcgggtcatcttgcaggaggcactgatagctgccagggtgactccggagggccacttgtgtgctttgaaaaagacaagtacattctccaaggtgtgacctcctgggggctcgggtgtgcgcggcctaacaaacctggggtgtacgtgcgagtgagccggttcgtgacgtggattgaaggtgtcatgaggaacaac

SEQ ID NO: 6619 - DNA, 2430 bp, Artificial Sequence
  derived and/or modified sequence
atggagcacaaggaagttgtgctgcttctgcttctgttcctgaagtccggacaaggcgaaccgctcgatgattacgtcaacactcaaggtgcatcgcttttttcggtcaccaaaaagcaactcggagcagggtccatcgaagaatgtgcagcaaagtgcgaagaggatgaagaatttacttgtagagcgttccaataccactcaaaggagcagcaatgtgtgattatggcagaaaacagaaagtcgtcgatcatcattcgcatgcgcgatgttgtgctgtttgagaaaaaagtgtacctctccgaatgcaagaccggtaacggaaaaaactataggggaacgatgagcaagactaaaaacggaattacctgccaaaagtggtcaagcacctcccctcatagaccgcggttttcgcctgcgacccatccatccgagggtttggaagagaactattgtcgaaacccagataatgacccccaaggaccctggtgttacacgacggatcccgagaagaggtatgattactgtgacattcttgagtgtgaagaggagtgcatgcattgttccggtgagaattacgatggaaaaatctccaaaactatgtcggggctcgaatgccaagcatgggattcacaaagcccgcacgcacatggatacatcccttccaagtttcccaataagaacctgaagaagaactactgtaggaatcccgatcgagaacttcgcccttggtgcttcacgaccgatcctaacaaacggtgggaactttgtgatatcccaagatgtaccacgcctcccccatcctcagggccgacttaccaatgcctgaaaggtactggagaaaactaccgtggaaacgtggcggtgaccgtgagcggacacacttgtcaacactggtcggcccagactccacacacccataatcgtactccagaaaactttccgtgtaagaatctggacgaaaactactgtcggaaccctgacgggaaaagggcaccatggtgtcacactaccaactcacaagtgagatgggaatactgcaaaattccaagctgtgactcctctcctgtgagtaccgaacagctcgcccctaccgccccgcctgaacttactccggtagtccaagattgttaccacggcgacggacagagctacagaggaacctcatcgactactaccactgggaagaagtgccagagctggtcctcgatgacccctcataggcatcagaaaacccctgaaaactacccgaacgcaggccttacgatgaattactgcaggaacccagacgcagataaagggccttggtgttttaccaccgatcctagcgtgaggtgggagtactgcaatctgaagaagtgttcgggaactgaggcgagcgtggtggcaccacctcctgtggtgctgctgccagatgtggagactcctagcgaggaggattgcatgtttgggaatggtaagggataccgcggcaagcgcgcgacgactgtgactgggacgccgtgccaggattgggcagcccaagagcctcaccgtcatagcattttcacgccagaaactaaccctcgcgcaggactggaaaagaactactgcagaaatcccgatggcgatgtcggcggaccgtggtgttatactaccaaccctcggaaactttacgactactgcgatgtgccacaatgtgcagcaccatcatttgactgtggtaagccccaggtcgagcctaagaagtgcccagggcgtgtcgtcgggggatgtgtggcacatcctcactcctggccatggcaggtcagtctccgtaccagatttgggatgcatttttgtggaggaaccctcatctcgccggaatgggtgctgaccgcagcacactgtctggagaagtcacctcgcccatcgtcttacaaggtcattctgggggcacaccaggaagtgaacctcgagcctcatgtgcaggagatagaagtgtccagactcttcctggaacccacccgaaaggacattgctcttctcaaactctccagccccgccgtgataaccgataaagtgattcctgcgtgtttgccaagcccgaactacgtggtggcagaccgtactgaatgcttcattaccggatggggggaaacgcagggaacctttggtgcaggtctgttgaaggaagcacagcttccagtcattgagaataaggtgtgcaatcgttacgagtttcttaatggtcgagtccagtccacggaactttgtgcaggacatcttgcgggtgggaccgattcttgtcagggcgattcgggaggtcctctggtctgctttgagaaagataagtacattctgcaaggcgtgacctcctggggactgggatgtgcacggccaaataagccaggagtgtacgtccgcgtgagccggtttgtcacctggatcgaaggcgtcatgcgtaataac

SEQ ID NO: 6620 - DNA, 2430 bp, Artificial Sequence
  derived and/or modified sequence
atggagcacaaggaagtggtgcttctccttcttctgttcctcaaatcgggccagggagagccacttgacgattacgtcaacacccaaggcgcatcgctcttctccgtgaccaaaaagcagctgggagcaggatcgatcgaagagtgtgccgcgaaatgtgaagaggatgaagaatttacttgtcgggcctttcaataccattccaaggaacagcaatgtgtgattatggcggagaaccggaaatcctccatcatcattaggatgcgggacgtcgttctgtttgaaaagaaggtgtacctttctgaatgcaaaaccggaaacggaaaaaactacagagggacgatgtccaagaccaagaatgggatcacttgtcaaaagtggtcgtcgacgtctcctcaccggcctcgcttttccccagccactcatccgagtgaaggcctggaggagaactattgcagaaaccctgacaacgaccctcaggggccctggtgttacacgaccgatcccgaaaagcggtatgactactgtgacatccttgaatgcgaggaggaatgtatgcactgtagcggggagaattacgatggcaagattagcaaaacgatgtcgggtctggaatgccaagcatgggattcacaatctccacatgcacacggttacatccctagcaagttccctaacaagaacttgaaaaagaattactgtcgcaacccagacagagaactcagaccatggtgttttactaccgatcctaacaaacgatgggaactgtgtgatattccaagatgcacgaccccacctccctcctcaggtccgacttaccaatgtcttaagggtaccggtgaaaactaccggggtaatgtggccgtgaccgtgtcgggacacacctgtcagcattggtcagctcaaactccgcatactcacaatagaaccccagagaatttcccgtgcaagaatcttgatgagaactactgtcgtaacccagatggcaaaagagcaccttggtgtcacaccactaattcgcaggtgcgttgggaatactgcaaaattccatcttgtgattcctcgccagtctcgactgagcagctcgctccaaccgcacccccggaactcacccctgtggtgcaggattgctaccatggagacggacaaagttacagaggaacctcaagcacgactactaccggaaaaaagtgtcaatcctggtcctccatgaccccccatagacatcaaaagactccagaaaactatccaaatgccggactgaccatgaactactgcagaaatcccgatgccgacaaaggtccttggtgctttaccacggatccttcggtgcgctgggaatattgtaatctgaagaagtgttccggcactgaagcatcagtcgtcgccccacctcctgtagtgctgctgccggatgttgaaacccctagcgaggaagattgtatgtttggcaatggcaaaggctatcggggtaaacgggcaaccaccgtgacggggactccttgccaagactgggcagcacaggaaccccaccggcattcgatctttactccagagacgaatccgcgcgcgggactggagaagaactactgtagaaacccagatggagacgttggaggcccatggtgttacaccacgaatccacggaagctgtacgactactgtgatgttccgcaatgtgcagcaccctcgtttgactgcggaaagccccaggtggaacccaagaaatgtcctggaagagtggtgggcggttgcgtggcccatcctcactcgtggccttggcaggtgtccctgaggacccgattcggtatgcatttttgcggtggaacccttatttcaccagagtgggtgctcactgccgcccattgtctcgagaagtccccaagacctagctcatacaaggtgatcttgggcgcccaccaggaggtgaaccttgagcctcatgtgcaggagattgaagtctcacggcttttcctggaacctactagaaaggacattgcactgctgaaactttcgtcccccgcagttataaccgacaaagtgatccctgcgtgcctcccttcgccgaattatgtggtggcagatcgcactgagtgttttatcactggatggggggaaactcaagggaccttcggggcaggccttcttaaggaggcacagctgcctgtgattgaaaacaaggtctgtaatagatacgaatttctgaacggacgcgtgcaatccaccgagctctgtgcaggccacctggccggaggtactgatagctgtcagggagatagtggtgggcctcttgtgtgcttcgaaaaggataagtacatcctgcagggagtgacttcatgggggctgggttgtgcacgaccgaacaagcccggtgtgtacgtgcgcgtgtcccgctttgtgacttggatagaaggagtgatgcgtaataac

SEQ ID NO: 6621 - DNA, 2430 bp, Artificial Sequence
  derived and/or modified sequence
atggagcacaaggaagttgttctactgctactcttgttccttaagtcaggtcagggtgaacctctggacgactatgtcaatacacagggggcatcacttttctccgttaccaaaaaacagctgggcgccggaagtatcgaggagtgtgctgctaagtgcgaggaggatgaagagtttacttgtcgtgcttttcagtaccattcaaaggaacagcagtgcgtcattatggccgaaaacagaaagagctccatcatcatcaggatgagggacgtagtgctgtttgagaagaaagtgtatttgtctgaatgcaagacagggaatgggaagaactatcgaggcacgatgagtaaaaccaagaacggaataacttgtcaaaagtggtcatcaacatcccctcatcgaccgcggttctcccctgcaacgcatcctagcgaaggcttggaggagaactactgtagaaatcccgacaatgatccacaggggccctggtgctatacaacagatcctgagaagcggtacgactactgtgacattctagagtgcgaagaggaatgcatgcactgctctggcgaaaactacgacggtaagattagtaagactatgtcggggctggagtgccaggcttgggactctcagtccccgcacgcacatgggtacatcccgagtaagtttcccaataagaatctgaagaaaaactattgtagaaacccagacagggagctacgcccgtggtgctttacaactgatcccaacaaaagatgggaattgtgcgatatcccacgctgtaccacacccccaccttcttctgggcccacttatcagtgtcttaaaggcacgggggaaaattatagaggaaatgtcgctgtgactgtgtcaggccacacctgtcaacactggtccgctcaaactccccacacccataataggacccctgaaaactttccatgcaaaaatctggacgagaattattgccggaacccagacggaaagcgagccccatggtgccacacaacgaatagccaggtccgctgggaatattgtaagattccctcatgtgatagctctccagtctcaaccgagcagctggcacctacggcgcctcccgaacttactccagtggtgcaggattgttaccatggggacggccagagctaccgaggaacttcatctaccactaccacggggaagaagtgtcagtcatggagcagtatgaccccgcaccgccaccagaagacccccgaaaactaccccaacgctggccttactatgaactactgtcgtaacccggacgccgacaaaggcccctggtgcttcacgacagacccaagtgtgagatgggagtactgcaatctgaagaagtgcagtggaacggaggctagcgtggtggccccaccacccgtcgttctgctacccgatgtggaaaccccaagcgaggaggattgcatgttcggcaacgggaagggctaccggggtaagcgcgccaccacagtgacgggtactccatgccaagactgggccgcccaagagcctcacaggcatagcatcttcacacccgagactaatcctagagccgggctcgagaaaaactactgcaggaatcccgatggggatgtgggtgggccttggtgttatacgaccaaccctagaaagttatatgactactgtgacgtgcctcagtgcgcagccccctcatttgattgtgggaagccccaagtggaacccaaaaagtgccctggacgggtcgtgggcgggtgcgtcgctcatccacacagctggccatggcaggtatcgctgaggacacggtttggcatgcatttttgtggggggaccctgatcagtccggagtgggtactaacagctgcacattgcctggagaaaagccctcgtccatcatcctataaggtgatacttggggcacaccaagaggtcaaccttgaaccccacgtacaggagatcgaggtgtcccgattattcctcgagccaaccaggaaggatattgccctgctcaagctttctagtccggctgttatcaccgataaggtcattcctgcatgcctgccttcccctaattacgtggtggctgatcggacagaatgctttattacaggttggggcgagacacagggaacattcggggcaggcctgttaaaagaggcacaactccccgtcatagagaacaaggtatgtaaccggtacgagtttctgaatgggcgcgttcaatctacagagctgtgtgccggccatctggccgggggtacagattcatgtcagggagattccggtggccctttggtgtgctttgagaaggacaaatacatcctccagggggtcacctcctggggactgggatgtgcccgccctaataaacccggggtgtacgtgcgggtttctcggttcgtgacttggatcgagggcgtaatgaggaacaat

SEQ ID NO: 6622 - DNA, 2430 bp, Artificial Sequence
  derived and/or modified sequence
atggagcacaaggaagtggtgctgttgctcctcctgtttttaaaaagtggacaaggtgagccactggatgactatgtgaacacacagggagctagcctgtttagcgtcaccaaaaaacaactgggcgccggttctatagaagagtgtgccgcaaagtgcgaagaagatgaagagttcacctgccgcgctttccaatatcacagtaaggaacagcagtgtgtgatcatggcggagaataggaaatcatccatcataattagaatgagggatgtggtgttattcgagaaaaaagtctacctctctgaatgtaaaacaggaaacggtaagaactacagggggaccatgtcaaagactaaaaacggcatcacctgccaaaaatggtctagtactagccctcataggccccgcttcagcccagcgacgcatccttcggaaggtctggaggagaattattgcagaaatcctgacaacgacccccagggcccttggtgctatacaactgatccagagaagagatatgattattgcgatatacttgagtgcgaggaggagtgcatgcactgttcaggagaaaattacgatggcaagatttcaaaaaccatgagtggtctggaatgtcaggcttgggactcacagtccccccacgctcatgggtatatccccagcaagttcccaaacaagaatctcaaaaagaattactgtagaaatccagatagggaactacgcccctggtgcttcactactgatcccaataaaaggtgggaactctgtgacataccgcgctgcaccacacctccgccatcatctgggcccacataccaatgtcttaagggtacaggtgaaaattatcgagggaacgtggccgtgaccgtgagtgggcacacttgccagcactggagtgcccaaacccctcatacacataatagaaccccggagaacttcccctgcaaaaatcttgacgaaaactactgcagaaacccagacggaaagagagctccatggtgtcacacaacgaatagccaggtgagatgggaatattgtaagatcccatcatgcgatagtagccccgtatcaacagagcagttagcccccaccgctcctcccgagctgacacctgtggtgcaggattgttatcatggggacgggcagtcctatagagggacctctagcacaacgacgaccggaaagaaatgtcaatcctggtcttcaatgacgccccataggcaccagaaaacccccgagaactatccgaacgcaggactgaccatgaattactgtcgaaacccagacgctgacaaggggccttggtgtttcacaaccgatccctccgtgcggtgggaatactgcaatctgaagaagtgtagtggtactgaggcctccgtggtggcgccccctccagtcgtgttactgcctgacgtggaaacaccctccgaggaagactgcatgtttgggaacggaaagggatacagaggaaagcgggcgacaaccgttaccggcacgccctgccaggactgggcagcacaggaacctcataggcattctattttcacgcccgagaccaacccacgcgccgggttggagaagaattattgtcgcaaccctgatggggatgtgggagggccttggtgttataccaccaatccgcgcaagctgtacgattattgtgacgtgcctcagtgcgctgcccctagttttgattgcgggaagccccaagtggagcccaagaagtgcccgggaagagttgtggggggatgcgttgcccacccccactcgtggccttggcaggtgagtctccgcactcggttcggtatgcacttctgtggtggcactctgatctcaccagaatgggtcttaaccgcagcccactgcctggaaaagtcacctcgcccatccagctacaaagtgatcctgggagcacatcaggaggttaatctcgaacctcatgtgcaggaaattgaggtaagccgcttgtttcttgaacccaccagaaaagatattgcactgctgaagctttcctctcccgcggtgatcacggacaaagtcatccccgcctgtctgccatcaccaaactatgtggttgctgatcgcaccgagtgctttattactgggtggggggagacacagggtacatttggtgccggtctattgaaagaggctcagctgccggtaatcgagaataaagtctgtaatcgttacgaatttctgaatggtcgggtccagtccacagaactgtgcgcggggcacctcgctggggggacggatagctgccagggcgacagcggaggtcctctagtttgcttcgaaaaagataaatacatacttcagggtgttacctcatggggcctcggctgtgcaaggcccaataagccaggcgtatacgtacgcgtcagccgcttcgtgacgtggattgagggcgttatgaggaataac

SEQ ID NO: 6623 - DNA, 2430 bp, Artificial Sequence
  derived and/or modified sequence
atggagcacaaggaagtggttttgctgctgctgttattcctgaagagcggccagggcgagcccctggatgactacgttaatacacagggtgcatctctgttctccgtgaccaagaagcagctcggggccggctccatagaagagtgcgccgcaaagtgcgaagaggatgaagagtttacgtgtcgcgcctttcagtatcactccaaagaacagcaatgtgtcatcatggcggagaacaggaagagctctatcataatccgcatgagggacgtggtattattcgagaagaaagtgtatctcagcgagtgtaaaaccggaaacggaaagaactaccgaggaactatgagcaagacaaaaaatggtataacctgtcaaaagtggagttccacttcacctcatcggccccgcttctcaccagccacccatccctccgaaggacttgaagagaattactgccgcaacccggataacgacccacaggggccgtggtgttacaccaccgaccccgagaagaggtacgattattgtgatatcctcgagtgtgaggaggagtgcatgcactgctctggtgagaattacgatggaaagatatccaagacaatgagtggactggagtgccaggcctgggacagccagtcaccacacgctcacggttatattccgagtaagttcccgaataagaatcttaagaagaactactgcaggaaccccgaccgtgaactccgcccttggtgcttcaccacggatcccaacaaaaggtgggagctgtgtgatatcccaagatgcaccactccacctcctagctccggcccaacctaccaatgcttgaagggcacgggtgagaattatagggggaacgtggcggtgactgtcagtggccatacctgccaacactggagcgcccagacacctcatacccacaatcggacccccgagaacttcccctgtaagaatctcgacgaaaactattgtcgcaaccctgatggtaaacgcgcgccttggtgtcacactaccaacagccaggtccgctgggagtactgtaagatcccaagctgcgattcttcgccggtttctaccgagcagctggcacccactgccccacccgagctgacccccgtcgttcaggattgttaccacggggatggacaatcgtaccgcggcactagttccacgacgacaacaggcaagaaatgtcagtcatggagtagtatgacccctcacaggcatcagaaaacgccagagaattaccccaatgctggccttaccatgaattactgcaggaaccctgatgcagataaggggccttggtgtttcaccacagatccctctgttcgctgggagtattgtaacctcaagaagtgtagcggtacagaagccagcgtcgtcgcgcccccaccagtcgtccttcttcctgacgtggagaccccctccgaggaagactgcatgtttggcaatggcaagggttatcgtggaaagcgagccacaacagtcacgggcacgccgtgtcaagactgggctgctcaggaaccccatcgccatagtatctttactccagaaactaatccaagagcaggactggagaagaactattgccggaatccggacggggacgtggggggaccttggtgctatactactaatccccgaaaactatatgattactgcgatgtgccccagtgtgcagctcccagcttcgattgcggcaaaccacaggttgaaccgaagaagtgtccaggtagagtggtgggcggctgtgtcgctcaccctcactcttggccatggcaagtgagccttcggacaagatttggcatgcatttttgtggtgggaccttaatttcacccgagtgggttttaaccgccgcgcactgcctggagaagagtccccggcccagcagttacaaggtaatcctaggggcccaccaggaggtgaacctggaaccacacgtgcaggagatcgaggtgagtcgattgttcttggagcccaccaggaaagatatcgccttgctcaaactgtcatctcctgccgtgattacagataaagtcatccccgcctgccttccctctccgaattacgttgtggccgatcggacagagtgttttatcaccggttggggggagacccaggggacctttggagctgggcttcttaaagaggcccagctgcccgtcattgagaacaaagtgtgcaaccggtatgaattcctcaacggtagagtgcagtcaaccgagttgtgtgccggtcatttggccgggggcactgattcgtgccagggtgactcaggcggtccgctggtgtgcttcgaaaaagataagtatattttacagggggtgaccagctggggcctggggtgcgcaagaccgaacaaaccgggcgtatatgtgcgggtgtccagatttgttacatggattgaaggagtgatgcgcaacaac

SEQ ID NO: 6624 - DNA, 2430 bp, Artificial Sequence
  derived and/or modified sequence
atggagcataaggaagtggtgctgctgctactactgttcctaaagtccgggcagggcgagccccttgatgattacgtgaatacacagggggcttctctattctctgtgaccaaaaaacagctcggcgccggcagtatcgaggagtgcgccgccaagtgtgaggaggatgaggagttcacctgtagggccttccagtatcattcaaaggagcagcagtgcgtcatcatggcagaaaacaggaaatcttctattatcatcaggatgagagacgtggtgctgttcgaaaagaaggtgtacctgtctgaatgcaagacaggcaatgggaaaaactaccgcggaaccatgtccaaaacaaaaaatggcatcacatgccagaagtggtcctctactagtccacacaggcctcggttcagtcccgccacccacccttccgagggcctggaggagaattattgtaggaatcctgataatgacccccagggcccttggtgctatactacagacccggaaaaacgctacgattattgtgacattttggagtgcgaggaggagtgcatgcactgctcaggggagaattatgatggaaaaatatctaagactatgagcggtctcgagtgtcaggcatgggactctcagagcccccatgcccacggctacatcccttctaagttccctaacaagaatttaaagaagaattactgccgaaaccccgatagggagttgagaccatggtgtttcactacagacccaaacaagaggtgggaactgtgcgacatcccccgttgcaccacccctcccccaagcagtgggcccacataccagtgtctcaagggaaccggcgagaattaccgggggaacgtagccgtgaccgtgtctggccatacatgccagcattggagcgcacagactccacacacccacaatcggacccccgagaatttcccatgcaagaatctggatgaaaactactgcagaaacccagatggaaagcgcgcaccctggtgccacacaaccaatagccaggtgcgatgggaatactgcaagattcctagctgtgatagttctcccgtgtccaccgagcagctcgctcctactgctccccccgagctgacacctgtggttcaggattgttatcacggagacggccagtcctatcggggcacttccagcaccaccacaacagggaaaaaatgccagagttggagtagcatgacaccccatcgccaccagaagacccctgagaattatccaaacgctggcctcactatgaactattgtcgaaatcctgatgcagacaaaggcccatggtgttttacaaccgatccttccgtacggtgggaatactgcaacctcaaaaagtgttcaggtactgaggcttccgtggtagcaccgccccctgtggttctgttacctgatgtcgagactccatccgaggaggactgtatgtttgggaatggtaaaggctaccgtgggaagagagccacaactgttacaggcaccccatgccaggactgggccgcccaagaaccccataggcatagtatctttacccccgagaccaaccccagagccgggctggaaaaaaactactgccggaatcctgatggcgatgtcggcggtccttggtgttacaccaccaatccacggaaactgtatgattattgcgatgtcccacagtgtgcagctcctagcttcgattgtggaaaaccacaggtcgaaccaaaaaaatgtcctggtcgcgtggtgggcggctgcgtcgcacatcctcactcttggccatggcaagtgagtctgaggacacggtttggtatgcacttctgcggcgggacactgatctctcctgagtgggtattgacagctgctcattgcctggaaaagtcaccacgccctagctcatataaggtaattttgggcgcccatcaggaagtgaatctggagccccacgttcaagagattgaagtatccaggctgttcttagaacctactcgcaaagacatagcattactaaaattatcctccccggccgtgattacagataaggtgatcccagcctgtctgccttccccaaactacgtggtcgccgaccgaacagaatgtttcatcacaggctggggggagacccaaggcacctttggggccggcctgctgaaggaagctcagctgccagttatagagaacaaagtgtgtaacaggtacgaatttctaaatggcagggtccagtccaccgaactgtgtgccgggcaccttgcaggcggcaccgactcctgccaaggcgacagcggcggcccactggtgtgttttgagaaggacaaatatattttacagggtgtcacttcctggggtctcggttgtgctcggccaaataagcctggagtttacgtacgcgtgtcacgatttgtgacatggatagaaggggttatgaggaataat

SEQ ID NO: 6625 - DNA, 2430 bp, Artificial Sequence
  derived and/or modified sequence
atggagcacaaggaggtggttctgcttctattgcttttcttaaagtctggtcagggtgaacctctcgacgattatgtcaacacacagggcgcaagcctttttagcgtgactaagaagcagcttggtgccggttccatcgaggaatgtgccgcaaagtgtgaggaagatgaggagttcacctgcagagctttccagtaccattctaaggaacagcaatgcgtcatcatggctgagaaccgtaagtccagtattataattagaatgagggatgtagtcctgttcgagaaaaaggtctatttgtctgagtgtaagacaggtaacggcaaaaattaccgaggaactatgagcaagacaaaaaacgggatcacttgtcagaagtggtcctccacgagcccccataggccccgtttctcccccgccacacacccgagtgaaggtcttgaggagaattattgccgtaatcctgacaacgatccccagggtccatggtgttataccactgatccagaaaaacggtacgattattgcgatattctcgagtgcgaggaggaatgcatgcattgttccggtgagaactatgacgggaaaatttctaagacaatgtcagggctggaatgccaggcatgggactcacagagtccacatgctcacggctatattccatcgaagttccccaacaagaacctgaagaagaactactgccggaacccagatagggagcttcgtccgtggtgtttcacaactgaccccaataaaagatgggaactctgcgatatacctcgatgcacgaccccccctccatctagcggtccgacataccaatgccttaaaggaacgggtgagaattaccgaggaaatgttgctgtaactgtaagtggtcacacgtgccagcactggtcggcacagactccccatacacacaacagaacccccgagaacttcccgtgcaagaacctcgacgaaaactactgtcgaaaccccgatggaaagagggccccgtggtgtcatacgacgaactctcaagttcgttgggaatactgtaagattccgtcatgcgacagctcgcccgtttccacggaacagttggcccctaccgcaccacccgagcttactccagtggtccaggattgctatcatggcgatggacagtcatacagaggcaccagttccacaactactacgggcaagaagtgccagagctggtcgtctatgaccccccaccgtcaccaaaagacgccggaaaattatcctaatgccggactgacgatgaactactgtagaaacccagatgctgacaaaggcccgtggtgcttcactaccgacccttcggtacgttgggagtattgcaaccttaaaaagtgctccggtacagaagccagtgttgtggcacccccgcccgtcgtactgctcccggatgtcgagactccaagtgaagaagactgcatgtttggtaatgggaaaggatacagaggaaagagagccaccaccgttaccggtaccccctgccaagactgggctgcgcaagagcctcataggcactcaatttttacaccagagaccaatccccgggcaggcctcgagaagaactactgtcggaaccctgacggagacgttggaggaccgtggtgttatacgacgaacccacgaaagctctacgattattgtgatgttcctcaatgcgcggccccatcgtttgactgcggaaagcctcaggtcgagccaaagaagtgccctggtcgagtcgtcggtggatgtgtcgcgcatccacattcttggccctggcaagtgtcgctccgcacacgcttcggtatgcacttttgcgggggaacactcatcagtcctgaatgggtgctaaccgcagcccattgcttggaaaagagtccacgaccttcctcttacaaagtgattcttggtgctcatcaggaagtaaacctggagccacacgtacaggagattgaagtgagtcgtttgtttctcgagcccaccagaaaagacatcgctctcctgaaactctcttctcctgccgttatcaccgacaaggttataccagcgtgtctcccgagcccaaactatgtggtcgcggaccgtacagaatgtttcattaccggatggggagagacccagggcacattcggagctggtctcctcaaagaagcgcagttgcccgtgatcgagaacaaggtttgcaatcgttacgaatttctaaatggtcgagtccaatcaactgagctatgcgctgggcacttggcgggtggtaccgactcttgccagggagactcggggggccctttagtatgtttcgagaaagacaagtacatcttacaaggtgtcacgtcctggggactcgggtgcgcacgcccaaataaaccaggagtgtatgtccgggtgagtcgatttgtgacctggatcgaaggtgtgatgcgtaacaac

SEQ ID NO: 6626 - DNA, 2430 bp, Artificial Sequence
  derived and/or modified sequence
atggaacataaggaggttgtgttactacttctccttttcctgaagtcggggcaaggggagcccttagatgattacgttaatacacaaggtgcttctcttttctctgtgactaagaagcaactgggagcaggctcgattgaagaatgcgcagctaaatgtgaagaggatgaagagttcacttgtagagctttccagtaccacagtaaggaacaacaatgcgtaatcatggcagagaaccgtaaaagttcgataattatcagaatgcgagatgttgtactattcgaaaaaaaggtctatttgagtgagtgcaagacaggaaatggcaaaaactatagaggaacgatgtctaaaacaaaaaatggaattacttgccaaaagtggtcttcaacgagtcctcatagacctcgtttttcaccagcaactcacccgagtgaaggtctggaagaaaattactgtcggaatccagataacgatccgcaaggtccatggtgctatacgacagatccagaaaagcgatacgattactgcgacattttggagtgcgaagaagagtgcatgcactgttctggtgagaattacgatggaaagatttcaaaaaccatgtctgggttggagtgccaagcgtgggattctcaatcaccacatgcccatggatatataccatctaaattcccaaataaaaacctcaagaagaattactgccggaatcctgatcgagaactccgcccatggtgctttactactgacccaaacaagcgatgggaactctgtgatattccacgatgtacaactccaccaccttcaagtggaccaacataccagtgtcttaagggaacgggggaaaattatagaggaaatgtcgctgtgacagtcagtggacatacctgtcagcattggtcggcccaaacgccacatacccacaacagaacaccggagaactttccatgcaaaaatctcgatgagaattactgccgtaatcccgatggaaagcgtgcaccatggtgtcataccacaaattcgcaagtgagatgggaatattgtaaaattccgagctgcgactcgagtcctgtttctacagaacagcttgctccgacggccccaccggagctgacccctgtggtacaagactgttaccacggtgacggtcagtcgtatcgtggtacaagttcaaccacgacaactggtaaaaagtgccaatcttggtcatctatgactccacatcggcatcaaaaaacccctgagaattaccccaatgctggattgacaatgaattattgtcgaaatccagatgcagacaaaggaccgtggtgctttaccaccgacccgtctgtacgttgggagtattgcaatctaaagaagtgctcaggaacggaggcatcggttgtggcacccccaccagtcgtcctccttccagacgtagagactccttcggaggaagattgtatgtttggaaacggtaagggatacagaggtaaacgtgctacaacagtcactggaacgccgtgtcaagattgggccgcacaggaaccacatcgtcattctattttcacgccggaaacaaatcctcgggcagggctcgaaaaaaactattgtcgtaatccagatggagacgttggtggcccatggtgttataccactaacccacgtaagctttatgattactgtgatgtgccccaatgcgccgccccatctttcgattgtggaaagcctcaggtcgaaccgaaaaaatgcccaggacgagtggttggaggctgtgtagcacatccacacagttggccatggcaggtttctttacgtacccgttttggtatgcatttctgtggaggaactcttatttctccagaatgggttctgacagcagcacattgccttgaaaaaagcccgcgccctagctcgtataaggtgattctgggagctcaccaggaggtcaatctggagccgcacgttcaagaaatcgaggtatctcgactcttcttggaaccaacccgaaaagacattgccctactaaagctcagttcgccagccgttattacagataaagttattccagcttgtctcccatcgcctaattatgtggttgcggatcgcactgaatgcttcataacaggatggggggaaacacagggtacattcggggcaggattgctgaaagaggcacaattgccagtcatagagaataaggtttgcaatcgttatgagttccttaatggaagagttcagagtacggaactttgcgctggtcatttagccggagggacagattcgtgtcagggagattcagggggtccgttggtctgctttgaaaaggataagtatattctgcagggagtgacgtcatggggactgggatgtgcgcgacccaataagccgggagtgtatgttcgggtgtcaagatttgtaacttggatcgaaggtgtgatgagaaataac

SEQ ID NO: 6627 - DNA, 2430 bp, Artificial Sequence
  derived and/or modified sequence
atggagcataaagaagtggtgctgcttcttctcctgtttctgaagtctggacagggagaaccgctggatgattacgtgaacacccaaggggcatcgctcttttcggtgaccaaaaaacaactgggagcaggaagcatcgaagagtgtgcagcgaaatgtgaagaggacgaagaattcacctgtcgcgcattccagtaccacagcaaggaacaacagtgtgtgattatggccgaaaatagaaagtcgagtatcataattcggatgcgggatgttgtgctttttgagaaaaaggtgtacctctccgagtgtaagactggaaacggtaagaattaccggggtactatgtcaaagactaagaacggaataacgtgtcagaaatggtcgtccacttcgccacatagaccaaggttttcacccgcaactcatccttctgagggacttgaggaaaactactgccgtaatcctgacaacgatccgcaaggtccttggtgctacacgactgatcctgaaaaacgatacgattattgtgatatcttggaatgtgaggaagaatgtatgcactgttccggcgaaaactacgatggcaagatttcaaagaccatgtcaggactggagtgtcaggcatgggatagtcaaagcccccatgcccatggatacattcctagcaagttccccaacaagaacctcaagaagaattactgccgcaacccagatcgtgagctcagaccatggtgtttcaccactgaccctaataagaggtgggaactttgcgatatcccaaggtgcactacccctcccccttcgagcggtcctacctaccagtgtctgaagggtaccggcgagaattatcggggtaacgtcgcagttaccgtgtcgggtcatacgtgccagcattggagcgctcagactcctcacactcacaaccgcaccccggaaaactttccgtgcaagaatctggacgagaactactgtagaaaccccgatggcaagagagcgccatggtgtcatactactaactcccaggtccgctgggaatactgtaagattccatcgtgtgattcgtcacccgtgtcgacggagcaacttgctcctaccgcacctcctgagcttacccccgtcgtgcaagattgctaccacggagatggacaatcctacagagggacctccagcaccactaccactggaaagaagtgtcagtcctggtcctccatgaccccacatagacaccaaaagaccccagaaaactacccaaacgcagggcttactatgaactactgtcgcaacccagacgcagataagggaccctggtgttttaccaccgacccgtcagtacggtgggaatattgcaatcttaagaaatgctcgggtactgaagccagcgtggtggctccgccaccagtcgtgctgcttccagacgtcgagactccctcggaagaagattgcatgtttggcaacggcaaagggtaccggggtaaaagggcgaccaccgtaacgggcaccccttgccaagactgggccgcacaagagcctcatcgccattcaatctttacccctgaaaccaatcctcgcgcaggtctggaaaagaattactgtcgaaatcctgacggagatgtcggaggaccttggtgttacaccactaacccacggaagttgtacgattactgtgatgtgccacaatgtgcagcaccgagcttcgactgcgggaagccgcaagtggagcctaagaaatgccctggccgtgttgtcggtgggtgcgtagctcacccccattcatggccatggcaggtgtcacttaggactcgatttgggatgcacttctgtgggggcacgctgatctccccggaatgggtgcttactgcagcccattgtcttgagaaaagcccgaggccatcttcgtacaaagtgattctcggcgcccatcaggaagtgaatctggaacctcacgtgcaagagatcgaagtctccagattgtttctcgaaccaacgcgtaaggacatcgcactgcttaaactgagctcacctgcggtgataactgataaagtgattcctgcctgtctcccatcgcccaattacgtcgtcgcggacagaaccgaatgtttcattaccggttggggagaaacccagggaacttttggcgcgggactgttgaaggaagctcaactccccgtaattgagaacaaggtatgtaaccgctatgaatttctgaacggtcgggtgcaaagcactgagttgtgcgccgggcaccttgcaggaggaaccgactcatgccaaggagactcgggtggtcccctggtgtgtttcgaaaaggacaagtacattctgcagggcgtgacttcttggggcctcggttgcgcaagacctaacaaaccgggagtctacgtccgagtgtccagatttgtgacgtggattgaaggagtgatgcggaataat

SEQ ID NO: 6628 - DNA, 2430 bp, Artificial Sequence
  derived and/or modified sequence
atggagcacaaggaagtggtcctgcttctcctcctgtttctgaagtcgggacagggcgaacccctggatgattacgtgaatacccagggcgcctcactgttctcggtgactaaaaagcaactgggagccgggtcaatcgaggaatgcgccgctaagtgtgaggaagatgaggaatttacttgccgagcgttccagtatcactctaaagaacagcagtgcgtgatcatggccgagaaccgcaagtcctcgatcattatccgaatgagagacgtcgtcctgtttgagaagaaggtctatctgtcagaatgcaagactggaaacggcaagaactacaggggtactatgtccaaaaccaaaaacggaatcacttgccagaagtggtcgtcaacttcacctcatagacctcggttctcccccgcaactcatccttcagagggactcgaggagaactactgcaggaatccggacaacgacccacaagggccttggtgttacacgactgatccggaaaagaggtacgactattgcgatatcctggaatgcgaggaggagtgcatgcattgcagcggggaaaactacgacggaaagatctcgaaaaccatgtcgggactggagtgccaagcatgggacagccagtcacctcacgcccacgggtacattccctcaaagtttccgaacaaaaacctcaaaaagaactattgccgcaatccagaccgggaactgaggccctggtgtttcactaccgacccaaataagcggtgggaactctgcgacatcccgcggtgcaccactccgccgccctccagcggaccgacctatcaatgccttaaaggtacgggcgaaaactacagaggtaacgtcgccgtgactgtgtccggccatacttgtcagcattggagcgcacaaactccgcatacgcacaacagaacgccggagaatttcccatgtaaaaacttggacgagaattactgcaggaacccggacggaaaacgggctccctggtgccataccacgaattctcaagtgcggtgggaatactgtaagatcccaagctgtgacagctcacctgtgtcgactgagcaactggcgccaactgccccgccggagctcaccccggtggtgcaggactgctaccacggagatggtcagtcgtacagaggcacctccagcactaccaccaccggtaagaaatgtcagtcatggtcctcaatgaccccacatagacaccagaaaacgccggaaaactaccctaacgcaggcctgaccatgaattactgtcgcaatcctgacgctgacaaaggtccgtggtgctttaccaccgacccttctgtgcgctgggaatactgcaatctcaagaaatgcagcggaactgaagcatcggtggttgcgccgccgcctgttgttttgctccctgatgtggaaaccccttcagaggaagattgcatgttcgggaacggaaaggggtaccgtggaaaacgggcgacgactgtgactgggactccctgccaggactgggccgcccaggagcctcaccgccactccattttcaccccggaaaccaacccacgggcgggactcgagaagaactactgccggaacccagatggcgacgtgggtgggccttggtgctatactaccaatcccagaaagctgtacgattactgcgatgtcccgcagtgcgcggcaccgtcgttcgactgcgggaagcctcaggtggaacctaagaagtgccctggacgggtcgttggaggatgcgtggcgcacccgcactcatggccttggcaggtgtcactgagaacccgtttcggcatgcacttttgtgggggcacccttatcagcccagaatgggtgcttactgcagcccactgcctcgagaagtccccgcggccgagcagctacaaggtgatactgggcgcgcaccaagaagtgaatctcgagccgcacgtgcaagaaattgaagtctcccgcctgttcctggaaccaacccggaaggatatcgcactgctcaagctgtcctcacccgccgtgatcactgacaaggtcatcccagcctgcctcccatccccaaactacgtggtggctgaccggaccgagtgtttcatcacgggttggggtgagacgcagggcactttcggcgctggactgctgaaggaagcgcagttgcctgtcattgagaacaaggtgtgtaaccggtacgagtttctgaatggtcgcgtgcaaagcaccgagctctgtgctggacacctcgctgggggcactgattcctgccaaggagattccggcggaccgcttgtctgtttcgaaaaagataagtatatcctccaaggagtgacttcgtggggactcggttgcgcccgccctaataagccaggagtctacgtgcgcgtgagccgcttcgtcacctggatagaaggcgtgatgagaaataac

SEQ ID NO: 6629 - DNA, 2430 bp, Artificial Sequence
  derived and/or modified sequence
atggagcacaaggaagtcgtgcttctcttgctcctgttcctgaaaagcggacaaggggaaccacttgacgactacgtgaatacccagggggcgtcgctcttctcagtaactaagaagcaactcggggccggttctatcgaggaatgcgcagcgaagtgtgaagaagatgaggagttcacctgcagggcgtttcagtaccattccaaagagcaacagtgcgtgatcatggcggagaaccgcaagtcgtcgatcatcatccgaatgcgcgacgtcgtcttgttcgagaagaaggtgtacctgtcagaatgcaaaactggaaatggcaagaattaccggggaactatgagcaaaaccaagaacggaataacctgccaaaagtggtctagtaccagcccccacaggccccgcttctcgcccgccactcacccgtccgagggactggaagaaaactactgccgtaatccagataacgatccgcagggaccatggtgttacaccactgaccctgaaaaaagatatgattactgcgacatcctggaatgcgaggaggaatgcatgcactgttcgggggagaactacgacggcaagatcagtaagactatgagcgggctggaatgccaggcgtgggactcgcaatccccgcacgctcatggatacatcccaagcaagttcccgaacaaaaatctgaagaaaaactactgtcggaacccggaccgggaactccgcccgtggtgcttcactactgaccccaataaacgctgggagctgtgcgatatccctcgttgtactaccccgcctccctcctctggtccaacttaccagtgcctgaaagggaccggcgaaaactatcgcggtaatgtggcagttaccgtgtcgggccacacctgccaacactggtcagctcagaccccacatactcataacaggactccagaaaacttcccgtgcaagaacctcgatgagaactattgccgaaacccggacggtaagcgcgcaccgtggtgtcacaccaccaacagccaagtgaggtgggaatactgcaagatcccatcatgcgattctagcccagtgtccacggaacagctggctccgacggcgccacctgaactcaccccggtcgtgcaagactgctaccatggcgacggtcagtcgtaccggggaacgagcagcaccacgaccaccggcaagaagtgtcagtcgtggtcgtcgatgaccccgcacagacatcagaaaactccggaaaactacccgaacgccggattgaccatgaattactgccggaatcccgacgccgacaaaggaccgtggtgtttcaccaccgatccatcagtgcgatgggagtactgcaatctgaaaaagtgctcgggaaccgaggcctccgtggtcgcgcctccgccggtagtgctcctccctgacgtcgaaaccccttcagaggaggattgtatgtttggaaatggaaagggatatcgcggaaaaagagctacgactgtgacgggaaccccttgccaggactgggccgcccaggaaccgcaccgccattccatcttcactccagagactaacccacgcgccggcctggaaaagaactactgtaggaacccggacggggatgtgggcggaccgtggtgctatactactaatccgcggaagctgtacgactactgcgatgtcccacagtgcgcagccccttcgttcgattgcggcaagccgcaggtggaacccaagaagtgtccgggtcgggtggtcgggggttgtgtggcgcacccacatagttggccgtggcaagtgtccctcagaacccggtttggcatgcacttctgtggcggaactctcataagcccggaatgggtcctgaccgcagctcattgtctggagaagagccctcggccgagctcatacaaagtcattcttggagcacatcaggaggtcaacctcgaaccgcacgtgcaggaaatcgaggtttcccggctgtttcttgaaccaactcgcaaggatattgcacttctcaagctgtccagcccggccgtgatcaccgacaaggtgatcccggcatgcctcccctcccctaactacgtggtcgccgatcgaactgagtgctttatcaccggatggggagagactcaagggaccttcggagccggactcctgaaagaagcccagctgcctgtgatcgaaaacaaggtgtgcaatcggtacgaattcctcaacggaagagtgcagagcaccgagctttgcgcgggtcacctggccggcggcactgactcctgtcaaggggacagcggaggaccgctggtttgcttcgagaaagataagtacattttgcaaggggtgacttcgtggggactgggatgcgctagacccaataagcccggggtttacgtgcgcgtctcacgttttgtaacctggattgaaggcgtgatgcgcaacaat

SEQ ID NO: 6630 - DNA, 2430 bp, Artificial Sequence
  derived and/or modified sequence
atggaacataaggaagtcgtcctgcttctcctgctcttcctgaagtccggccaaggcgaacctctggacgattacgtcaacacccaaggtgcctcactcttttcagttactaaaaagcagctcggcgccgggtcgatcgaagaatgcgcagctaagtgtgaggaggatgaggagttcacttgccgggcattccagtaccattccaaagagcagcagtgcgtgattatggcagaaaatcgtaagtcgagcatcatcataaggatgcgggacgtggtgctctttgagaagaaggtctatctctcagagtgcaaaactggaaacgggaaaaactaccggggcacgatgtccaaaactaagaatggaatcacctgccaaaagtggtcgagcacttcccctcataggccacggttcagcccggccacccacccctcggaaggtctggaggaaaattactgcagaaatccggacaacgaccctcaaggaccatggtgttataccacggacccagagaagagatacgattattgtgacatcctggaatgtgaggaagaatgtatgcactgttcgggagagaactacgacggaaagatttccaagactatgtctggcctcgaatgccaagcatgggacagccagagcccgcacgcacatggctacattccgtccaagttccctaacaaaaatctgaagaagaattactgccgcaatcctgatcgagaactccggccttggtgcttcaccactgacccgaacaagcggtgggagctgtgtgatatcccgcgatgcaccactccgcctccttcttcagggccgacttaccaatgtttgaagggtacgggagaaaattacaggggaaacgtggcagtgactgtctcgggacacacctgtcagcactggtcggcccagaccccacacacccataaccgcacccccgaaaatttcccatgtaagaacctggacgagaattattgccggaatcccgatggcaagagagccccgtggtgccacaccactaactcacaggtgcgctgggaatattgcaaaatcccatcatgcgattcgtcgcctgtgtccaccgaacagctggcaccgaccgccccgcccgaattgacgccggtggtgcaagactgctaccatggagacggtcagtcgtatagaggcacctcgagcactaccaccacgggaaagaaatgccagagctggtcgtcgatgactccgcaccgccaccagaaaaccccagaaaactacccgaatgccggactgaccatgaactactgcagaaaccctgatgccgataagggtccgtggtgcttcactacggacccctccgtgaggtgggagtactgcaatttgaagaagtgcagcgggacggaagctagcgtggtggcaccgcccccggtggtgctgctgccggacgtggagactccttcggaagaggactgcatgttcgggaacggaaagggataccgtggaaagagagctactaccgtgaccggtaccccttgccaagattgggcggctcaggagccacaccggcattcaatcttcaccccggaaaccaaccctagagcgggactggaaaagaactactgtcgcaaccctgatggagacgtcgggggcccatggtgctacactactaacccgcggaaactctacgattactgcgacgtgcctcagtgcgccgcgccatcctttgactgtggaaagccccaggtggaaccaaaaaagtgccctgggcgcgtcgtcggcggttgcgtggcccatccacattcatggccgtggcaggtgagcctgcggacccgcttcggcatgcatttctgcggaggaacccttatctctccggaatgggtgctgactgccgcgcactgcctcgagaagtcccctaggccgagctcttacaaggtgatcctcggtgcgcatcaagaggtgaacctggagccacatgtgcaagaaatcgaggtgagccgcctttttctcgagccgactagaaaagacattgcccttctgaagctgtcatcgccagctgtcatcactgacaaagtcatcccagcatgcctcccaagcccaaactatgtcgtcgcggaccggaccgagtgctttatcactggatggggtgaaactcagggtacctttggagcgggtctgctcaaggaggctcagctgcctgtcatagaaaacaaggtgtgcaaccgctatgagttcctgaacggaagggtccagtcaactgaactctgcgcgggacacctggcgggcggaaccgactcgtgccagggagattcgggcggaccgctcgtgtgctttgaaaaggacaagtatatcctgcaaggtgtgacttcgtggggccttggatgtgcacgcccaaacaagccaggagtgtacgtgcgcgtctcgcggttcgtgacctggatcgagggagtgatgaggaataat

SEQ ID NO: 6631 - DNA, 2430 bp, Artificial Sequence
  derived and/or modified sequence
atggagcacaaggaagtggtgcttctgcttctgctcttcttgaagtccggacagggagaacccctcgatgactacgtgaacactcaaggcgcatcactcttctccgtgaccaagaagcaacttggagcgggaagcatcgaggaatgcgcagctaaatgtgaagaagatgaagagttcacttgccgggccttccagtaccattctaaggagcagcagtgcgtgatcatggcggagaatcgaaagtcgtcgatcattatccggatgcgggacgtggtgctgttcgagaagaaagtgtacctgtcggaatgtaagaccggaaatggaaagaattaccggggaaccatgtcgaaaaccaagaacggcattacttgtcaaaagtggtcgtcaacttccccgcaccggcctagattctccccagcaacccatccctccgaaggattggaggagaattactgtcgtaatccagacaacgacccgcagggtccctggtgttacactaccgacccggagaagagatacgattactgcgacatcctggaatgcgaggaagaatgcatgcactgcagcggagagaattacgatggaaagatctccaagaccatgtcgggtctggagtgtcaggcatgggactcacaatctccacatgcgcacggctacatcccgtcaaagtttccgaacaagaatctgaagaaaaactactgcaggaaccctgatcgcgaacttagaccttggtgtttcactacggaccctaataagcggtgggaactgtgcgacatcccgcggtgtactaccccgccgccgtcatccggtccgacctaccagtgcctcaagggaaccggagagaactaccggggaaatgtggctgtgaccgtgtccgggcacacttgccagcactggtcagcgcaaaccccccacacccataatagaacccctgaaaacttcccttgcaagaacttggacgaaaactactgccggaacccagatggaaaacgcgccccttggtgccacaccaccaactcccaggtgcgctgggagtattgtaaaatcccatcatgcgattcatcgccggtgtcaaccgaacaactggcgccgactgcccctccggaactcactccggtggtgcaggattgctatcatggagatggccaatcctaccgtggcacgagctcaactactactaccggcaaaaagtgtcagtcatggtcctctatgacgcctcacagacaccaaaagactccggagaattaccctaatgctggcctcactatgaattactgccgcaacccagacgcagataagggtccgtggtgttttactacggatccatccgttaggtgggagtattgcaatctgaagaagtgctccggtactgaagcgtcggtggtggctccacccccagtcgtgctgctcccggatgttgaaaccccctcagaggaggattgcatgtttggaaacggtaagggataccgcggcaaaagggcgaccaccgtcaccggcacgccatgccaggattgggccgcccaagagccacatcggcatagcatctttactccggaaaccaaccctcgcgctggtctggaaaagaactactgtaggaacccagacggggacgtcggtgggccgtggtgctatactacgaacccgcgcaagctctacgactattgcgatgtgcctcagtgcgcagctccttcgttcgactgcggcaagccgcaggtggagccaaagaagtgcccgggaagagtcgtcggggggtgtgtggcacatccccactcatggccgtggcaagtgagcctgcgcaccaggttcggtatgcacttttgcggaggaaccttgatctcgccggaatgggttctcaccgcggcacactgtttggagaaatcacctcggccgtcgtcgtacaaagtgatcctgggggcgcaccaagaagtcaacctggaaccccatgtgcaggaaatcgaggtgagcaggctgtttctggaaccaaccagaaaggacatcgccctgctcaagctgagctcgccagcagtgatcaccgacaaagtcatcccggcctgcctgcctagcccgaactacgtggtggcggaccgcaccgaatgctttatcaccggatggggcgaaactcagggaacctttggagcaggtctgttgaaggaagcccaactcccggtgatcgagaataaggtttgcaacagatacgagtttctcaacggaagagtgcagtcgaccgagttgtgcgcaggacacctggcaggaggcactgattcgtgccaaggcgactctggaggaccactggtctgctttgaaaaggataagtacatcctccaaggagttacctcgtggggacttggctgcgctcggccaaacaagccaggggtgtacgttcgggtgtcgcggttcgtcacttggatcgaaggcgtgatgagaaacaat

SEQ ID NO: 6632 - DNA, 2430 bp, Artificial Sequence
  derived and/or modified sequence
atggaacataaggaggtggtgctgctgctcctcctcttcctgaagtcgggacaaggggagccactggacgactacgtgaatacccaaggggcctcgcttttttctgtgacgaaaaagcagctgggagctgggtctatcgaagagtgtgccgccaagtgtgaggaagatgaagaattcacgtgcagagcgttccagtaccacagcaaggagcagcaatgtgtcatcatggccgaaaaccgaaaatcatcaatcataatccggatgcgggacgtggtgctgttcgagaagaaggtctatctgagcgaatgcaagaccgggaatgggaagaactaccgcggaacgatgagcaagactaaaaacggaatcacttgtcaaaagtggtcctcaacctccccgcaccgcccgcggtttagccctgcgacccacccctcggaaggactcgaagaaaactattgtcggaacccggataacgatcctcagggtccttggtgctacaccaccgatccagaaaaacgctacgattactgtgacatcttggagtgcgaagaagagtgcatgcattgttccggggagaattacgacggcaagatatccaaaaccatgtcaggacttgagtgtcaggcatgggactcgcagtcccctcatgcccacgggtacattccctcgaagttccccaacaagaatctcaagaaaaactactgcagaaatcccgatcgcgagctgcgcccgtggtgctttaccacggatccaaacaagcgctgggaactgtgtgacatccccaggtgcaccaccccgccgccgtcctctggtccaacctaccagtgccttaaagggactggtgagaattaccgcggaaatgtggcggtgaccgtctctggacatacctgtcaacattggtcagcacagacccctcacactcataaccgcactcccgaaaacttcccatgcaagaacttggatgaaaactactgtcgcaacccggacggaaagagggctccatggtgccacaccaccaacagccaagtgaggtgggagtactgcaagatcccctcgtgtgattcgagcccggtgagcactgagcagctggcaccaaccgcgccccctgagctcactccggtggtgcaggattgctaccacggagacggccagtcgtatcgcggaacttccagcactaccaccaccggaaagaaatgccagtcatggtcgagcatgactccacatcggcaccagaaaactccggagaattacccgaacgcaggactgaccatgaactactgccggaaccctgacgccgataagggaccctggtgtttcactactgacccctcggtccggtgggaatactgtaacctgaaaaagtgcagcggaactgaggcctccgtcgtcgccccgcccccagtggtcctgctgccggacgtcgaaaccccatcagaagaggactgtatgttcggaaacggcaagggataccgcggaaaacgcgccacgaccgtgactggaactccttgccaagattgggcagcacaggaaccccacaggcattcgatcttcaccccagagactaacccgagagccggactcgaaaagaactactgtcggaacccagatggggacgtcggaggaccatggtgctatacgactaatcctagaaaactgtacgactactgcgacgtgcctcagtgcgcagcgccgtccttcgattgcggtaagccccaggtggaacctaagaaatgcccgggacgggtggtagggggttgcgtcgcgcatccgcattcctggccgtggcaggtgtcacttcggactcgattcggtatgcacttctgcgggggaaccctcatctcgccggagtgggtcctcactgcagcgcactgcctcgaaaagagccctcgcccatcaagctataaggtgattctgggagctcaccaggaagtcaacctggagccgcacgtgcaagaaatagaagtctcccgtctctttttggaaccaactaggaaggacatcgctttgcttaagctgagcagtccggctgttatcaccgacaaagtgatccccgcctgcctcccctcaccgaactacgttgtggctgacagaactgaatgcttcatcaccggatggggagaaacccagggcacgtttggagccgggctcctgaaagaggctcaactgccggttatcgagaataaagtgtgcaatcggtacgagtttctgaatggtcgcgtgcagagcactgagctttgcgccgggcacttggcaggtggcaccgactcctgccaaggtgactctggaggacctctcgtttgcttcgagaaagacaagtacattctgcaaggggtcacctcatggggcctcggctgcgcccggccgaataagccaggggtgtacgtgcgggtgtcccggttcgtgacctggatcgaaggagtcatgagaaataac

SEQ ID NO: 6633 - DNA, 2430 bp, Artificial Sequence
  derived and/or modified sequence
atggagcataaggaggtcgtgctgttacttctcttgttcctgaagtccggccagggtgagccactggacgactacgtgaacacacagggcgcctcccttttttcagtcacgaagaaacaacttggcgccggaagtattgaggagtgcgcagccaaatgcgaggaggacgaagagttcacgtgccgtgcattccagtaccattcgaaggaacagcagtgcgtgattatggcagagaatcgcaagagctcaataataattcggatgcgcgatgtagtgctgtttgaaaagaaagtttatctcagcgagtgtaaaaccggcaatggcaagaactaccgtggtacgatgtcgaagaccaagaacggcattacttgccaaaaatggagcagcacatccccccatagaccacgcttcagtcctgcgacccacccaagcgagggcctcgaggagaattattgccggaatccggataatgatccacaaggcccgtggtgctatacaacggaccccgagaagcgttacgactactgtgatatactggagtgcgaagaggaatgcatgcattgtagcggagaaaactacgacggtaaaattagcaagacgatgagcggtttggagtgccaagcttgggacagccaatcgccgcacgcccacggctacatccctagtaagtttccaaacaagaatttgaagaagaactactgtcgtaatcccgatagagagctccggccctggtgttttactacggatccaaataagcgatgggagttgtgcgatatccctcgatgcactacacccccaccctcaagtggtccgacctatcagtgcctaaagggaacgggagagaattaccggggcaacgtggcggtgaccgtgagcggacacacctgtcagcactggagcgcgcagactccacatacccataacaggactccggaaaatttcccgtgcaagaatctggacgaaaattattgccgaaacccagacggcaagcgagcaccgtggtgccacaccacgaatagccaggtgaggtgggagtattgtaagataccatcctgcgactcatccccagtctctaccgagcagctagcgccgaccgctccgcccgagctgaccccggtggtccaggattgctaccatggcgacggtcaaagctatagaggcacgagcagcaccaccacgactggcaagaaatgccaatcctggagcagtatgacaccacatcgtcatcaaaagacaccagaaaattatcccaacgcgggcctgacaatgaattactgcaggaaccccgacgccgacaagggcccgtggtgcttcaccaccgatccctccgtgcgatgggagtattgcaatctcaagaaatgttcgggcaccgaggcctctgtcgtcgcgcccccaccggttgtgctgctgcccgatgtcgaaacaccctccgaggaggactgtatgtttggcaacggtaagggataccgtggaaagcgcgccacgaccgtcaccggcacgccatgtcaggattgggccgcgcaggagccccaccgccactctatcttcacgccggagacgaacccccgcgcgggattggaaaagaactactgccgtaatcccgacggcgacgtcggcggtccgtggtgctatacaacgaatcccaggaaactgtacgactattgcgatgtcccccaatgtgcggcgccatcgtttgactgcgggaagccacaagtcgagccgaaaaagtgtccaggccgcgtggtggggggatgcgtcgcacatcctcattcatggccatggcaggtgagcttacgcacgaggtttggcatgcatttttgtggcggcacgctcatttccccagagtgggtgttgaccgcggcccattgtctggaaaagtcgccccgcccgtcttcctacaaggttatcttgggagcacaccaggaagttaacttggagccacatgttcaggagatcgaagtgagccgcctcttcctggagccgactcgcaaagacatagcgctattgaagttgtccagcccggcggtgattactgataaggtcattcctgcatgcttgccctcgcccaattacgtggtggcggatcggactgagtgtttcataaccggctggggagaaactcagggtacgttcggcgcgggactgctgaaggaagcgcaactgcccgtgattgagaacaaggtgtgtaatcgctatgagttcctaaatggccgtgtgcagagcacggaattgtgcgcgggccacttggcaggcggtaccgatagctgtcagggcgattcggggggtcccctcgtatgctttgaaaaggataagtatatcctgcaaggagttacatcgtggggcctgggctgcgcacgcccaaacaagcccggtgtgtacgtgcgggtctcgcgcttcgtgacatggatagaaggtgtcatgaggaacaac

SEQ ID NO: 6634 - DNA, 2430 bp, Artificial Sequence
  derived and/or modified sequence
atggaacacaaagaggtcgtgctgctgctgctcctgtttctcaaaagcggacaaggagaaccactcgacgattacgtgaatactcagggtgcaagcctcttctcggttaccaagaaacagttgggagctggcagcatcgaagaatgtgcggccaaatgcgaggaggacgaggagttcacttgccgcgcattccagtaccactccaaggaacagcaatgcgtcattatggcagaaaacaggaaatcgtctatcatcattagaatgcgggacgtggttctcttcgaaaagaaggtctacttgtcggagtgcaagaccggaaatggcaagaactacagaggcaccatgtcgaaaactaagaacggcattacctgccagaaatggtcgagcacgtcccctcataggccgcggttctcaccggctactcacccgtcggagggactcgaagagaattactgtcggaaccccgataatgacccacagggaccgtggtgctacactactgacccggaaaaacgctacgattactgcgatatcctcgagtgcgaagaggaatgtatgcactgtagcggagagaattacgatggtaagatctcgaaaactatgtcgggtctggaatgtcaagcctgggactcgcagtcgccccacgcccacggatacatcccttcgaagttccctaacaagaatctcaaaaagaactactgccggaacccggaccgggaacttcgcccgtggtgtttcactaccgacccgaacaagcgctgggaactgtgcgacatcccccggtgtaccacgcctccaccatccagcgggccaacctaccagtgtctgaaaggaactggagagaactaccggggaaatgtcgcagtcactgtgagcggacatacgtgccagcattggtcagctcagaccccgcatacccacaaccggactcccgaaaacttcccgtgcaaaaacttggacgaaaactattgccggaatccggatggcaagcgggccccttggtgtcacactaccaatagccaggtgcggtgggagtattgtaaaatcccgagctgtgattcatcaccggtgtcaaccgaacaactcgcccccactgcaccccccgagctgaccccggtcgtgcaagactgctaccatggggacggtcagtcctaccggggaacctcgtcaaccaccactaccgggaagaagtgtcagtcatggtcgtcaatgacccctcatcggcaccagaaaacgccggagaactatccgaacgctgggctgactatgaattactgcagaaatccggacgccgacaagggtccatggtgttttaccaccgacccctccgtgcggtgggaatattgcaaccttaagaagtgttcgggtactgaagcctccgtcgtggccccgccgccggtggtgctgcttccagatgtggaaaccccctccgaagaggactgcatgtttgggaacggaaaggggtacaggggtaagcgggcgaccactgtcaccgggactccctgccaagattgggccgcgcaagaaccccatcggcattcaattttcactccggaaactaacccccgggccggactggagaaaaactattgtcggaatcctgatggagatgtgggaggaccgtggtgttataccaccaatccgaggaagctctacgattattgcgacgttccacagtgcgcggccccttcgtttgactgcggaaagcctcaagtagaacccaagaagtgcccaggacgcgtggtgggagggtgcgtcgcgcatccccacagctggccatggcaggtgtccctgagaactaggtttgggatgcatttctgcggaggaactttgatcagtccagagtgggtgctgaccgccgcccactgtctggaaaagtcccctcggccatcaagctacaaggtgatcttgggggcgcaccaagaagtgaatctggagcctcacgtgcaggagatcgaggtgtcgcggctcttcctggaaccaacccgcaaggatattgccctgttgaagctctcgtccccggccgtgatcaccgacaaggtgatcccggcctgcctgccatctccgaattacgtggtcgccgatcggactgagtgcttcatcactggatggggagagacgcaaggtactttcggtgcgggcctgctgaaggaggcacagctgccagtgattgagaataaggtgtgtaaccgctacgaattccttaacggaagggtacaatctaccgaattgtgtgctggtcacctcgcaggaggcaccgatagctgccagggagattcgggaggaccgctggtgtgctttgagaaggacaagtacatcctgcagggagtgacgtcctgggggctcggatgcgctagaccaaacaaacctggcgtgtacgtgcgcgtctcgcgattcgtgacgtggatcgaaggcgtcatgcgcaacaac

SEQ ID NO: 6635 - DNA, 2430 bp, Artificial Sequence
  derived and/or modified sequence
atggaacacaaggaagtggtgctgctcctgctcctcttcctgaagtcagggcagggggagcctctggacgattacgtcaatacccaaggtgcctcgctcttcagcgtgactaagaagcagctgggagcaggatccatcgaggagtgcgccgcgaaatgcgaagaggatgaagaattcacgtgccgagcgttccaataccactccaaggaacaacaatgcgtgattatggccgagaatcggaagtcgtcgatcataattcggatgcgcgacgtggtgctgtttgagaagaaggtgtatctctcggagtgcaaaaccggaaacggaaagaattaccgcgggaccatgagcaaaaccaagaatggtatcacttgccaaaaatggagcagtacttccccgcatcgcccaaggttctcgccggcaacgcatccgagcgagggacttgaagagaattactgtagaaacccagataacgatccccagggaccctggtgctacactaccgaccctgaaaagagatacgactactgcgatattcttgaatgcgaagaagaatgcatgcactgtagcggcgagaactacgacggtaagatttccaagactatgagcggtctggaatgtcaggcatgggactcgcagtccccgcacgcgcacggatacatcccttcaaagttccctaacaagaatctgaaaaagaactattgccggaatccggatcgggaactgcgtccatggtgttttactaccgaccccaacaaaagatgggagctctgcgacattcccaggtgcactactcctccaccaagctccggccctacctatcaatgcttgaagggcacgggtgagaactatagaggaaacgtggctgtgacggtgtcggggcatacctgccaacactggtcagcacagactccgcatactcacaaccggactccagagaacttcccttgtaaaaaccttgacgagaactactgtcgcaatccggatggaaagagagctccctggtgtcataccaccaactcacaggtccgctgggagtactgtaagatcccgagctgtgactcgtcacccgtgtccacggaacagctggctccaaccgctccgccagaactgactccggtagtccaggattgctaccatggtgatggacagtcctaccgggggacctcgtccaccaccactaccgggaagaagtgccaatcatggtcgtccatgaccccgcatagacaccaaaagaccccggaaaactacccgaacgcgggactcaccatgaactattgtcgaaacccagatgccgataagggcccttggtgcttcacgactgatccatcggtgcggtgggaatattgcaacctgaaaaagtgttctgggactgaagcgtccgtggtggccccgccaccggttgtcctgctgcctgacgtcgagactccgtcagaggaggactgcatgttcggaaatggaaaaggatacagagggaagcgggccactacggtgactggaactccgtgccaagactgggcagcccaagaaccacatcgacactctatcttcaccccggagactaacccgcgcgctggactcgagaaaaactactgccgaaatccggacggagacgtcggaggcccgtggtgctacaccaccaaccctcgcaagctctatgactactgtgacgtgcctcagtgcgcggcaccgagtttcgattgcggaaagccgcaagtcgagccaaagaagtgcccaggcagggtggttgggggctgcgtggcccaccctcattcgtggccatggcaggtgtcgcttagaacccgctttggaatgcacttttgcggcggtaccttgatctcgcccgagtgggtgttgaccgccgcacattgcctcgaaaagtccccaaggccatcgtcctacaaagtgatcctgggcgcccaccaagaagtgaacctggaaccgcatgttcaggagatcgaagtgagccggctctttctggagcctactcggaaagacatcgcactcctgaagttgagctctcccgctgtgatcacggataaggtgatcccggcctgtctgccgagcccaaactacgtggtcgccgaccggactgagtgttttatcaccggatggggagaaacccaagggactttcggagcgggcttgctcaaagaagcccagctgcccgtcattgagaataaagtgtgcaaccgctacgaattcctgaacggaagggtccagtccacggaactgtgcgcaggccatctggccggagggactgactcatgccaaggggactcaggcggcccgctggtctgcttcgaaaaggacaagtacattttgcagggagtcacgtcctggggactgggatgcgcacggccgaataagccgggagtctatgtaagggtatcgagattcgtgacctggatcgaaggagtgatgcggaacaat

SEQ ID NO: 6636 - DNA, 2430 bp, Artificial Sequence
  derived and/or modified sequence
atggaacataaagaagttgttctactacttttacttttccttaaatcaggacaaggagaacctttagatgattatgttaatacacaaggagctagtcttttttctgttacaaaaaaacaacttggtgcaggaagtattgaagaatgtgcagctaaatgtgaagaagatgaagaattcacatgtagagctttccaatatcattcaaaggaacaacaatgtgttattatggcagaaaatcgaaagtcatcaataattattagaatgagagatgtagttttatttgaaaaaaaggtttacttatcagaatgtaaaactggtaatggaaaaaattatagagggacaatgtcaaaaactaaaaatggaattacatgtcaaaaatggtcttcaacatcaccacatagaccaagattttcaccagcaactcatccatcagaaggtcttgaagaaaactattgtcgtaacccagacaatgatccacaaggaccttggtgttatactacagatccagaaaaaagatatgattattgtgatattttagaatgtgaagaagaatgtatgcactgttcaggagagaactatgacggaaaaatttctaaaactatgagtggattagaatgtcaagcatgggattcacaatcacctcatgctcatggatacattccaagtaaatttcctaataagaatttaaaaaaaaattattgtagaaatccagatagggaacttagaccatggtgttttactacagatccaaataaaagatgggaattatgtgatattccaagatgtactacacctcctccatcatctgggccaacttatcaatgtttaaaaggaacaggggagaattaccgaggaaatgtagcagttactgtttcaggacatacatgtcaacattggtcagctcaaacaccacatactcataatcgaactccagaaaattttccatgtaagaatttagatgaaaattattgtcgtaacccagatggaaaaagagctccatggtgtcatacgacaaacagtcaagttagatgggaatattgtaaaattccaagttgtgatagttcaccagtatcaaccgaacaattagctccaacagcaccaccagaattaacaccagtagtacaagattgttatcacggtgacggtcaatcttatcgaggaacatctagtactacaacaactggaaaaaaatgtcaatcttggtcatctatgacacctcatcgtcatcaaaaaactccagaaaattatccaaatgctggattgacaatgaattattgtagaaatccagatgcagataaaggaccatggtgttttacaacagatccatcagttcgttgggaatactgtaatttaaaaaaatgttcaggaactgaagcatctgttgttgcaccacctccagttgttttattaccagacgttgaaacaccaagtgaagaagattgtatgtttggaaatggaaaaggatatagaggaaagagagctactacagttactggtactccatgtcaagattgggctgcacaagaaccacatagacactcaatatttactccagaaactaatccaagagctggacttgaaaaaaattattgtagaaatccagacggagatgtaggtggtccatggtgttatacaacaaatccaagaaaattatacgattattgtgatgttccacaatgtgcagctccatcatttgactgtggtaaaccacaagttgaacctaaaaaatgtccagggagagttgtaggaggatgtgttgctcatccacattcatggccatggcaagttagtctcagaactagattcggaatgcatttctgtggagggacattaataagtccagaatgggttcttactgctgcacattgtttagaaaagagtccaagaccttcttcttataaagtaatattaggtgcacatcaagaagttaatttagaaccacacgttcaagaaatagaggtatctagattatttttagaaccaaccagaaaagatattgctcttttaaaactaagtagtccagcagttattactgataaagtaattccagcttgcttaccatccccaaattatgtagtagcagatagaacagaatgtttcattactggatggggagaaactcaaggaacatttggagcaggattacttaaggaggcacaacttcctgttattgaaaataaggtttgtaatagatatgaattcttaaatggacgtgttcaatcaacagagctttgtgcaggtcatttagcaggaggaacagattcatgtcaaggagatagtggtggaccacttgtatgttttgaaaaagataaatatattttacaaggagtaacatcctggggactaggttgtgcaagaccaaacaaacctggagtatatgtaagagttagtagatttgtcacttggatagaaggagttatgagaaataat

SEQ ID NO: 6637 - DNA, 2430 bp, Artificial Sequence
  derived and/or modified sequence
atggagcacaaggaagtcgtcctgctgctcctgttatttctaaaaagcggccagggcgaacccctggacgactacgtcaacacccagggagcatctctattttcagtcacgaagaagcagttgggcgctggcagcatcgaggaatgcgctgccaaatgcgaggaagacgaggagttcacctgtcgagctttccaataccactccaaagaacagcagtgcgtgatcatggcagagaatagaaagtcctccataattatccgaatgagagatgttgttctgttcgagaaaaaagtctacctgtctgaatgcaagacgggaaacggaaagaactatagaggtacgatgtccaagactaagaatggcataacttgccagaaatggtcctctacctccccccatagaccccggttctcccctgccacccacccatccgaggggttagaggagaactactgtaggaaccccgacaacgaccctcagggaccatggtgctacaccacggatccagagaaacgatacgactactgtgacattctggaatgtgaagaagagtgcatgcattgcagcggagagaactacgacggcaaaattagcaaaaccatgagtgggctggaatgtcaggcttgggatagccagagcccccatgctcacggctacataccaagtaagtttcccaacaaaaatctcaaaaagaactactgcagaaatcccgacagagagctacgaccttggtgcttcacaactgatcctaacaaacgctgggaactttgcgatatacctcggtgtaccacaccacctccttccagcggccccacgtatcagtgccttaaaggcacaggagagaactaccgggggaacgttgccgtcactgtgtcaggtcatacctgtcagcactggagcgcgcaaactccacatacacacaaccgcacaccagaaaactttccttgcaagaatctggatgaaaattattgtcggaaccccgatggcaagcgcgctccttggtgtcacactaccaacagccaggtcagatgggagtactgtaaaattccgagctgcgatagcagccctgtttctactgagcagttggcccccactgcccccccagagcttactcccgttgtccaggactgctatcacggcgatggccaatcctaccgaggaaccagctcgactacaactaccggtaaaaagtgtcagagctggagttctatgacaccccaccgtcatcagaaaacccctgaaaactatcccaacgcaggattgaccatgaactactgtcgtaacccagacgcggacaaaggtccttggtgctttacaaccgacccctccgtccgttgggagtactgcaaccttaagaagtgttccggtactgaggcatcagttgtcgccccacctcccgtggttctgctcccagatgtcgaaacaccaagtgaggaagattgcatgtttggaaacggcaagggatacagggggaagcgagccacaaccgtgactggcacaccttgccaagactgggcagcacaggagcctcacaggcacagtatctttacacctgagacaaatccccgagcaggtctagagaaaaattattgcagaaatccggatggcgacgtgggaggaccttggtgttacaccacgaatccccggaagctgtatgattattgcgatgtgccacagtgtgccgccccttcttttgactgtgggaagccgcaggtagagcccaaaaagtgtcctggcagggttgtcgggggttgcgtggcacaccctcacagttggccatggcaagtgtcccttcgcacgcgctttggaatgcacttttgtggcggtacgctgatctcgcccgagtgggttctgaccgcggcccactgtttggagaagtcacctaggccatcatcgtacaaggttatccttggggcgcaccaggaagttaatcttgagccccacgtgcaggagattgaggtaagtagactctttcttgagcccacacggaaggacattgcgcttttgaagctgagctcacccgccgttatcacagataaagtgatcccggcctgtctaccgtctccaaactatgttgtggccgatagaacggaatgcttcatcacaggatggggggagacccagggaacgtttggcgctgggctgctgaaagaagcccaacttcccgtcatcgagaacaaagtctgtaaccgctacgagtttctcaacggacgcgtgcagagcacagagctgtgcgctgggcatcttgccggaggcacagattcttgtcaaggcgattcaggaggtccgcttgtctgcttcgagaaggataaatacattttacagggcgtaacctcatggggtcttgggtgtgcaaggccaaacaaaccaggagtttatgtaagggtgagcaggtttgtgacatggatcgaaggggtgatgcgcaacaac

SEQ ID NO: 6638 - DNA, 2430 bp, Artificial Sequence
  derived and/or modified sequence
atggaacacaaagaagtagtcctcctgcttctgctgttcttgaaatctggacagggcgaacccctggacgactacgttaatacccagggcgcatctttgttctccgtgactaaaaagcaactgggcgctggctctatcgaagagtgcgctgccaagtgtgaggaagatgaggagttcacatgtagagcttttcagtatcattctaaagagcagcagtgcgtgattatggccgaaaatagaaagagctctatcatcatccgtatgcgcgacgtggtgttgttcgagaagaaagtgtatctcagcgaatgcaaaacaggcaatggtaagaattacaggggcacaatgtctaagacaaagaatggtataacatgccagaaatggtcctccacttcacctcatcgccctcgcttctcacctgcaacacatccaagcgagggcctggaggagaactactgcagaaatcctgacaatgaccctcagggaccctggtgttacaccactgacccagaaaaacgctacgactactgtgatattttggaatgcgaggaggaatgcatgcactgctctggtgagaattatgacggaaaaatcagtaagacaatgagcggactcgaatgtcaagcttgggactctcaaagccctcatgcacacggctacatccccagtaagttccccaacaagaatctgaagaagaactactgcaggaatcccgacagagaattgaggccctggtgtttcactacagaccctaataaacgttgggaactctgtgatatcccccgttgtactacacctccacctagttctggccccacataccaatgcctcaagggcacaggtgaaaactatcgcggaaacgtcgccgtgaccgtgtccggccacacatgccagcactggtccgctcagacccctcatacccataaccgcacccctgagaacttcccttgtaaaaacctggatgaaaactattgcagaaaccccgacggcaagagggccccatggtgccatactacaaactcccaagtccgttgggagtattgtaagatcccctcatgcgatagctctcctgtgagtactgaacagctcgcacctaccgctccacccgagctgacacccgttgtgcaggattgctaccatggagacggtcagtcttaccgtggcacctctagtactacaacaaccggtaagaaatgtcaatcctggtcatccatgactccccatcgtcaccagaagactcccgagaactatccaaacgctggtttgaccatgaactattgtcgcaaccccgacgctgataagggaccttggtgtttcacaacagatcccagcgtacgttgggagtactgcaatttgaagaagtgctcaggtacagaggctagtgtcgtcgctcctccacctgtcgtccttttgcccgacgtggagacccccagtgaagaggattgtatgtttggaaacggcaagggttataggggtaagagggccacaacagtgacaggcaccccctgccaagactgggcagcacaggagccccacaggcattcaatcttcactccagagaccaacccacgtgctggtcttgaaaagaattactgtaggaacccagatggcgacgtgggtggcccatggtgctacacaactaatcccaggaaattgtacgactactgcgacgtgcctcagtgcgctgcaccttccttcgactgcggaaagcctcaggttgagcctaagaagtgccccggaagggtggtcggtggttgcgtcgcccatccacactcatggccttggcaagtttccctgaggacacgttttggcatgcacttctgcggcggcacactgatttcccccgagtgggtcctgaccgccgcccactgcctggagaaaagccctcgccccagttcctataaggtaattctgggtgcccaccaggaagtgaatctcgagccacacgtacaagagatagaggtttctcgtttgttcctggagccaactcgcaaggatatcgctctgctgaagcttagcagtcccgccgtgatcaccgacaaagttatcccagcctgtttgccctccccaaattatgttgtagcagataggacagaatgttttatcaccggctggggagagacacaaggaacattcggtgccggacttttgaaggaggctcaactgcctgtgatcgaaaataaggtgtgtaaccgttacgagttcctgaatggacgcgtgcagtcaacagaactttgcgctggacacctggccggcggtaccgattcatgccagggcgactcaggtggtccccttgtttgcttcgagaaagacaaatacatcttgcaaggtgtcacctcctggggactgggatgcgccagacccaacaagcccggcgtttatgtacgcgttagcaggtttgtaacttggatcgagggagtcatgcgtaataac

SEQ ID NO: 6639 - DNA, 2430 bp, Artificial Sequence
  derived and/or modified sequence
atggagcataaggaggtcgtgctcctccttctgctttttctaaagagcggccagggcgaacccctggatgattatgttaatacgcagggagctagtcttttcagcgtgaccaagaagcaattgggcgctgggtccatcgaagagtgtgcagctaaatgtgaagaagacgaagaatttacatgtagggccttccagtatcactccaaggagcaacagtgtgtgatcatggccgaaaatcgcaagtcctcaattattatccggatgcgtgatgttgttttatttgagaagaaagtgtacttgagtgaatgtaagaccggcaacgggaagaactacaggggtactatgtcaaaaacgaagaacggcatcacgtgtcagaaatggtcctccaccagcccacatcgaccaagattctctcctgcgactcatccgtccgagggactggaggaaaattactgtcgcaaccccgacaatgacccacaaggaccatggtgttatacaaccgatccagagaaacgttacgattactgtgatattctggagtgcgaagaagaatgcatgcattgttcaggggaaaactacgacggaaaaatttctaagacaatgtcgggtttagagtgtcaagcctgggatagccagtctccacacgcccatgggtatatcccctccaaatttcccaacaagaacctgaaaaagaattactgtcgcaatcctgaccgggagctccggccatggtgcttcacgacagaccccaataagcgctgggaactttgcgacattcctagatgcactactccgcctccttcttccggaccgacataccagtgcctgaagggaactggagagaattacaggggcaatgtggcggttactgtgtccggtcacacgtgccagcattggagcgctcagacaccccacacacacaaccgcactccagaaaattttccctgtaaaaacctggacgagaactactgtcgcaatcctgatggaaagagggcaccatggtgccataccactaattcccaagttaggtgggagtattgcaagattccgagctgcgacagttcaccggtgtctaccgagcagctggccccaactgcccctcctgaacttacgcccgtggtgcaggattgctaccatggtgatggccagtcctataggggaactagctccactaccacgacagggaaaaagtgccagagctggtcgtctatgacgccgcaccgacaccagaagactcccgagaactacccgaacgccggcctgactatgaactattgccggaatcccgacgcggacaaggggccgtggtgctttaccactgacccttctgtgaggtgggagtactgcaatctcaaaaaatgttcagggactgaagcttcagtggtagcccctccaccagtcgttttactcccagatgttgagaccccttctgaagaggactgtatgtttggaaacggaaagggctatcggggtaagagagcaacgacggtgacgggtaccccatgtcaagactgggcagcccaagagccacacagacactcaattttcactcctgaaacgaatccccgggccggcttggagaagaattattgccggaacccagacggcgatgtcggcgggccctggtgctatacaaccaaccctcggaaactatacgactactgcgacgtcccccagtgtgccgccccatcattcgactgtggcaaaccacaggtggaaccaaagaagtgtcccgggcgcgtcgttggggggtgcgtggctcatccacactcttggccatggcaggtttcactgcgtactcgatttgggatgcatttttgcggcgggactctaatttctcctgaatgggtgctgaccgcggcccactgtctggagaaatctccaagaccttcaagctataaagtaatactgggcgcgcaccaggaggtgaatctggagccccacgttcaggaaatagaggtgtcccgactgttccttgagccaacccgtaaggatatcgctctgttaaaattgagctctcccgccgtgataacggacaaagtcattcctgcttgtcttccttctcccaattacgtggtggcggacaggaccgaatgcttcatcaccggatggggcgagacccaaggcaccttcggggctggcctgcttaaagaagcccagctccccgtcatcgagaataaagtgtgcaacaggtacgagtttttaaatggccgcgtccagtccactgagctgtgtgctggccacctggccggagggaccgactcatgccagggagattcaggcggaccactggtttgctttgaaaaggataagtacatcctgcagggtgtcacatcgtggggcctggggtgtgcaaggcccaataaacctggagtctatgtgcgcgtgagtaggtttgttacatggatagagggcgtcatgcgaaacaac

SEQ ID NO: 6640 - DNA, 2430 bp, Artificial Sequence
  derived and/or modified sequence
atggagcataaggaggtcgtactgctgctcctcctctttctgaagtccgggcagggcgagcccctggatgattatgtgaatacacaaggcgcctccctgttcagcgttaccaagaagcaactgggtgccggatccatagaggagtgcgcggctaagtgtgaggaagacgaggagttcacttgtcgcgcgttccaataccactcaaaggaacagcagtgcgtgatcatggctgaaaaccggaaaagctctatcattattagaatgcgagacgtcgtgctgttcgaaaagaaggtgtaccttagtgagtgtaagaccgggaatggcaagaactacagaggcacgatgtccaagactaaaaacggaataacgtgtcagaaatggtcatccacgagcccacatcgccctcggttctctccagcaacgcacccctccgagggcctggaggagaactactgcaggaatcccgacaacgacccccagggcccctggtgctacacaaccgaccctgaaaagaggtatgattactgtgatatcctggaatgtgaggaggagtgcatgcactgcagtggggagaattacgatggaaagataagtaagacaatgtctgggctcgagtgccaagcatgggacagccagagcccccatgcacatggctatattccgtccaagttcccgaacaagaatctgaagaagaattattgccgcaacccagaccgagaacttcgaccctggtgtttcacgacagaccccaataagaggtgggaattgtgcgatatccctcgatgcaccacacctcctcccagctctggtcctacctatcagtgcctgaagggcaccggcgagaattatcgaggtaatgtcgcggtcaccgtgtccggccacacctgtcaacactggtccgcccagaccccacacactcacaaccgaactcccgaaaatttcccctgtaaaaaccttgacgagaactactgccggaatccagatggcaagcgagcaccttggtgccacacgaccaattcacaggttcggtgggagtactgtaaaatcccatcctgcgattcatctccagtttcaaccgaacagcttgcccccactgccccccctgagctgaccccagtagtgcaggattgttaccacggagacggacagagctacaggggtaccagtagcacaacaacaaccgggaagaagtgccagtcctggagctccatgactcctcaccggcaccagaagacaccggagaactaccccaacgccggtcttactatgaactattgccgcaatcctgacgcagacaagggaccttggtgctttacgaccgatccttctgtgcgctgggaatactgcaacctgaaaaaatgtagcgggacagaggcatctgtggttgcacccccccccgtcgtcctcctccccgatgtcgagaccccttcagaagaggactgtatgtttgggaatgggaagggatatcggggcaagagagcaacaaccgttacagggacaccgtgccaggactgggcagcacaagagccccaccgccatagcatcttcactcccgagactaacccgcgggccggcctggagaagaactactgtcgaaatcccgacggcgacgtcggggggccctggtgttatactaccaatccacgcaagctctatgattattgcgacgtgccacaatgtgccgctccgtcatttgattgtggaaaaccacaggttgagccaaaaaagtgtccaggtcgcgtcgttggaggatgtgtcgcccatccacactcctggccgtggcaggtgtcattgcgcacccggttcggcatgcatttttgcggaggaaccttgataagccccgaatgggtattgacagccgcccactgtctggagaagtcaccgcggccatctagctataaagtgattctgggagcccatcaggaggttaacctcgagcctcacgtacaagagattgaggtctctcgccttttccttgagccaacacgcaaagacatcgctctcctgaagctcagttcccccgccgtgatcactgataaggtgatcccggcttgtctcccaagtccgaactatgttgtcgccgacaggactgaatgttttatcacaggttggggagagactcagggcacgttcggagctggtctgttgaaagaggctcaactgcctgtgatagagaataaggtgtgcaacaggtatgaattcctgaacggccgagttcagtcaactgagttgtgtgctggacatttggctggcggcaccgattcttgccagggcgactccggaggaccacttgtgtgtttcgaaaaagacaagtacatcctgcagggagttacctcctggggcctgggatgcgccagacccaataagccaggcgtgtacgttcgagttagcagatttgtgacctggattgagggcgtcatgcgaaacaac

SEQ ID NO: 6641 - DNA, 2430 bp, Artificial Sequence
  derived and/or modified sequence
atggagcacaaagaagtggtgctgctgctcttgcttttcctgaagagcggacaaggcgagcctctggatgattatgtgaacacccagggagcctccctcttttccgtaacaaaaaaacagctgggcgcagggtctatagaagagtgcgccgccaaatgcgaagaggatgaggaatttacttgtcgcgctttccagtaccactccaaggagcagcaatgcgttattatggccgagaatcgcaagtcctctattattatcaggatgcgggacgtggtgctctttgaaaaaaaggtgtatctctctgagtgcaagaccggaaatgggaagaattatcgaggaaccatgagtaaaacaaagaacggtatcacctgtcagaagtggagcagcacctctccgcaccgcccccggtttagccccgctacccatccaagcgagggcctggaggagaactactgtcgtaacccagataacgacccccaaggtccttggtgttatacaacggaccctgaaaagcgctatgattactgtgacattctcgagtgtgaagaggagtgtatgcactgtagcggcgagaactacgacggcaaaatctcgaaaacaatgagcggtctcgagtgccaggcgtgggacagtcagtcaccccacgctcacggctacatccctagtaagttccccaacaagaacctgaagaaaaactattgccggaaccctgatagagaattgcgcccttggtgctttactactgaccctaataagagatgggaattgtgtgacatccctagatgcactaccccaccaccatcgagcgggccaacatatcaatgccttaaaggtacaggcgagaactaccgtggaaatgtggcagtcaccgtgagtggccacacttgccagcattggtctgcccagacaccccatacccacaacagaacaccagaaaacttcccctgtaaaaacctggacgaaaattattgtaggaatccagatggaaaacgggcaccctggtgccatacaactaatagtcaggttcgctgggagtactgtaaaattcctagctgcgactcatctcccgttagcaccgagcaactcgcccctacggctccccccgaactgactcctgtggtccaagactgctaccacggggatggacagtcttatcgtggcacttcctccacaaccaccacagggaagaagtgccagagttggagcagcatgactcctcaccgacaccagaagacacctgagaattatccgaacgccggccttacaatgaactattgtcgtaatcccgatgctgacaaggggccttggtgtttcaccacagatccctccgtcaggtgggagtactgcaacctcaagaagtgttcaggcactgaagcatctgtggtagcgcccccgcccgtagtgctgctcccagacgtcgagaccccctccgaagaggattgcatgttcggcaacggcaagggctacaggggcaaaagagctactacggttactgggacaccatgccaggattgggcagcgcaagaaccacacagacacagcatcttcacacccgagaccaatccccgcgctggactcgagaaaaattattgccgaaacccagatggcgacgtcggcggtccttggtgttacacaacaaaccctcgcaagctatacgattattgtgacgtccctcagtgtgcggcccctagttttgactgcggaaagcctcaggttgaacctaagaagtgcccggggagagtcgtgggaggctgtgttgcacacccccatagttggccttggcaagtaagcttaaggacaaggttcggaatgcatttctgtggcggcacgctaataagccctgaatgggtcttaaccgccgcacactgtctggagaagtcgcctaggccttctagttacaaagtcatcctcggcgcccaccaggaggtaaacctggagccccatgtccaggagattgaagtgtccaggctgtttttggagccaacacggaaggacatcgccctgctaaaactgtcctccccagcagtaatcacagataaggtcatccccgcatgtttgcctagccccaattacgtcgtggctgaccggaccgagtgcttcatcacaggatggggtgagactcaggggaccttcggagctgggctgctaaaagaggcacagttgccagtcattgagaataaggtttgcaatcgctacgaattcctgaacggacgcgttcagtccacagagctgtgcgcagggcacttagcgggaggaaccgattcctgtcagggagattctggagggccattggtatgctttgagaaggacaaatacatcctgcaaggggtgaccagctgggggttaggctgcgcacggccaaacaaacccggagtgtacgtccgcgtatcacgcttcgtgacgtggatcgaaggggttatgcgaaacaac

SEQ ID NO: 6642 - DNA, 2430 bp, Artificial Sequence
  derived and/or modified sequence
atggagcacaaggaagtcgttttactgctgttgctctttttgaagtcgggacagggtgagccattggacgactatgtgaatacacagggagcctctctctttagcgtaacaaaaaagcagctgggtgcagggtccattgaggaatgtgccgctaagtgtgaagaggacgaggagtttacctgcagggccttccagtatcactcaaaggaacagcaatgtgtcattatggcggagaataggaagtctagcatcattatccgcatgcgcgacgttgtcctgttcgagaaaaaagtatatttatcagaatgtaaaacagggaacggcaaaaattaccgtggcacgatgtctaagaccaagaatgggattacatgtcagaagtggagttccacatccccgcatcgtccccgattttccccagctacgcaccccagtgaggggcttgaagaaaactactgcaggaaccctgataatgacccgcagggcccatggtgttatactacagatccagagaagcgttatgactactgcgatattctcgagtgtgaggaggagtgcatgcattgcagcggcgaaaactacgatggaaagatctctaagacaatgtcaggcttagagtgccaggcgtgggacagtcagagtcctcatgcccacggttacattccctcaaagtttcccaataaaaatcttaaaaagaactattgtcgcaaccctgatcgggagttgcgaccatggtgtttcaccaccgatccaaataaacgctgggaactttgtgacatcccgcggtgcacgacccctcctccaagctccgggcctacatatcagtgtctcaaaggcaccggagaaaattacaggggcaacgtagctgttaccgtctcaggccatacatgccagcactggagtgctcaaactccacacactcataatcgcacccctgagaactttccatgcaaaaatcttgatgagaactattgccgtaaccccgacggtaagcgggcaccctggtgccacactaccaattcccaggttaggtgggagtattgtaaaatcccctcctgtgacagctctcctgtgtctactgagcaattggctccaaccgccccgccagaactgacccctgttgtgcaagactgctatcacggcgatggacaatcctatagggggacgagctccaccacaaccaccggcaaaaaatgtcagtcttggagctctatgacaccccacagacaccagaaaactcctgagaattacccgaacgccggcctcactatgaattattgtcgtaatcccgatgcggacaagggcccatggtgcttcaccacagacccttctgtcagatgggagtattgcaatctgaagaaatgcagtggcactgaagcatccgtagttgccccaccaccggtggtgctattgcccgacgtggagaccccctcagaggaggattgtatgttcgggaacggaaagggttatcggggaaagcgggctacgactgtgacagggactccctgccaggactgggctgcacaagaacctcacaggcacagtatatttacaccagagaccaatcccagggcgggccttgagaagaattactgccgcaaccccgatggggacgttggcgggccgtggtgctacaccaccaatccacgcaagctctatgattactgcgacgtcccgcagtgtgcagcaccgtcctttgactgcggaaagcctcaagtggagcctaaaaagtgtccgggacgggttgtcggcgggtgcgtggcgcatccacacagttggccatggcaggtgtctctgaggacgcggtttggtatgcatttctgcggagggacgctgatctctccagagtgggttcttaccgcagctcactgcctggaaaagtcgcctcgcccttcttcatataaggtgatcctgggagctcaccaggaggttaatttggagccacacgtacaggaaatcgaggtgtcgcggctgttcctggaacccacacgcaaggacattgcgctcctaaagctaagctctccggctgtaattacagacaaagtcattcctgcctgcctgccaagtccaaattacgttgtagcggacagaactgagtgcttcattactggctggggcgagacacagggaacttttggtgcggggctgctgaaagaagcgcagctcccagttatcgagaataaggtatgcaatcgctatgagtttttgaatggccgcgtgcagagtaccgagctgtgcgcagggcatctagctggaggcactgattcctgccagggtgattccggcgggcccctcgtgtgtttcgaaaaggataagtacatcctgcagggagttactagctggggcttaggatgcgctcgtcccaataagcctggcgtttacgttcgcgtaagcagatttgtcacctggatagaaggcgttatgcgtaataac

SEQ ID NO: 6643 - DNA, 2430 bp, Artificial Sequence
  derived and/or modified sequence
atggaacataaggaagtcgtcctgctcctcctgcttttccttaaatcaggacaaggtgagccacttgacgactacgtcaatacccagggagcctcactgttttcggttaccaagaagcagctgggcgcgggctcgattgaagaatgcgccgccaaatgcgaggaggacgaggagtttacttgtcgcgcgttccagtaccactcgaaagaacaacagtgcgttatcatggccgaaaaccggaagtcaagtatcatcatcagaatgcgcgacgtggtgctgttcgaaaagaaggtgtacctctcagaatgcaagaccggaaatggaaagaactatcgcggcaccatgagcaagaccaagaacggtatcacgtgccaaaagtggagcagtacctcaccgcaccgccctcgcttctctccagcgactcatccatcagaaggcttggaggaaaactactgtcgaaatccggataatgacccgcaaggaccgtggtgctataccactgatcctgagaagcgttacgattactgcgatatactcgaatgcgaagaggagtgtatgcactgctccggtgagaactacgatgggaagatttccaaaactatgtcaggactggaatgccaagcctgggacagccaatcgcctcacgcacatggctacattccgtccaagttcccgaacaagaatctcaagaagaattactgcagaaacccagacagggagcttagaccctggtgctttacgactgatcctaacaagcggtgggaactgtgcgacatcccgagatgcacgacccctccgccttccagcggaccgacttaccagtgcctgaaagggaccggcgagaactaccgaggaaacgtggccgtgactgtgtccggacatacttgtcagcactggagcgcccagaccccacacactcacaatcgcaccccagagaacttcccgtgcaaaaatctcgacgagaactactgcaggaacccggatggcaagagggcgccatggtgccatactacgaattcgcaggtccggtgggaatactgtaagatcccatcatgcgattcaagcccggtatccaccgagcagctcgcacccaccgctccgcccgagctgaccccggtcgtacaggattgctaccatggagacggacagtcctatcgcggtacctccagcaccaccactaccggcaagaaatgccagtcgtggagcagcatgactcctcaccgccaccagaaaacccccgagaactaccccaacgcggggttgactatgaactattgtcggaatccagacgcagataaaggaccttggtgcttcaccaccgacccttccgtgcgctgggaatactgcaacctcaaaaagtgttccggcactgaagcctcggttgtcgcgccacctcccgtggtgctcctccctgacgtggaaaccccgagtgaagaggactgtatgttcggcaacggaaaaggctaccggggaaagagagccactaccgtgaccggaactccttgccaagattgggcggcgcaagaaccacatcgccactcgatcttcaccccagaaactaatccgcgcgcgggactcgaaaagaactactgccgcaacccggacggggacgtcgggggtccctggtgctacactacgaatccgcgcaaactgtacgactactgtgacgtgccgcagtgtgctgccccttcgttcgactgcggaaaaccacaagtggaacctaagaagtgcccaggacgggtagtgggaggttgcgtggctcatccacattcgtggccgtggcaggtgtcactgcggactcgatttggaatgcacttttgcggagggactcttatcagccctgagtgggtgctcaccgcagctcactgtcttgaaaaatcaccaagacccagctcctacaaggtcatcctgggcgcacaccaagaagtgaacttggagccacatgtgcaggaaatcgaggtgtcgagactgttcctggaaccgacccggaaggacatcgctctgctcaagctgtcgtcccctgccgtaatcacggataaagtgatcccagcctgtctcccctcccctaactacgtggtcgctgatcggactgaatgtttcatcacgggttggggcgaaacccagggaacttttggtgccggcctgttgaaggaggctcagctgcctgtgatcgagaataaagtgtgcaacaggtacgagttcctgaatgggcgcgtgcagtcaaccgaattgtgcgccggacacctcgcaggtggaacggattcctgtcaaggagattcaggaggacccctggtctgcttcgagaaggacaaatacatccttcaaggtgtgacgagctgggggctgggatgcgcccggcctaataagccgggcgtgtacgtgagagtttcgcgcttcgtgacttggattgaaggagtgatgcgcaacaac

SEQ ID NO: 6644 - DNA, 2430 bp, Artificial Sequence
  derived and/or modified sequence
atggagcataaggaggtggtactccttctactgctctttctgaagtccggtcagggagagcctctggacgattatgtgaacacacagggggccagtcttttcagtgtgactaaaaaacagctgggggccggtagcatagaagaatgcgcagccaagtgcgaagaggacgaagagttcacgtgccgcgcgttccagtaccatagtaaagagcagcaatgtgttatcatggcagagaacagaaagtcttcaatcatcattcgcatgagagacgttgtactcttcgaaaaaaaggtatacctatccgaatgtaagactggtaacgggaagaattacagggggaccatgagcaaaacaaagaatggaatcacctgccagaagtggagctcaacctctccccatagaccccgattcagccccgctacccaccccagcgaggggctagaagaaaactactgtaggaatcccgacaacgacccacagggtccctggtgttataccaccgatccagaaaagcgatatgattattgtgatatcctggaatgtgaggaggagtgtatgcactgtagcggagagaactacgacggcaagattagtaaaacaatgagtggactggaatgtcaggcatgggactctcagtcgcctcatgcccacgggtatataccatccaaatttcccaacaaaaacttaaagaaaaattactgtagaaatcctgacagagaattaagaccctggtgctttacaactgatcccaataagcgatgggagctttgtgatatcccacgatgcacaactccaccgcccagctccggtcctacctatcagtgccttaagggaactggggaaaattacagaggcaatgtggcggtgacagtcagtggccacacttgccaacattggtctgcccagaccccccacacacataacaggactccggagaatttcccctgtaagaacctcgacgagaactactgtagaaaccccgacggtaagagagccccctggtgccacactacaaactcccaggttagatgggaatactgcaagatccctagctgtgatagctccccggtgtctactgagcaattagccccaaccgcaccacccgagctgacaccagtggtacaggattgctatcatggagacgggcaatcttataggggtacctcatcgacgacaacaactggcaaaaagtgtcagtcttggtcttccatgactccacatcggcatcagaaaactccggagaactaccctaatgccggcctcactatgaattactgcaggaatcctgacgctgataaaggaccttggtgcttcacgaccgacccctcagtcaggtgggaatattgcaatctgaaaaaatgtagtggaaccgaagccagtgtcgtggccccccctcctgtagtgctccttcccgatgtggaaacaccttccgaagaagattgtatgttcggaaacggcaaagggtatagaggcaagagggctaccaccgtaacgggcacgccttgccaagattgggcggcacaagagccccacagacacagtatctttacaccagaaacaaatccacgagctggacttgaaaagaattattgtagaaacccagatggcgacgtgggtggtccttggtgttacaccacaaacccaaggaaactgtacgattactgcgacgtgccccagtgtgctgccccaagttttgactgtggcaagccacaggtagaacctaagaagtgcccagggagagtcgtcggggggtgtgtggcccacccccactcatggccatggcaggtgagcctgcgtactaggtttgggatgcatttttgcggcggtacactcatatcacccgagtgggtgctaaccgccgcacactgccttgagaagtccccaagaccttcaagctacaaggtgatcctgggggcccaccaggaggtgaaccttgaaccccacgtgcaggagattgaagtatcccggttgttcctcgagccgacccgaaaggacatcgctttactcaaactgagtagccctgccgtgattacagataaggtgatcccagcatgtctcccgtccccaaattatgtggtggcagacagaacagaatgcttcatcacaggttggggagagactcagggaacattcggggctgggctgcttaaagaagcccagttgccagttattgaaaataaggtctgcaacaggtacgagtttttgaatggccgggtacagtccactgagttatgcgcagggcacctagcaggggggacagactcatgtcagggtgactctggaggtcccctggtctgcttcgaaaaagataaatacattcttcagggcgtgacgagttggggcctgggttgtgcaagacctaacaagcccggggtgtacgtaagagtttctagatttgtgacctggatcgagggagtgatgagaaataat

SEQ ID NO: 6645 - DNA, 2430 bp, Artificial Sequence
  derived and/or modified sequence
atggaacacaaggaggttgtactactgctgctcctgttccttaaaagcggtcagggagaacctttagacgactatgtcaatacccagggggcctcactgttttcagttaccaagaagcagctcggcgccggttcaatcgaggagtgcgcggctaagtgcgaagaggacgaagagtttacttgccgagcttttcagtaccattctaaggaacagcagtgtgttatcatggccgagaacaggaagtccagcataatcatcaggatgagagatgtcgttctctttgagaaaaaggtctacctttcagagtgcaagacggggaatgggaagaactaccggggcactatgtctaagacgaaaaatgggatcacgtgtcaaaaatggtctagcacctcaccacaccgacctcgtttcagccccgcgacccatccatcggaggggttagaggagaattactgtcgcaatcccgataatgacccacagggcccgtggtgttatacgactgaccccgagaagcggtacgattactgcgacattttagagtgcgaggaggaatgtatgcactgtagtggtgagaactatgacgggaaaatctctaagaccatgtccggcttagagtgccaagcctgggactcccagtcaccgcacgcacacggttatattcccagtaaattccctaataagaacctgaagaagaattactgtcgcaatcccgatagggagcttcggccgtggtgcttcacaaccgacccgaataaacggtgggaactgtgcgacatccctagatgtactactcctcccccttcaagcgggccaacttatcaatgcctcaaaggtaccggtgagaactatagagggaatgtggctgtaaccgtgtctgggcacacatgccagcattggagcgcccagactccacacacgcataataggactccggagaatttcccctgtaaaaatctcgatgagaattattgcagaaatcctgacggaaagcgggccccctggtgtcacaccaccaattctcaggtgaggtgggagtattgtaagattccatcttgtgattcttcgcccgtttcaaccgaacagctcgcccccactgcccctcccgagctaactccggtggtccaagattgttaccatggtgatggacagagctaccgaggcacctcatccaccaccacaactggaaaaaaatgtcagtcctggagcagcatgaccccacacaggcatcaaaagaccccagagaactacccgaatgcgggtctaaccatgaattattgcaggaatccggatgctgataaaggcccatggtgctttaccaccgaccctagcgttcggtgggagtactgtaacttgaagaagtgttcaggaacagaagcttccgtcgtggcccccccccccgtcgtgcttttgcctgatgtagaaacacccagcgaagaggattgcatgtttggtaacggaaaaggttacaggggcaagcgcgcgactactgttacagggaccccttgccaggactgggccgcccaggagccacatcgccatagcatctttactcctgagactaatccaagagcggggctggagaagaattactgtcggaatcctgatggcgatgtcggtggtccatggtgctatacaacaaaccctcgcaagctgtacgactactgcgacgttccacagtgtgcggctccctcgttcgattgcggaaagccacaggtggagccaaaaaaatgccctggccgggtcgtgggtggctgtgtggctcatccccactcatggccttggcaggtttctctgaggactagatttgggatgcatttctgtggcgggacgcttatctcaccggagtgggtgctgacggcagctcactgcttggaaaagagcccacgcccatcctcttataaggtcatcctcggcgcccaccaggaagttaacctggagccgcacgtgcaggagatcgaagtgtctagactcttcctggaacccacgcgtaaagacatagctttgttgaagctgtcgagccctgcagtgattacggacaaagtgatacctgcttgcctgccatctcctaactacgtggttgcagatcgcaccgaatgttttatcacaggatggggagagactcagggcacttttggggccgggttgctcaaggaagcccagctaccagtgatagagaacaaggtgtgtaaccggtatgaattccttaatggaagggtccaaagtactgaactgtgcgcaggccatctggccggaggaactgactcttgtcagggtgatagtggagggcccctggtgtgctttgaaaaggataagtacatcctgcagggtgtgactagttgggggctgggatgtgctcgccctaataagcctggcgtgtatgtgcgagtatcaagattcgttacatggattgagggcgttatgcgtaacaat

SEQ ID NO: 6646 - DNA, 2430 bp, Artificial Sequence
  derived and/or modified sequence
atggagcacaaagaggttgtcctattgttactgctgttcttgaagagcgggcagggcgaacccctcgatgattacgttaacactcagggcgcaagccttttttctgtgacaaagaaacagcttggtgccggaagcattgaagaatgcgccgcgaagtgcgaggaggacgaggaatttacttgccgtgccttccagtaccatagtaaagagcagcaatgtgtgatcatggcggaaaacaggaagtcctcaattataatccgcatgcgggatgtggtgctgttcgaaaagaaggtgtatctgagcgagtgcaagaccgggaacgggaagaattaccgggggaccatgagcaaaacaaagaatggtatcacctgtcagaaatggagtagcacctctccccaccggccgagattcagtcccgcgactcaccctagcgaaggcctggaggagaattattgcagaaaccccgacaacgatccacaaggaccctggtgttatacgactgatccagagaagaggtatgactattgtgacatcttggaatgcgaggaggaatgcatgcattgctccggggaaaactacgacggaaagatttcaaagacaatgtccggtctggaatgtcaggcatgggactctcagagcccacatgcacacggatacatcccatccaagtttccaaataagaacctgaaaaaaaactactgccgtaacccagatcgggaactgaggccatggtgctttacgaccgacccaaataagcgctgggaattgtgcgatatacctcggtgcaccacaccaccaccaagtagtggaccgacctatcagtgcctcaagggcactggagaaaattatcgaggaaacgtcgcagtcacggtgagtggccacacttgccaacactggtccgctcagactccgcacacgcataaccggacacccgagaattttccttgtaagaatctcgacgagaattactgccgcaaccctgatggcaagcgggctccatggtgtcacaccacaaatagccaagtcaggtgggaatattgtaaaattccctcctgcgactcctccccagtttccactgaacagcttgcacctactgcaccacccgagttaactccagtagtgcaagactgttatcatggcgacgggcagtcctataggggaacttcaagcactacaacaacagggaaaaaatgtcagtcttggtcatctatgactcctcaccgccatcagaaaacacccgagaactatcctaacgccgggctgaccatgaactactgcagaaatcccgacgctgacaaaggcccctggtgcttcaccacggatcccagcgtgcggtgggagtactgcaacctaaagaaatgttctggcacagaagccagcgtggtagcccctcctccagtggtactgctgcctgatgtcgagactcccagcgaagaagattgtatgttcggaaacgggaaggggtacaggggtaaaagagctactacggtgaccggcaccccatgtcaggattgggcagcccaagaaccccacaggcattccatctttactcccgagacaaacccacgggcaggtcttgaaaaaaattattgcagaaaccccgacggagatgtgggcggcccttggtgctataccaccaatcccagaaagctatatgactactgtgatgtgcctcagtgcgcggctccttcctttgactgcggtaagccacaggtggaaccaaaaaagtgtcccggacgggtcgtaggaggttgcgtggcccacccccatagctggccctggcaggtgagtcttagaactaggtttgggatgcacttttgtggaggtacattaatctccccagagtgggtccttacagctgcacactgtctggagaagagcccaagaccctcaagctacaaggttattttgggcgcccatcaggaggtcaatctagagccacacgtccaagagatcgaggtatctcggctgttcttggaacctacccggaaagacattgctctcctgaagctgtcttctcccgctgtgattacggacaaagtcatcccagcctgtctgccctctcccaattacgtcgtggccgacaggactgagtgctttattaccggatggggagaaacccaaggaacatttggtgctgggttgctaaaggaggcacagctccccgttattgaaaataaggtgtgcaaccggtatgagtttctgaacggaagggtccagtctactgagctatgcgctggccatttggctggagggactgattcttgtcaaggggattccggaggcccactcgtgtgttttgagaaagacaagtatattttgcagggcgttacaagctggggcctaggatgcgcccgccctaataagccaggcgtgtacgtgcgagtgtccagattcgtgacctggattgagggagtgatgcgcaataac

SEQ ID NO: 6647 - DNA, 2430 bp, Artificial Sequence
  derived and/or modified sequence
atggaacacaaagaagtggtcctcctgctgctcctgttcctcaagagtgggcagggcgaaccattagacgactacgtgaacactcagggggctagcctgtttagtgtcacaaagaagcagctcggcgcgggcagcattgaggagtgtgccgcgaaatgtgaggaggacgaagaatttacttgcagggctttccagtaccatagcaaggagcaacagtgtgtgattatggcggaaaatagaaagagttcaatcatcatacggatgcgagatgtcgtgcttttcgagaagaaagtgtatctgtccgagtgcaaaacagggaacgggaagaactaccgcggcaccatgtctaaaactaagaacggaatcacatgccagaagtggtcttccacttcaccccacagacctcgcttcagccccgcaactcacccctccgaagggctggaagaaaattattgccgtaaccccgataatgatccccagggaccctggtgctacactactgaccctgagaaacgctatgactattgcgatattttggagtgcgaggaggagtgcatgcattgttcaggagagaactacgatgggaaaatcagtaaaaccatgtctggtctggagtgccaggcctgggacagccagagtcctcacgcacacggatatatacccagcaagtttcccaacaagaatctgaagaagaattactgcaggaatcctgatcgcgagctccgcccttggtgctttacaactgaccctaataagcgatgggagctgtgtgacataccacggtgtaccacaccccccccgtctagcggacccacgtatcagtgcctcaaagggacaggcgagaactatcgggggaatgtcgccgttaccgtgtcaggccacacatgccagcactggtctgcacagactccccacacacacaatcggactccggagaatttcccttgtaagaaccttgatgagaattattgccgcaatccagatggcaagagagccccatggtgccacactaccaattcccaggtccgctgggagtactgcaagattccgtcttgtgacagctctcctgtgtccactgagcaattagctcccactgcccctcccgaacttactccagtcgtccaggactgctaccatggggacgggcaatcttatcgtgggacctcttctactacgactaccggaaagaaatgccagtcttggagtagcatgacacctcaccggcaccagaaaacgcccgagaactaccccaatgcgggcctgactatgaattattgtcggaatccagacgcggacaaggggccatggtgcttcaccaccgacccctctgttcgatgggagtattgtaatttaaaaaaatgttcaggtaccgaagcgtccgtcgtggctccgccccccgtggtgttgctgccagatgtggaaacgccgtcggaagaggactgcatgtttggcaacggcaagggctatcggggaaagagagccaccactgttaccggaacaccctgccaggactgggccgcgcaagaacctcataggcattcaatctttactcccgagacaaacccccgggctggactggaaaaaaattactgtcggaaccccgacggggacgtaggtggaccgtggtgttataccacaaatccacggaaactttatgattactgtgatgtgccgcagtgtgcagctccgagctttgactgcggaaaaccacaagtcgagccaaagaagtgccccggccgggtggtaggcggatgtgtcgctcacccgcatagttggccctggcaggtctctctgagaactcggttcggcatgcacttctgtgggggaactttgatctccccagaatgggtgctcaccgccgcccactgtctcgaaaagtcgcctcggcctagtagttacaaggtcatcctgggagctcatcaggaagtgaatctagaaccccacgtgcaggagatcgaagtttcgagactgtttctggaaccaactcggaaagacatcgctctcttgaaactgtcatcccccgcggtcatcacggataaggtgattcctgcatgcctgccatccccaaattacgtggttgccgatcgaaccgagtgcttcatcacaggctggggtgagactcagggaacctttggcgccggactcctgaaggaggctcagcttcctgttatagaaaacaaggtctgcaatcgttacgaatttctgaacggccgggtgcagagcactgaattgtgcgcgggacatctagctggaggtacagacagctgccagggtgactccggcggcccactagtgtgctttgagaaagataaatatattctgcagggagttacatcatggggcctgggatgtgccaggcccaataagcccggagtgtatgtgcgcgttagtaggttcgtgacctggatcgagggagttatgcgaaataac

SEQ ID NO: 6648 - DNA, 2430 bp, Artificial Sequence
  derived and/or modified sequence
atggagcacaaagaggtggttctgttgctcctgctgttcctcaaaagtggccagggcgagccgctggatgactatgtgaacacccaaggtgcgtctttgttcagcgtgaccaagaagcaactcggggccggttcaattgaggaatgtgccgccaaatgcgaagaagacgaagaattcacctgtcgagcttttcagtatcactccaaggaacagcaatgtgttatcatggcagagaaccgcaaaagcagcatcatcatccgcatgagggatgtggtgctgttcgagaagaaggtttacctgtccgaatgcaagacggggaatggcaagaattacaggggtacgatgagcaaaacgaagaatggtattacttgtcaaaagtggtctagcacgagccctcaccgcccacgcttctccccagcaacccacccttctgaaggactggaggaaaactactgccgcaatcccgataatgacccccaaggtccgtggtgctacacgaccgatcctgaaaagcgctacgactactgcgacatcctggagtgcgaggaggagtgtatgcactgctccggagaaaattacgatggtaaaatcagcaagaccatgtcaggtctggagtgccaggcctgggatagccagtctccgcatgcgcatggttatatcccatctaagtttccaaataaaaacctgaagaaaaactattgtcgcaacccggacagagagctgcgcccatggtgcttcaccacagacccaaacaaacgttgggaactgtgtgatattccgaggtgtacaacgcctccaccttcgagcggccctacgtaccaatgcctgaagggtaccggtgaaaattatcgtggtaacgttgccgtgacggtctctggacatacttgccagcactggagcgctcagaccccgcatacccacaaccgaactcccgaaaatttcccatgcaaaaatctggacgagaattactgtcgtaatccggatggaaaacgggcgccttggtgtcatactacgaactctcaggtacgctgggagtactgcaagatcccaagctgcgacagctctcccgtgagcaccgagcagctggcaccaacggctcccccggagttgacgccggtcgtccaggactgctatcacggggacggtcagtcatatcgcggaactagctctacgaccacgaccggcaagaaatgccagagctggtctagcatgactcctcaccgccaccagaaaactccagagaactatccaaacgccgggctgacgatgaattattgccgcaatccagacgcagataaaggtccgtggtgtttcacgaccgacccaagcgtgcgctgggaatattgcaatctgaagaagtgtagcggtactgaggcgagcgtcgttgcgccacctccagttgtcctgctcccagatgtggaaaccccatccgaggaggactgcatgttcgggaatggtaagggttaccgtggtaagcgtgctactaccgtcacgggtaccccatgtcaggattgggccgcgcaggaacctcaccgtcatagtatctttactcctgagaccaacccacgagccggcctggaaaaaaattattgccgcaatcccgacggcgatgttggcggtccgtggtgctacaccaccaacccgcgcaagctgtacgattattgcgatgttcctcagtgcgcggcaccaagctttgactgtggtaaaccacaggtggaacccaagaaatgcccaggacgcgtggtggggggatgcgtcgcacatcctcactcctggccatggcaagtgagcctccgcacccgcttcggtatgcacttctgcgggggtacgctgatttctcccgagtgggtcctgacagcagcgcattgcctggagaaatcgccacgacctagctcctacaaagtcatcctgggcgcgcatcaagaagtgaatctggagccacatgtgcaggagatagaggtttcccgcctgttcctggaaccgacccgcaaagatatcgcgctgttgaagctgtccagtcccgccgtcattacggataaagtcattccagcctgtttgccgagcccaaactatgtggtcgccgaccgtaccgaatgtttcattaccggttggggtgaaacgcaaggtacctttggagctggtctgctgaaggaagcccagctgccagttatcgagaacaaggtgtgcaatagatacgagtttctgaacggccgtgtccagagcaccgagctctgcgctggccatttggcaggcggcaccgattcttgtcaaggtgactccggcggtccattagtctgcttcgaaaaggacaagtatattctgcagggtgtcaccagctggggactggggtgcgcacggcccaacaaacccggagtctatgttagggtttcccgcttcgttacgtggattgaaggggttatgcgcaataat

SEQ ID NO: 6649 - DNA, 2430 bp, Artificial Sequence
  derived and/or modified sequence
atggagcacaaagaggtggtgctgctgttgctgctctttctgaagtccggccagggcgaaccgttggacgactacgtcaatactcagggagcgtctctcttctctgtgactaagaagcagctcggcgcaggatccatcgaggaatgcgccgctaagtgcgaggaggacgaggaattcacttgcagagcattccagtaccacagcaaggaacaacagtgtgtcatcatggccgagaaccggaaatcatccatcattatccggatgagagacgtggtgctgttcgaaaagaaggtgtacttgtccgaatgtaagaccggcaacggcaaaaactatcgcgggactatgtcaaagacgaaaaatggaatcacttgccagaagtggtccagcacttcgccgcaccgcccgcgcttctcgcctgccactcacccgtccgaagggctggaagagaactattgccggaatccagacaacgatcctcaaggaccatggtgctacaccaccgacccagaaaagcgctacgattactgcgatatcctcgaatgtgaggaagagtgtatgcactgctccggtgaaaactacgatggaaagatcagcaaaaccatgtccgggctggagtgccaggcatgggattcgcagagcccgcacgcgcacggatacatcccttcaaaattcccgaacaaaaacttgaaaaagaactactgtcgtaacccggacagagagctccgcccttggtgcttcactaccgacccaaacaagagatgggaactttgcgacatcccgagatgtaccactcccccgccaagctctggaccaacttaccagtgtcttaagggcaccggagaaaactatcggggaaatgtggccgtgaccgttagtggacatacctgccaacactggagcgctcagacgccgcatactcataatagaaccccggagaacttcccctgcaagaaccttgatgagaactattgtcgcaatcctgacgggaagcgggcgccttggtgccataccaccaacagccaggtgcgctgggagtactgcaaaattccgtcctgtgacagctcgcccgtctccactgagcaactggctcccaccgcaccacctgagctgacccccgtcgtccaagattgctatcacggtgacggacagagctataggggaacctcatcaacgaccaccacgggaaagaagtgccaatcctggtcctcaatgactccgcatcggcatcagaaaactcccgagaattacccgaacgcggggcttaccatgaactactgcagaaacccggatgccgataagggaccctggtgctttaccactgacccgtccgtgcgctgggaatattgcaacctgaaaaagtgttccggcaccgaggcatccgtggtcgcccctccccctgtggtcctgctgcctgatgtggagactccctcagaagaagattgcatgttcggaaacggtaagggatacaggggaaagagggcgaccaccgtgaccggcaccccctgccaagattgggcagctcaggagccacatcggcactccattttcactcctgaaactaatccgcgggccggtctggagaagaattactgcaggaacccggatggtgacgtgggaggaccgtggtgctacacgaccaacccacgcaagctgtacgactactgcgacgtcccacagtgcgccgccccatcgttcgactgcggaaaaccacaagtggagcccaagaagtgcccgggcagggtcgtaggtggctgtgtggcccatcctcactcatggccgtggcaagtgagtctgcggactagatttggaatgcatttttgcggaggaaccctgatctccccggagtgggtgctgactgccgcccattgcttggaaaaaagcccacgcccgtcgtcgtacaaggtgatcctcggggctcatcaggaagtgaacctggagcctcatgtgcaagaaattgaagtgtcgagattgtttctcgaaccgactcgcaaagacattgctctcctgaagttgtcgtcgccagcggttatcaccgacaaggtgatacctgcctgcctgccttccccgaactacgtggtggcagaccggactgaatgcttcatcactggatggggagaaacccagggcactttcggtgctggcctgctgaaggaggcgcagctgccagtgatcgagaataaggtgtgcaatcgctatgaattcctgaacggacgcgtccagtccacggagctctgtgccggacatttggccggaggcaccgactcttgccagggggattccggtgggccactggtgtgtttcgaaaaggacaagtacattctgcagggcgtcacgtcgtggggactcggatgcgctagaccgaacaagcctggagtctacgtgcgcgtgagccgcttcgtgacgtggatcgagggggtgatgcgcaacaat

SEQ ID NO: 6650 - RNA, 2576 nt, Artificial Sequence
  derived and/or modified sequence
gggaaauaagagagaaaagaagaguaagaagaaauauaagagccaccauggaacacaaagaggucguccucuugcugcuccuguuucucaaaucgggccagggagagcccuuggacgauuacgugaacacacagggcgcgagccuguucucgguaacgaaaaagcaguugggagcuggcucaauugaagaaugugcggcgaaaugcgaagaagaugaagaguucacgugucgggcauuucaguaucacucgaaagagcaacagugcgugaucauggcagagaaccgaaaaucgucgaucaucaucagaaugcgggacgucgugcuguucgaaaagaaaguguaccugucagaguguaagacggguaaugggaaaaacuauaggggcacaaugucaaagacuaagaaugggauuacaugucagaaauggucguccacguccccucacagaccaagauucucgccugcuacgcauccguccgagggcuuggaggagaacuauugucgcaacccagauaacgauccccaagggccuuggugcuacaccacagaccccgagaagcgguaugauuacugcgauauucuugaaugcgaggaggaguguaugcacugcuccggagagaacuacgauggaaagaucuccaagacaauguccggacuggaaugucaggccugggacucacagucgccccaugcacacgguuacauuccuagcaaauucccgaauaagaaccuuaagaagaauuacugccggaacccggaccgagagcuucgcccuugguguuucacaaccgaccccaacaagagaugggagcugugugacauuccgagauguacaacaccaccgccgucaucggguccaaccuaucaaugucugaagggaacgggugagaacuaucggggaaacgucgcggucacagugagcgggcacacgugccagcacuggucggcgcagacaccccacacacauaaucggacgccagaaaacuucccuuguaagaaucuggaugagaacuacugcagaaacccagacgguaaaagagccccguggugccauacuacgaacagccaagugcgaugggaauauuguaagaucccgucgugcgacucaucgccaguaagcacugaacaacuugcaccgacggcuccucccgaguugacgccuguggugcaagauuguuaccauggcgaugggcagucauacaggggaacuagcagcaccaccacgacgggcaaaaagugucagucgugguccuccaugacaccacaccggcaccaaaagacuccggagaauuacccaaaugcgggucugaccaugaauuacuguaggaacccugacgcggacaaagguccauggugcuuuaccaccgaucccuccguacgcugggaauacuguaacuugaagaaaugcucggggacagaagccuccgugguagccccuccgccagucgugcugcuucccgacguggagacaccguccgaagaggacuguauguuugguaacggaaagggauauagagggaaaagggcgacgacggugacugggacgcccugucaggacugggcagcgcaagagccgcaccgccacagcaucuuuacucccgaaaccaauccaagggccggacuugaaaagaacuauugccggaauccggauggggacgucggagguccgugguguuauacuacaaacccuagaaaacucuacgauuauugcgauguaccgcaaugugccgcucccuccuucgacugcggaaagccucaagucgagccuaagaagugucccgggagaguggugggcgggugcguagcccacccgcauucguggcccuggcagguaucguugagaacgagauuugggaugcacuuuuguggcgguacgcuuaucuccccugagugggucuugacagcugcgcauugcuuggagaaguccccucggccguccucauacaaggucaucuugggagcccaucaggaggugaaucuggagccccauguccaagaaauugagguaucgagguuguuucucgaaccgacacgcaaggacaucgcacugcugaaacuuagcuccccugccgucaucacagacaaagucaucccagcgugccuccccagccccaauuacguaguggcggauagaaccgagugcuucaucacgggauggggcgagacacaggggacguucggagcuggccuccuuaaagaggcccagcuucccguaaucgaaaacaaaguaugcaaccgcuaugaguuucucaauggacgcgugcagagcacagagcuuugcgccggacaccucgcgggagggaccgauagcugccagggugacagcggagggccguugguguguuucgaaaaagacaaguauaucuugcaaggugugaccagcuggggacuugggugcgcgaggcccaauaagccgggagucuaugugagagucucacgcuucgucacauggauugagggagugaugaggaacaacugauaagcugccuucugcggggcuugccuucuggccaugcccuucuucucucccuugcaccuguaccucuuggucuuugaauaaagccugaguaggaag

SEQ ID NO: 6651 - protein, 246 aa, Artificial Sequence
  derived and/or modified sequence
MAAPGPALCLFDVDGTLTAPRQKITKEMDDFLQKLRQKIKIGVVGGSDFEKVQEQLGNDVVEKYDYVFPENGLVAYKDGKLLCRQNIQSHLGEALIQDLINYCLSYIAKIKLPKKRGTFIEFRNGMLNVSPIGRSCSQEERIEFYELDKKENIRQKFVADLRKEFAGKGLTFSIGGQISFDVFPDGWDKRYCLRHVENDGYKTIYFFGDKTMPGGNDHEIFTDPRTMGYSVTAPEDTRRICELLFS

SEQ ID NO: 6652 - protein, 121 aa, Artificial Sequence
  derived and/or modified sequence
MLNVSPIGRSCSQEERIEFYELDKKENIRQKFVADLRKEFAGKGLTFSIGGQISFDVFPDGWDKRYCLRHVENDGYKTIYFFGDKTMPGGNDHEIFTDPRTMGYSVTAPEDTRRICELLFS

SEQ ID NO: 6653 - DNA, 741 bp, Artificial Sequence
  derived and/or modified sequence
atggctgcccctggaccagccctatgtttgtttgacgttgatggtacactgaccgctcctcgccaaaaaatcaccaaagaaatggatgacttcctccagaaactccgacaaaaaatcaaaattggtgtcgttggcggctcagacttcgaaaaggtgcaggagcagctggggaatgacgtggtcgagaaatacgattatgtatttccagaaaatggcttggtagcttataaggacgggaagctgctgtgccggcagaacattcagtctcacttgggcgaggcccttattcaagatttgatcaattactgcctttcctacatcgcaaaaatcaaactccccaagaagagaggcacttttatagaattccggaatgggatgctgaacgtgtctccaattggacgttcctgtagccaggaggagcggatcgaattttatgaactggataagaaagagaatatccgacagaaatttgtcgccgacctgcggaaagagtttgccggtaaggggctgacattcagtatcggcggccagatttcttttgacgtgtttccagacggatgggataagagatattgcttacggcatgtggaaaatgatggctacaagacgatctattttttcggcgataagactatgcccggtggcaacgaccacgaaatttttaccgacccaaggacaatgggctatagcgtgactgcccctgaggacaccaggaggatctgcgaactgttgttcagctag

SEQ ID NO: 6654 - DNA, 741 bp, Artificial Sequence
  derived and/or modified sequence
atggccgcccctggccctgccctgtgcctgtttgatgtggatggcaccctgacagccccccggcagaagatcaccaaggagatggatgacttcctgcagaagctgcggcagaagatcaagattggagtggtgggcggcagtgactttgagaaggtgcaggagcagctgggcaatgatgtggtggagaagtatgactatgtgtttcctgaaaatggcctggtggcctacaaggatggcaagctgctgtgccggcagaacatccagagccacctgggggaggccctgatccaggacctgatcaactactgcctgagctacatcgccaagatcaagctgcccaagaagaggggcaccttcatcgagttcagaaatggcatgctgaatgtgagccccatcggccgcagctgcagccaggaggagcgcatcgagttctatgagctggacaagaaggagaacatccggcagaagtttgtggccgacctgaggaaggagtttgctgggaagggcctgaccttcagcatcggcggccagatcagctttgatgtgtttcctgatggctgggacaagcgctactgcctgcggcacgtggagaatgatggctacaagaccatctacttctttggagacaagaccatgcctggaggaaatgaccacgagatcttcacagaccccaggaccatgggctacagcgtgacagcccctgaggacacccggcgcatctgtgagctgctcttctcctag

SEQ ID NO: 6655 - DNA, 741 bp, Artificial Sequence
  derived and/or modified sequence
atggccgcccccggccccgccctgtgcctgttcgacgtggacggcactctcaccgccccacgccaaaaaatcactaaggagatggatgatttcctgcagaagctgaggcagaaaatcaaaattggcgtcgttggaggctccgatttcgagaaggtgcaagagcaattgggcaatgacgtggtagaaaagtatgactacgtgtttccagaaaacggcctggtagcatacaaagatgggaagctcctgtgcagacagaacattcagagccatcttggagaagccttaattcaggatctgattaattattgtttaagctacatcgccaaaattaagttaccaaaaaagcggggcaccttcatcgaattccgcaacgggatgctgaacgtgagccccattggccgtagctgttcacaagaggaacggatcgagttctatgaactggacaaaaaagaaaacatccgccagaaattcgtcgccgatctcagaaaggagttcgccggaaagggcctgacattttcaatcggtggccaaattagcttcgacgtgttccccgacggttgggataagagatactgcctgagacacgtggagaacgatgggtataagactatctacttcttcggggacaagaccatgccaggagggaatgatcacgagatttttactgaccctcgcacaatggggtatagtgtgaccgcacccgaagacacccgtcggatttgcgagttgttattctcctag

SEQ ID NO: 6656 - DNA, 2313 bp, Artificial Sequence
  derived and/or modified sequence
ccggaagttccgggccgagttcctcgtgccaacgtgtcttgtaaggtgcggctagaaactggggacatggcagcgcctggcccagcgctctgcctcttcgacgtggatgggaccctcaccgccccgcggcagaaaattaccaaagaaatggatgacttcctacaaaaattgaggcagaagatcaaaatcggagtggtaggcggatcggactttgagaaagtgcaggagcaactgggaaatgatgtggttgaaaaatacgattatgtgtttccagaaaatggcttggtagcatacaaagatgggaaactcttgtgtagacagaatattcaaagtcatctgggtgaggccctaatccaagatttaatcaactactgtctgagctacattgcgaaaattaaactcccgaagaagaggggtactttcattgaattccgaaatgggatgttaaacgtgtcccctattggaagaagctgcagccaagaagaacgcattgagttctacgaactcgataaaaaagaaaatataagacaaaagtttgtagcagatctacggaaagagtttgctggaaaaggcctcacgttttccataggaggccagatcagctttgatgtctttcctgatggatgggacaagagatactgtctgcgacatgtggaaaatgacggttataagaccatttatttctttggagacaaaactatgccaggtggcaatgaccatgagatcttcacagaccccagaaccatgggctactccgtgacagcgcctgaggacacgcgcaggatctgtgaactgctgttctcctaacgtgggagcgggaggggcggggtcccggctgacaagccagcatagggcattcggtggccagagccgagggtcctcccacacgtgctcacccacccgcagcctaggcaggctctgcatgctatgccaggcatgtgcagtctggacttccacctccagtgccagaaacttccagaaggaaggagaaaactcttgtcaagaatggcccagaggaatgcctcgcacaaaaggtcttccccacccacccccagccccctagtctaatacccaccctgatacgtgcaatcatgtagttttggcggaaatttccccatcattctaggatgatacagaaagaaaaactgtgcctggaccctccctcttggtgggtctgtggaaacataagcggtttttttaatgggcccctgcatcaataccaaacatgggggtttggtaatgagaaaccaggacaggccatctgcagtgacccagcccaggacgaagtttacaaacacctcctggaacgaagctcccgcctgcatgtcaccttgatgggggctgtgagtggggcagtgtgatacccagtgactagacgcactctgcgttttcccgtgtttggggctgaggcctgctggacagatggctggccaagtgggagcagaccctagggagtttgcacctcggctgggccggattcggaccggctctgtgttcactacactcagaatagcctggctgcttctctgtctccgagaccggaggtagtgggaaccaacagctgggctggagagttggtgctggcaaaacagtccttgccctggggccggttcttacccaggtccagagaaaccaacgcgggatgtcagacttcaccaaaaggactttctggttgcccctggctggcttcctggaggcgttcgcctctagtttctcagggatggagcgagagcccagccagagaacagtaagaggagctgctctcctatctgcactcacccaggccttcacccagactttaccacggaggcggctgagtgcagctacagctaggtccgcgtccctcactcttttcatcttctgcacgttcttcgtgaaactggaaggatcccgggtctcagctagaacacggtggaagagaactttcctaggaaacggttcatgtgtcacttttcaggatgtggaaacactgagccatacaccctccattgcttggtgctggggttgtgtggcctccactgggcacttgccgacctgagtctggggccaggggagcccaggctgccctgcactcctgcctcccagcccacagccaggtgctttcatcacagctaaacctggttccctccaaacctcccagccactcgggcttgtaactgtctgagccccggatccggtggggtgaaagcagccagctcatcccagtgactcacaggacacagccatccagcggcatctttccttgtcgaatgatactgtaatgaccttccaaagtgaagagtagcacattaaagtgattttattgtttcctgt

SEQ ID NO: 6657 - DNA, 931 bp, Artificial Sequence
  derived and/or modified sequence
gtgccaacgtgtcttgtaaggtgcggctagaaactggggacatggcagcgcctggcccagcgctctgcctcttcgacgtggatgggaccctcaccgccccgcggcagaaaattaccaaagaaatggatgacttcctacaaaaattgaggcagaagatcaaaatcggagtggtaggcggatcggactttgagaaagtgcaggagcaactgggaaatgatgaatattcaaagtcatctgggtgaggccctaatccaagatttaatcaactactgtctgagctacattgcgaaaattaaactcccgaagaagaggggtactttcattgaattccgaaatgggatgttaaacgtgtcccctattggaagaagctgcagccaagaagaacgcattgagttctacgaactcgataaaaaagaaaatataagacaaaagtttgtagcagatctacggaaagagtttgctggaaaaggcctcacgttttccataggaggccagatcagctttgatgtctttcctgatggatgggacaagagatactgtctgcgacatgtggaaaatgacggttataagaccatttatttctttggagacaaaactatgccaggtggcaatgaccatgagatcttcacagaccccagaaccatgggctactccgtgacagcgcctgaggacacgcgcaggatctgtgaactgctgttctcctaacgtgggagcgggaggggcggggtcccggctgacaagccagcatagggcattcggtggccagagccgagggtcctcccacacgtgctcacccacccgcagcctaggcaggctctgcatgctatgccaggcatgtgcagtctggacttccacctccagtgccagaaacttccagaaggaaggagaaaactcttgtcaagaatggcccagaggaatgcctcgcacaaaa

SEQ ID NO: 6658 - DNA, 741 bp, Artificial Sequence
  derived and/or modified sequence
atggccgctccaggaccggctctgtgcttattcgatgttgacgggacattaaccgctccacgtcagaagatcacaaaagagatggatgacttcctccagaaactcagacaaaaaattaaaataggggtcgtgggtggatccgactttgagaaggttcaggaacaactcggtaacgacgtagttgaaaagtacgattacgtttttccagaaaacggcctcgttgcgtacaaagacggaaagctgctgtgcagacaaaacatccagagccacctcggagaggccctcattcaagacttgatcaattactgcctcagttacattgccaaaatcaagttgccgaaaaagcggggtaccttcatcgaattcaggaatggtatgctgaatgtgagcccaatcggacgctcatgcagccaggaagagcggatcgagttctatgaactagataagaaggaaaacattcggcagaagtttgtggccgatcttagaaaggaatttgcaggcaaggggctgactttttccataggaggccagattagttttgatgtgttccccgacgggtgggacaagaggtactgtcttaggcacgtggagaacgacgggtacaagacaatctatttcttcggtgataagaccatgcccggtgggaatgatcatgaaatctttacagaccccagaacaatgggctattctgttacagcaccagaggacacgcgtagaatatgcgaattgctcttttcttag

SEQ ID NO: 6659 - DNA, 741 bp, Artificial Sequence
  derived and/or modified sequence
atggccgcccccggccccgccctgtgcctgttcgacgtggacggcaccctgaccgcccccagacagaagatcaccaaggagatggacgacttcctgcagaagctgagacagaagatcaagatcggcgtggtgggcggcagcgacttcgagaaggtgcaggagcagctgggcaacgacgtggtggagaagtacgactacgtgttccccgagaacggcctggtggcctacaaggacggcaagctgctgtgcagacagaacatccagagccacctgggcgaggccctgatccaggacctgatcaactactgcctgagctacatcgccaagatcaagctgcccaagaagagaggcaccttcatcgagttcagaaacggcatgctgaacgtgagccccatcggcagaagctgcagccaggaggagagaatcgagttctacgagctggacaagaaggagaacatcagacagaagttcgtggccgacctgagaaaggagttcgccggcaagggcctgaccttcagcatcggcggccagatcagcttcgacgtgttccccgacggctgggacaagagatactgcctgagacacgtggagaacgacggctacaagaccatctacttcttcggcgacaagaccatgcccggcggcaacgaccacgagatcttcaccgaccccagaaccatgggctacagcgtgaccgcccccgaggacaccagaagaatctgcgagctgctgttcagctag

SEQ ID NO: 6660 - protein, 160 aa, Artificial Sequence
  derived and/or modified sequence
MLLLLLSIIVLHVAVLVLLFVSTIVSQWIVGNGHATDLWQNCSTSSSGNVHHCFSSSPNEWLQSVQATMILSIIFSILSLFLFFCQLFTLTKGGRFYITGIFQILAGLCVMSAAAIYTVRHPEWHLNSDYSYGFAYILAWVAFPLALLSGVIYVILRKRE

SEQ ID NO: 6661 - protein, 149 aa, Artificial Sequence
  derived and/or modified sequence
MLLLLLSIIVLHVAVLVLLFVSTIVSQWIVGNGHATDLWQNCSTSSSGNVHHCFSSSPNEWLQSVQATMILSIIFSILSLFLFFCQLFTLTKGGRFYITGIFQILAGLCVMSAAAIYTVRHPEWHLNSDYSFPLALLSGVIYVILRKRE

SEQ ID NO: 6662 - DNA, 483 bp, Artificial Sequence
  derived and/or modified sequence
atgctcctgctgctcttatcaatcatcgtgctgcatgtggccgtactggtcctgctgtttgtctcaacaatcgtctcccagtggatagtgggcaacggacacgcaaccgatttgtggcagaattgtagcacatcgagctccggcaatgtccaccattgcttctccagttctcccaacgaatggttgcagagcgtccaggctaccatgatcctgtccatcatatttagcatcctgagccttttcttgtttttctgtcagctctttactctaaccaagggcggacgattctatatcacgggtatcttccagattctcgctgggctgtgcgtcatgtccgccgcggctatctacacagtgcgtcaccccgagtggcatctcaactcggattactcgtacggatttgcttacatacttgcctgggtggcttttccactggcactgttgagtggcgttatttatgttattttgcgaaagagggagtag

SEQ ID NO: 6663 - DNA, 483 bp, Artificial Sequence
  derived and/or modified sequence
atgctgctgctgctgttgtcgatcattgtcctccatgtagccgtcctggtgcttctctttgtgagtactatcgtttctcagtggattgtggggaacgggcatgccaccgacctctggcaaaactgttccaccagttcatccggtaacgtacaccactgcttctcttccagtccaaatgaatggctgcagtctgtccaggccactatgatactcagcattatcttttccatcctgtcattgttcctctttttttgtcagcttttcacactaacaaaagggggacggttttatattaccggaatatttcaaattctggcaggcctctgcgtcatgtcagccgccgctatttacacagtccggcacccagagtggcatcttaatagtgattactcctatggatttgcctacatactggcgtgggtggcattcccactcgctttattaagtggagtgatttacgtgatcctccggaagagggaatag

SEQ ID NO: 6664 - DNA, 450 bp, Artificial Sequence
  derived and/or modified sequence
atgttgctgctgctgctctctataattgtgctgcacgtcgcggttctggtgctgctctttgtaagtaccattgtcagccaatggatcgttggcaacggtcatgctaccgatctgtggcagaactgttccacgtcaagctcaggaaacgtacaccactgcttctcctcaagtccaaatgagtggctgcagtctgttcaggccaccatgatattgagcatcatattctcaatcctcagtctcttcctcttcttctgtcagctgtttacactcactaagggaggcagattctatatcactggtatatttcagattttggcaggactgtgtgtgatgtctgcagcggcaatctatactgtgcgtcaccccgagtggcacctgaactctgattatagcttcccgcttgcactgctctcaggagttatctatgtgatactgcggaagagagaatag

SEQ ID NO: 6665 - DNA, 483 bp, Artificial Sequence
  derived and/or modified sequence
atgctgctgctgctgctgagcatcatcgtgctgcacgtggccgtgctggtgctgctgtttgtgtccaccatcgtgtcccagtggatcgtgggcaatggccacgccacagacctgtggcagaactgcagcaccagcagcagtggaaatgtgcaccactgcttcagcagcagccccaatgagtggctgcagagcgtgcaggccaccatgatcctgagcatcatcttcagcatcctgagcctcttcctgttcttctgccagctgttcaccctgaccaagggcggccgcttctacatcaccggcatcttccagatcctggccggcctgtgtgtgatgtctgctgctgccatctacacagtgcgccaccctgagtggcacctgaacagcgactacagctatggctttgcctacatcctggcctgggtggccttccccctggccctgctgtctggagtcatctacgtgatcctgaggaagcgggagtag

SEQ ID NO: 6666 - DNA, 450 bp, Artificial Sequence
  derived and/or modified sequence
atgctgctgctgctgctgagcatcatcgtgctgcacgtggccgtgctggtgctgctgtttgtgtccaccatcgtgtcccagtggatcgtgggcaatggccacgccacagacctgtggcagaactgcagcaccagcagcagtggaaatgtgcaccactgcttcagcagcagccccaatgagtggctgcagagcgtgcaggccaccatgatcctgagcatcatcttcagcatcctgagcctcttcctgttcttctgccagctgttcaccctgaccaagggcggccgcttctacatcaccggcatcttccagatcctggccggcctgtgtgtgatgtctgctgctgccatctacacagtgcgccaccctgagtggcacctgaacagcgactacagcttccccctggccctgctgagcggggtcatctacgtgatcctgaggaagcgggagtag

SEQ ID NO: 6667 - DNA, 483 bp, Artificial Sequence
  derived and/or modified sequence
atgctgctgctgctgctgagcatcatcgtgctgcacgtggccgtgctggtcttgctttttgtttctacaatcgtgtcacaatggatcgttggtaacgggcacgcgaccgacctgtggcaaaattgttcaaccagctctagtggaaatgtgcaccattgtttttcatccagcccaaacgagtggctgcagagcgtccaagccaccatgatcctatccatcattttttcaattctgtcactttttctattcttctgccagctttttacactgaccaaaggtgggcgcttttatatcaccgggatctttcagatcctggctggactttgcgtaatgtcggccgcagctatttataccgtcaggcaccctgagtggcacctcaactctgattacagttacggcttcgcttacattttggcatgggtagcattcccattagcactcttgagcggagttatttacgtaatcctgcgtaagcgggagtag

SEQ ID NO: 6668 - DNA, 483 bp, Artificial Sequence
  derived and/or modified sequence
atgctgctgctgctgctgagcatcatcgtgctgcacgtggccgtgcttgttttgctgttcgtttcaaccattgtgtcacagtggatcgtgggcaacggtcacgccacggacctgtggcagaattgttcaacttccagtagcggcaacgtccatcactgtttctctagctcccccaatgagtggcttcagagcgtgcaagccacaatgatcctgtcaatcatcttctctatactgtctctattcctgttcttctgtcagctgttcaccctcacaaagggcggaagattttatatcaccgggatctttcagatactggcaggactctgtgttatgtctgctgccgctatttacaccgtgagacatcccgagtggcacctgaatagcgattacagctacggctttgcttatatactcgcttgggttgccttcccgctggcactactgtctggcgtcatttacgtgatcctccggaagcgtgagtag

SEQ ID NO: 6669 - DNA, 450 bp, Artificial Sequence
  derived and/or modified sequence
atgctgctgctgctgctgagcatcatcgtgctgcacgtggccgtgttggtgctgctgttcgtaagcaccattgtttcacagtggatcgtcggcaacggccatgctaccgacctctggcagaattgttccacaagttcatcgggaaatgtgcatcactgcttttccagcagcccaaacgaatggctccaaagtgtacaggcaacaatgattctgtctatcatcttcagtatcctgtccctatttttgtttttttgtcagctctttaccctgaccaagggtggccgattttatatcacagggatcttccagatcctggccggcctgtgcgtgatgtccgccgccgccatttatactgtgcggcatcctgagtggcatctgaattcggactattcttttccattggcacttctgtccggcgttatctatgtgatcctgagaaaacgagaatag

SEQ ID NO: 6670 - DNA, 1829 bp, Artificial Sequence
  derived and/or modified sequence
agttacagggagcaccaccagggaacatctcggggagcctggttggaagctgcaggcttagtctgtcggctgcgggtctctgactgccctgtggggagggtcttgccttaacatcccttgcatttggctgcaaagaaatctgcttggaagaaggggttacgctgtttggccgggcagaaactccgctgagcagaacttgccgccagaatgctcctcctgttgctgagtatcatcgtcctccacgtcgcggtgctggtgctgctgttcgtctccacgatcgtcagccaatggatcgtgggcaatggacacgcaactgatctctggcagaactgtagcacctcttcctcaggaaatgtccaccactgtttctcatcatcaccaaacgaatggctgcagtctgtccaggccaccatgatcctgtcgatcatcttcagcattctgtctctgttcctgttcttctgccaactcttcaccctcaccaaggggggcaggttttacatcactggaatcttccaaattcttgctggtctgtgcgtgatgagtgctgcggccatctacacggtgaggcacccggagtggcatctcaactcggattactcctacggtttcgcctacatcctggcctgggtggccttccccctggcccttctcagcggtgtcatctatgtgatcttgcggaaacgcgaatgaggcgcccagacggtctgtctgaggctctgagcgtacatagggaagggaggaagggaaaacagaaagcagacaaagaaaaaagagctagcccaaaatcccaaactcaaaccaaaccaaacagaaagcagtggaggtgggggttgctgttgattgaagatgtatataatatctccggtttataaaacctatttataacactttttacatatatgtacatagtattgtttgctttttatgttgaccatcagcctcgtgttgagccttaaagaagtagctaaggaactttacatcctaacagtataatccagctcagtatttttgttttgttttttgtttgtttgttttgttttacccagaaataagataactccatctcgccccttccctttcatctgaaagaagatacctccctcccagtccacctcatttagaaaaccaaagtgtgggtagaaaccccaaatgtccaaaagcccttttctggtgggtgacccagtgcatccaacagaaacagccgctgcccgaacctctgtgtgaagctttacgcgcacacggacaaaatgcccaaactggagcccttgcaaaaacacggcttgtggcattggcatacttgcccttacaggtggagtatcttcgtcacacatctaaatgagaaatcagtgacaacaagtctttgaaatggtgctatggatttaccattccttattatcactaatcatctaaacaactcactggaaatccaattaacaattttacaacataagatagaatggagacctgaataattctgtgtaatataaatggtttataactgcttttgtacctagctaggctgctattattactataatgagtaaatcataaagccttcatcactcccacatttttcttacggtcggagcatcagaacaagcgtctagactccttgggaccgtgagttcctagagcttggctgggtctaggctgttctgtgcctccaaggactgtctggcaatgacttgtattggccaccaactgtagatgtatatatggtgcccttctgatgctaagactccagaccttttgtttttgctttgcattttctgattttataccaactgtgtggactaagatgcattaaaataaacatcagagtaactcac

SEQ ID NO: 6671 - DNA, 816 bp, Artificial Sequence
  derived and/or modified sequence
tcgcgcgcgcgcagccccgcagcgcagctttggcggcgccagcagcggagccaacgcacccgagtttgtgtttgaggccaccctgaggatcgggacagctgttcctttgggctgcagaaactccgctgagcagaacttgccgccagaatgctcctcctgttgctgagtatcatcgtcctccacgtcgcggtgctggtgctgctgttcgtctccacgatcgtcagccaatggatcgtgggcaatggacacgcaactgatctctggcagaactgtagcacctcttcctcaggaaatgtccaccactgtttctcatcatcaccaaacgaatggctgcagtctgtccaggccaccatgatcctgtcgatcatcttcagcattctgtctctgttcctgttcttctgccaactcttcaccctcaccaaggggggcaggttttacatcactggaatcttccaaattcttgctgaatcaaactcaagtcaaatgtgtggttaccgggattaagaacagaaagaatagaggggactcctgagtctgtgcgtgatgagtgctgcggccatctacacggtgaggcacccggagtggcatctcaactcggattactcctacggtttcgcctacatcctggcctgggtggccttccccctggcccttctcagcggtgtcatctatgtgatcttgcggaaacgcgaatgaggcgcccagacggtctgtctgaggctctgagcgtacatagggaagggaggaagggaaaacagaaagcagacaaagaaaaaagagctagcccaaaatcccaaactcaaaccaaaccaaaca

SEQ ID NO: 6672 - DNA, 1817 bp, Artificial Sequence
  derived and/or modified sequence
tgttcccgttaaaggggaacgccaggagcctcccactgcccccttgcttcgcgcgcgcgcagccccgcagcgcagctttggcggcgccagcagcggagccaacgcacccgagtttgtgtttgaggccaccctgaggatcgggacagctgttcctttgggctgcagaaactccgctgagcagaacttgccgccagaatgctcctcctgttgctgagtatcatcgtcctccacgtcgcggtgctggtgctgctgttcgtctccacgatcgtcagccaatggatcgtgggcaatggacacgcaactgatctctggcagaactgtagcacctcttcctcaggaaatgtccaccactgtttctcatcatcaccaaacgaatggctgcagtctgtccaggccaccatgatcctgtcgatcatcttcagcattctgtctctgttcctgttcttctgccaactcttcaccctcaccaaggggggcaggttttacatcactggaatcttccaaattcttgctggtctgtgcgtgatgagtgctgcggccatctacacggtgaggcacccggagtggcatctcaactcggattactcctacggtttcgcctacatcctggcctgggtggccttccccctggcccttctcagcggtgtcatctatgtgatcttgcggaaacgcgaatgaggcgcccagacggtctgtctgaggctctgagcgtacatagggaagggaggaagggaaaacagaaagcagacaaagaaaaaagagctagcccaaaatcccaaactcaaaccaaaccaaacagaaagcagtggaggtgggggttgctgttgattgaagatgtatataatatctccggtttataaaacctatttataacactttttacatatatgtacatagtattgtttgctttttatgttgaccatcagcctcgtgttgagccttaaagaagtagctaaggaactttacatcctaacagtataatccagctcagtatttttgttttgttttttgtttgtttgttttgttttacccagaaataagataactccatctcgccccttccctttcatctgaaagaagatacctccctcccagtccacctcatttagaaaaccaaagtgtgggtagaaaccccaaatgtccaaaagcccttttctggtgggtgacccagtgcatccaacagaaacagccgctgcccgaacctctgtgtgaagctttacgcgcacacggacaaaatgcccaaactggagcccttgcaaaaacacggcttgtggcattggcatacttgcccttacaggtggagtatcttcgtcacacatctaaatgagaaatcagtgacaacaagtctttgaaatggtgctatggatttaccattccttattatcactaatcatctaaacaactcactggaaatccaattaacaattttacaacataagatagaatggagacctgaataattctgtgtaatataaatggtttataactgcttttgtacctagctaggctgctattattactataatgagtaaatcataaagccttcatcactcccacatttttcttacggtcggagcatcagaacaagcgtctagactccttgggaccgtgagttcctagagcttggctgggtctaggctgttctgtgcctccaaggactgtctggcaatgacttgtattggccaccaactgtagatgtatatatggtgcccttctgatgctaagactccagaccttttgtttttgctttgcattttctgattttataccaactgtgtggactaagatgcattaaaataaacatcagagtaactcac

SEQ ID NO: 6673 - DNA, 1236 bp, Artificial Sequence
  derived and/or modified sequence
acccgagtttgtgtttgaggccaccctgaggatcgggacagctgttcctttgggctgcagaaactccgctgagcagaacttgccgccagaatgctcctcctgttgctgagtatcatcgtcctccacgtcgcggtgctggtgctgctgttcgtctccacgatcgtcagccaatggatcgtgggcaatggacacgcaactgatctctggcagaactgtagcacctcttcctcaggaaatgtccaccactgtttctcatcatcaccaaacgaatggctgcagtctgtccaggccaccatgatcctgtcgatcatcttcagcattctgtctctgttcctgttcttctgccaactcttcaccctcaccaaggggggcaggttttacatcactggaatcttccaaattcttgctggtctgtgcgtgatgagtgctgcggccatctacacggtgaggcacccggagtggcatctcaactcggattactccttccccctggcccttctcagcggtgtcatctatgtgatcttgcggaaacgcgaatgaggcgcccagacggtctgtctgaggctctgagcgtacatagggaagggaggaagggaaaacagaaagcagacaaagaaaaaagagctagcccaaaatcccaaactcaaaccaaaccaaacagaaagcagtggaggtgggggttgctgttgattgaagatgtatataatatctccggtttataaaacctatttataacactttttacatatatgtacatagtattgtttgctttttatgttgaccatcagcctcgtgttgagccttaaagaagtagctaaggaactttacatcctaacagtataatccagctcagtatttttgttttgttttttgtttgtttgttttgttttacccagaaataagataactccatctcgccccttccctttcatctgaaagaagatacctccctcccagtccacctcatttagaaaaccaaagtgtgggtagaaaccccaaatgtccaaaagcccttttctggtgggtgacccagtgcatccaacagaaacagccgctgcccgaacctctgtgtgaagctttacgcgcacacggacaaaatgcccaaactggagcccttgcaaaaacacggcttgtggcattggcatacttgcccttacaggtggagtatcttcgtcacacatctaaatgagaaatcagtgacaacaagtctttgaaatggtgctatggatttaccat

SEQ ID NO: 6674 - DNA, 483 bp, Artificial Sequence
  derived and/or modified sequence
atgctccttctgctcctcagcattatcgtgctgcacgtcgcagtgctggtgcttctgtttgtgtcaaccatagtgtcccagtggatcgttggaaatggccacgccaccgatctgtggcagaactgcagcacgagctcttccgggaatgtgcaccactgcttctcctcgagccctaatgagtggcttcagtcagtgcaggcaacgatgatccttagtattatcttttctatcttgagcctgttcttgtttttttgtcagttgtttacgctcaccaagggaggcaggttctacataaccggcatctttcagatcctggccggactttgtgttatgagcgccgctgccatttacacagttagacaccccgagtggcatctgaattcagattatagctacgggttcgcatacattttggcgtgggttgcttttcccttagcgctgctgagcggagtcatctatgttattcttagaaagagggagtag

SEQ ID NO: 6675 - DNA, 483 bp, Artificial Sequence
  derived and/or modified sequence
atgcttctcctgctactcagtatcattgtcctgcacgtagctgtgttggtgttgttgttcgtgtctacaatcgttagccagtggattgtgggcaacggtcatgctacagacctgtggcagaattgcagtacatcaagtagcggaaatgtgcaccactgttttagctccagcccgaacgaatggttacagtccgtgcaggccactatgatcctgtcaattatctttagcatccttagcctgtttttgttcttctgccagctgtttactctgacaaaggggggtcgcttctatatcacaggtattttccagatcctcgctgggctgtgcgtgatgagcgccgctgcaatctacactgttagacacccagagtggcatctgaactctgactactcatacggcttcgcctacatcctggcctgggtcgcgttccctctggctctgctgtctggggtgatttatgttattcttaggaaaagggaatag

SEQ ID NO: 6676 - DNA, 450 bp, Artificial Sequence
  derived and/or modified sequence
atgctgctactgctcctgagcattatagttcttcatgttgccgttctagtccttctgtttgtatctacaatcgtatcacagtggatcgtgggcaatggccacgcaactgatctgtggcagaattgttccacctcctcctccggtaatgttcatcactgttttagttcatcgccgaacgaatggctgcagagtgtgcaggccaccatgatactgtccattatcttcagcatcttaagcctcttcctatttttctgtcagttgttcaccctgactaaggggggacggttttacatcactggaattttccaaattttagccggactgtgcgtgatgtctgccgctgccatttacaccgtccgacaccccgaatggcatctgaattccgattacagttttccactggcgcttctttccggggttatctacgttattctccgaaaaagggaatag

SEQ ID NO: 6677 - DNA, 483 bp, Artificial Sequence
  derived and/or modified sequence
atgctgctgctgctgctgagcatcatcgtgctgcacgtggccgtgctggtgctgctgttcgtgagcaccatcgtgagccagtggatcgtgggcaacggccacgccaccgacctgtggcagaactgcagcaccagcagcagcggcaacgtgcaccactgcttcagcagcagccccaacgagtggctgcagagcgtgcaggccaccatgatcctgagcatcatcttcagcatcctgagcctgttcctgttcttctgccagctgttcaccctgaccaagggcggcagattctacatcaccggcatcttccagatcctggccggcctgtgcgtgatgagcgccgccgccatctacaccgtgagacaccccgagtggcacctgaacagcgactacagctacggcttcgcctacatcctggcctgggtggccttccccctggccctgctgagcggcgtgatctacgtgatcctgagaaagagagagtag

SEQ ID NO: 6678 - DNA, 450 bp, Artificial Sequence
  derived and/or modified sequence
atgctgctgctgctgctgagcatcatcgtgctgcacgtggccgtgctggtgctgctgttcgtgagcaccatcgtgagccagtggatcgtgggcaacggccacgccaccgacctgtggcagaactgcagcaccagcagcagcggcaacgtgcaccactgcttcagcagcagccccaacgagtggctgcagagcgtgcaggccaccatgatcctgagcatcatcttcagcatcctgagcctgttcctgttcttctgccagctgttcaccctgaccaagggcggcagattctacatcaccggcatcttccagatcctggccggcctgtgcgtgatgagcgccgccgccatctacaccgtgagacaccccgagtggcacctgaacagcgactacagcttccccctggccctgctgagcggcgtgatctacgtgatcctgagaaagagagagtag

SEQ ID NO: 6679 - protein, 354 aa, Artificial Sequence
  derived and/or modified sequence
MGRLVAVGLLGIALALLGERLLALRNRLKASREVESVDLPHCHLIKGIEAGSEDIDILPNGLAFFSVGLKFPGLHSFAPDKPGGILMMDLKEEKPRARELRISRGFDLASFNPHGISTFIDNDDTVYLFVVNHPEFKNTVEIFKFEEAENSLLHLKTVKHELLPSVNDITAVGPAHFYATNDHYFSDPFLKYLETYLNLHWANVVYYSPNEVKVVAEGFDSANGINISPDDKYIYVADILAHEIHVLEKHTNMNLTQLKVLELDTLVDNLSIDPSSGDIWVGCHPNGQKLFVYDPNNPPSSEVLRIQNILSEKPTVTTVYANNGSVLQGSSVASVYDGKLLIGTLYHRALYCEL

SEQ ID NO: 6680 - protein, 352 aa, Artificial Sequence
  derived and/or modified sequence
GAAGGCGLAGDRAGLGERLLALRNRLKASREVESVDLPHCHLIKGIEAGSEDIDILPNGLAFFSVGLKFPGLHSFAPDKPGGILMMDLKEEKPRARELRISRGFDLASFNPHGISTFIDNDDTVYLFVVNHPEFKNTVEIFKFEEAENSLLHLKTVKHELLPSVNDITAVGPAHFYATNDHYFSDPFLKYLETYLNLHWANVVYYSPNEVKVVAEGFDSANGINISPDDKYIYVADILAHEIHVLEKHTNMNLTQLKVLELDTLVDNLSIDPSSGDIWVGCHPNGQKLFVYDPNNPPSSEVLRIQNILSEKPTVTTVYANNGSVLQGSSVASVYDGKLLIGTLYHRALYCEL

SEQ ID NO: 6681 - protein, 375 aa, Artificial Sequence
  derived and/or modified sequence
MAPPTELLARPERGSAPGSRAMGRLVAVGLLGIALALLGERLLALRNRLKASREVESVDLPHCHLIKGIEAGSEDIDILPNGLAFFSVGLKFPGLHSFAPDKPGGILMMDLKEEKPRARELRISRGFDLASFNPHGISTFIDNDDTVYLFVVNHPEFKNTVEIFKFEEAENSLLHLKTVKHELLPSVNDITAVGPAHFYATNDHYFSDPFLKYLETYLNLHWANVVYYSPNEVKVVAEGFDSANGINISPDDKYIYVADILAHEIHVLEKHTNMNLTQLKVLELDTLVDNLSIDPSSGDIWVGCHPNGQKLFVYDPNNPPSSEVLRIQNILSEKPTVTTVYANNGSVLQGSSVASVYDGKLLIGTLYHRALYCEL

SEQ ID NO: 6682 - DNA, 1065 bp, Artificial Sequence
  derived and/or modified sequence
atgggcagactggtggccgtgggcctgctgggcatcgccctggccctgctgggcgagagactgctggccctgagaaacagactgaaggccagcagagaggtggagagcgtggacctgccccactgccacctgatcaagggcatcgaggccggcagcgaggacatcgacatcctgcccaacggcctggccttcttcagcgtgggcctgaagttccccggcctgcacagcttcgcccccgacaagcccggcggcatcctgatgatggacctgaaggaggagaagcccagagccagagagctgagaatcagcagaggcttcgacctggccagcttcaacccccacggcatcagcaccttcatcgacaacgacgacaccgtgtacctgttcgtggtgaaccaccccgagttcaagaacaccgtggagatcttcaagttcgaggaggccgagaacagcctgctgcacctgaagaccgtgaagcacgagctgctgcccagcgtgaacgacatcaccgccgtgggccccgcccacttctacgccaccaacgaccactacttcagcgaccccttcctgaagtacctggagacctacctgaacctgcactgggccaacgtggtgtactacagccccaacgaggtgaaggtggtggccgagggcttcgacagcgccaacggcatcaacatcagccccgacgacaagtacatctacgtggccgacatcctggcccacgagatccacgtgctggagaagcacaccaacatgaacctgacccagctgaaggtgctggagctggacaccctggtggacaacctgagcatcgaccccagcagcggcgacatctgggtgggctgccaccccaacggccagaagctgttcgtgtacgaccccaacaacccccccagcagcgaggtgctgagaatccagaacatcctgagcgagaagcccaccgtgaccaccgtgtacgccaacaacggcagcgtgctgcagggcagcagcgtggccagcgtgtacgacggcaagctgctgatcggcaccctgtaccacagagccctgtactgcgagctgtag

SEQ ID NO: 6683 - DNA, 1065 bp, Artificial Sequence
  derived and/or modified sequence
atgggtcgcctggtggcagtgggactgctggggatcgcactggctctgctaggagaacgtctcctcgccctgcgaaaccggctaaaggcgtcacgggaggtggagagcgtagacctgcctcactgccatctcatcaaggggatcgaggccggctccgaagacatcgatattctgcctaatggtttagcctttttcagcgtggggctgaagtttccaggcttgcattcctttgcaccagacaaaccggggggcatcttaatgatggatctgaaagaggagaaaccaagggcgcgcgaacttaggatcagtagaggtttcgacctggcttcattcaatccccatgggattagcacctttatagataacgacgataccgtctatctgttcgtggtgaaccaccccgagtttaaaaatacagtggaaattttcaaattcgaagaggcagagaatagcctgctccacctgaagaccgtaaagcacgagctgctgccttctgttaacgacattactgcggttggccccgcacacttttatgccacgaatgatcactacttcagcgacccatttctgaagtacctggaaacttatctgaatctgcattgggcgaatgtggtttactacagcccaaacgaagtcaaggtcgtggcggaaggcttcgattcagccaatgggatcaacatctcccctgacgacaagtacatatatgtggcggatatcttagcccatgaaatccatgtgctggagaagcataccaatatgaatcttacacagctgaaggtgctggagctcgacactctggtggataacctgagcatcgacccttcctcaggcgacatttgggtgggctgtcaccctaatggccaaaagctgtttgtgtatgatcccaacaatcccccttcttccgaagtcctacggatccagaacattctttccgagaaacccaccgttaccacagtttacgctaacaacggtagcgtcctccagggaagctcagtcgcgtccgtgtatgatggaaaattactgatcggcactctgtaccatagggcactatattgtgagttatag

SEQ ID NO: 6684 - DNA, 1065 bp, Artificial Sequence
  derived and/or modified sequence
atgggccgcctggtggccgtgggcctgctgggcatcgccctggccctgctgggggagcggctgctggccctgaggaaccggctgaaggccagccgggaggtggagagcgtggacctgccccactgccacctgatcaagggcatcgaggccggctctgaagatattgacatcctgcccaacggcctggccttcttctctgtgggcctgaagtttcctggcctgcacagctttgccccagacaagccaggcggcatcctgatgatggacctgaaggaggagaagccccgggcccgggagctgcgcatcagccggggctttgacctggccagcttcaacccccacggcatcagcaccttcatcgacaatgatgacacagtgtacctgtttgtggtgaaccaccctgagttcaagaacacagtggagatcttcaagtttgaggaggccgagaacagcctgctgcacctgaagacagtgaagcatgagctgctgcccagcgtgaatgacatcacagctgtgggccctgcccacttctacgccaccaatgaccactacttcagtgaccccttcctgaagtacctggagacctacctgaacctgcactgggccaacgtggtgtactacagccccaatgaggtgaaggtggtggccgagggctttgattctgccaacggcatcaacatcagcccagatgacaagtacatctacgtggccgacatcctggcccacgagatccacgtgctggagaagcacaccaacatgaacctgacccagctgaaggtgctggagctggacaccctggtggacaacctgagcattgaccccagcagcggggacatctgggtgggctgccaccccaacggccagaagctgtttgtgtatgaccccaacaacccccccagcagcgaggtgctgcgcatccagaacatcctgtctgagaagcccaccgtgaccaccgtgtatgccaacaatggatctgtgctgcagggcagctctgtggcctctgtgtatgatggcaagctgctgattggcaccctgtaccaccgggccctgtactgtgagctgtag

SEQ ID NO: 6685 - DNA, 1065 bp, Artificial Sequence
  derived and/or modified sequence
atgggccggctggtggccgtgggcctgctgggcatcgccctggccctgcttggggaaagactgctcgccttacggaacaggcttaaggcatccagagaggttgagtcggtggatctcccgcattgccatttaattaaggggatcgaagctggaagcgaagatattgatatcctgccgaacggactcgcatttttcagcgtagggttaaagttcccgggtctgcacagcttcgcccccgataaacccgggggaatactgatgatggacttgaaggaggaaaagcctcgagcacgggagctacgaatctccagaggatttgacctcgcctcatttaaccctcacggcatcagtactttcatcgataacgacgatacggtgtatctgttcgtcgtaaatcacccagaatttaagaatacagtcgagatttttaaatttgaggaggccgagaacagcctactacaccttaagaccgttaagcatgaactgctgcccagcgtgaacgacattactgcagtaggcccagctcatttttatgccacaaacgaccactacttttctgatcctttcctgaagtatctggagacgtatctgaacttgcactgggctaacgtggtatattacagcccaaatgaggtaaaagttgttgcagaggggttcgatagcgcaaatggtatcaatattagcccggatgacaagtatatatatgtggcagacatcttggctcacgagatccacgtgctcgagaagcataccaacatgaacttgactcagctgaaagtgctggagctggatacccttgtggataatcttagcattgacccgagtagcggcgatatttgggtgggatgccaccccaacggccaaaagctgtttgtctatgacccaaacaaccccccaagctcagaagtcctgcggatccagaacatcctaagcgaaaagcctaccgtaactaccgtatacgcgaataatggctcagtgctacaggggtcatctgtggccagtgtgtacgacggcaagctgctgatagggacactctatcatagagccctgtattgcgagctgtag

SEQ ID NO: 6686 - DNA, 1065 bp, Artificial Sequence
  derived and/or modified sequence
atggggcgactggtggctgtcggcttgctcggtatcgctctggccttgcttggggagcgccttttggccctcagaaacaggctgaaggcttccagggaggtggaaagtgtagacctgccacactgccatctgattaaggggatcgaagcaggaagcgaagatatagatattctgcctaatggactggcttttttctcggttggattgaagttccccggtctgcacagctttgcgccagacaagccaggtgggattttaatgatggacctcaaggaggaaaaacctcgtgctcgcgagctgcgcatatcgaggggctttgacttggcgtctttcaacccccatgggatttcaacattcattgacaatgatgatacagtgtatctgttcgttgtaaaccaccctgaattcaagaacactgttgagatcttcaagttcgaggaagctgagaattctctcctgcacctcaagacagttaaacacgaactgctgccgagtgtgaacgatattaccgccgtagggccagcacatttttacgcaaccaatgatcactacttctctgaccccttcttaaagtatctggagacctacctaaaccttcattgggctaacgtagtgtattactcacccaatgaggtcaaagtggtcgccgaaggattcgactccgccaacgggatcaatatctctcccgatgacaagtacatctacgtggcagacatcttagcacacgagatccacgtgctcgagaagcatactaatatgaatctgacccaactcaaggtgcttgagctggacaccttggtcgacaatctatcgattgaccccagttctggtgatatctgggtcggctgccaccccaatggccagaagctttttgtttacgaccctaataatccccctagctccgaggtgttacgaatccagaatatcctatccgaaaagccgactgtaaccactgtctacgcaaacaacgggagcgtgctgcaagggagcagcgtcgcatcggtatacgatggtaaactgttaatcggaaccctgtaccaccgagctctctattgcgagttatag

SEQ ID NO: 6687 - DNA, 1059 bp, Artificial Sequence
  derived and/or modified sequence
ggagctgctgggggatgcggactggcgggcgaccgcgcaggcctaggcgagcgcctgctcgctctgcggaacagactcaaggctagccgcgaggtggaatcagtagacctcccccattgtcatttaatcaagggtatcgaggcgggcagcgaagacatcgatatactgcccaacggcctggccttcttttcagtcgggctgaaattccccggactccacagcttcgcccctgacaaacccggaggcatcctcatgatggatctcaaagaagagaaaccccgtgcaagagaactccgaataagccgtggcttcgatcttgcaagcttcaatccccacggaatcagcacatttatcgacaacgacgatactgtgtatctgtttgtggtcaaccaccccgaatttaagaatacagttgagatattcaagttcgaggaagctgagaactccctgctgcacctgaagactgtgaaacatgaattactgccttctgtcaatgacattaccgccgtggggcctgcccatttctatgccaccaatgatcattattttagcgacccctttctcaaatatctcgaaacttacctcaacctgcattgggccaatgtggtgtactactctccaaatgaagtgaaggtggtcgcagagggatttgacagtgccaacggcatcaacattagccccgatgacaagtacatctacgtagcggacattctggctcacgagatacacgtgttggagaagcataccaacatgaatctgactcaacttaaagtgttggaactggacactctggtggacaatctcagtatagatccttcatccggcgacatctgggtcgggtgtcacccaaacggccagaaactgttcgtctatgacccaaataaccccccctcctccgaggtgctacggatccagaatattctgagcgagaagccaaccgtaacaactgtctatgccaacaatgggagtgtgctgcaggggtcaagcgtggcctcagtgtacgatggcaaactcctgatcggcactctctaccaccgtgcattgtattgcgagctctag

SEQ ID NO: 6688 - DNA, 1128 bp, Artificial Sequence
  derived and/or modified sequence
atggctccccccacagagctgctggcacgtcctgagaggggctccgctcccggcagtagggcgatgggccggctggttgcagttggtctccttggcatagcacttgcgttgctgggcgaacgtctgctggccctgcgtaatcgactgaaggcatcacgagaggtcgaatcagtggaccttcctcattgtcacctgatcaagggcatcgaggccggatcagaggatattgacattttacccaacggcttagcatttttttcagtgggactgaaattccccggcctgcacagcttcgcgcccgataagccgggtggcatcttgatgatggatctgaaagaagagaagccgagagcccgagaacttcgcatctccaggggctttgacttagcgtccttcaatcctcatggtatttctaccttcatcgataacgacgacactgtctacttgtttgtcgttaatcatccagaattcaaaaacaccgtggagatctttaagttcgaggaggccgaaaacagtctgctgcacttgaaaacagtaaaacacgagctgctgccatcagtgaacgatataaccgccgtgggccctgcccacttttatgccaccaacgaccattactttagtgatccctttctgaagtatttagagacctacttgaatctgcactgggcaaacgtggtatactactcacctaacgaagtcaaggtcgtcgcggagggattcgactccgctaatggtattaatatttccccagacgacaaatatatttacgtcgccgatatcctggcccacgaaattcatgtgcttgagaagcacacaaacatgaacttgacccagctgaaagtgctggagcttgacacactggtcgacaacctgtccatcgatccctcctcaggagatatctgggttggttgccaccctaatgggcaaaagctgtttgtctatgatcccaataacccaccatcgagtgaagtcctgagaatccagaatatactgtcggaaaagccaaccgttactacagtgtacgccaacaacggctcagtgctccagggttctagtgtggcctccgtatatgatgggaagcttctgattggtaccctgtatcacagggccctatactgtgagctatag

SEQ ID NO: 6689 - DNA, 1059 bp, Artificial Sequence
  derived and/or modified sequence
ggggctgctgggggctgcggcctggccggggacagagctggcctgggggagcggctgctggccctgaggaaccggctgaaggccagccgggaggtggagagcgtggacctgccccactgccacctgatcaagggcatcgaggccggctctgaagatattgacatcctgcccaacggcctggccttcttctctgtgggcctgaagtttcctggcctgcacagctttgccccagacaagccaggcggcatcctgatgatggacctgaaggaggagaagccccgggcccgggagctgcgcatcagccggggctttgacctggccagcttcaacccccacggcatcagcaccttcatcgacaatgatgacacagtgtacctgtttgtggtgaaccaccctgagttcaagaacacagtggagatcttcaagtttgaggaggccgagaacagcctgctgcacctgaagacagtgaagcatgagctgctgcccagcgtgaatgacatcacagctgtgggccctgcccacttctacgccaccaatgaccactacttcagtgaccccttcctgaagtacctggagacctacctgaacctgcactgggccaacgtggtgtactacagccccaatgaggtgaaggtggtggccgagggctttgattctgccaacggcatcaacatcagcccagatgacaagtacatctacgtggccgacatcctggcccacgagatccacgtgctggagaagcacaccaacatgaacctgacccagctgaaggtgctggagctggacaccctggtggacaacctgagcattgaccccagcagcggggacatctgggtgggctgccaccccaacggccagaagctgtttgtgtatgaccccaacaacccccccagcagcgaggtgctgcgcatccagaacatcctgtctgagaagcccaccgtgaccaccgtgtatgccaacaatggatctgtgctgcagggcagctctgtggcctctgtgtatgatggcaagctgctgattggcaccctgtaccaccgggccctgtactgtgagctgtag

SEQ ID NO: 6690 - DNA, 1128 bp, Artificial Sequence
  derived and/or modified sequence
atggccccacccacagagctgctggcccggcctgagcggggcagcgcccctggcagccgggccatgggccgcctggtggccgtgggcctgctgggcatcgccctggccctgctgggggagcggctgctggccctgaggaaccggctgaaggccagccgggaggtggagagcgtggacctgccccactgccacctgatcaagggcattgaagctggcagcgaggacatcgacatcctgcccaacggcctggccttcttctctgtgggcctgaagtttcctggcctgcacagctttgccccagacaagccaggcggcatcctgatgatggacctgaaggaggagaagccccgggcccgggagctgcgcatcagccggggctttgacctggccagcttcaacccccacggcatcagcaccttcatcgacaatgatgacacagtgtacctgtttgtggtgaaccaccctgagttcaagaacacagtggagatcttcaagtttgaggaggccgagaacagcctgctgcacctgaagacagtgaagcatgagctgctgcccagcgtgaatgacatcacagctgtgggccctgcccacttctacgccaccaatgaccactacttcagtgaccccttcctgaagtacctggagacctacctgaacctgcactgggccaacgtggtgtactacagccccaatgaggtgaaggtggtggccgagggctttgacagcgccaacggcatcaacatcagcccagatgacaagtacatctacgtggccgacatcctggcccacgagatccacgtgctggagaagcacaccaacatgaacctgacccagctgaaggtgctggagctggacaccctggtggacaacctgagcattgaccccagcagcggggacatctgggtgggctgccaccccaacggccagaagctgtttgtgtatgaccccaacaacccccccagcagcgaggtgctgcgcatccagaacatcctgtctgagaagcccaccgtgaccaccgtgtatgccaacaacggctctgtgctgcagggcagctctgtggcctctgtgtatgatggcaagctgctgattggcaccctgtaccaccgggccctgtactgtgagctgtag

SEQ ID NO: 6691 - DNA, 1059 bp, Artificial Sequence
  derived and/or modified sequence
ggcgccgccggcggctgcggcctggccggcgaccgggccggcctgggagaaaggttactcgcactccgcaatagactgaaagcatctcgggaagtggaaagcgtagatctgcctcattgtcacttgattaagggaatagaggctggaagcgaagacattgacatactacccaacggtcttgccttcttcagcgtagggctgaaattccccggcttgcatagttttgctccggataaaccagggggtattctcatgatggatttgaaggaagaaaaacccagagcaagggagctgcgtattagccgtggtttcgacttagcctctttcaaccctcatggaattagtacatttatcgataacgacgacacagtatacctcttcgtcgtcaaccatcctgagttcaagaataccgtggagattttcaaattcgaggaagccgaaaattctttgctccacctcaaaactgtgaaacacgaacttctcccttccgtaaacgacatcaccgcggttgggcctgcccacttctatgccacaaacgatcactactttagtgatccttttctcaaatatctcgagacctacctaaatctccattgggccaacgtggtgtactactctcccaacgaggtgaaggttgtggcagagggatttgacagcgccaacggaatcaacatttcaccggatgacaaatacatatacgtagcggatattcttgcacacgaaatccacgtattagagaagcacactaacatgaatctaacacagctgaaggtgctggagctggatactttggttgacaacctgtccattgacccctcgtcaggcgatatttgggtcggctgccatccaaatggtcaaaaactctttgtctacgatccaaacaacccgccctcttcagaagtactacggatccaaaacatcttgtccgagaaaccgacggtcactactgtctacgctaataatgggagcgtcttgcaaggcagtagcgtggctagtgtttacgacggtaagctgctgatcggcactctttatcatcgagccctgtactgcgagctttag

SEQ ID NO: 6692 - DNA, 1128 bp, Artificial Sequence
  derived and/or modified sequence
atggccccccccaccgagctgctggcccggcccgagcggggcagcgccccaggatccagggccatggggcgcctggtggctgtggggctgctgggcatcgccctggccctactcggcgagcgcctgcttgcactgaggaatcggctcaaggcgagtagagaagtagaatccgtcgacctcccgcattgccacctgataaaaggaatcgaggccggttcagaggatatagatatcctgcctaatggcctcgcattcttctccgtgggactgaaattccctggtttacacagctttgcacctgataaacctggggggattttgatgatggacttaaaggaagaaaaaccccgggctagggagctcagaattagccggggcttcgacctcgcctcgttcaatccgcacggcatcagcacattcattgacaatgatgacaccgtgtatctatttgttgttaaccacccggagtttaagaatacagtggaaatctttaaatttgaagaggctgagaattcccttctgcatcttaagacggtgaagcacgagcttttaccgagcgttaacgacattacagccgtggggcccgcccatttctacgcgaccaatgatcactactttagtgatccctttttgaagtatctagaaacttaccttaatttgcactgggctaacgtcgtgtattactctcctaacgaagtcaaggtggttgccgaggggttcgacagcgccaacggaatcaacatatcacccgacgataaatatatatatgtagcagatatcctggcccatgaaatccacgtgttggagaagcacacaaatatgaacttgacccagttgaaagtcctggagttggacactttagtggacaacctgagcattgaccctagtagtggagatatctgggttggatgccaccctaacggtcagaagctgtttgtctacgatcccaataatccgccaagttctgaagtgctgagaattcagaatattttgagtgaaaagcctactgttaccacggtttacgccaacaacggctctgtgctccagggtagcagcgtcgcctccgtgtacgatggcaagctgcttattggaacactgtaccatcgtgcactttactgtgagctatag

SEQ ID NO: 6693 - DNA, 1745 bp, Artificial Sequence
  derived and/or modified sequence
aagtttcacatcatgagcctaatgtaaggcgtgtccgggccgtcccgaaggtatctggggaaataggtttgtgaggacaaagaccagggccaggcccagggcggagcctccgcggccccgacgcagggactcggcctaggcggaggacggggcggagcgcggccggcaccatcgagccgggaagatggcaccgcccacggagctgctggccaggccggagcgaggcagcgcgcccggctcccgcgccatggggcggctggtggctgtgggcttgctggggatcgcgctggcgctcctgggcgagaggcttctggcactcagaaatcgacttaaagcctccagagaagtagaatctgtagaccttccacactgccacctgattaaaggaattgaagctggctctgaagatattgacatacttcccaatggtctggctttttttagtgtgggtctaaaattcccaggactccacagctttgcaccagataagcctggaggaatactaatgatggatctaaaagaagaaaaaccaagggcacgggaattaagaatcagtcgtgggtttgatttggcctcattcaatccacatggcatcagcactttcatagacaacgatgacacagtttatctctttgttgtaaaccacccagaattcaagaatacagtggaaatttttaaatttgaagaagcagaaaattctctgttgcatctgaaaacagtcaaacatgagcttcttccaagtgtgaatgacatcacagctgttggaccggcacatttctatgccacaaatgaccactacttctctgatcctttcttaaagtatttagaaacatacttgaacttacactgggcaaatgttgtttactacagtccaaatgaagttaaagtggtagcagaaggatttgattcagcaaatgggatcaatatttcacctgatgataagtatatctatgttgctgacatattggctcatgaaattcatgttttggaaaaacacactaatatgaatttaactcagttgaaggtacttgagctggatacactggtggataatttatctattgatccttcctcgggggacatctgggtaggctgtcatcctaatggccagaagctcttcgtgtatgacccgaacaatcctccctcgtcagaggttctccgcatccagaacattctatctgagaagcctacagtgactacagtttatgccaacaatgggtctgttctccaaggaagttctgtagcctcagtgtatgatgggaagctgctcataggcactttataccacagagccttgtattgtgaactctaaattgtacttttggcatgaaagtgcgataacttaacaattaattttctatgaattgctaattctgagggaatttaaccagcaacattgacccagaaatgtatggcatgtgtagttaattttattccagtaaggaacggcccttttagttcttagagcacttttaacaaaaaaggaaaatgaacaggttctttaaaatgccaagcaagggacagaaaagaaagctgctttcgaataaagtgaatacattttgcacaaagtaagcctcacctttgccttccaactgccagaacatggattccactgaaatagagtgaattatatttccttaaaatgtgagtgacctcacttctggcactgtgactactatggctgtttagaactactgataacgtattttgatgttttgtacttacatctttgtttaccattaaaa

SEQ ID NO: 6694 - DNA, 1516 bp, Artificial Sequence
  derived and/or modified sequence
ggggcggctggtggctgtgggcttgctggggatcgcgctggcctgggcgagaggcttctggcactcagaaatcgacttaaagcctccagagaagtagaatctgtagaccttccacactgccacctgattaaaggaattgaagctggctctgaagatattgacatacttcccaatggtctggctttttttagtgtgggtctaaaattcccaggactccacagctttgcaccagataagcctggaggaatactaatgatggatctaaaagaagaaaaaccaagggcacgggaattaagaatcagtcgtgggtttgatttggcctcattcaatccacatggcatcagcactttcatagacaacgatgacacagtttatctctttgttgtaaaccacccagaattcaagaatacagtggaaatttttaaatttgaagaagcagaaaattctctgttgcatctgaaaacagtcaaacatgagcttcttccaagtgtgaatgacatcacagctgttggaccggcacatttctatgccacaaatgaccactacttctctgatcctttcttaaagtatttagaaacatacttgaacttacactgggcaaatgttgtttactacagtccaaatgaagttaaagtggtagcagaaggatttgattcagcaaatgggatcaatatttcacctgatgataagtatatctatgttgctgacatattggctcatgaaattcatgttttggaaaaacacactaatatgaatttaactcagttgaaggtacttgagctggatacactggtggataatttatctattgatccttcctcgggggacatctgggtaggctgtcatcctaatggccagaagctcttcgtgtatgacccgaacaatcctccctcgtcagaggttctccgcatccagaacattctatctgagaagcctacagtgactacagtttatgccaacaatgggtctgttctccaaggaagttctgtagcctcagtgtatgatgggaagctgctcataggcactttataccacagagccttgtattgtgaactctaaattgtacttttggcatgaaagtgcgataacttaacaattaattttctatgaattgctaattctgagggaatttaaccagcaacattgacccagaaatgtatggcatgtgtagttaattttattccagtaaggaacggcccttttagttcttagagcacttttaacaaaaaaggaaaatgaacaggttctttaaaatgccaagcaagggacagaaaagaaagctgctttcgaataaagtgaatacattttgcacaaagtaagcctcacctttgccttccaactgccagaacatggattccactgaaatagagtgaattatatttccttaaaatgtgagtgacctcacttctggcactgtgactactatggctgtttagaactactgataacgtattttgatgttttgtacttacatctttgtttaccattaaaaagttggagttatattaaagactaa

SEQ ID NO: 6695 - DNA, 1779 bp, Artificial Sequence
  derived and/or modified sequence
aagtttcacatcatgagcctaatgtaaggcgtgtccgggccgtcccgaaggtatctggggaaataggtttgtgaggacaaagaccagggccaggcccagggcggagcctccgcggccccgacgcagggactcggcctaggcggaggacggggcggagcgcggccggcaccatcgagccgggaagatggcaccgcccacggagctgctggccaggccggagcgaggcagcgcgcccggctcccgcgccatggggcggctggtggctgtgggcttgctggggatcgcgctggcgctcctgggcgagaggcttctggcactcagaaatcgacttaaagcctccagagaagtagaatctgtagaccttccacactgccacctgattaaaggaattgaagctggctctgaagatattgacatacttcccaatggtctggctttttttagtgtgggtctaaaattcccaggactccacagctttgcaccagataagcctggaggaatactaatgatggatctaaaagaagaaaaaccaagggcacgggaattaagaatcagtcgtgggtttgatttggcctcattcaatccacatggcatcagcactttcatagacaacgatgacacagtttatctctttgttgtaaaccacccagaattcaagaatacagtggaaatttttaaatttgaagaagcagaaaattctctgttgcatctgaaaacagtcaaacatgagcttcttccaagtgtgaatgacatcacagctgttggaccggcacatttctatgccacaaatgaccactacttctctgatcctttcttaaagtatttagaaacatacttgaacttacactgggcaaatgttgtttactacagtccaaatgaagttaaagtggtagcagaaggatttgattcagcaaatgggatcaatatttcacctgatgataagtatatctatgttgctgacatattggctcatgaaattcatgttttggaaaaacacactaatatgaatttaactcagttgaaggtacttgagctggatacactggtggataatttatctattgatccttcctcgggggacatctgggtaggctgtcatcctaatggccagaagctcttcgtgtatgacccgaacaatcctccctcgtcagaggttctccgcatccagaacattctatctgagaagcctacagtgactacagtttatgccaacaatgggtctgttctccaaggaagttctgtagcctcagtgtatgatgggaagctgctcataggcactttataccacagagccttgtattgtgaactctaaattgtacttttggcatgaaagtgcgataacttaacaattaattttctatgaattgctaattctgagggaatttaaccagcaacattgacccagaaatgtatggcatgtgtagttaattttattccagtaaggaacggcccttttagttcttagagcacttttaacaaaaaaggaaaatgaacaggttctttaaaatgccaagcaagggacagaaaagaaagctgctttcgaataaagtgaatacattttgcacaaagtaagcctcacctttgccttccaactgccagaacatggattccactgaaatagagtgaattatatttccttaaaatgtgagtgacctcacttctggcactgtgactactatggctgtttagaactactgataacgtattttgatgttttgtacttacatctttgtttaccattaaaaagttggagttatattaaagactaactaaaatccc

SEQ ID NO: 6696 - DNA, 1059 bp, Artificial Sequence
  derived and/or modified sequence
ggcgctgcaggaggatgcggattggcaggggatagggccggtctaggagaaagactgctcgccctgcgtaaccgcctgaaagcatcaagagaggtcgaatccgtcgacttgccgcattgccatctcataaagggtatcgaagctgggtcggaggacatcgacattctgccgaacgggctagccttcttcagtgtaggcctgaaattcccaggactgcactcctttgccccagataaaccaggaggaatactgatgatggacctgaaagaggagaaacccagagccagagagctccggattagcagagggttcgaccttgcaagttttaaccctcacgggattagcacttttatcgacaatgatgatacagtctatctgttcgtagtgaaccaccccgagttcaaaaatacagtcgaaattttcaagttcgaagaggcagagaacagtttgctccacctgaagaccgtgaaacacgagttgttaccgtcagtaaatgatatcacagctgtgggaccagctcacttttatgctactaatgatcactatttctcggacccgtttttgaaatacctggagacttatctgaacctgcactgggctaatgtggtctactacagtcccaacgaggtcaaggtggtggccgaagggtttgattcagccaacggcatcaacatctccccagacgataaatatatctatgtagccgacatcctcgcccatgaaatccatgttctggagaagcacactaacatgaatctcacacagctgaaggtcctcgagttggatacattggtagataacttatccatcgacccaagttctggggatatttgggtcggctgtcaccccaatggacaaaagttgtttgtgtacgaccctaataatccaccgtcttcagaagtgctccgcatccagaacatcttgagcgaaaaaccaaccgtcacaacagtctacgcgaacaacggcagcgttctccagggcagtagcgtggcatctgtctatgacgggaagctgctcatcggcaccctctatcatcgcgctctttactgtgaactctag

SEQ ID NO: 6697 - DNA, 1128 bp, Artificial Sequence
  derived and/or modified sequence
atggcgcctcccaccgagttgctggcacgtcctgaaagaggatccgcccctggttccagagccatgggcaggctcgtggcagtgggactcctaggcatcgccctcgcattgttgggtgaacgactcttggccctgagaaaccgactgaaggccagcagggaagtcgaatctgtggatcttccacactgccacttaattaaaggcattgaggcaggatcggaagatatcgatatcttgcctaacggactagcgttcttttctgtcggccttaagtttcccggactccactcctttgccccagataaacccggtggcatactgatgatggatctcaaggaggagaagccacgagccagagaactgagaataagccgcggatttgacttagccagtttcaaccctcatggaattagcacattcattgataacgatgatactgtgtatctgttcgtagtgaaccatccagagtttaaaaatactgtggaaatttttaaattcgaagaggcagaaaattctttactgcaccttaagactgtcaagcacgagctgctgcctagcgtgaacgacatcacggccgtcggtccagcccatttctatgccacaaatgatcattacttctccgatcccttcttgaagtatctggaaacatacttaaacctgcactgggccaatgtggtgtactactcccctaacgaggtgaaagtagtggctgagggatttgactctgcaaacggcataaatattagccccgatgacaagtatatttacgtagctgacattctagctcacgaaatccatgtcctggagaaacatacgaacatgaatctcacccagttgaaggtgttggagctggatacgctcgtggataatctctccatcgacccgtcttccggtgatatctgggtcggctgtcatcccaatggccaaaagctctttgtctacgacccaaataaccccccaagctccgaggtgctgagaatacaaaacatcctgtctgaaaagccgaccgttaccaccgtctatgctaacaatggttcagttctacaggggtcatcagtggcttctgtctacgacgggaagctgttaattggaaccttatatcaccgggctctgtattgtgagctttag

SEQ ID NO: 6698 - DNA, 1059 bp, Artificial Sequence
  derived and/or modified sequence
ggcgccgccggcggctgcggcctggccggcgacagagccggcctgggcgagagactgctggccctgagaaacagactgaaggccagcagagaggtggagagcgtggacctgccccactgccacctgatcaagggcatcgaggccggcagcgaggacatcgacatcctgcccaacggcctggccttcttcagcgtgggcctgaagttccccggcctgcacagcttcgcccccgacaagcccggcggcatcctgatgatggacctgaaggaggagaagcccagagccagagagctgagaatcagcagaggcttcgacctggccagcttcaacccccacggcatcagcaccttcatcgacaacgacgacaccgtgtacctgttcgtggtgaaccaccccgagttcaagaacaccgtggagatcttcaagttcgaggaggccgagaacagcctgctgcacctgaagaccgtgaagcacgagctgctgcccagcgtgaacgacatcaccgccgtgggccccgcccacttctacgccaccaacgaccactacttcagcgaccccttcctgaagtacctggagacctacctgaacctgcactgggccaacgtggtgtactacagccccaacgaggtgaaggtggtggccgagggcttcgacagcgccaacggcatcaacatcagccccgacgacaagtacatctacgtggccgacatcctggcccacgagatccacgtgctggagaagcacaccaacatgaacctgacccagctgaaggtgctggagctggacaccctggtggacaacctgagcatcgaccccagcagcggcgacatctgggtgggctgccaccccaacggccagaagctgttcgtgtacgaccccaacaacccccccagcagcgaggtgctgagaatccagaacatcctgagcgagaagcccaccgtgaccaccgtgtacgccaacaacggcagcgtgctgcagggcagcagcgtggccagcgtgtacgacggcaagctgctgatcggcaccctgtaccacagagccctgtactgcgagctgtag

SEQ ID NO: 6699 - DNA, 1128 bp, Artificial Sequence
  derived and/or modified sequence
atggccccccccaccgagctgctggccagacccgagagaggcagcgcccccggcagcagagccatgggcagactggtggccgtgggcctgctgggcatcgccctggccctgctgggcgagagactgctggccctgagaaacagactgaaggccagcagagaggtggagagcgtggacctgccccactgccacctgatcaagggcatcgaggccggcagcgaggacatcgacatcctgcccaacggcctggccttcttcagcgtgggcctgaagttccccggcctgcacagcttcgcccccgacaagcccggcggcatcctgatgatggacctgaaggaggagaagcccagagccagagagctgagaatcagcagaggcttcgacctggccagcttcaacccccacggcatcagcaccttcatcgacaacgacgacaccgtgtacctgttcgtggtgaaccaccccgagttcaagaacaccgtggagatcttcaagttcgaggaggccgagaacagcctgctgcacctgaagaccgtgaagcacgagctgctgcccagcgtgaacgacatcaccgccgtgggccccgcccacttctacgccaccaacgaccactacttcagcgaccccttcctgaagtacctggagacctacctgaacctgcactgggccaacgtggtgtactacagccccaacgaggtgaaggtggtggccgagggcttcgacagcgccaacggcatcaacatcagccccgacgacaagtacatctacgtggccgacatcctggcccacgagatccacgtgctggagaagcacaccaacatgaacctgacccagctgaaggtgctggagctggacaccctggtggacaacctgagcatcgaccccagcagcggcgacatctgggtgggctgccaccccaacggccagaagctgttcgtgtacgaccccaacaacccccccagcagcgaggtgctgagaatccagaacatcctgagcgagaagcccaccgtgaccaccgtgtacgccaacaacggcagcgtgctgcagggcagcagcgtggccagcgtgtacgacggcaagctgctgatcggcaccctgtaccacagagccctgtactgcgagctgtag

SEQ ID NO: 6700 - protein, 291 aa, Artificial Sequence
  derived and/or modified sequence
MSCQAFTSADTFIPLNSDASATLPLIMHHSAAECLPVSNHATNVMSTATGLHYSVPSCHYGNQPSTYGVMAGSLTPCLYKFPDHTLSHGFPPIHQPLLAEDPTAADFKQELRRKSKLVEEPIDMDSPEIRELEKFANEFKVRRIKLGYTQTNVGEALAAVHGSEFSQTTICRFENLQLSFKNACKLKAILSKWLEEAEQVGALYNEKVGANERKRKRRTTISIAAKDALERHFGEQNKPSSQEIMRMAEELNLEKEVVRVWFCNRRQREKRVKTSLNQSLFSISKEHLECR

SEQ ID NO: 6701 - DNA, 876 bp, Artificial Sequence
  derived and/or modified sequence
atgtcctgccaggcctttaccagtgccgacaccttcattcccctgaattcagatgcttcggctactctacctcttattatgcaccacagcgctgccgaatgtctgccagtgtctaaccacgctactaacgtgatgagcactgcaacaggtctccactactccgtaccgagctgtcactacggaaatcagccgtccacttacggagtcatggcgggctcactcacaccctgtttgtacaagtttccagaccatactctcagccacggtttccccccaattcatcagcccttgctggccgaggatccaacagccgcagacttcaagcaggagttgcgtaggaaatccaaactggtggaggagccaattgatatggacagcccagaaatccgggaactagagaaattcgccaatgagtttaaggtgaggcgtatcaagcttggctatactcagaccaacgttggggaagccctggctgccgttcacggatccgagttctctcaaacaaccatttgtagattcgaaaacctccagttgagctttaagaacgcatgtaagcttaaggccatcctgagcaaatggctcgaagaagcagaacaggtgggtgcgttatacaatgagaaggtgggagccaatgaacgaaaacgtaagcggcgtactacaatcagtatagccgcaaaggacgccctggaaagacacttcggggagcaaaacaagccttcatcacaggagattatgcggatggccgaggaactgaatctggagaaggaggttgtgcgcgtgtggttttgtaacagacgccagagagagaagagagttaaaacatctttgaatcagtcactgtttagcatctcaaaggagcacctcgagtgccggtag

SEQ ID NO: 6702 - DNA, 876 bp, Artificial Sequence
  derived and/or modified sequence
atgagctgccaggccttcaccagcgctgacaccttcatccccctgaacagtgatgccagcgccaccctgcccctcatcatgcaccacagcgctgctgaatgtctgcctgtgagcaaccacgccaccaacgtgatgagcacagccaccggcctgcactacagcgtgcccagctgccactacggcaaccagcccagcacctatggagtgatggccggcagcctgaccccctgcctgtacaagttcccagaccacaccctgagccacggcttcccccccatccaccagcccctgctggccgaggaccccacagctgctgacttcaagcaggagctgcggaggaagagcaagctggtggaggagcccatcgacatggacagccctgagatccgggagctggagaagtttgccaatgagttcaaggtgcggcgcatcaagctgggctacacccagaccaacgtgggggaggccctggccgctgtgcacggcagcgagttcagccagaccaccatctgccgctttgagaacctgcagctgtccttcaagaatgcctgcaagctgaaggccatcctgagcaagtggctggaggaggccgagcaggtgggcgccctgtacaatgagaaggtgggcgccaatgaaaggaagaggaagaggaggaccaccatcagcattgctgccaaggatgccctggagcggcactttggagagcagaacaagcccagcagccaggagatcatgaggatggccgaggagctgaacctggagaaggaggtggtgcgggtgtggttctgcaacagacggcagcgggagaagagggtgaagaccagcctgaaccagagcctcttcagcatcagcaaggagcacctggagtgcaggtag

SEQ ID NO: 6703 - DNA, 876 bp, Artificial Sequence
  derived and/or modified sequence
atgagctgccaggccttcaccagcgccgacaccttcatccccctgaactctgacgccagcgcgacgctccccctcattatgcaccatagtgctgccgagtgcctgcccgtatccaatcatgcaacaaacgtcatgtcaacagctactggacttcactatagtgttccatcttgccactacggtaatcaaccatcgacttatggggtcatggctggcagtctgactccttgcttgtataaatttccagatcatacattatctcatggattcccgccaatccatcagcccctgctggctgaagacccgacagcagccgacttcaagcaggagctccgccgcaagtccaagctggtagaggaacccatagacatggatagtccggagatcagggaactggaaaagttcgcaaatgagtttaaggttaggaggattaagttggggtatactcagactaatgtgggcgaagctctggcggccgttcacggatcggaattcagccagacaacgatctgtaggttcgagaatctccaactgagctttaaaaatgcgtgcaagctgaaagcaatcttgtcaaaatggcttgaggaagcggaacaggtgggggcactgtacaacgagaaggtaggcgctaacgaaagaaagaggaaacggcgcaccactatcagtatagcagccaaagacgccttggaacggcatttcggagaacaaaataaacctagttcacaggaaattatgagaatggcagaggagttgaacctcgagaaggaggtagtgagggtgtggttttgtaataggaggcagcgggagaaacgcgtaaagacatccctgaaccagtcccttttctctatttccaaggagcacctcgagtgcaggtag

SEQ ID NO: 6704 - DNA, 1491 bp, Artificial Sequence
  derived and/or modified sequence
ctcagagccttcctgatgtatatatgcaggtagtgagaattgaatcggccctttgagacagtaatataataaaactctgatttggggagcagcggttctccttatttttctactctcttgtgggaatgagttgccaagcttttacttcggctgatacctttatacctctgaattctgacgcctctgcaactctgcctctgataatgcatcacagtgctgccgagtgtctaccagtctccaaccatgccaccaatgtgatgtctacagcaacaggacttcattattctgttccttcctgtcattatggaaaccagccatcaacctatggagtgatggcaggtagtttaaccccttgtctttataaatttcctgaccacaccttgagtcatggatttcctcctatacaccagcctcttctggcagaggaccccacagctgctgatttcaagcaggaactcaggcggaaaagtaaattggtggaagagccaatagacatggattctccagaaatcagagaacttgaaaagtttgccaatgaatttaaagtgagacgaattaaattaggatacacccagacaaatgttggggaggccctggcagctgtgcatggctctgaattcagtcaaacaacaatctgccgatttgaaaatctgcagctcagctttaaaaatgcatgcaaactgaaagcaatattatccaaatggctggaggaagctgagcaagtaggagctttgtacaatgaaaaagtgggagcaaatgaaaggaaaagaaaacgaagaacaactataagcattgctgctaaagatgctctggagagacactttggagaacagaataaaccttcttctcaagagatcatgaggatggctgaagaactgaatctggagaaagaagtagtaagagtttggttttgcaaccggaggcagagagaaaaacgggtgaaaacaagtctgaatcagagtttattttctatttctaaggaacatcttgagtgcagataagatttttctattgtataatagcctttttctcccgtttcattcctttctcttcctcaacaaaaacagaaattacttggttgacttaaaatcattttatatcaatagcttttacagaagctttacttttccacttttttttaaaaaaaagaaaccaacaatttaaattatattgatgttatttacttaaaataattattctcagaagccacattgtctattttaagccaaatatattaacagtaataaaatgatctctctgtctctcccgctctctttctcacacacacgcagacatatgagtatgggtttataagttccttttccaaacatgtatattagctttttaacatgtaagtcagtaatgacacatatgtaaagcacatcaccagaaatatccaattcaaaaattaaccaatgttctgctttctaccaactctactaatttgtctgaactaaaagttttgaacttaagagctggaggtgtcttata

SEQ ID NO: 6705 - DNA, 876 bp, Artificial Sequence
  derived and/or modified sequence
atgtcctgtcaggcgtttactagtgctgacacatttatcccccttaactctgatgcgtccgctaccctgcctctcatcatgcatcattccgccgcagaatgccttcccgtatccaatcatgctactaatgtgatgtctactgccaccggcctacactacagcgtcccttcctgtcactatgggaatcagccttctacctacggcgtcatggcaggaagtctgaccccttgcttatacaagttccccgatcataccctgtctcacggcttcccccctatacaccagcctctgctggctgaagatccgacagcagccgatttcaagcaggaactccgacggaagagcaagctggtggaagaacctatcgacatggacagtcccgagatcagagaacttgagaaatttgcaaatgagttcaaggtgcgcagaatcaagttaggctacacgcagacgaacgttggggaggccttggccgctgtccatgggagcgaattcagccaaactaccatatgtcgctttgagaatctgcagttgtcttttaagaatgcatgtaaattgaaggccatcctctctaaatggctggaggaagccgagcaggttggagccctgtacaacgagaaggtcggggctaatgagcggaagcggaaaagacgcacaaccatatctatcgcggctaaggatgcactcgagagacactttggtgaacaaaacaagccctcgtcacaggagattatgagaatggccgaagaactgaatctcgagaaagaggtagtaagagtttggttttgcaatcgccgacagcgtgaaaaaagggtgaaaacttccctgaatcaatcattgttttctatcagtaaagagcacttggagtgtagatag

SEQ ID NO: 6706 - DNA, 876 bp, Artificial Sequence
  derived and/or modified sequence
atgagctgccaggccttcaccagcgccgacaccttcatccccctgaacagcgacgccagcgccaccctgcccctgatcatgcaccacagcgccgccgagtgcctgcccgtgagcaaccacgccaccaacgtgatgagcaccgccaccggcctgcactacagcgtgcccagctgccactacggcaaccagcccagcacctacggcgtgatggccggcagcctgaccccctgcctgtacaagttccccgaccacaccctgagccacggcttcccccccatccaccagcccctgctggccgaggaccccaccgccgccgacttcaagcaggagctgagaagaaagagcaagctggtggaggagcccatcgacatggacagccccgagatcagagagctggagaagttcgccaacgagttcaaggtgagaagaatcaagctgggctacacccagaccaacgtgggcgaggccctggccgccgtgcacggcagcgagttcagccagaccaccatctgcagattcgagaacctgcagctgagcttcaagaacgcctgcaagctgaaggccatcctgagcaagtggctggaggaggccgagcaggtgggcgccctgtacaacgagaaggtgggcgccaacgagagaaagagaaagagaagaaccaccatcagcatcgccgccaaggacgccctggagagacacttcggcgagcagaacaagcccagcagccaggagatcatgagaatggccgaggagctgaacctggagaaggaggtggtgagagtgtggttctgcaacagaagacagagagagaagagagtgaagaccagcctgaaccagagcctgttcagcatcagcaaggagcacctggagtgcagatag

SEQ ID NO: 6707 - protein, 361 aa, Artificial Sequence
  derived and/or modified sequence
MATAASNPYSILSSTSLVHADSAGMQQGSPFRNPQKLLQSDYLQGVPSNGHPLGHHWVTSLSDGGPWSSTLATSPLDQQDVKPGREDLQLGAIIHHRSPHVAHHSPHTNHPNAWGASPAPNPSITSSGQPLNVYSQPGFTVSGMLEHGGLTPPPAAASAQSLHPVLREPPDHGELGSHHCQDHSDEETPTSDELEQFAKQFKQRRIKLGFTQADVGLALGTLYGNVFSQTTICRFEGLQLSFKNMCKLKPLLNKWLEEADSSTGSPTSIDKIAAQGRKRKKRTSIEVSVKGVLETHFLKCPKPAAQEISSLADSLQLEKEVVRVWFCNRRQKEKRMTPPGDQQPHEVYSHTVKTDTSCHDL

SEQ ID NO: 6708 - DNA, 1507 bp, Artificial Sequence
  derived and/or modified sequence
agatgtcaaaggctgaagctgctccctttgccacattataactagtaggggatcctcaccgaccatggccacagctgcctcgaatccctacagcattctcagttccacctccctagtccatgcggactctgcgggcatgcagcaggggagtcctttccgcaaccctcagaaacttctccaaagtgattacttgcagggagttcccagcaatgggcatcccctcgggcatcactgggtgaccagtctgagcgacgggggcccatggtcctccacactggccaccagccccctggaccagcaggacgtgaagcccgggcgcgaagacctgcaactgggtgcgatcatccatcaccgctcgccacacgtagcccaccactcaccgcacactaaccaccccaacgcctggggggccagcccggcaccgaacccgtctatcacgtcaagcggccaacccctcaacgtgtactcgcagcctggcttcaccgtgagcggcatgctggaacacgggggactcaccccacctccagctgccgcctctgcacagagcctgcacccggtgctccgagagcccccggatcacggcgaactgggctcgcaccattgccaggatcactccgacgaggagacgccaacctctgatgagttggaacagttcgccaaacaattcaaacaaagaagaatcaagttgggcttcacgcaggccgacgtggggttggcgctgggcacactgtatggtaacgtgttctcgcagaccaccatctgcaggttcgaaggcttgcagctgagcttcaaaaatatgtgcaagctgaagcccctgctgaacaagtggctggaggaggcggattcgtccacagggagcccgaccagcattgacaagatcgctgcacagggccgcaagcgcaagaagcggacctccatcgaggtgagtgtcaagggcgtactggagacgcatttcctcaagtgtcccaagcctgccgcgcaggagatctcctcgctggcagacagcctccagttggagaaggaagtggtgcgtgtctggttctgtaatcgaagacaaaaagagaaaagaatgactccgccaggggatcagcagccgcatgaggtttattcgcacaccgtgaaaacagacacatcttgccatgatctctgactggaggaagcgaggaggcggccggccgcactgggagcagcgcggatttctctttctctctcactctcttcctttcattctagtattctttattatttttctctctctctcgttcgctcgctctctcgtactctctctcttttccctcctttcctttttctttcctttcccctttttctttcccttctttttccctttcctttcctttcattttctttcctttccccttcccttcccttcccttccatctcttcctttcctttcctttcttttcttttgctttcctttcctttttttcccttttctttccttttcataagaggttctaacttctgttgacaaaggaaacacatactc

SEQ ID NO: 6709 - DNA, 1086 bp, Artificial Sequence
  derived and/or modified sequence
atggccaccgccgcctccaacccgtattctatcctctcttcgacttccctcgtgcatgctgatagtgcagggatgcaacaaggcagcccatttcgcaatcctcaaaaattactccaatccgactatctccagggagtgcctagcaatggacacccgcttggacaccattgggtgacaagtctcagtgacggcggaccctggtccagcaccctggccacctcgccactggatcagcaggacgtgaaacccggcagggaagacttacaactgggtgcaatcattcaccatcgtagccctcacgtggcccaccacagtccccacacaaatcatcccaatgcatggggtgcctccccggccccaaatccttctataacaagctctggccagccgttgaatgtgtatagtcagccaggtttcacagtgtctgggatgctcgagcacggcggactaaccccaccccctgccgcagcatccgctcagagtctgcacccagtgctgagggaacctcctgatcacggggagctgggcagccatcactgtcaggatcactcagacgaagagacccccacgagtgatgagcttgaacagttcgctaagcagtttaaacagcggcgcataaagttgggcttcactcaggccgacgtcgggttagcactggggaccctgtacgggaacgttttttctcaaactaccatctgtagatttgaagggttacagctgtcattcaaaaacatgtgcaaactcaagcccctcctcaataaatggctggaggaggccgattcttccacaggatctcctaccagtattgataaaattgctgcccaaggccggaagagaaagaagagaacgtctatagaggtgtcagtgaagggcgtgctcgaaacccactttctaaagtgtcccaagccagcagcccaggagatatcctccttggcagatagcctgcagctggagaaggaggtggtgagagtttggttctgtaacaggaggcagaaagagaagcggatgacaccaccgggtgatcagcaaccacacgaggtgtactcccacacggtgaagacagatacaagctgccatgatctttag

SEQ ID NO: 6710 - DNA, 1086 bp, Artificial Sequence
  derived and/or modified sequence
atggccacagctgccagcaacccctacagcatcctgagcagcaccagcctggtgcacgccgacagcgctggcatgcagcagggcagccccttcaggaacccccagaagctgctgcagagcgactacctgcagggcgtgcccagcaatggccaccccctgggccaccactgggtgaccagcctgagtgatggcggcccctggagcagcaccctggccaccagccccctggaccagcaggatgtgaagccaggccgggaggacctgcagctgggcgccatcatccaccacaggagcccccacgtggcccaccacagcccccacaccaaccaccccaatgcctggggcgccagccctgcccccaaccccagcatcaccagcagcggccagcccctgaatgtgtacagccagcccggcttcaccgtgtctggcatgctggagcacggcggcctgaccccacctcctgctgctgccagcgcccagagcctgcaccctgtgctgcgggagcccccagaccacggggagctgggcagccaccactgccaggaccacagtgatgaggagacccccaccagtgatgagctggagcagtttgccaagcagttcaagcagaggcgcatcaagctgggcttcacccaggctgatgtgggcctggccctgggcaccctgtatggaaatgtgttcagccagaccaccatctgccgctttgagggcctgcagctgtccttcaagaacatgtgcaagctgaagcccctgctgaacaagtggctggaggaggccgacagcagcacaggcagccccaccagcattgacaagattgctgcccagggcaggaagaggaagaagaggaccagcattgaggtgtctgtgaagggcgtgctggagacccacttcctgaagtgccccaagccagctgcccaggagatcagcagcctggccgacagcctgcagctggagaaggaggtggtgcgggtgtggttctgcaacagacggcagaaggagaagaggatgaccccacctggggaccagcagccccatgaggtgtacagccacacagtgaagacagacaccagctgccacgacctgtag

SEQ ID NO: 6711 - DNA, 1086 bp, Artificial Sequence
  derived and/or modified sequence
atggccaccgccgccagcaacccctacagcatcctgagcagcacctcactggtccacgccgattccgcaggaatgcaacagggctccccctttcgtaaccctcagaagctcctccagtccgattatctccaaggcgtgcccagtaatggccaccctctgggacaccactgggttacaagcctaagcgatggcggaccgtggtcttcaacccttgcaacctccccgcttgatcagcaggatgtaaagcccggccgcgaagacctgcagctgggagccatcattcaccatcgtagcccccatgtcgcccaccactctcctcatactaatcatccgaatgcatggggagcaagccctgcccccaatccatccattacctccagcggacagccccttaacgtgtacagtcagccaggttttacggtgtcgggcatgctggaacacggtggccttacgccccccccagccgcggcctccgcccaatccctgcaccctgtcctgcgcgagccacctgatcacggggaactggggtcccaccactgccaagatcactcagatgaagaaacaccaacatccgacgaattagagcagttcgccaagcagtttaaacagcgccgcattaagctgggcttcactcaggcagacgtaggcctagcactcgggaccctatacggcaatgtgttctcccagaccactatatgtcggttcgaggggcttcagctctcatttaagaacatgtgcaaactcaagcctcttctgaacaagtggctcgaggaggccgatagcagtaccggaagtccgacatctatagataaaattgctgcacagggaaggaaacgcaagaagagaacttcaatcgaagtgtcagtgaagggggtgctagagactcatttcttgaagtgtcccaagccagctgcccaggaaatctctagtcttgctgacagcctgcagctggagaaggaagtggtgcgcgtctggttctgcaatagacgccagaaggaaaaaaggatgacacccccaggcgaccagcagcctcacgaggtatacagtcacaccgtgaaaaccgacacatcttgtcatgacctgtag

SEQ ID NO: 6712 - DNA, 1086 bp, Artificial Sequence
  derived and/or modified sequence
atggcaaccgcggcatccaatccttattcgatactctccagcacctctctcgtccacgcagattctgcgggaatgcaacaaggttctccattccggaatccacagaagctgctgcagagtgattacctgcaaggtgtcccaagtaatggtcatcccttggggcaccactgggtgacgagtctctcagatggcggaccatggtcatccaccctggcgacctccccactggaccagcaagatgtgaagccaggcagggaggatttgcagttgggagctatcatacaccatagatcaccgcatgttgcgcatcattcaccacacactaaccatcctaacgcttggggcgcttcacctgcccctaacccttctattacttcaagcggacagccgcttaatgtatactcacagcccggttttaccgtgtccggaatgctcgaacacggagggctaacacctcctccggcagcggctagcgcacagagtctacatccggtgctccgagagccaccagatcacggcgagctagggtctcaccattgtcaagaccacagtgatgaggagacgccaactagcgatgaattagagcaattcgctaaacagttcaagcagagacgaatcaagctggggtttacacaagcagacgtaggactcgccctagggactctgtatggaaacgtttttagccagaccacaatttgtagattcgaaggattacagctgtcctttaagaacatgtgcaagctgaaacccctcctaaataagtggctcgaggaagctgactctagcaccgggagtcccacctcaatcgataagatcgcagcccaggggagaaagcggaaaaagcgcaccagtattgaggttagcgtgaaaggtgtacttgagacccacttcttaaagtgccccaaaccagcggctcaagaaatctcctcacttgcagactctctccagctggaaaaagaggtggtgcgcgtttggttctgtaatcgccgtcagaaagaaaagcgaatgaccccgcctggtgatcagcagccgcacgaggtttacagtcacacggtaaaaaccgatacttcttgtcatgatctgtag

SEQ ID NO: 6713 - DNA, 1086 bp, Artificial Sequence
  derived and/or modified sequence
atggccaccgccgccagcaacccctacagcatcctgagcagcaccagcctggtgcacgccgacagcgccggcatgcagcagggcagccccttcagaaacccccagaagctgctgcagagcgactacctgcagggcgtgcccagcaacggccaccccctgggccaccactgggtgaccagcctgagcgacggcggcccctggagcagcaccctggccaccagccccctggaccagcaggacgtgaagcccggcagagaggacctgcagctgggcgccatcatccaccacagaagcccccacgtggcccaccacagcccccacaccaaccaccccaacgcctggggcgccagccccgcccccaaccccagcatcaccagcagcggccagcccctgaacgtgtacagccagcccggcttcaccgtgagcggcatgctggagcacggcggcctgacccccccccccgccgccgccagcgcccagagcctgcaccccgtgctgagagagccccccgaccacggcgagctgggcagccaccactgccaggaccacagcgacgaggagacccccaccagcgacgagctggagcagttcgccaagcagttcaagcagagaagaatcaagctgggcttcacccaggccgacgtgggcctggccctgggcaccctgtacggcaacgtgttcagccagaccaccatctgcagattcgagggcctgcagctgagcttcaagaacatgtgcaagctgaagcccctgctgaacaagtggctggaggaggccgacagcagcaccggcagccccaccagcatcgacaagatcgccgcccagggcagaaagagaaagaagagaaccagcatcgaggtgagcgtgaagggcgtgctggagacccacttcctgaagtgccccaagcccgccgcccaggagatcagcagcctggccgacagcctgcagctggagaaggaggtggtgagagtgtggttctgcaacagaagacagaaggagaagagaatgaccccccccggcgaccagcagccccacgaggtgtacagccacaccgtgaagaccgacaccagctgccacgacctgtag

SEQ ID NO: 6714 - protein, 498 aa, Artificial Sequence
  derived and/or modified sequence
MTSSPRAPPGEQGRGGAEMIRAAPPPLFLLLLLLLLLVSWASRGEAAPDQDEIQRLPGLAKQPSFRQYSGYLKGSGSKHLHYWFVESQKDPENSPVVLWLNGGPGCSSLDGLLTEHGPFLVQPDGVTLEYNPYSWNLIANVLYLESPAGVGFSYSDDKFYATNDTEVAQSNFEALQDFFRLFPEYKNNKLFLTGESYAGIYIPTLAVLVMQDPSMNLQGLAVGNGLSSYEQNDNSLVYFAYYHGLLGNRLWSSLQTHCCSQNKCNFYDNKDLECVTNLQEVARIVGNSGLNIYNLYAPCAGGVPSHFRYEKDTVVVQDLGNIFTRLPLKRMWHQALLRSGDKVRMDPPCTNTTAASTYLNNPYVRKALNIPEQLPQWDMCNFLVNLQYRRLYRSMNSQYLKLLSSQKYQILLYNGDVDMACNFMGDEWFVDSLNQKMEVQRRPWLVKYGDSGEQIAGFVKEFSHIAFLTIKGAGHMVPTDKPLAAFTMFSRFLNKQPY

SEQ ID NO: 6715 - DNA, 2300 bp, Artificial Sequence
  derived and/or modified sequence
agagtgcacccgaatccacgggctcggaggcagcagccatctctcggccatagggcaggccagctggcgccgggggctattttgggcggcgggcaatgatggtgaccgcaaggcgaccttgtaaggcatttcccccctgactcccttccccgagcctctgcccgggggtcctagcgccgctttctcagccatcccgcctacaacttagccgtccacaacaggatcatctgatcgcgtgcgcccgggctacgatctgcgaggcccgcggaccttgacccggcattgaccgccaccgccccccaggtccgtagggaccaaagaaggggcgggaggaagactgtcacgtggcgccggagttcacgtgactcgtacacatgacttccagtccccgggcgcctcctggagagcaaggacgcgggggagcagaggtgagctggcaccggaggctggaggggatccccgagcccgggatcgatgatccgagccgcgccgccgccgctgttcctgctgctgctgctgctgctgctgctagtgtcctgggcgtcccgaggcgaggcagcccccgaccaggacgagatccagcgcctccccgggctggccaagcagccgtctttccgccagtactccggctacctcaaaggctccggctccaagcacctccactactggtttgtggagtcccagaaggatcccgagaacagccctgtggtgctttggctcaatgggggtcccggctgcagctcactagatgggctcctcacagagcatggccccttcctggtccagccagatggtgtcaccctggagtacaacccctattcttggaatctgattgccaatgtgttatacctggagtccccagctggggtgggcttctcctactccgatgacaagttttatgcaactaatgacactgaggtcgcccagagcaattttgaggcccttcaagatttcttccgcctctttccggagtacaagaacaacaaacttttcctgaccggggagagctatgctggcatctacatccccaccctggccgtgctggtcatgcaggatcccagcatgaaccttcaggggctggctgtgggcaatggactctcctcctatgagcagaatgacaactccctggtctactttgcctactaccatggccttctggggaacaggctttggtcttctctccagacccactgctgctctcaaaacaagtgtaacttctatgacaacaaagacctggaatgcgtgaccaatcttcaggaagtggcccgcatcgtgggcaactctggcctcaacatctacaatctctatgccccgtgtgctggaggggtgcccagccattttaggtatgagaaggacactgttgtggtccaggatttgggcaacatcttcactcgcctgccactcaagcggatgtggcatcaggcactgctgcgctcaggggataaagtgcgcatggaccccccctgcaccaacacaacagctgcttccacctacctcaacaacccgtacgtgcggaaggccctcaacatcccggagcagctgccacaatgggacatgtgcaactttctggtaaacttacagtaccgccgtctctaccgaagcatgaactcccagtatctgaagctgcttagctcacagaaataccagatcctattatataatggagatgtagacatggcctgcaatttcatgggggatgagtggtttgtggattccctcaaccagaagatggaggtgcagcgccggccctggttagtgaagtacggggacagcggggagcagattgccggcttcgtgaaggagttctcccacatcgcctttctcacgatcaagggcgccggccacatggttcccaccgacaagcccctcgctgccttcaccatgttctcccgcttcctgaacaagcagccatactgatgaccacagcaaccagctccacggcctgatgcagcccctcccagcctctcccgctaggagagtcctcttctaagcaaagtgcccctgcaggccgggttctgccgccaggactgcccccttcccagagccctgtacatcccagactgggcccagggtctcccatagacagcctgggggcaagttagcactttattcccgcagcagttcctgaatggggtggcctggccccttctctgcttaaagaatgccctttatgatgcactgattccatcccaggaacccaacagagctcaggacagcccacagggaggtggtggacggactgtaattgatagattgattatggaattaaattgggtacagcttcaaaaaaaaaaaaaaaa

SEQ ID NO: 6716 - DNA, 2254 bp, Artificial Sequence
  derived and/or modified sequence
agagtgcacccgaatccacgggctcggaggcagcagccatctctcggccatagggcaggccagctggcgccgggggctattttgggcggcgggcaatgatggtgaccgcaaggcgaccttgtaaggcatttcccccctgactcccttccccgagcctctgcccgggggtcctagcgccgctttctcagccatcccgcctacaacttagccgtccacaacaggatcatctgatcgcgtgcgcccgggctacgatctgcgaggcccgcggaccttgacccggcattgaccgccaccgccccccaggtccgtagggaccaaagaaggggcgggaggaagactgtcacgtggcgccggagttcacgtgactcgtacacatgacttccagtccccgggcgcctcctggagagcaaggacgcgggggagcagagatgatccgagccgcgccgccgccgctgttcctgctgctgctgctgctgctgctgctagtgtcctgggcgtcccgaggcgaggcagcccccgaccaggacgagatccagcgcctccccgggctggccaagcagccgtctttccgccagtactccggctacctcaaaggctccggctccaagcacctccactactggtttgtggagtcccagaaggatcccgagaacagccctgtggtgctttggctcaatgggggtcccggctgcagctcactagatgggctcctcacagagcatggccccttcctggtccagccagatggtgtcaccctggagtacaacccctattcttggaatctgattgccaatgtgttatacctggagtccccagctggggtgggcttctcctactccgatgacaagttttatgcaactaatgacactgaggtcgcccagagcaattttgaggcccttcaagatttcttccgcctctttccggagtacaagaacaacaaacttttcctgaccggggagagctatgctggcatctacatccccaccctggccgtgctggtcatgcaggatcccagcatgaaccttcaggggctggctgtgggcaatggactctcctcctatgagcagaatgacaactccctggtctactttgcctactaccatggccttctggggaacaggctttggtcttctctccagacccactgctgctctcaaaacaagtgtaacttctatgacaacaaagacctggaatgcgtgaccaatcttcaggaagtggcccgcatcgtgggcaactctggcctcaacatctacaatctctatgccccgtgtgctggaggggtgcccagccattttaggtatgagaaggacactgttgtggtccaggatttgggcaacatcttcactcgcctgccactcaagcggatgtggcatcaggcactgctgcgctcaggggataaagtgcgcatggaccccccctgcaccaacacaacagctgcttccacctacctcaacaacccgtacgtgcggaaggccctcaacatcccggagcagctgccacaatgggacatgtgcaactttctggtaaacttacagtaccgccgtctctaccgaagcatgaactcccagtatctgaagctgcttagctcacagaaataccagatcctattatataatggagatgtagacatggcctgcaatttcatgggggatgagtggtttgtggattccctcaaccagaagatggaggtgcagcgccggccctggttagtgaagtacggggacagcggggagcagattgccggcttcgtgaaggagttctcccacatcgcctttctcacgatcaagggcgccggccacatggttcccaccgacaagcccctcgctgccttcaccatgttctcccgcttcctgaacaagcagccatactgatgaccacagcaaccagctccacggcctgatgcagcccctcccagcctctcccgctaggagagtcctcttctaagcaaagtgcccctgcaggccgggttctgccgccaggactgcccccttcccagagccctgtacatcccagactgggcccagggtctcccatagacagcctgggggcaagttagcactttattcccgcagcagttcctgaatggggtggcctggccccttctctgcttaaagaatgccctttatgatgcactgattccatcccaggaacccaacagagctcaggacagcccacagggaggtggtggacggactgtaattgatagattgattatggaattaaattgggtacagcttcaaaaaaaaaaaaaaaa

SEQ ID NO: 6717 - DNA, 1497 bp, Artificial Sequence
  derived and/or modified sequence
atgaccagctcaccacgtgccccacccggcgagcagggacgcggaggcgccgaaatgatacgcgccgcacccccacctctgttcctgctactgctcctgttgctgctgcttgtgtcttgggcttctaggggcgaggctgcacctgatcaggatgagatacaaaggttaccaggtctggcaaagcagcccagctttcgacagtacagtggctacctgaaaggaagcggcagcaagcacctgcactattggtttgtcgagtctcagaaggatcccgagaatagcccggtcgtactttggctcaatggcgggcctggatgttcgtccctcgatggcttgttgactgagcacggcccctttctggtgcagccagacggtgtcactctcgaatacaatccatacagctggaacctgattgctaacgtgctttatctggaaagtcctgccggagtaggttttagctactctgacgataagttctatgcgacgaacgacacagaggtggctcagagcaacttcgaggccttgcaagactttttccgcctgttccctgaatataaaaataataagctgttcttgaccggggagtcttatgccgggatttacatccctaccctggccgtcctagtgatgcaggatccctcaatgaacttacaaggcttagccgtgggcaatggattgtcctcatacgaacaaaatgacaattcactagtgtactttgcttactatcatgggctcctggggaatcgtctctggtcctctcttcaaacgcactgctgttcgcagaacaaatgtaatttctacgacaacaaggacttggaatgcgtcaccaacctgcaggaggtggcccgaattgtgggcaactccgggctcaacatttacaacctgtacgctccatgtgccgggggtgtccccagccattttaggtacgagaaagatactgtggttgtgcaggacctagggaacatattcacaagattgcccctcaagcgcatgtggcatcaggccctcttgcgatccggagacaaggtacggatggatcccccctgcaccaatacaactgcagcctcaacctatctaaacaatccatacgtgaggaaagctctaaacattccggagcagttgccccaatgggacatgtgcaactttctggtgaaccttcaatatcgcaggctctaccgctccatgaattcacagtacctaaagcttctgtcaagtcaaaaatatcagattctactgtacaacggcgacgttgatatggcctgcaacttcatgggcgacgagtggtttgtcgattcgctcaaccagaaaatggaggtgcaacgtcgtccatggctcgtgaagtatggcgacagcggtgaacagattgctggcttcgtgaaggaatttagtcacattgcatttttgacaattaagggggccggccacatggttcctaccgacaaacccttagccgccttcacaatgttctcacgctttctgaacaaacagccatattag

SEQ ID NO: 6718 - DNA, 1497 bp, Artificial Sequence
  derived and/or modified sequence
atgaccagcagcccccgggcccctcctggagagcagggccggggcggcgctgagatgatccgggccgcccctcctcctctcttcctgctgctgctgctgctgctgctgctggtgtcctgggccagcagaggagaggccgccccagaccaggatgagatccagaggctgcccggcctggccaagcagcccagcttccggcagtacagcggctacctgaagggcagcggcagcaagcacctgcactactggtttgtggagagccagaaggaccctgagaacagccctgtggtgctgtggctgaatggaggccctggctgcagcagcctggatggcctgctgacagagcacggccccttcctggtgcagccagatggagtgaccctggagtacaacccctacagctggaacctgattgccaacgtgctgtacctggagagccctgctggggtgggcttctcctacagtgatgacaagttctacgccaccaatgacacagaggtggcccagagcaactttgaggccctgcaggacttcttccgcctcttccctgagtacaagaacaacaagctgttcctgactggagagagctatgccggcatctacatccccaccctggccgtgctggtgatgcaggaccccagcatgaacctgcagggcctggccgtgggcaatggcctgagcagctatgagcagaatgacaacagcctggtgtactttgcctactaccacggcctgctgggcaaccggctgtggagcagcctgcagacccactgctgcagccagaacaagtgcaacttctatgacaacaaggacctggagtgtgtgaccaacctgcaggaggtggcccgcatcgtgggcaacagcggcctgaacatctacaacctgtatgccccctgtgccggcggcgtgcccagccacttccgctatgagaaggacacagtggtggtgcaggacctgggcaacatcttcacccggctgcccctgaagaggatgtggcaccaggccctgctgcggagcggggacaaggtgaggatggaccccccctgcaccaacaccacagctgccagcacctacctgaacaacccctacgtgaggaaggccctgaacatccctgagcagctgccccagtgggacatgtgcaacttcctggtgaacctgcagtacagaagactctaccgctccatgaacagccagtacctgaagctgctgagcagccagaagtaccagatcctgctgtacaatggagatgtggacatggcctgcaacttcatgggagatgagtggtttgtggacagcctgaaccagaagatggaggtgcagaggcggccctggctggtgaagtacggggacagcggggagcagattgctggctttgtgaaggagttcagccacatcgccttcctgaccatcaagggagctggccacatggtgcccacagacaagcccctggccgccttcaccatgttcagccgcttcctgaacaagcagccctactag

SEQ ID NO: 6719 - DNA, 1497 bp, Artificial Sequence
  derived and/or modified sequence
atgaccagcagcccccgggccccccccggcgagcagggccggggcggcgctgaaatgattcgggcagcccctccgccgctttttctcttgctgctactgctgcttctgctggtctcgtgggccagcagaggggaggccgccccagatcaggatgagatccagaggctgcccggtcttgctaagcagcccagcttcaggcaatatagcgggtacctgaaaggaagcggatccaaacacctgcattactggttcgtggaatcccagaaagatccggagaactcccccgtggtactctggcttaacggcgggccaggttgctcctccctggacggcctgctaaccgagcatggtccgtttctggtgcaacccgacggagtgacactcgagtataatccttattcctggaatctgatcgccaacgtgctgtacctagaaagcccagctggagtggggtttagttacagtgacgataagttctacgccacaaatgatactgaggtggcccagagcaattttgaggcattgcaagacttttttcggttattcccagagtataagaacaataaactgttcctcacgggtgagagttacgctgggatatacattccaaccctcgccgtgctggttatgcaggaccccagcatgaatctgcagggtctggctgtcgggaacggactgtcatcttatgaacagaacgacaactccttggtgtatttcgcttactaccatggtctgcttggaaataggttgtggagttctttgcagacccattgttgcagtcaaaataaatgtaacttttatgataataaagatctagagtgcgtgacaaatttgcaggaagtggctcgaatcgtaggcaactctggcctcaacatatacaatctgtacgccccatgtgctgggggcgttccttctcactttcgatatgaaaaagataccgtcgtcgtccaggatttgggtaacattttcacgaggctgccactgaaacggatgtggcatcaggccctactccggtctggcgataaggttcgcatggaccccccttgcactaacactacagccgcatctacttacttaaacaatccttatgttcgcaaagcactgaatatcccggaacagctaccccagtgggacatgtgcaacttcctggtgaacttacagtacaggagactctatcgcagcatgaattctcaatacctcaaattgttatcatctcagaagtaccagatacttttgtataatggagatgtggacatggcctgcaatttcatgggcgacgagtggtttgtggattccctgaatcagaagatggaggtgcagcggcgtccttggctcgtgaaatacggcgacagtggggaacagattgcaggctttgtgaaagaattttcgcacatcgctttcctgacaattaagggcgccggtcatatggtgccaaccgataagcccctcgcagcttttaccatgtttagcaggttcctcaataaacaaccttattag

SEQ ID NO: 6720 - DNA, 1497 bp, Artificial Sequence
  derived and/or modified sequence
atgacttcttctcctagggctcctcctggcgaacagggaagaggtggtgctgaaatgatccgagccgctccccctccactgtttctgctgttactcctgctcctgttgctcgtgtcctgggctagccggggagaagccgcacccgaccaggatgagattcagcgactgccgggacttgccaaacagccctctttcagacagtactctggatacttgaagggatctggatctaagcatctccactattggtttgtagaatctcagaaagatccagaaaactcaccagtcgtgttgtggttgaatggaggtcctggatgcagctctctggatggcttgctcaccgagcacggtccttttctcgtccagccggacggtgtgactttggaatataacccatattcctggaacttgattgctaatgtcctgtaccttgagtctccagctggggtgggtttctcctattctgacgataagttttacgcaacaaatgacaccgaagtggctcaatccaatttcgaagcactgcaggactttttccgactctttcctgagtacaagaacaataaactcttcctgaccggggagtcttacgctgggatttatattccaactctcgccgtcctggtgatgcaggacccgtctatgaacctgcaaggcctggcagttgggaacggactctcctcctatgagcaaaacgacaattccctggtgtacttcgcatattatcatggcctgctcgggaatcggctgtggtcgtcactgcagacacattgctgcagccagaataagtgtaatttctatgataacaaggatctggagtgcgtgacgaacctgcaggaagttgcacgtattgtgggtaattcagggctgaatatctacaacttgtacgccccatgtgctgggggagtgcccagccacttccggtacgagaaggataccgttgtggtacaggatctaggcaacattttcaccaggcttcctctgaagaggatgtggcaccaggctctgctgaggtcaggcgataaagtgcgaatggacccgccttgtaccaatactaccgccgcaagcacgtatctcaataacccttacgtgagaaaagcgttgaacatcccagagcagttgccccagtgggatatgtgtaattttttagtaaacctgcagtatcggcgtttgtatcgaagcatgaactcccagtacctgaaactgctctcttcccagaagtatcagatactgctgtataacggcgatgtggacatggcgtgtaactttatgggtgacgaatggttcgtggactccctcaaccagaaaatggaagtgcagagacggccttggctggtgaagtatggggatagtggagaacagattgcgggttttgtaaaggagttcagtcacattgcatttctgaccataaaaggtgccggacacatggtcccaaccgataagccactcgccgcttttaccatgttctcccggttcctgaataagcagccatactag

SEQ ID NO: 6721 - DNA, 1898 bp, Artificial Sequence
  derived and/or modified sequence
cgggcgcctcctggagagcaaggacgcgggggagcagaggtgagctggcaccggaggctggaggggatccccgagcccgggatcgatgatccgagccgcgccgccgccgctgttcctgctgctgctgctgctgctgctgctagtgtcctgggcgtcccgaggcgaggcagcccccgaccaggacgagatccagcgcctccccgggctggccaagcagccgtctttccgccagtactccggctacctcaaaggctccggctccaagcacctccactactggtttgtggagtcccagaaggatcccgagaacagccctgtggtgctttggctcaatgggggtcccggctgcagctcactagatgggctcctcacagagcatggccccttcctggtccagccagatggtgtcaccctggagtacaacccctattcttggaatctgattgccaatgtgttatacctggagtccccagctggggtgggcttctcctactccgatgacaagttttatgcaactaatgacactgaggtcgcccagagcaattttgaggcccttcaagatttcttccgcctctttccggagtacaagaacaacaaacttttcctgaccggggagagctatgctggcatctacatccccaccctggccgtgctggtcatgcaggatcccagcatgaaccttcaggggctggctgtgggcaatggactctcctcctatgagcagaatgacaactccctggtctactttgcctactaccatggccttctggggaacaggctttggtcttctctccagacccactgctgctctcaaaacaagtgtaacttctatgacaacaaagacctggaatgcgtgaccaatcttcaggaagtggcccgcatcgtgggcaactctggcctcaacatctacaatctctatgccccgtgtgctggaggggtgcccagccattttaggtatgagaaggacactgttgtggtccaggatttgggcaacatcttcactcgcctgccactcaagcggatgtggcatcaggcactgctgcgctcaggggataaagtgcgcatggaccccccctgcaccaacacaacagctgcttccacctacctcaacaacccgtacgtgcggaaggccctcaacatcccggagcagctgccacaatgggacatgtgcaactttctggtaaacttacagtaccgccgtctctaccgaagcatgaactcccagtatctgaagctgcttagctcacagaaataccagatcctattatataatggagatgtagacatggcctgcaatttcatgggggatgagtggtttgtggattccctcaaccagaagatggaggtgcagcgccggccctggttagtgaagtacggggacagcggggagcagattgccggcttcgtgaaggagttctcccacatcgcctttctcacgatcaagggcgccggccacatggttcccaccgacaagcccctcgctgccttcaccatgttctcccgcttcctgaacaagcagccatactgatgaccacagcaaccagctccacggcctgatgcagcccctcccagcctctcccgctaggagagtcctcttctaagcaaagtgcccctgcaggccgggttctgccgccaggactgcccccttcccagagccctgtacatcccagactgggcccagggtctcccatagacagcctgggggcaagttagcactttattcccgcagcagttcctgaatggggtggcctggccccttctctgcttaaagaatgccctttatgatgcactgattccatcccaggaacccaacagagctcaggacagcccacagggaggtggtggacggactgtaattgatagattgattatggaattaaattgggtacagcttcaaa

SEQ ID NO: 6722 - DNA, 2149 bp, Artificial Sequence
  derived and/or modified sequence
gcaatgatggtgaccgcaaggcgaccttgtaaggcatttcccccctgactcccttccccgagcctctgcccgggggtcctagcgccgctttctcagccatcccgcctacaacttagccgtccacaacaggatcatctgatcgcgtgcgcccgggctacgatctgcgaggcccgcggaccttgacccggcattgaccgccaccgccccccaggtccgtagggaccaaagaaggggcgggaggaagactgtcacgtggcgccggagttcacgtgactcgtacacatgacttccagtccccgggcgcctcctggagagcaaggacgcgggggagcagagatgatccgagccgcgccgccgccgctgttcctgctgctgctgctgctgctgctgctagtgtcctgggcgtcccgaggcgaggcagcccccgaccaggacgagatccagcgcctccccgggctggccaagcagccgtctttccgccagtactccggctacctcaaaggctccggctccaagcacctccactactggtttgtggagtcccagaaggatcccgagaacagccctgtggtgctttggctcaatgggggtcccggctgcagctcactagatgggctcctcacagagcatggccccttcctggtccagccagatggtgtcaccctggagtacaacccctattcttggaatctgattgccaatgtgttatacctggagtccccagctggggtgggcttctcctactccgatgacaagttttatgcaactaatgacactgaggtcgcccagagcaattttgaggcccttcaagatttcttccgcctctttccggagtacaagaacaacaaacttttcctgaccggggagagctatgctggcatctacatccccaccctggccgtgctggtcatgcaggatcccagcatgaaccttcaggggctggctgtgggcaatggactctcctcctatgagcagaatgacaactccctggtctactttgcctactaccatggccttctggggaacaggctttggtcttctctccagacccactgctgctctcaaaacaagtgtaacttctatgacaacaaagacctggaatgcgtgaccaatcttcaggaagtggcccgcatcgtgggcaactctggcctcaacatctacaatctctatgccccgtgtgctggaggggtgcccagccattttaggtatgagaaggacactgttgtggtccaggatttgggcaacatcttcactcgcctgccactcaagcggatgtggcatcaggcactgctgcgctcaggggataaagtgcgcatggaccccccctgcaccaacacaacagctgcttccacctacctcaacaacccgtacgtgcggaaggccctcaacatcccggagcagctgccacaatgggacatgtgcaactttctggtaaacttacagtaccgccgtctctaccgaagcatgaactcccagtatctgaagctgcttagctcacagaaataccagatcctattatataatggagatgtagacatggcctgcaatttcatgggggatgagtggtttgtggattccctcaaccagaagatggaggtgcagcgccggccctggttagtgaagtacggggacagcggggagcagattgccggcttcgtgaaggagttctcccacatcgcctttctcacgatcaagggcgccggccacatggttcccaccgacaagcccctcgctgccttcaccatgttctcccgcttcctgaacaagcagccatactgatgaccacagcaaccagctccacggcctgatgcagcccctcccagcctctcccgctaggagagtcctcttctaagcaaagtgcccctgcaggccgggttctgccgccaggactgcccccttcccagagccctgtacatcccagactgggcccagggtctcccatagacagcctgggggcaagttagcactttattcccgcagcagttcctgaatggggtggcctggccccttctctgcttaaagaatgccctttatgatgcactgattccatcccaggaacccaacagagctcaggacagcccacagggaggtggtggacggactgtaattgatagattgattatggaattaaattgggtacagcttcaaa

SEQ ID NO: 6723 - DNA, 1497 bp, Artificial Sequence
  derived and/or modified sequence
atgaccagcagccccagagccccccccggcgagcagggcagaggcggcgccgagatgatcagagccgcccccccccccctgttcctgctgctgctgctgctgctgctgctggtgagctgggccagcagaggcgaggccgcccccgaccaggacgagatccagagactgcccggcctggccaagcagcccagcttcagacagtacagcggctacctgaagggcagcggcagcaagcacctgcactactggttcgtggagagccagaaggaccccgagaacagccccgtggtgctgtggctgaacggcggccccggctgcagcagcctggacggcctgctgaccgagcacggccccttcctggtgcagcccgacggcgtgaccctggagtacaacccctacagctggaacctgatcgccaacgtgctgtacctggagagccccgccggcgtgggcttcagctacagcgacgacaagttctacgccaccaacgacaccgaggtggcccagagcaacttcgaggccctgcaggacttcttcagactgttccccgagtacaagaacaacaagctgttcctgaccggcgagagctacgccggcatctacatccccaccctggccgtgctggtgatgcaggaccccagcatgaacctgcagggcctggccgtgggcaacggcctgagcagctacgagcagaacgacaacagcctggtgtacttcgcctactaccacggcctgctgggcaacagactgtggagcagcctgcagacccactgctgcagccagaacaagtgcaacttctacgacaacaaggacctggagtgcgtgaccaacctgcaggaggtggccagaatcgtgggcaacagcggcctgaacatctacaacctgtacgccccctgcgccggcggcgtgcccagccacttcagatacgagaaggacaccgtggtggtgcaggacctgggcaacatcttcaccagactgcccctgaagagaatgtggcaccaggccctgctgagaagcggcgacaaggtgagaatggaccccccctgcaccaacaccaccgccgccagcacctacctgaacaacccctacgtgagaaaggccctgaacatccccgagcagctgccccagtgggacatgtgcaacttcctggtgaacctgcagtacagaagactgtacagaagcatgaacagccagtacctgaagctgctgagcagccagaagtaccagatcctgctgtacaacggcgacgtggacatggcctgcaacttcatgggcgacgagtggttcgtggacagcctgaaccagaagatggaggtgcagagaagaccctggctggtgaagtacggcgacagcggcgagcagatcgccggcttcgtgaaggagttcagccacatcgccttcctgaccatcaagggcgccggccacatggtgcccaccgacaagcccctggccgccttcaccatgttcagcagattcctgaacaagcagccctactag

SEQ ID NO: 6724 - DNA, 1386 bp, Artificial Sequence
  derived and/or modified sequence
atgtggcagctgaccagcctgctgctgttcgtggccacctggggcatcagcggcacccccgcccccctggacagcgtgttcagcagcagcgagagagcccaccaggtgctgagaatcagaaagagagccaacagcttcctggaggagctgagacacagcagcctggagagagagtgcatcgaggagatctgcgacttcgaggaggccaaggagatcttccagaacgtggacgacaccctggccttctggagcaagcacgtggacggcgaccagtgcctggtgctgcccctggagcacccctgcgccagcctgtgctgcggccacggcacctgcatcgacggcatcggcagcttcagctgcgactgcagaagcggctgggagggcagattctgccagagagaggtgagcttcctgaactgcagcctggacaacggcggctgcacccactactgcctggaggaggtgggctggagaagatgcagctgcgcccccggctacaagctgggcgacgacctgctgcagtgccaccccgccgtgaagttcccctgcggcagaccctggaagagaatggagaagaagagaagccacctgaagagagacaccgaggaccaggaggaccaggtggaccccagactgatcgacggcaagatgaccagaagaggcgacagcccctggcaggtggtgctgctggacagcaagaagaagctggcctgcggcgccgtgctgatccaccccagctgggtgctgaccgccgcccactgcatggacgagagcaagaagctgctggtgagactgggcgagtacgacctgagaagatgggagaagtgggagctggacctggacatcaaggaggtgttcgtgcaccccaactacagcaagagcaccaccgacaacgacatcgccctgctgcacctggcccagcccgccaccctgagccagaccatcgtgcccatctgcctgcccgacagcggcctggccgagagagagctgaaccaggccggccaggagaccctggtgaccggctggggctaccacagcagcagagagaaggaggccaagagaaacagaaccttcgtgctgaacttcatcaagatccccgtggtgccccacaacgagtgcagcgaggtgatgagcaacatggtgagcgagaacatgctgtgcgccggcatcctgggcgacagacaggacgcctgcgagggcgacagcggcggccccatggtggccagcttccacggcacctggttcctggtgggcctggtgagctggggcgagggctgcggcctgctgcacaactacggcgtgtacaccaaggtgagcagatacctggactggatccacggccacatcagagacaaggaggccccccagaagagctgggccccctag

SEQ ID NO: 6725 - DNA, 351 bp, Artificial Sequence
  derived and/or modified sequence
atgtggcagctgaccagcctgctgctgttcgtggccacctggggcatcagcggcacccccgcccccctggacagcgtgttcagcagcagcgagagagcccaccaggtgctgagaatcagaaagagagccaacagcttcctggaggagctgagacacagcagcctggagagagagtgcatcgaggagatctgcgacttcgaggaggccaaggagatcttccagaacgtggacgacaccctggccttctggagcaagcacgtggacggcgaccagtgcctggtgctgcccctggagcacccctgcgccagcctgtgctgcggccacggcacctgcatcgacggcatcggctag

SEQ ID NO: 6726 - DNA, 381 bp, Artificial Sequence
  derived and/or modified sequence
atgtggcagctgaccagcctgctgctgttcgtggccacctggggcatcagcggcacccccgcccccctggacagcgtgttcagcagcagcgagagagcccaccaggtgctgagaatcagaaagagagccaacagcttcctggaggagctgagacacagcagcctggagagagagtgcatcgaggagatctgcgacttcgaggaggccaaggagatcttccagaacgtggacgacaccctggccttctggagcaagcacgtggacggcgaccagtgcctggtgctgcccctggagcacccctgcgccagcctgtgctgcggccacggcacctgcatcgacggcatcggcagcttcagctgcgactgcagaagcggctggtag

SEQ ID NO: 6727 - DNA, 1386 bp, Artificial Sequence
  derived and/or modified sequence
atgtggcagttaacgtcacttctcctgttcgtggctacttggggtatctccgggacccctgcacctctagactcagtctttagttcatctgagcgggcacaccaggtgctgcgaatccgaaaacgagcgaactcttttctggaggagttacggcatagctcgctggagagagaatgtattgaagagatttgtgatttcgaagaagcgaaggaaatttttcaaaacgtcgatgatactctagccttttggtcaaagcacgtggatggggaccaatgtctcgttttaccactggaacatccatgcgccagtctctgttgcgggcacgggacctgcatcgacggtattggctcattttcatgcgactgccggagcggctgggaaggccggttctgtcagcgcgaggtgtcttttctgaattgctcgctggataatggaggttgcacacactactgcctggaggaagtgggctggcggcgatgtagttgcgccccaggttataagctgggggatgacctgttacagtgccaccccgcggtcaaattcccttgtggaaggccatggaagcgaatggagaagaaacgtagccacctcaaacgcgatacggaggaccaggaggaccaggtggaccctagactgatcgacggaaagatgactagacgcggcgatagcccatggcaggtcgttctcctcgatagcaaaaagaagttggcctgtggcgcggtactcatccacccctcatgggtcttaactgctgcgcactgtatggacgaatcaaagaagttgctggtgcgactgggggagtatgacctgagacgctgggaaaaatgggaactagatctagatattaaagaggtctttgttcaccccaattatagtaagtccactaccgacaacgatattgccctcctgcacctggcgcagccagcaaccctctcacagaccatcgtcccgatctgcctgcccgactcgggcctggcggagcgggagttaaaccaggcgggccaggagacactggttaccgggtggggttaccacagctctcgggaaaaagaggctaaaagaaaccgcactttcgtgttaaatttcattaagatcccagtggtgcctcacaacgagtgttcggaggtcatgtccaacatggtttcagagaacatgctctgcgccggcatcctgggggatagacaagacgcgtgtgaaggtgacagcgggggacctatggttgccagctttcatggcacttggtttttggttgggctggtgagctggggggagggttgcggactacttcacaactacggcgtctacaccaaggtctctcgatatctggattggatacacggacatattcgagataaagaggcaccccagaagtcctgggcgccatag

SEQ ID NO: 6728 - DNA, 351 bp, Artificial Sequence
  derived and/or modified sequence
atgtggcagcttacctcgctgctcctcttcgttgcgacatggggtatcagcgggaccccagcccccttagactcagtattcagttcaagtgaacgagcccatcaggttttgcgaattcggaaacgggcaaattccttcctggaggaattgagacactcatctctggagcgcgaatgcatagaagaaatttgcgattttgaagaggccaaggaaatattccagaacgtcgacgacaccctagcgttctggtcaaagcatgtcgacggcgatcagtgcttagtgctgccccttgagcacccatgtgccagtctttgctgtggccatggtacgtgtattgatggaattgggtag

SEQ ID NO: 6729 - DNA, 381 bp, Artificial Sequence
  derived and/or modified sequence
atgtggcaacttacttcgctcctgttatttgtggcaacctggggcatcagcgggaccccggctccgctggactcggtatttagctcctccgagagggcccaccaggtgctgaggattaggaaaagggctaattcgttcttagaagaactgcgacactcgtctctggagagagagtgtatagaggagatttgtgatttcgaagaggcaaaggagatttttcaaaacgtagatgataccctggctttctggtcaaaacacgtggatggggatcagtgcctggtgctgccgcttgaacacccttgcgcgagtctttgttgtggtcacggaacctgtatcgacgggatcggttcatttagttgtgactgccggtccggatggtag

SEQ ID NO: 6730 - DNA, 1386 bp, Artificial Sequence
  derived and/or modified sequence
atgtggcagctgaccagcctgctgctgtttgtggccacctggggcatcagcggcaccccagcccccctggacagcgtcttcagcagcagcgagcgggcccaccaggtgctgcgcatcaggaagagggccaacagcttcctggaggagctgcggcacagcagcctggagcgggagtgcatcgaggagatctgtgactttgaggaggccaaggagatcttccagaatgtggatgacaccctggccttctggagcaagcacgtggatggagaccagtgcctggtgctgcccctggagcacccctgtgccagcctgtgctgcggccacggcacctgcattgatggcatcggcagcttcagctgtgactgccgcagcggctgggagggccgcttctgccagcgggaggtgtccttcctgaactgcagcctggacaatggaggctgcacccactactgcctggaggaggtgggctggaggcgctgcagctgtgcccctggctacaagctgggagatgacctgctgcagtgccaccctgctgtgaagttcccctgtggccggccctggaagaggatggagaagaagaggagccacctgaagagggacacagaggaccaggaggaccaggtggacccccggctgattgatggcaagatgaccaggagaggagacagcccctggcaggtggtgctgctggacagcaagaagaagctggcctgtggggctgtgctgatccaccccagctgggtgctgacagctgcccactgcatggatgagagcaagaagctgctggtgcggctgggggagtatgacctgcggcgctgggagaagtgggagctggacctggacatcaaggaggtgtttgtgcaccccaactacagcaagagcaccacagacaatgacatcgccctgctgcacctggcccagcctgccaccctgagccagaccatcgtgcccatctgcctgcctgattctggcctggccgagcgggagctgaaccaggccggccaggagaccctggtgacaggctggggctaccacagcagccgggagaaggaggccaagaggaacagaacatttgtgctgaacttcatcaagatccctgtggtgccccacaatgaatgttctgaggtgatgagcaacatggtgtctgagaacatgctgtgtgccggcatcctgggggaccggcaggatgcctgtgagggggacagcggcggccccatggtggccagcttccacggcacctggttcctggtgggcctggtgtcctggggcgagggctgcggcctgctgcacaactacggcgtgtacaccaaggtgagccgctacctggactggatccacggccacatccgggacaaggaggccccccagaagtcctgggccccctag

SEQ ID NO: 6731 - DNA, 351 bp, Artificial Sequence
  derived and/or modified sequence
atgtggcagctgaccagcctgctgctgtttgtggccacctggggcatcagcggcaccccagcccccctggacagcgtcttcagcagcagcgagcgggcccaccaggtgctgcgcatcaggaagagggccaacagcttcctggaggagctgcggcacagcagcctggagcgggagtgcatcgaggagatctgtgactttgaggaggccaaggagatcttccagaatgtggatgacaccctggccttctggagcaagcacgtggatggagaccagtgcctggtgctgcccctggagcacccctgtgccagcctgtgctgcggccacggcacctgcattgatggcattggatag

SEQ ID NO: 6732 - DNA, 381 bp, Artificial Sequence
  derived and/or modified sequence
atgtggcagctgaccagcctgctgctgtttgtggccacctggggcatcagcggcaccccagcccccctggacagcgtcttcagcagcagcgagcgggcccaccaggtgctgcgcatcaggaagagggccaacagcttcctggaggagctgcggcacagcagcctggagcgggagtgcatcgaggagatctgtgactttgaggaggccaaggagatcttccagaatgtggatgacaccctggccttctggagcaagcacgtggatggagaccagtgcctggtgctgcccctggagcacccctgtgccagcctgtgctgcggccacggcacctgcattgatggcatcggcagcttcagctgtgactgccgcagcggctggtag

SEQ ID NO: 6733 - DNA, 1386 bp, Artificial Sequence
  derived and/or modified sequence
atgtggcagctgaccagcctgctgctgttcgtggccacctggggcatctcaggcactccagcgcctctcgacagtgtcttcagcagcagtgagagagctcatcaagtgctgcgtattcgcaaaagggccaatagcttcctcgaagaactgcgacatagcagtctggagcgcgagtgtatcgaagagatctgcgacttcgaagaggccaaggagatatttcagaacgtagacgataccttagccttttggtcaaagcatgtggacggcgatcagtgtcttgtgctgcccttggaacacccatgcgctagcttgtgctgtgggcacggaacatgcatcgacgggattggctctttttcttgcgattgccgatcaggctgggagggccgcttttgccaaagagaggtgagctttctgaactgtagtctcgataatggcggctgcacacattattgcctagaggaagtgggctggcggcggtgttcctgcgcccctggatacaaactgggagacgatctgttacagtgtcatcctgcagtgaaatttccttgtggaaggccttggaagaggatggaaaagaaaaggtctcatctcaaaagagatactgaggatcaggaggaccaggtcgatccacgtttgatcgacggcaagatgaccagacgaggtgactccccatggcaagtcgttttgttggattccaagaagaagctcgcctgtggcgcagtattgattcacccctcatgggttctgaccgctgcacattgtatggatgagagcaaaaaactgctggtgagacttggcgagtacgacctacggcgatgggagaagtgggagctggacctcgacattaaagaagtgttcgtgcatccaaattacagtaagtctacgaccgacaatgacatcgcgctgctgcacctggctcaacccgccacacttagccaaacaattgtgcccatttgcctgcctgatagcgggctggctgagagggagttgaaccaggccggccaggagaccctggtgaccggttggggctaccactcttctagagaaaaggaggcaaagcgcaatcgaacatttgtgttgaactttatcaagatcccagtagtgcctcacaacgagtgctccgaagtgatgagtaatatggtgtcggagaatatgttgtgtgcgggtattttaggagatcggcaggatgcttgtgaaggggacagtggagggccgatggtcgctagctttcatgggacctggtttctggttggcctcgtgtcttggggggaagggtgcgggcttctccacaattacggcgtgtatactaaggtgagccgatatcttgactggatccacggacacatccgagacaaggaagcgcctcagaaatcttgggccccctag

SEQ ID NO: 6734 - DNA, 351 bp, Artificial Sequence
  derived and/or modified sequence
atgtggcagctgaccagcctgctgctgttcgtggccacctggggcatatctgggacacctgcccctctggatagtgtgttctctagtagcgagagagcgcatcaggttctgcggatacgtaaaagggccaattcttttttggaagagcttcggcattcgagcttagagcgagaatgtattgaggaaatttgtgactttgaagaggctaaggagatttttcaaaatgtggacgacacactggccttttggtctaagcacgtggacggagaccaatgtctcgtattacctttagaacatccttgtgcctccctatgctgtggacacggcacctgcatagatggtatcggctag

SEQ ID NO: 6735 - DNA, 381 bp, Artificial Sequence
  derived and/or modified sequence
atgtggcagctgaccagcctgctgctgttcgtggccacctggggcatctctggcacccccgcccctcttgattcggtgttcagtagctcagaacgagcccaccaggtcctccggataagaaagcgtgcgaattcattcctggaggaactgagacatagttcgctggagcgcgaatgcattgaagagatatgtgattttgaagaggcaaaggaaattttccagaatgtggatgacaccctggctttctggtccaaacatgtggatggcgatcaatgcctcgtcttgccactagagcatccttgcgcgagcctatgttgcggccatggcacatgcattgatggaattggttcattcagctgcgactgtaggtctgggtggtag

SEQ ID NO: 6736 - DNA, 1386 bp, Artificial Sequence
  derived and/or modified sequence
atgtggcagcttacaagcctacttctgttcgtcgcaacctgggggataagtggaactccagccccattggattctgtattctccagctctgagcgggctcaccaggtcttgagaattcgcaaacgagccaatagcttccttgaagaactaaggcacagcagcctcgagcgggaatgtatcgaagaaatttgcgacttcgaggaggcaaaagaaatcttccagaacgtggatgacacattggccttctggagcaagcacgtcgatggggaccagtgtctggtgttacccttggagcatccttgcgcctccctgtgctgcggtcacggtacttgtatcgacggcattggaagtttcagctgcgattgtcgctcagggtgggaaggtagattctgtcagcgagaagtgagttttctcaattgcagccttgataatggtggctgcacccattattgtctagaagaggtcgggtggcgtagatgctcttgcgccccaggatataagttgggcgatgaccttttgcaatgtcacccagcggtcaagtttccctgcggcaggccttggaagagaatggaaaaaaaacgtagccatctgaagcgcgatacagaagaccaggaggatcaagtggaccccaggctcattgacggcaagatgaccaggcgcggagactcaccctggcaagtggtcctactcgattccaagaaaaagttagcctgtggggcagtgttgatccacccctcctgggtacttactgcagcccattgcatggacgagagcaagaaactgctagtgcgactgggtgaatacgacctacgtaggtgggagaagtgggagctggacttggatattaaggaggtgttcgtccatcctaattacagcaaaagcactactgataacgatattgctttgctccacctcgctcagccggctaccctgtcgcaaaccatcgtgccaatttgtttgcccgacagcggcctggcagagcgcgaactaaaccaggctggtcaggagacactggtcacaggctggggctaccattcatcgcgggagaaggaggctaagcgcaacaggacctttgtactgaactttattaaaattcctgttgttccgcacaatgagtgttctgaagttatgtcaaacatggtcagtgaaaatatgctttgtgccggtatcttaggcgatcggcaggatgcctgtgaaggtgacagcgggggtcccatggtcgcaagctttcacggaacctggtttctcgtggggcttgtcagctggggtgaaggctgcggtcttcttcacaactacggtgtgtacacaaaggtttcccgatacttagactggattcatgggcacatacgcgacaaggaagctcctcagaagtcatgggcaccttag

SEQ ID NO: 6737 - DNA, 351 bp, Artificial Sequence
  derived and/or modified sequence
atgtggcagctgacctccttgcttctgttcgtggctacttggggaattagcggtactcccgctcccctggattctgtttttagcagcagcgagcgagcccaccaagtcctccgcatcagaaagagagcaaacagcttcctcgaagagctgcgccacagcagtcttgaacgagagtgtatcgaggagatttgcgacttcgaagaggccaaagagatttttcagaacgtcgatgacacgctggccttctggtccaaacacgttgatggcgatcagtgtctagtgctcccgctggaacacccatgtgcctctctctgttgcggccacggcacatgtatcgacggcatcggatag

SEQ ID NO: 6738 - DNA, 381 bp, Artificial Sequence
  derived and/or modified sequence
atgtggcaactgaccagcctgctcttatttgttgctacatgggggatatctggaactccagcgcctctggatagtgtgtttagctccagcgagagggcacaccaagtgctgcggatccggaagcgggcaaacagctttctggaagagctccgccactcctcattggaaagagagtgtatcgaggaaatctgtgattttgaggaggcgaaggagatttttcagaatgttgacgatacactcgctttctggtctaagcatgttgatggtgaccagtgcttagtgctgccgctggagcacccatgtgcatccctgtgctgtgggcatgggacctgtatcgacggtatcggaagcttctcctgcgactgtaggtccggttggtag

SEQ ID NO: 6739 - DNA, 1386 bp, Artificial Sequence
  derived and/or modified sequence
atgtggcaacttacctcgctgctgcttttcgtcgccacatggggcatatcagggaccccagctccgctggattctgtcttctcttccagcgagcgggcccaccaggtgttaagaattcgcaaacgtgcgaacagtttcttagaagagctgcgtcattcttctctagagcgagagtgcatcgaggagatttgtgattttgaagaagccaaggaaattttccagaatgttgatgacacactggcattttggtcaaagcatgtagatggggatcagtgcttagtgttaccccttgaacatccttgtgcatccctttgttgcggccacggcacctgcattgatggcatcggatcttttagttgcgactgccgctcagggtgggaggggaggttttgtcagcgagaggtttcattcctgaattgctccctggacaacggcggatgtactcattactgcctggaagaagtgggctggagacgttgcagctgcgccccgggctacaagctcggggatgatctgcttcagtgtcaccctgccgttaaattcccttgcggtaggccatggaagcgcatggaaaaaaaacgctcgcatctgaaacgggatacagaagatcaggaggaccaagtcgaccctaggctgatagatgggaaaatgacaagaagaggagatagcccgtggcaggttgtacttctagacagcaaaaagaagctcgcctgtggggcagtgctcatacacccttcctgggtcctgacggccgcccactgtatggatgaatccaaaaagcttctggtaagattgggtgagtatgacctacgccgatgggaaaagtgggaattagacctcgacatcaaggaagtttttgtgcaccctaattattcaaagtctactacggacaacgacattgccctcctgcacctagctcaacccgcaactttgtcacagactatagtcccaatttgccttcccgactcaggcctcgcagaaagggaactaaaccaggccgggcaggagaccctggtcactgggtggggataccacagttcacgcgagaaggaggctaaacggaaccgcacttttgtgctgaattttattaaaatacccgtcgttcctcacaacgaatgcagtgaagtgatgtccaacatggtttctgaaaatatgctgtgcgctggaatattgggcgacagacaggacgcatgcgaaggagatagcggcggcccaatggtagcctcttttcacggtacgtggttcttggtcggtctcgtgtcatggggggaaggctgtgggctcctgcacaattatggagtatacacgaaggtatcacgctatctcgattggatccatggccatattcgggacaaagaagcaccgcagaagagctgggccccatag

SEQ ID NO: 6740 - DNA, 351 bp, Artificial Sequence
  derived and/or modified sequence
atgtggcagctcacaagtttgctcctgtttgtcgccacttggggaatttccggtacccctgcacccctcgattcagttttttctagtagcgagagagctcaccaggttctgcgcattcgcaaacgtgccaatagctttctagaggaactccgccactcttcattagaacgggaatgcatcgaggagatttgcgactttgaggaggcaaaagaaatctttcagaatgtcgacgacaccctggccttttggagcaagcacgtggatggggaccaatgtcttgtgcttcccctcgaacacccttgcgcctctttgtgctgtggacatgggacttgtattgacggaattggatag

SEQ ID NO: 6741 - DNA, 381 bp, Artificial Sequence
  derived and/or modified sequence
atgtggcaattaacctctttactgttattcgtggcaacttggggtatttcagggacccctgctcccttggacagcgtctttagtagcagcgagcgagctcaccaagtcctaaggatacgcaaacgagctaattcttttctcgaggagcttcgacactcttctctggagcgcgaatgcatagaggagatatgtgactttgaagaagccaaggagatcttccagaacgtggatgacactttggccttttggtctaagcacgtagatggtgatcaatgcctagttctgcctcttgaacatccttgtgccagcctttgttgtggccacggaacctgcatcgatggaattgggagttttagttgtgattgtcgttcagggtggtag

SEQ ID NO: 6742 - DNA, 1386 bp, Artificial Sequence
  derived and/or modified sequence
atgtggcagctcacctcactgctgctgtttgtagctacttggggtatctcggggacccccgctccgttagattccgttttttcatcatccgagagagcccaccaagtgctcagaatccggaaacgcgccaatagctttttagaggagttacggcacagtagtctagaaagggaatgcattgaagaaatttgcgattttgaggaagctaaagagatctttcagaatgtagatgataccctggccttttggtccaaacacgtagacggcgatcagtgtctagtgctccccttagagcacccatgcgcaagcctgtgctgtggacatgggacttgtattgacggtatcggctccttttcatgcgattgccgctccggttgggaagggcgattttgccagagagaagtgtcctttctgaattgcagcctggacaacggaggttgcacacattactgtctcgaagaagttggctggaggagatgctcctgtgcacctggttataagctgggagacgacttgctgcagtgccatcctgctgtcaaattcccctgcggtagaccctggaaaagaatggaaaagaagagaagtcacttaaagagggatacagaagatcaggaggaccaagtcgaccctaggctgatagatgggaaaatgacaagaagaggagatagcccgtggcaggttgtacttctagacagcaaaaagaagctcgcctgtggggcagtgctcatacacccttcctgggtcctgacggccgcccactgtatggatgaatccaaaaagcttctggtaagattgggtgagtatgacctacgccgatgggaaaagtgggaattagacctcgacatcaaggaagtttttgtgcaccctaattattcaaagtctactacggacaacgacattgccctcctgcacctagctcaacccgcaactttgtcacagactatagtcccaatttgccttcccgactcaggcctcgcagaaagggaactaaaccaggccgggcaggagaccctggtcactgggtggggataccacagttcacgcgagaaggaggctaaacggaaccgcacttttgtgctgaattttattaaaatacccgtcgttcctcacaacgaatgcagtgaagtgatgtccaacatggtttctgaaaatatgctgtgcgctggaatattgggcgacagacaggacgcatgcgaaggagattccggcggccctatggtggctagttttcacggtacatggttccttgtcggtctcgtatcatggggcgagggctgcggattgttgcacaattatggagtttataccaaagtgagtcgctacttagattggatacacgggcacatacgcgataaagaagcacctcagaagtcttgggccccatag

SEQ ID NO: 6743 - DNA, 351 bp, Artificial Sequence
  derived and/or modified sequence
atgtggcagctgacaagcctactgttatttgtggccacgtggggcatctcgggaacacccgcaccgctcgactcagtgttctcaagcagcgaacgggctcatcaggtactcagaatccgtaaaagggcaaattcctttttagaggagttgcgacactcatcactggaaagagagtgtatagaggagatttgtgattttgaagaagctaaagagatctttcaaaacgtcgatgacactttagcgttctggtctaaacacgtggatggagatcaatgcctagtgttacctctcgaacatccatgcgcctctttgtgctgtggacatgggacttgtattgacggaattggatag

SEQ ID NO: 6744 - DNA, 381 bp, Artificial Sequence
  derived and/or modified sequence
atgtggcaattaacctctttactgttattcgtggcaacttggggtatttcagggacccctgctcccttggacagcgtctttagtagcagcgagcgagctcaccaagtcctaaggatacgcaaacgagctaattcttttctcgaggagcttcgacactcttctctggagcgcgaatgcatagaggagatatgtgactttgaagaagccaaggagatcttccagaacgtggatgacactttggccttttggtctaagcacgtagatggtgatcaatgcctagttctgcctcttgaacatccttgtgcgtccctgtgttgcggccatggcacgtgtatcgatggaattggctcattctcttgtgattgtagatctggatggtag

SEQ ID NO: 6745 - DNA, 1386 bp, Artificial Sequence
  derived and/or modified sequence
atgtggcagctcacaagcctcctgctgttcgtggccacctggggaatttccggcacaccagctcctcttgactcagtgttctccagcagcgagcgtgcccaccaggtgctgcggatccgcaaacgtgccaactccttcctggaggagctccgtcacagcagcctggagcgggagtgcatagaggagatctgtgacttcgaggaggccaaggaaattttccaaaatgtggatgacacactggccttctggtccaagcacgtcgacggtgaccagtgcttggtcttgcccttggagcacccgtgcgccagcctgtgctgcgggcacggcacgtgcatcgacggcatcggcagcttcagctgcgactgccgcagcggctgggagggccgcttctgccagcgcgaggtgagcttcctcaattgctcgctggacaacggcggctgcacgcattactgcctagaggaggtgggctggcggcgctgtagctgtgcgcctggctacaagctgggggacgacctcctgcagtgtcaccccgcagtgaagttcccttgtgggaggccctggaagcggatggagaagaagcgcagtcacctgaaacgagacacagaagaccaagaagaccaagtagatccgcggctcattgatgggaagatgaccaggcggggagacagcccctggcaggtggtcctgctggactcaaagaagaagctggcctgcggggcagtgctcatccacccctcctgggtgctgacagcggcccactgcatggatgagtccaagaagctccttgtcaggcttggagagtatgacctgcggcgctgggagaagtgggagctggacctggacatcaaggaggtcttcgtccaccccaactacagcaagagcaccaccgacaatgacatcgcactgctgcacctggcccagcccgccaccctctcgcagaccatagtgcccatctgcctcccggacagcggccttgcagagcgcgagctcaatcaggccggccaggagaccctcgtgacgggctggggctaccacagcagccgagagaaggaggccaagagaaaccgcaccttcgtcctcaacttcatcaagattcccgtggtcccgcacaatgagtgcagcgaggtcatgagcaacatggtgtctgagaacatgctgtgtgcgggcatcctcggggaccggcaggatgcctgcgagggcgacagtggggggcccatggtcgcctccttccacggcacctggttcctggtgggcctggtgagctggggtgagggctgtgggctccttcacaactacggcgtttacaccaaagtcagccgctacctcgactggatccatgggcacatcagagacaaggaagccccccagaagagctgggcaccttag

SEQ ID NO: 6746 - DNA, 1386 bp, Artificial Sequence
  derived and/or modified sequence
atgtggcaactaacttcattgctgctattcgtcgcaacctggggcatctcaggaacccccgcacccctcgacagcgtgtttagcagttctgagcgcgcgcaccaagtattaagaatccgcaaacgggcaaatagtttcctggaggaactcaggcacagttcccttgaacgggaatgcatcgaagagatctgtgactttgaagaggcgaaggagatattccagaacgtggacgacactttagcgttttggtccaagcatgtggacggtgaccagtgtttagttctgcccctcgaacacccatgcgcttctctgtgctgtgggcacggcacgtgcatagatggaatcggaagcttctcatgtgactgtcgatccggatgggaagggcgcttttgtcagagggaggtttcgtttctgaattgctcactagacaacggcggttgcacccattattgtttggaagaggtgggatggagaaggtgtagttgtgctcccggctataaactcggagacgacctgttgcagtgccatcccgctgttaagttcccatgtggacgtccatggaaaagaatggaaaagaaacgttctcacctcaagagagatactgaggatcaagaggaccaagttgatcccagactaatcgacggaaagatgacaaggagaggcgatagtccttggcaggtcgtgctcctggactctaagaagaagctggcttgcggggcagtactgatccatccaagctgggtgttaacagctgctcactgcatggatgaatcaaaaaagcttctagttcgcctcggtgaatacgatttacgacgctgggaaaaatgggaattggacctggacattaaggaggtatttgttcaccccaattacagcaaaagtacaacagataacgacattgccctgcttcacctggcccaaccggctaccttgagccaaacaatcgttccaatctgcttgcctgacagcggtctggctgaaagagagcttaatcaagcaggtcaagagactctggtcaccggatgggggtaccatagctcccgcgaaaaagaagccaaaaggaataggacattcgtgctgaacttcattaagatccctgtggtaccgcataacgaatgttcagaagtcatgtcaaatatggtgagcgagaatatgctgtgtgccggtattctgggagatcggcaagacgcgtgtgagggtgactccggagggcctatggtcgcttctttccatgggacctggtttttggtcgggctagtgagctggggggaaggatgcggattacttcataattacggtgtgtacaccaaggtgtcccgataccttgactggattcacggccacatcagagacaaagaagccccccagaagtcctgggcaccttag

SEQ ID NO: 6747 - DNA, 1386 bp, Artificial Sequence
  derived and/or modified sequence
atgtggcagctgaccagcctgctgctgttcgtggccacctggggcatttctggcacccctgctcctctagactcagttttctcttcctctgaacgagcacatcaggttctgagaatacgcaaacgggcaaacagctttttagaagaattacggcattcaagcctggagagagagtgcatcgaggaaatttgtgacttcgaggaggccaaggagatattccagaatgtagatgacacgctagcgttctggtcaaagcacgtggacggcgaccagtgccttgtgctgcctctcgaacacccttgcgctagcctttgctgtggccacggcacttgcatcgatggcatcggcagttttagttgcgattgccgctccggatgggagggaagattctgccagagggaagtctcgttcctgaactgttctctggataacggaggttgtacccattactgtcttgaggaggtaggctggagacggtgcagttgtgcccccggctataagttgggcgatgatctcctccagtgtcacccggcggtgaagtttccatgtggccgtccttggaagagaatggagaagaaacgcagccacctgaagagagacactgaagatcaggaagatcaggtggacccccgcctcatcgatgggaaaatgaccagacgaggtgactccccttggcaggtggttctgcttgatagcaagaaaaagctggcttgcggtgctgtcctgatccatccatcatgggtgctgacggccgcccactgtatggatgaaagtaagaaactgctggtgagactcggtgagtatgacctgcggagatgggagaagtgggaactggatttggacattaaggaggtttttgtgcaccctaattattcaaaatccactaccgacaatgacatcgcacttttgcacctcgctcaacccgcaaccctcagccagaccatcgtccccatttgcttacccgacagcggcctcgcagaaagagagcttaaccaagcagggcaggagacccttgtaactggatggggatatcactcttcccgggagaaggaagcaaagcggaatcggactttcgtgttaaattttatcaaaatccctgtagtgcctcataatgagtgcagcgaggtgatgtctaacatggttagcgagaatatgctctgcgctggcattctcggggatcgtcaagacgcgtgcgagggggactccggcggacccatggttgccagcttccacggtacttggtttctcgtgggcctggtcagctggggcgaaggctgtggcttactgcataattacggcgtgtacacaaaggtatcccgctacctagactggattcacggccacatacgagataaagaagctccgcagaaatcatgggccccgtag

SEQ ID NO: 6748 - DNA, 1386 bp, Artificial Sequence
  derived and/or modified sequence
atgtggcagttaacttcacttctgttgttcgtcgcaacctggggcatcagtggaacaccggctccacttgatagtgttttctcaagctccgaacgtgctcatcaggtgcttcggatccggaaaagggctaacagtttcctggaggagctgcgccattcgtcattggagagagaatgcattgaggaaatctgtgatttcgaggaggccaaagaaatcttccagaatgtggacgatacactcgctttctggagcaagcatgtcgacggagaccaatgcctggtgcttccccttgaacacccttgtgccagtctgtgttgtgggcacggtacgtgcatagacggcattggttcattctcctgtgactgtcgcagcgggtgggaaggacggttctgtcagcgggaggtaagcttcctcaattgcagcctcgacaacggtgggtgtacccactattgcctcgaggaggtcgggtggagaagatgtagttgcgcacccggatataagcttggggacgaccttctccagtgccatcctgctgtgaagttcccttgcgggaggccttggaagcgcatggaaaagaaacggagtcacctcaagcgggacacagaagaccaggaggatcaagtcgaccctcggcttatcgatggaaaaatgacccgtcggggtgattctccctggcaggtcgtactgttggactcaaaaaaaaagttagcctgcggagctgtgctgatccacccatcttgggtgcttactgcggcacactgcatggatgagagcaaaaaacttctcgtcaggctgggggagtatgatctgcgccgttgggaaaaatgggaactggatctggatataaaggaggtgtttgtgcatcctaactactcaaaatctacaaccgacaacgacattgcgctgctgcacctggcgcagcccgctactctctcccagaccatcgtgccaatttgtttgccagattccggacttgccgaacgtgagctgaaccaggccggacaggaaacattggtgaccggatggggctatcactcctccagagagaaggaggctaagcgaaataggaccttcgtgctaaattttatcaagattcctgtggtgccccataatgagtgtagcgaagttatgtccaatatggtctcagaaaacatgctctgtgctgggattcttggcgatcgccaggacgcctgtgaaggcgacagcggtggcccaatggtggcatcttttcacggtacatggttcttagtgggcctggttagttggggtgaagggtgcggtttacttcacaattatggcgtgtacactaaagtgtcacgttatttggactggatccacggccatataagagacaaggaggctcctcagaaatcgtgggccccatag

SEQ ID NO: 6749 - DNA, 1386 bp, Artificial Sequence
  derived and/or modified sequence
atgtggcaactaacttcattactcctgtttgtcgcaacatggggaatatctggcacccccgcaccactggactcagtcttttcatcttccgagcgtgcgcaccaagttctgaggattagaaaaagagcaaacagtttcctcgaagaactgaggcacagttccctcgaacgggagtgcattgaggagatatgcgattttgaagaggctaaagaaatcttccagaacgttgacgacacacttgctttttggagtaaacacgtcgacggtgaccaatgcttggttctcccattagagcatccctgcgcgtccctgtgttgcggacacggcacctgtatcgacggaataggcagtttctcgtgtgattgccgttcgggttgggaaggccgcttctgtcaacgcgaggtgagctttctaaactgcagcctcgataatggcgggtgtactcactactgcctcgaagaggtcggatggcgacgctgctcttgcgcaccaggctataagcttggcgacgaccttctgcagtgccatccagcggtaaaattcccctgtggacgtccttggaagcgtatggaaaaaaaacggagccacctcaaacgggatacagaggatcaagaagatcaggtggacccacgcttaattgacgggaaaatgaccaggagaggcgactctccttggcaggtggtgttgctggattccaagaagaagctggcttgtggagcggtcctcatccatccatcatgggtgctgacagctgctcactgtatggacgaatcaaagaaacttttggtgaggctgggggaatatgatctgaggagatgggaaaaatgggaactggatctggacattaaagaggtattcgtgcaccccaattatagtaagtctacaacggacaacgacatagctcttttgcacctcgcccagccagctactcttagccaaacgatcgttcctatttgtcttcctgactcaggcctggcggaaagggagctaaaccaagcgggtcaagaaaccttagttaccggatggggctaccattcctctagggaaaaagaagccaagagaaacaggacttttgtgctgaacttcatcaaaatcccagtggtaccccacaacgagtgttctgaggtgatgtcaaatatggtgagtgaaaatatgttgtgtgctggaatcctgggagatagacaagacgcatgcgaaggcgattcagggggacccatggtggcatcattccatgggacctggtttctcgtgggcctggtctcttggggagaaggttgcggcctgctgcataattatggcgtctacaccaaggtgtcacgatacctagactggatccatggccacatacgcgataaagaagcaccgcaaaagagttgggcaccatag

SEQ ID NO: 6750 - DNA, 1386 bp, Artificial Sequence
  derived and/or modified sequence
atgtggcaactgactagtctcctactctttgtggcgacttggggcatttctggcacccctgcccccttagattctgttttcagctcctcagagcgggcccaccaggttctcagaatccgaaaacgcgcaaacagttttctcgaggaattgcgacattcatcattggaacgggagtgcatcgaggaaatctgcgattttgaggaagccaaggaaattttccagaacgtcgacgatacattagcattctggtctaaacacgtggacggcgaccagtgcctagtccttcctctcgagcacccctgtgcttccctgtgttgtggccatggaacatgtatcgacgggattggttctttttcatgcgattgtagatctggatgggaagggcgtttttgccagagagaagtttccttcttgaattgttctcttgataacggtggttgcacccactattgtttggaggaggtcggatggagaagatgcagttgcgcccctgggtacaagctgggagacgacctattacagtgtcaccctgcggtcaagtttccctgcggtcggccatggaagaggatggaaaagaaacgcagccatctcaaacgtgacacagaggaccaagaagatcaggttgaccctaggctaattgacggtaaaatgacgcgccggggagattccccatggcaagtggtgctcctggactcgaagaaaaagttggcctgcggagctgtgcttatccacccttcatgggtcctgacagccgcccattgcatggacgagagcaaaaaactactggtgaggcttggagaatacgatttgaggagatgggagaagtgggaattggatctggacatcaaggaggtcttcgtgcatcctaactacagcaagagcactacggataacgatatagcattactgcacctggcccagcctgccactctatctcaaactatcgtgccaatttgtctccctgactcagggttagcagagagggaactgaatcaagctggacaggagacattagtgactggctggggctaccacagttcaagagaaaaggaagcaaagaggaaccggaccttcgtcctaaattttatcaaaattcccgtggtcccccacaacgagtgctccgaagtcatgtcgaacatggttagcgaaaatatgctgtgcgcaggaattctgggagaccggcaggatgcctgtgagggggactcaggcggacctatggtcgcttctttccacgggacctggtttctggtcggtctggtatcttggggggagggatgcggtctgttacacaattatggagtgtacactaaagttagtcggtatttagattggatacatgggcatatcagagacaaagaggcccctcagaaaagctgggccccttag

SEQ ID NO: 6751 - RNA, 1386 nt, Artificial Sequence
  derived and/or modified sequence
auguggcaacuuaccucgcugcugcuuuucgucgccacauggggcauaucagggaccccagcuccgcuggauucugucuucucuuccagcgagcgggcccaccagguguuaagaauucgcaaacgugcgaacaguuucuuagaagagcugcgucauucuucucuagagcgagagugcaucgaggagauuugugauuuugaagaagccaaggaaauuuuccagaauguugaugacacacuggcauuuuggucaaagcauguagauggggaucagugcuuaguguuaccccuugaacauccuugugcaucccuuuguugcggccacggcaccugcauugauggcaucggaucuuuuaguugcgacugccgcucagggugggaggggagguuuugucagcgagagguuucauuccugaauugcucccuggacaacggcggauguacucauuacugccuggaagaagugggcuggagacguugcagcugcgccccgggcuacaagcucggggaugaucugcuucagugucacccugccguuaaauucccuugcgguaggccauggaagcgcauggaaaaaaaacgcucgcaucugaaacgggauacagaagaucaggaggaccaagucgacccuaggcugauagaugggaaaaugacaagaagaggagauagcccguggcagguuguacuucuagacagcaaaaagaagcucgccuguggggcagugcucauacacccuuccuggguccugacggccgcccacuguauggaugaauccaaaaagcuucugguaagauugggugaguaugaccuacgccgaugggaaaagugggaauuagaccucgacaucaaggaaguuuuugugcacccuaauuauucaaagucuacuacggacaacgacauugcccuccugcaccuagcucaacccgcaacuuugucacagacuauagucccaauuugccuucccgacucaggccucgcagaaagggaacuaaaccaggccgggcaggagacccuggucacuggguggggauaccacaguucacgcgagaaggaggcuaaacggaaccgcacuuuugugcugaauuuuauuaaaauacccgucguuccucacaacgaaugcagugaagugauguccaacaugguuucugaaaauaugcugugcgcuggaauauugggcgacagacaggacgcaugcgaaggagauagcggcggcccaaugguagccucuuuucacgguacgugguucuuggucggucucgugucauggggggaaggcugugggcuccugcacaauuauggaguauacacgaagguaucacgcuaucucgauuggauccauggccauauucgggacaaagaagcaccgcagaagagcugggccccauag

SEQ ID NO: 6752 - RNA, 351 nt, Artificial Sequence
  derived and/or modified sequence
auguggcagcucacaaguuugcuccuguuugucgccacuuggggaauuuccgguaccccugcaccccucgauucaguuuuuucuaguagcgagagagcucaccagguucugcgcauucgcaaacgugccaauagcuuucuagaggaacuccgccacucuucauuagaacgggaaugcaucgaggagauuugcgacuuugaggaggcaaaagaaaucuuucagaaugucgacgacacccuggccuuuuggagcaagcacguggauggggaccaaugucuugugcuuccccucgaacacccuugcgccucuuugugcuguggacaugggacuuguauugacggaauuggauag

SEQ ID NO: 6753 - RNA, 381 nt, Artificial Sequence
  derived and/or modified sequence
auguggcaauuaaccucuuuacuguuauucguggcaacuugggguauuucagggaccccugcucccuuggacagcgucuuuaguagcagcgagcgagcucaccaaguccuaaggauacgcaaacgagcuaauucuuuucucgaggagcuucgacacucuucucuggagcgcgaaugcauagaggagauaugugacuuugaagaagccaaggagaucuuccagaacguggaugacacuuuggccuuuuggucuaagcacguagauggugaucaaugccuaguucugccucuugaacauccuugugccagccuuuguuguggccacggaaccugcaucgauggaauugggaguuuuaguugugauugucguucagggugguag

SEQ ID NO: 6754 - RNA, 1386 nt, Artificial Sequence
  derived and/or modified sequence
auguggcagcucaccucacugcugcuguuuguagcuacuugggguaucucggggacccccgcuccguuagauuccguuuuuucaucauccgagagagcccaccaagugcucagaauccggaaacgcgccaauagcuuuuuagaggaguuacggcacaguagucuagaaagggaaugcauugaagaaauuugcgauuuugaggaagcuaaagagaucuuucagaauguagaugauacccuggccuuuugguccaaacacguagacggcgaucagugucuagugcuccccuuagagcacccaugcgcaagccugugcuguggacaugggacuuguauugacgguaucggcuccuuuucaugcgauugccgcuccgguugggaagggcgauuuugccagagagaaguguccuuucugaauugcagccuggacaacggagguugcacacauuacugucucgaagaaguuggcuggaggagaugcuccugugcaccugguuauaagcugggagacgacuugcugcagugccauccugcugucaaauuccccugcgguagacccuggaaaagaauggaaaagaagagaagucacuuaaagagggauacagaagaucaggaggaccaagucgacccuaggcugauagaugggaaaaugacaagaagaggagauagcccguggcagguuguacuucuagacagcaaaaagaagcucgccuguggggcagugcucauacacccuuccuggguccugacggccgcccacuguauggaugaauccaaaaagcuucugguaagauugggugaguaugaccuacgccgaugggaaaagugggaauuagaccucgacaucaaggaaguuuuugugcacccuaauuauucaaagucuacuacggacaacgacauugcccuccugcaccuagcucaacccgcaacuuugucacagacuauagucccaauuugccuucccgacucaggccucgcagaaagggaacuaaaccaggccgggcaggagacccuggucacuggguggggauaccacaguucacgcgagaaggaggcuaaacggaaccgcacuuuugugcugaauuuuauuaaaauacccgucguuccucacaacgaaugcagugaagugauguccaacaugguuucugaaaauaugcugugcgcuggaauauugggcgacagacaggacgcaugcgaaggagauuccggcggcccuaugguggcuaguuuucacgguacaugguuccuugucggucucguaucauggggcgagggcugcggauuguugcacaauuauggaguuuauaccaaagugagucgcuacuuagauuggauacacgggcacauacgcgauaaagaagcaccucagaagucuugggccccauag

SEQ ID NO: 6755 - RNA, 351 nt, Artificial Sequence
  derived and/or modified sequence
auguggcagcugacaagccuacuguuauuuguggccacguggggcaucucgggaacacccgcaccgcucgacucaguguucucaagcagcgaacgggcucaucagguacucagaauccguaaaagggcaaauuccuuuuuagaggaguugcgacacucaucacuggaaagagaguguauagaggagauuugugauuuugaagaagcuaaagagaucuuucaaaacgucgaugacacuuuagcguucuggucuaaacacguggauggagaucaaugccuaguguuaccucucgaacauccaugcgccucuuugugcuguggacaugggacuuguauugacggaauuggauag

SEQ ID NO: 6756 - RNA, 381 nt, Artificial Sequence
  derived and/or modified sequence
auguggcaauuaaccucuuuacuguuauucguggcaacuugggguauuucagggaccccugcucccuuggacagcgucuuuaguagcagcgagcgagcucaccaaguccuaaggauacgcaaacgagcuaauucuuuucucgaggagcuucgacacucuucucuggagcgcgaaugcauagaggagauaugugacuuugaagaagccaaggagaucuuccagaacguggaugacacuuuggccuuuuggucuaagcacguagauggugaucaaugccuaguucugccucuugaacauccuugugcgucccuguguugcggccauggcacguguaucgauggaauuggcucauucucuugugauuguagaucuggaugguag

SEQ ID NO: 6757 - protein, 676 aa, Artificial Sequence
  derived and/or modified sequence
MRVLGGRCGALLACLLLVLPVSEANFLSKQQASQVLVRKRRANSLLEETKQGNLERECIEELCNKEEAREVFENDPETDYFYPKYLVCLRSFQTGLFTAARQSTNAYPDLRSCVNAIPDQCSPLPCNEDGYMSCKDGKASFTCTCKPGWQGEKCEFDINECKDPSNINGGCSQICDNTPGSYHCSCKNGFVMLSNKKDCKDVDECSLKPSICGTAVCKNIPGDFECECPEGYRYNLKSKSCEDIDECSENMCAQLCVNYPGGYTCYCDGKKGFKLAQDQKSCEVVSVCLPLNLDTKYELLYLAEQFAGVVLYLKFRLPEISRFSAEFDFRTYDSEGVILYAESIDHSAWLLIALRGGKIEVQLKNEHTSKITTGGDVINNGLWNMVSVEELEHSISIKIAKEAVMDINKPGPLFKPENGLLETKVYFAGFPRKVESELIKPINPRLDGCIRSWNLMKQGASGIKEIIQEKQNKHCLVTVEKGSYYPGSGIAQFHIDYNNVSSAEGWHVNVTLNIRPSTGTGVMLALVSGNNTVPFAVSLVDSTSEKSQDILLSVENTVIYRIQALSLCSDQQSHLEFRVNRNNLELSTPLKIETISHEDLQRQLAVLDKAMKAKVATYLGGLPDVPFSATPVNAFYNGCMEVNINGVQLDLDEAISKHNDIRAHSCPSVWKKTKNS

SEQ ID NO: 6758 - DNA, 2031 bp, Artificial Sequence
  derived and/or modified sequence
atgagagtcttgggcggtcgttgtggtgctctgctggcatgtctgctgctggttttacctgtaagcgaggcgaatttccttagtaaacagcaggcatctcaggtcctcgtgaggaagcgacgggctaattcattgctggaggagaccaagcagggaaatctggaacgggagtgtatcgaggagttgtgtaataaggaggaggctagagaagttttcgagaacgaccctgagaccgactatttctatccaaaatatttagtttgtctgaggagctttcaaactggactctttacagccgcaaggcaaagtactaacgcttatccagatcttcggtcttgtgtcaacgccattcccgatcaatgctccccccttccttgcaatgaagacggctacatgtcttgcaaagacggtaaggcatcattcacgtgtacgtgcaaaccaggctggcagggggagaaatgcgagttcgatatcaacgagtgcaaggatccaagcaacatcaatggaggttgttcccagatctgtgacaacacaccaggctcatatcattgttcctgtaaaaatggatttgtaatgctgagtaacaagaaggactgcaaagacgtcgatgaatgtagcttaaagcctagcatctgcggcacagccgtgtgtaagaacattccaggggatttcgaatgcgaatgccctgagggctacaggtataaccttaaaagcaaatcatgcgaagacatcgatgaatgctccgaaaatatgtgcgcacagttgtgtgttaattacccaggtggttacacctgctactgcgatggtaaaaaaggcttcaaactagcccaggaccagaagtcctgcgaggtcgtttccgtttgcctgccacttaacctcgacaccaagtatgagctcctgtatttggctgagcagtttgccggcgtggtgctgtatctcaaatttaggctgccagagatatccagattcagtgccgagtttgattttcgcacttatgactccgaaggcgttatcctgtacgcagagtcgatcgaccatagcgcatggctgctcattgctttacggggtggaaagatcgaggtgcagttaaagaacgagcacacgtcaaagataaccacagggggggatgtcattaacaacggactctggaatatggtgtccgtggaggaacttgaacattctatcagtatcaaaattgccaaagaagctgtgatggacatcaataagcccggccccttgttcaagcctgagaatgggctcctggagactaaggtgtatttcgcaggattccctcgaaaggtcgagagtgagttgattaagcctattaatccacgactggatgggtgcatccgatcctggaatcttatgaaacagggcgcctctggaataaaggagattatccaggagaagcagaataagcactgtctagtgacggtagaaaagggcagctactatccagggtctggcatcgctcaattccacatcgactataataacgtgtcctccgctgagggatggcacgttaatgtgacacttaacattcggccaagcactggaactggagtgatgctcgctctggtctctgggaataacacagtgcccttcgcagttagcctagtagactccacttcggaaaagtcccaagacattctcctttctgtagaaaacactgtgatttaccgcatacaggcgctctcgctgtgttctgaccagcagtctcacctggagttccgggtgaaccgcaataacctggagctgagcactcctcttaaaatcgagaccatttctcacgaagacctgcagcggcaactggccgtcctcgataaggcaatgaaggccaaagtggccacctacctgggaggcctgcctgatgtcccgttctcggcaactcccgtcaatgccttctacaacggctgcatggaggtgaacataaatggtgtccagctggacttagatgaggccatctcaaaacacaatgatattcgagcacattcttgtccatcagtgtggaaaaagacaaagaactcatag

SEQ ID NO: 6759 - DNA, 2031 bp, Artificial Sequence
  derived and/or modified sequence
atgagggtgctgggcggccgctgtggggccctgctggcctgcctgctgctggtgctgcctgtgtctgaggccaacttcctgagcaagcagcaggccagccaggtgctggtgaggaagaggcgggccaacagcctgctggaggagaccaagcagggcaacctggagagagaatgtattgaggagctgtgcaacaaggaggaggcccgggaggtgtttgaaaatgaccctgagacagactacttctaccccaagtacctggtgtgcctgcgctccttccagacaggcctcttcaccgctgcccggcagagcaccaatgcctacccagacctgcggagctgtgtgaatgccatcccagaccagtgcagccccctgccctgcaatgaagatggctacatgagctgcaaggatggcaaggccagcttcacctgcacctgcaagccaggctggcagggcgagaagtgtgaatttgacatcaatgaatgcaaggaccccagcaacatcaatggaggctgcagccagatctgtgacaacaccccaggcagctaccactgcagctgcaagaatggatttgtgatgctgagcaacaagaaggactgcaaggatgtggatgagtgcagcctgaagcccagcatctgtggcacagctgtgtgcaagaacatccctggggactttgaatgtgaatgtcctgagggctaccgctacaacctgaagagcaagagctgtgaggacattgatgagtgcagcgagaacatgtgtgcccagctgtgtgtgaactacccaggcggctacacctgctactgtgatggcaagaagggcttcaagctggcccaggaccagaagagctgtgaggtggtgtctgtgtgcctgcccctgaacctggacaccaagtatgagctgctgtacctggccgagcagtttgctggggtggtgctgtacctgaagttccggctgcctgagatcagccgcttctctgctgagtttgacttccgcacctatgacagcgagggcgtcatcctgtatgcagagagcattgaccacagcgcctggctgctgattgccctgcggggcggcaagattgaggtgcagctgaagaatgagcacaccagcaagatcaccactggaggagatgtgatcaacaacggcctgtggaacatggtgtctgtggaggagctggagcacagcatcagcatcaagatcgccaaggaggccgtgatggacatcaacaagccaggccccctcttcaagccagaaaatggcctgctggagaccaaggtgtactttgctggcttccccaggaaggtggagagcgagctgatcaagcccatcaacccccggctggatggctgcatccgctcctggaacctgatgaagcagggcgccagcggcatcaaggagatcatccaggagaagcagaacaagcactgcctggtgacagtggagaagggcagctactacccaggcagcggcatcgcccagttccacatcgactacaacaacgtgagcagcgctgagggctggcacgtgaatgtgaccctgaacatccggcccagcacaggcaccggggtgatgctggccctggtgtctggcaacaacacagtgccctttgctgtgtccctggtggacagcaccagcgagaagagccaggacatcctgctgtctgtggagaacacagtcatctaccgcatccaggccctgagcctgtgcagcgaccagcagagccacctggagttccgggtgaacagaaacaacctggagctgagcacccccctgaagattgagaccatcagccatgaggacctgcagaggcagctggccgtgctggacaaggccatgaaggccaaggtggccacctacctgggcggcctgcctgatgtgcccttcagcgccacccctgtgaatgccttctacaacggctgcatggaggtgaacatcaatggagtgcagctggacctggatgaggccatcagcaagcacaatgacatccgggcccacagctgccccagcgtgtggaagaagaccaagaacagctag

SEQ ID NO: 6760 - DNA, 2031 bp, Artificial Sequence
  derived and/or modified sequence
atgcgggtgctgggcggccggtgcggcgccctgctggcctgcctgctcctggtcttgcctgtctccgaggctaacttcctttctaagcagcaggcttcgcaggtcctggtccggaagcgcagagccaactccctgctagaagaaaccaaacaggggaatctcgaaagggaatgtatagaggaactttgcaataaggaggaggcaagggaggtgtttgagaacgaccccgagacagactatttttacccgaaatatttagtgtgcctgcggtcgtttcagacggggctcttcaccgctgccagacagagcacaaatgcatacccagaccttcgcagctgcgtgaatgccattccagaccagtgcagtcccttgccttgcaatgaagatgggtatatgagctgcaaggatggcaaagcgtcctttacttgcacttgcaaaccaggctggcaaggagagaaatgtgagtttgatataaacgaatgcaaggatcctagcaatattaatggcggatgttcacagatttgtgataacaccccaggctcttatcactgctcctgtaaaaacggttttgtgatgctctctaacaaaaaggattgtaaggacgtcgacgaatgcagccttaaacctagtatttgcgggacagccgtctgtaaaaatatcccaggtgattttgagtgtgaatgccctgaaggctaccgctataatttgaagtccaagtcctgcgaagacatcgacgagtgctctgaaaatatgtgcgcgcagctctgcgtgaattatcccggaggctacacctgctactgcgacggaaaaaaaggatttaaactagctcaagaccagaaaagctgtgaggttgtctctgtgtgcctccctcttaacttggacacaaagtacgaattactctatctagctgagcagttcgcaggtgtagtcctctatctcaaattcagactgcctgaaatcagtaggttcagtgccgaattcgatttcagaacttacgactcagagggagtgattctgtatgccgagtccatcgatcactcagcatggctgctgatcgctcttaggggcggcaaaatcgaggtccagttaaagaatgagcacacgtccaagatcactaccggcggagacgttattaacaacggcctgtggaacatggtgtccgtggaggaactcgagcatagtatttcaatcaagatcgctaaggaagctgttatggacattaataagccaggcccactcttcaagccggagaatggactgctggagaccaaagtgtatttcgcaggctttccccgcaaggtggaatcagagctgattaagcctatcaatccccgattggacgggtgtattcggtcttggaatctgatgaagcaaggcgcttctggcatcaaggagattattcaggagaaacagaacaagcattgccttgtcacagtcgagaagggctcttattacccaggcagcggaatcgctcagttccacattgattacaataatgtctccagcgcggaggggtggcacgtgaatgtcacccttaatatcaggcccagcacaggtactggcgtgatgctggctttagtcagtggtaacaatacagtccctttcgcagttagcctcgtggactctacctccgaaaagtctcaggacatactcctgagtgtggaaaataccgtaatttaccgaatacaggcccttagcctatgttcagatcaacaaagtcacctcgaattccgagttaaccgcaataacctggagctgtcgacccctctcaaaatagagaccatttctcacgaggacctgcagagacagctggcggtactggacaaggcgatgaaagcaaaagtggcgacctatctgggtggcctccctgacgtgccattctctgccactccagtgaacgccttttataatgggtgtatggaggttaacataaacggcgtgcagctcgacctggatgaagcgattagcaagcataatgacattcgcgctcactcctgcccatccgtgtggaaaaagacaaaaaactcatag

SEQ ID NO: 6761 - DNA, 2031 bp, Artificial Sequence
  derived and/or modified sequence
atgagagtgttggggggacgatgcggcgctttacttgcctgcctgttgctggtgcttcccgtcagtgaggccaatttccttagtaaacagcaggctagccaggtgcttgtacgcaaaagacgcgcaaacagcttgctcgaggaaacaaagcaaggtaacctcgagcgcgagtgcatcgaagagctctgtaataaagaagaggcacgagaggtattcgaaaacgatcctgagacggattatttttatccgaaatatctggtgtgtctgaggtctttccagaccggcttatttacagccgctcgccagtccaccaatgcttatcccgacctccggtcctgcgtcaacgccatcccggatcaatgctctccactcccatgtaatgaggacggctacatgtcctgtaaagatgggaaggccagctttacctgcacctgtaagccgggatggcagggcgaaaaatgcgagttcgacattaacgagtgcaaggatccttccaatattaacggcggttgcagccaaatctgcgacaacacacctggatcttaccactgtagctgcaaaaatggttttgtgatgctttccaataagaaagattgcaaagacgtcgacgagtgttcactgaagcctagcatctgcgggacagcggtgtgcaaaaacattcccggagatttcgagtgcgagtgccccgagggctaccggtacaacctgaaatctaagagttgtgaggacatcgacgagtgctcagaaaatatgtgcgcacagctttgcgtgaattatcctggaggctacacttgttattgcgatggaaagaagggctttaagctggcacaggaccagaaaagttgcgaggtcgtaagtgtgtgtctgcctctgaatttagatacgaaatacgagctgctctatctcgccgagcagtttgctggcgtggtattgtacctgaaatttcgtttgccagagatctcaaggttctccgcagaatttgacttccgaacctatgatagcgaaggcgtgattctctacgctgagtccattgatcactccgcctggttactgatcgcccttcgcggagggaagatcgaggtccagttaaaaaatgaacatacaagcaagattaccaccgggggagatgtgatcaacaatggtctctggaatatggtgtccgttgaggagctagagcactcaataagtatcaagattgcaaaggaggcagtgatggacataaacaagcctgggccattatttaagcctgagaatgggttgctcgaaaccaaggtctatttcgctggcttccctcgaaaagtggagtctgagttgatcaagcctatcaatccccgtctggacggttgcatacgctcttggaatctgatgaagcagggagcatctggcataaaagagatcatccaagagaagcagaacaagcactgcctagttactgtcgaaaaaggtagttactacccaggaagcgggattgctcagtttcatattgactacaacaacgtcagcagcgctgaaggctggcatgtgaatgtaactctgaatatacggccttcgacaggaactggggtcatgctggccctggtttcaggaaataacactgtcccttttgccgtatctctggtcgatagcacttctgagaagagccaggatattctgctctccgtagagaacacagtgatttaccgaattcaggccctgtccctctgctcggatcagcagtcacacctggagttccgggttaatcgaaataacctggaactgtccactcctctaaagatcgagactatttcccacgaggatctccagcgtcagctggccgtgcttgacaaggcgatgaaggccaaggtggctacgtatctgggaggcctgcctgacgtgcccttcagcgccacccctgttaatgctttttacaacgggtgtatggaagtgaatatcaacggggtgcagctggacctcgatgaagccatctccaaacacaatgacatcagggctcatagctgccctagcgtgtggaagaagaccaaaaattcctag

SEQ ID NO: 6762 - DNA, 3556 bp, Artificial Sequence
  derived and/or modified sequence
aaaagcagcaactagggagctggtgaagaaggatgtctcagcagtgtttactaggcctccaacactagagcccatcccccagctccgaaaagcttcctggaaatgtccttgttatcacttcccctctcgggctgggcgctgggagcgggcggtctcctccgcccccggctgttccgccgaggctcgctgggtcgctggcgccgccgcgcagcacggctcagaccgaggcgcacaggctcgcagctccgcggcgcctagcgctccggtccccgccgcgacgcgccaccgtccctgccggcgcctccgcgcgcttcgaaatgagggtcctgggtgggcgctgcggggcgctgctggcgtgtctcctcctagtgcttcccgtctcagaggcaaactttttgtcaaagcaacaggcttcacaagtcctggttaggaagcgtcgtgcaaattctttacttgaagaaaccaaacagggtaatcttgaaagagaatgcatcgaagaactgtgcaataaagaagaagccagggaggtctttgaaaatgacccggaaacggattatttttatccaaaatacttagtttgtcttcgctcttttcaaactgggttattcactgctgcacgtcagtcaactaatgcttatcctgacctaagaagctgtgtcaatgccattccagaccagtgtagtcctctgccatgcaatgaagatggatatatgagctgcaaagatggaaaagcttcttttacttgcacttgtaaaccaggttggcaaggagaaaagtgtgaatttgacataaatgaatgcaaagatccctcaaatataaatggaggttgcagtcaaatttgtgataatacacctggaagttaccactgttcctgtaaaaatggttttgttatgctttcaaataagaaagattgtaaagatgtggatgaatgctctttgaagccaagcatttgtggcacagctgtgtgcaagaacatcccaggagattttgaatgtgaatgccccgaaggctacagatataatctcaaatcaaagtcttgtgaagatatagatgaatgctctgagaacatgtgtgctcagctttgtgtcaattaccctggaggttacacttgctattgtgatgggaagaaaggattcaaacttgcccaagatcagaagagttgtgaggttgtttcagtgtgccttcccttgaaccttgacacaaagtatgaattactttacttggcggagcagtttgcaggggttgttttatatttaaaatttcgtttgccagaaatcagcagattttcagcagaatttgatttccggacatatgattcagaaggcgtgatactgtacgcagaatctatcgatcactcagcgtggctcctgattgcacttcgtggtggaaagattgaagttcagcttaagaatgaacatacatccaaaatcacaactggaggtgatgttattaataatggtctatggaatatggtgtctgtggaagaattagaacatagtattagcattaaaatagctaaagaagctgtgatggatataaataaacctggacccctttttaagccggaaaatggattgctggaaaccaaagtatactttgcaggattccctcggaaagtggaaagtgaactcattaaaccgattaaccctcgtctagatggatgtatacgaagctggaatttgatgaagcaaggagcttctggaataaaggaaattattcaagaaaaacaaaataagcattgcctggttactgtggagaagggctcctactatcctggttctggaattgctcaatttcacatagattataataatgtatccagtgctgagggttggcatgtaaatgtgaccttgaatattcgtccatccacgggcactggtgttatgcttgccttggtttctggtaacaacacagtgccctttgctgtgtccttggtggactccacctctgaaaaatcacaggatattctgttatctgttgaaaatactgtaatatatcggatacaggccctaagtctatgttccgatcaacaatctcatctggaatttagagtcaacagaaacaatctggagttgtcgacaccacttaaaatagaaaccatctcccatgaagaccttcaaagacaacttgccgtcttggacaaagcaatgaaagcaaaagtggccacatacctgggtggccttccagatgttccattcagtgccacaccagtgaatgccttttataatggctgcatggaagtgaatattaatggtgtacagttggatctggatgaagccatttctaaacataatgatattagagctcactcatgtccatcagtttggaaaaagacaaagaattcttaaggcatcttttctctgcttataataccttttccttgtgtgtaattatacttatgtttcaataacagctgaagggttttatttacaatgtgcagtctttgattattttgtggtcctttcctgggatttttaaaaggtcctttgtcaaggaaaaaaattctgttgtgatataaatcacagtaaagaaattcttacttctcttgctatctaagaatagtgaaaaataacaattttaaatttgaatttttttcctacaaatgacagtttcaatttttgtttgtaaaactaaattttaattttatcatcatgaactagtgtctaaatacctatgtttttttcagaaagcaaggaagtaaactcaaacaaaagtgcgtgtaattaaatactattaatcataggcagatactattttgtttatgtttttgtttttttcctgatgaaggcagaagagatggtggtctattaaatatgaattgaatggagggtcctaatgccttatttcaaaacaattcctcagggggaacagctttggcttcatctttctcttgtgtggcttcacatttaaaccagtatctttattgaattagaaaacaagtgggacatattttcctgagagcagcacaggaatcttcttcttggcagctgcagtctgtcaggatgagatatcagattaggttggataggtggggaaatctgaagtgggtacattttttaaattttgctgtgtgggtcacacaaggtctacattacaaaagacagaattcagggatggaaaggagaatgaacaaatgtgggagttcatagttttccttgaatccaacttttaattaccagagtaagttgccaaaatgtgattgttgaagtacaaaaggaactatgaaaaccagaacaaattttaacaaaaggacaaccacagagggatatagtgaatatcgtatcattgtaatcaaagaagtaaggaggtaagattgccacgtgcctgctggtactgtgatgcatttcaagtggcagttttatcacgtttgaatctaccattcatagccagatgtgtatcagatgtttcactgacagtttttaacaataaattcttttcactgtattttatatcacttataataaatcggtgtataattttaaaatgcatgtgaatatctttattatatcaactgtttgaataaaacaaaattacataatagacatttaactcttca

SEQ ID NO: 6763 - DNA, 2031 bp, Artificial Sequence
  derived and/or modified sequence
atgcgcgtgctcggcggcagatgtggtgcgttgctcgcttgccttctcctggtcctccctgtctcagaagcaaacttcctgtctaagcagcaggccagtcaagtgctggtcagaaaacgacgcgccaactccctgttggaggaaaccaaacaaggaaacctggaaagagaatgtattgaggagctgtgcaataaggaagaggcacgcgaggtttttgagaacgaccccgaaaccgattacttctacccgaagtatctggtgtgcctccggtcctttcagactggtttgttcaccgcggcccgccaaagtacgaacgcgtacccagatctcagatcctgtgtgaacgctattcctgaccagtgcagccctctgccttgcaacgaagacgggtacatgagttgcaaggacggaaaagcctctttcacatgtacatgtaaacctgggtggcaaggggaaaagtgtgagttcgacattaatgaatgcaaagaccccagtaatattaatggtggttgttctcagatttgtgataacactcccggcagttatcactgctcatgcaagaatggctttgttatgctaagcaacaaaaaggactgtaaagacgttgatgagtgctcattaaagccatcaatttgtggaacagccgtgtgtaaaaacatccccggagacttcgaatgcgagtgccctgaagggtatagatacaatttaaagagcaaaagctgcgaagacatcgatgaatgtagcgagaacatgtgcgctcaactgtgtgtcaactaccctggcggctacacctgttactgtgatggaaagaaagggtttaaactggcccaggatcagaagagctgtgaggtggtatcagtctgtctccccctgaatttggatacaaagtatgaactgctgtacttggctgaacagtttgctggcgtagttctgtatctgaagtttcgcctaccagagatctcccgctttagcgccgagttcgactttaggacctatgactccgaaggggtcatcctgtatgccgaaagcattgatcattctgcctggctcctgatcgcgctgcggggtggcaagattgaggtccaacttaagaatgaacatacatccaaaattactactggtggcgacgtcatcaacaatggcttatggaatatggtgtccgttgaggagctggaacattcgatttcaatcaaaattgcaaaagaagctgttatggacattaataaaccgggtccactgtttaagccggaaaatggccttcttgagacaaaagtctactttgccggattcccccgtaaggtcgaaagtgagctgatcaaacccattaacccccgccttgacggttgtatccggtcttggaatctgatgaagcaaggtgcaagtgggattaaggaaatcatccaggaaaaacagaacaaacattgtttagtaactgtggagaagggctcatattaccctggatccgggattgctcagtttcacatcgactataacaatgtgtcgtcagctgagggatggcacgtcaacgttaccttaaacattcgcccatctacaggaaccggggtgatgcttgctttggtgagcgggaataatactgtccctttcgccgtgtctctagtggactcaacctctgaaaaatcccaggacatcctcctgtccgtggaaaacactgttatttacaggatccaagccctaagcctctgttcagaccaacaatctcacctcgagtttcgcgttaataggaacaacctggagttaagtactccactcaagatcgagactatctcgcatgaggatttgcaaaggcagcttgcagtgttagacaaagccatgaaggcgaaggtggcgacatatctggggggcctccccgacgtgcccttctcagcaacacctgtgaacgcattttacaacggctgtatggaggtcaacatcaatggggttcagctcgatctcgacgaagctatatccaaacacaacgatatccgtgcccactcgtgtccgtcagtctggaagaagaccaaaaattcatag

SEQ ID NO: 6764 - DNA, 2031 bp, Artificial Sequence
  derived and/or modified sequence
atgagagtattaggcggccggtgtggcgctttgcttgcttgcctcttacttgttcttccagtgtccgaagccaatttcctgtcgaagcaacaggcaagccaggttctcgtgcgaaagcgtcgagcaaactcgctcttagaagagacaaaacagggaaatctcgagcgcgagtgtattgaggaactgtgtaacaaggaggaagcaagagaagtatttgaaaatgatccagaaaccgactatttttaccctaagtaccttgtatgcctgcgctccttccagacaggcctgttcactgctgcacggcaatctaccaatgcttaccctgaccttaggagttgtgttaatgccatcccagaccagtgctcaccactcccctgcaatgaagacggatacatgtcatgtaaggacggtaaggcatcgttcacgtgtacttgcaagccgggttggcagggcgaaaaatgcgaatttgacataaatgaatgtaaggatccatccaatatcaacggaggctgctcccagatctgcgataatactccaggaagctatcattgcagttgcaaaaatgggtttgtcatgctcagtaataaaaaggactgtaaggatgtggacgaatgctcgcttaagccctcaatttgcggaaccgccgtttgtaaaaatattcccggcgacttcgaatgcgagtgccccgaaggctatcgatacaatctgaaatcaaagtcttgtgaggatattgacgaatgcagtgagaatatgtgcgcacaactatgtgttaattacccgggcggctatacctgttattgcgacgggaaaaaaggtttcaaattagcccaagaccaaaaatcctgcgaggtggttagcgtgtgtcttcccttaaacctggataccaagtacgagctcttgtaccttgcagaacaattcgccggggtcgtgctgtacttaaaatttcggctgcccgagatttccagattttctgccgagttcgacttcagaacttatgacagcgaaggcgtgattctttatgcagaaagcatagaccacagcgcctggctcctgattgccctgaggggagggaaaattgaagtacagttaaagaatgaacatacctcgaaaatcaccacgggcggagatgtcatcaataatggactgtggaatatggtaagcgtggaggaattagagcacagtataagtatcaagattgccaaggaggcggtgatggatataaataaaccgggccctctcttcaaacccgaaaacgggctacttgagacaaaagtttacttcgctggcttcccccgcaaagttgagtctgaactaatcaaacccattaacccccggctcgatggctgcattaggtcatggaacctaatgaaacagggcgcgtcaggtatcaaagaaattattcaggagaagcagaacaaacattgtctagtcaccgttgagaaaggaagctattatcctggatcaggcatcgctcagttccacatcgactacaacaacgtctcatctgccgagggctggcatgtcaacgtaactctgaatattagaccatcaaccggaactggcgtcatgctggcacttgtatctggaaacaacactgtcccatttgccgtctccctcgtcgacagtacctctgagaaatcccaagacatcctcctgtcagtggagaatacggtaatctataggatccaagcattatcactatgctccgaccaacaatctcatctggagtttagggtgaaccggaataatctcgagctgagcacccctctcaagatagaaacaatctctcatgaagatctgcagagacagctagcagttcttgataaggctatgaaggcaaaagtggccacttacctaggcgggctcccagacgtcccatttagcgctactccggtcaatgcattctacaatgggtgtatggaggtcaacataaacggcgtgcagctggacttagacgaagctatttcaaaacataatgatatcagggcgcactcatgtcccagcgtgtggaaaaaaacaaaaaacagttag

SEQ ID NO: 6765 - DNA, 2031 bp, Artificial Sequence
  derived and/or modified sequence
atgagagtgctgggcggcagatgcggcgccctgctggcctgcctgctgctggtgctgcccgtgagcgaggccaacttcctgagcaagcagcaggccagccaggtgctggtgagaaagagaagagccaacagcctgctggaggagaccaagcagggcaacctggagagagagtgcatcgaggagctgtgcaacaaggaggaggccagagaggtgttcgagaacgaccccgagaccgactacttctaccccaagtacctggtgtgcctgagaagcttccagaccggcctgttcaccgccgccagacagagcaccaacgcctaccccgacctgagaagctgcgtgaacgccatccccgaccagtgcagccccctgccctgcaacgaggacggctacatgagctgcaaggacggcaaggccagcttcacctgcacctgcaagcccggctggcagggcgagaagtgcgagttcgacatcaacgagtgcaaggaccccagcaacatcaacggcggctgcagccagatctgcgacaacacccccggcagctaccactgcagctgcaagaacggcttcgtgatgctgagcaacaagaaggactgcaaggacgtggacgagtgcagcctgaagcccagcatctgcggcaccgccgtgtgcaagaacatccccggcgacttcgagtgcgagtgccccgagggctacagatacaacctgaagagcaagagctgcgaggacatcgacgagtgcagcgagaacatgtgcgcccagctgtgcgtgaactaccccggcggctacacctgctactgcgacggcaagaagggcttcaagctggcccaggaccagaagagctgcgaggtggtgagcgtgtgcctgcccctgaacctggacaccaagtacgagctgctgtacctggccgagcagttcgccggcgtggtgctgtacctgaagttcagactgcccgagatcagcagattcagcgccgagttcgacttcagaacctacgacagcgagggcgtgatcctgtacgccgagagcatcgaccacagcgcctggctgctgatcgccctgagaggcggcaagatcgaggtgcagctgaagaacgagcacaccagcaagatcaccaccggcggcgacgtgatcaacaacggcctgtggaacatggtgagcgtggaggagctggagcacagcatcagcatcaagatcgccaaggaggccgtgatggacatcaacaagcccggccccctgttcaagcccgagaacggcctgctggagaccaaggtgtacttcgccggcttccccagaaaggtggagagcgagctgatcaagcccatcaaccccagactggacggctgcatcagaagctggaacctgatgaagcagggcgccagcggcatcaaggagatcatccaggagaagcagaacaagcactgcctggtgaccgtggagaagggcagctactaccccggcagcggcatcgcccagttccacatcgactacaacaacgtgagcagcgccgagggctggcacgtgaacgtgaccctgaacatcagacccagcaccggcaccggcgtgatgctggccctggtgagcggcaacaacaccgtgcccttcgccgtgagcctggtggacagcaccagcgagaagagccaggacatcctgctgagcgtggagaacaccgtgatctacagaatccaggccctgagcctgtgcagcgaccagcagagccacctggagttcagagtgaacagaaacaacctggagctgagcacccccctgaagatcgagaccatcagccacgaggacctgcagagacagctggccgtgctggacaaggccatgaaggccaaggtggccacctacctgggcggcctgcccgacgtgcccttcagcgccacccccgtgaacgccttctacaacggctgcatggaggtgaacatcaacggcgtgcagctggacctggacgaggccatcagcaagcacaacgacatcagagcccacagctgccccagcgtgtggaagaagaccaagaacagctag

SEQ ID NO: 6766 - DNA, 1212 bp, Artificial Sequence
  derived and/or modified sequence
atgaccgccatcatcaaggagatcgtgagcagaaacaagagaagataccaggaggacggcttcgacctggacctgacctacatctaccccaacatcatcgccatgggcttccccgccgagagactggagggcgtgtacagaaacaacatcgacgacgtggtgagattcctggacagcaagcacaagaaccactacaagatctacaacctgtgcgccgagagacactacgacaccgccaagttcaactgcagagtggcccagtaccccttcgaggaccacaaccccccccagctggagctgatcaagcccttctgcgaggacctggaccagtggctgagcgaggacgacaaccacgtggccgccatccactgcaaggccggcaagggcagaaccggcgtgatgatctgcgcctacctgctgcacagaggcaagttcctgaaggcccaggaggccctggacttctacggcgaggtgagaaccagagacaagaagggcgtgaccatccccagccagagaagatacgtgtactactacagctacctgctgaagaaccacctggactacagacccgtggccctgctgttccacaagatgatgttcgagaccatccccatgttcagcggcggcacctgcaacccccagttcgtggtgtgccagctgaaggtgaagatctacagcagcaacagcggccccaccagaagagaggacaagttcatgtacttcgagttcccccagcccctgcccgtgtgcggcgacatcaaggtggagttcttccacaagcagaacaagatgctgaagaaggacaagatgttccacttctgggtgaacaccttcttcatccccggccccgaggagaccagcgagaaggtggagaacggcagcctgtgcgaccaggagatcgacagcatctgcagcatcgagagagccgacaacgacaaggagtacctggtgctgaccctgaccaagaacgacctggacaaggccaacaaggacaaggccaacagatacttcagccccaacttcaaggtgaagctgtacttcaccaagaccgtggaggagcccagcaaccccgaggccagcagcagcaccagcgtgacccccgacgtgagcgacaacgagcccgaccactacagatacagcgacaccaccgacagcgaccccgagaacgagcccttcgacgaggaccagcacacccagatcaccaaggtgtag

SEQ ID NO: 6767 - DNA, 1212 bp, Artificial Sequence
  derived and/or modified sequence
atgacagccattattaaggagatcgtgtcccggaataagcgccggtatcaggaggacggtttcgatctggatctaacctacatttatcccaacattatcgccatgggctttcccgcagaacgattagagggcgtataccgaaacaatatcgacgatgtcgttcgctttctggattctaagcataagaaccactacaagatatacaatctttgcgccgaacgccactatgataccgctaagttcaattgcagagtcgcacagtatccttttgaggaccacaaccctcctcaactggagttaattaaaccattttgcgaggatctagaccagtggctctctgaggacgacaatcatgtggccgccatacattgcaaggctggcaagggacgcacgggagtaatgatctgtgcgtacttgttacacaggggaaagtttttaaaagcccaggaggctttggacttttacggggaggtacgcacaagagacaagaagggggtgaccattccaagccagagaaggtatgtctactattacagctacctcctgaagaaccacctagattataggcctgtcgcccttctttttcataaaatgatgtttgagaccatcccaatgttctccggaggaacttgcaatccgcagtttgttgtatgtcaattgaaagtcaagatctatagtagcaactccggacctacacgtagagaggataagttcatgtattttgaattcccacagccgctgccagtgtgtggtgatattaaggtggaattcttccataagcagaacaaaatgttaaagaaggataagatgttccatttctgggtgaacacattcttcatccccggccctgaggaaacgagtgagaaagtcgaaaacggcagtttgtgcgaccaggaaatcgacagcatttgttcgattgagagagccgacaacgataaggagtatcttgtgctcaccttaaccaagaatgatctagataaagccaataaggataaggcgaaccggtatttctcccctaatttcaaggtgaagctgtattttacgaagaccgtagaagaaccatccaaccccgaggccagttccagtacaagcgtcacgcctgacgtatccgacaacgagcccgatcactatcgctattcggacacaactgactccgacccggagaatgagccttttgatgaagaccagcacacgcagatcacaaaagtgtag

SEQ ID NO: 6768 - DNA, 1212 bp, Artificial Sequence
  derived and/or modified sequence
atgacagccatcatcaaggagatcgtgtccaggaacaagaggcgctaccaggaggatggctttgacctggacctgacctacatctaccccaacatcatcgccatgggcttccctgctgagcggctggagggcgtgtacagaaacaacattgatgatgtggtgcgcttcctggacagcaagcacaagaaccactacaagatctacaacctgtgtgccgagcggcactatgacacagccaagttcaactgccgggtggcccagtacccctttgaggaccacaaccccccccagctggagctgatcaagcccttctgtgaggacctggaccagtggctgtctgaagatgacaaccacgtggccgccatccactgcaaggccggcaagggccgcactggagtgatgatctgtgcctacctgctgcaccggggcaagttcctgaaggcccaggaggccctggacttctatggagaggtgaggacccgggacaagaagggcgtgaccatccccagccagaggcgctacgtgtactactacagctacctgctgaagaaccacctggactacagacctgtggccctgctcttccacaagatgatgtttgagaccatccccatgttttctgggggcacctgcaacccccagtttgtggtgtgccagctgaaggtgaagatctacagcagcaacagcggccccacccggcgggaggacaagttcatgtactttgagttcccccagcccctgcctgtgtgtggggacatcaaggtggagttcttccacaagcagaacaagatgctgaagaaggacaagatgttccacttctgggtgaacaccttcttcatccctggccctgaggagaccagcgagaaggtggagaatggcagcctgtgtgaccaggagattgacagcatctgcagcattgaaagagctgacaatgacaaggagtacctggtgctgaccctgaccaagaatgacctggacaaggccaacaaggacaaggccaaccgctacttcagccccaacttcaaggtgaagctgtacttcaccaagacagtggaggagcccagcaaccctgaggccagcagcagcacctctgtgaccccagatgtgtctgacaatgaaccagaccactaccgctacagcgacaccacagacagcgaccctgaaaatgagccctttgatgaggaccagcacacccagatcaccaaggtgtag

SEQ ID NO: 6769 - DNA, 1212 bp, Artificial Sequence
  derived and/or modified sequence
atgaccgccatcatcaaggagatcgtgagccggaacaagcggcggtaccaggaggatggctttgatctggatcttacctacatttatcccaatatcattgctatgggattcccggccgaacgcctggagggggtctaccgtaataatattgacgatgtggtgagatttctggactctaagcataaaaatcactacaagatttacaatctatgtgcggagcgacactatgataccgccaagtttaattgtagggtcgctcagtatcccttcgaggatcacaatccacctcaactcgagctgatcaaaccattctgtgaggatctggatcagtggctgagcgaggatgacaatcatgtggcggccattcactgtaaagcaggaaaaggacgcaccggcgttatgatctgcgcatacctccttcaccgtgggaagtttctaaaagctcaggaagcacttgacttttacggcgaagtgaggacacgtgataagaagggggtgaccatcccatctcaacggcgctacgtgtattattacagctatttgctgaaaaaccacctggactatagaccggtcgccctgctgtttcacaaaatgatgttcgaaactatcccaatgttttccggtggcacttgcaacccccagttcgtggtgtgccagctgaaagtgaagatctactcctccaacagcggtcccactcgcagggaagacaagtttatgtacttcgaatttccgcagccactccccgtgtgtggggacataaaggtcgagttcttccataagcaaaataagatgttaaaaaaagataaaatgttccacttttgggtcaacacgttctttattcccggcccagaggaaaccagcgagaaggtagaaaacgggtccctttgcgaccaagaaattgattccatttgctcaatcgagagggccgacaacgacaaagagtatttggttctgactctgaccaaaaatgatctcgataaggccaacaaggacaaagccaaccgctactttagtcctaatttcaaagtgaagctgtactttacaaagactgttgaggaaccctcaaacccagaagctagttctagcaccagcgtaacccctgatgtgtccgacaacgaacctgaccactacaggtactctgataccactgactccgatcctgaaaatgagccgtttgacgaggatcagcatacccaaatcacgaaggtttag

SEQ ID NO: 6770 - DNA, 1212 bp, Artificial Sequence
  derived and/or modified sequence
atgaccgccatcatcaaggagatcgtgagtaggaataagagacggtatcaggaagatggcttcgacctcgacctgacatatatatatcccaatataatcgccatgggtttccctgccgaacgcctggagggtgtgtaccgcaataacatagacgatgtcgttagattcctagactctaagcataaaaaccactacaaaatctacaatctgtgcgcagagcggcactacgacacagcgaaattcaactgccgcgttgcgcagtatccatttgaagaccacaaccccccacagctggaactgatcaagccattttgtgaagacctggaccagtggttgtcagaggacgataatcacgttgccgcaattcactgcaaagcaggcaaaggtcgcactggcgtcatgatttgtgcttacctgctgcacagaggcaagttcctgaaggcacaggaggcactggacttttacggcgaagtgcgcacacgcgacaaaaagggagttaccatcccaagccagaggcgatatgtgtattactactcatatctgcttaaaaatcaccttgactatcggcctgtcgcacttctgtttcataagatgatgtttgaaactatacccatgttctcagggggaacctgtaacccgcagttcgtcgtgtgccagctgaaagtgaagatttattcttcaaactcgggtccaacgagacgcgaagataagtttatgtatttcgagtttccacagccgttacctgtgtgcggggacatcaaagtcgaattctttcataaacagaacaaaatgctgaagaaggataagatgtttcatttttgggttaacacattctttattccgggaccggaggaaacatccgaaaaagtcgaaaatggaagcctctgcgatcaggagatagattctatttgttccatcgagagagcagataacgacaaagaatacctcgtactgacactgaccaaaaatgatctggataaggctaacaaggacaaagccaaccgttacttctctccgaattttaaagtgaaactctatttcacgaagaccgttgaggagccatccaaccctgaggcaagcagcagcacgagcgtcacccctgacgtctctgataatgaacccgaccattaccgctatagtgacactacggacagcgatcccgaaaatgaaccttttgacgaggaccaacacacccagattacaaaggtgtag

SEQ ID NO: 6771 - protein, 115 aa, Artificial Sequence
  derived and/or modified sequence
MIPAKDMAKVMIVMLAICFLTKSDGKSVKKRSVSEIQLMHNLGKHLNSMERVEWLRKKLQDVHNFVALGAPLAPRDAGSQRPRKKEDNVLVESHEKSLGEADKADVNVLTKAKSQ

SEQ ID NO: 6772 - DNA, 348 bp, Artificial Sequence
  derived and/or modified sequence
atgatccccgccaaggacatggccaaggtgatgatcgtgatgctggccatctgcttcctgaccaagagcgacggcaagagcgtgaagaagagaagcgtgagcgagatccagctgatgcacaacctgggcaagcacctgaacagcatggagagagtggagtggctgagaaagaagctgcaggacgtgcacaacttcgtggccctgggcgcccccctggcccccagagacgccggcagccagagacccagaaagaaggaggacaacgtgctggtggagagccacgagaagagcctgggcgaggccgacaaggccgacgtgaacgtgctgaccaaggccaagagccagtag

SEQ ID NO: 6773 - DNA, 348 bp, Artificial Sequence
  derived and/or modified sequence
atgatccctgccaaggatatggctaaggtcatgatcgttatgctggctatttgcttcctgacaaagtctgatgggaaaagcgtcaaaaagcgcagtgtaagtgaaattcagctaatgcataatctggggaaacatcttaattccatggagcgcgtcgagtggctgaggaaaaaattgcaagatgtgcataattttgtcgccctcggcgctcctctggcacccagagatgctggatctcagcggccacgcaaaaaagaggacaatgtgctggtcgaaagccatgaaaagtcattgggtgaagccgacaaagccgatgttaatgtgctgacaaaggcaaaaagccaatag

SEQ ID NO: 6774 - DNA, 348 bp, Artificial Sequence
  derived and/or modified sequence
atgatacccgcaaaagatatggccaaagtaatgatcgttatgttagctatttgctttttaacaaagagcgatgggaagtcagtcaaaaagcgctctgtgagtgagattcagttgatgcacaatctcggcaagcaccttaactcaatggagcgagtagagtggttgaggaagaagctgcaggacgtccacaacttcgtcgccctaggggccccactggccccccgtgatgccggttctcagcggccccggaaaaaagaggataatgtgctagtcgagagccatgaaaaatctttaggcgaggcagataaagcggacgtgaacgtcctgacaaaggcgaagtcgcagtag

SEQ ID NO: 6775 - DNA, 348 bp, Artificial Sequence
  derived and/or modified sequence
atgatcccagccaaggacatggccaaggtgatgattgtgatgctggccatctgcttcctgaccaagagtgatggcaagtctgtgaagaagaggtctgtgtctgagatccagctgatgcacaacctgggcaagcacctgaacagcatggagcgggtggagtggctgaggaagaagctgcaggatgtgcacaactttgtggccctgggcgcccccctggcccccagagatgctggcagccagaggcccaggaagaaggaggacaacgtgctggtggagagccatgagaagagcctgggggaggccgacaaggcagatgtgaatgtgctgaccaaggccaagagccagtag

SEQ ID NO: 6776 - DNA, 348 bp, Artificial Sequence
  derived and/or modified sequence
atgatccccgccaaggacatggccaaggtgatgatcgtgatgctggcgatctgctttctaacgaagtcagatggtaagtcagttaagaagaggtctgtgtctgaaatccagctcatgcataatctggggaagcacctgaattcgatggaacgggtcgagtggctgcgcaagaagctgcaggacgttcataatttcgtggctttaggtgctccgctggcacctcgggacgccgggtcccaacggccgagaaaaaaggaagacaacgtccttgtcgaaagccacgaaaagagcttaggggaggccgataaagccgacgtgaacgtgcttaccaaggccaaatctcaatag

SEQ ID NO: 6777 - DNA, 348 bp, Artificial Sequence
  derived and/or modified sequence
atgatccccgccaaggacatggccaaggtgatgatcgtgatgctggccatctgtttcctgaccaagagtgacggcaagtcagtgaagaagcgaagcgtgtccgagattcagctcatgcacaatctgggcaagcacttgaacagcatggaaagggtcgaatggttgaggaaaaagctccaagatgtgcacaattttgtggcgctgggggctcctctcgccccccgtgacgcaggctctcagcgccctcgtaagaaagaggataacgtactcgtggaatctcacgagaagtcgctgggcgaggccgataaagcagacgtgaatgtcctgaccaaagccaagtctcaatag

SEQ ID NO: 6778 - DNA, 348 bp, Artificial Sequence
  derived and/or modified sequence
atgatccccgctaaagatatggctaaggtaatgattgtaatgcttgccatttgttttctgaccaaaagcgacggcaagtccgttaagaaaagatcagtctctgaaattcagctcatgcataatctgggtaagcatctgaattccatggagcgagtggagtggctgcgaaagaaattacaggatgtccacaatttcgtggccctcggggcacccctggccccaagagacgccggtagccagcgaccccgtaaaaaggaagataatgtgttggttgagtctcacgagaaaagccttggcgaggcggacaaagctgacgtcaacgtcctaacgaaggccaaatcccagtag

SEQ ID NO: 6779 - DNA, 348 bp, Artificial Sequence
  derived and/or modified sequence
atgattcccgctaaggacatggcgaaggtaatgatcgtgatgcttgctatatgctttcttacaaagtctgatggaaagtcagtgaaaaaacggagcgtgtctgaaatccagctgatgcacaatctcggcaagcaccttaattcaatggagcgcgtagagtggttacgcaagaagctccaagacgtgcataacttcgtggcattgggcgctccactggcgcctcgtgatgctggcagccagcgacccaggaaaaaggaagataatgtactggtagaatcacatgaaaaatcattaggagaggcggataaggccgatgtaaatgttctgactaaagccaagagccagtag

SEQ ID NO: 6780 - DNA, 348 bp, Artificial Sequence
  derived and/or modified sequence
atgatccccgccaaagacatggccaaggtcatgatcgtgatgcttgcaatatgttttctaaccaagtccgacgggaagtccgtgaaaaaaaggtctgttagcgaaatccagcttatgcacaatctcgggaagcacttgaatagcatggagagagttgaatggttgaggaagaagctccaggacgtgcataattttgtagctctcggcgcccctctcgccccacgggacgctggcagccaacgccccagaaaaaaagaggataacgttcttgtggagagtcatgaaaagagcctcggggaagcagacaaagctgacgtcaacgtcttaacaaaagccaagagccagtag

SEQ ID NO: 6781 - DNA, 348 bp, Artificial Sequence
  derived and/or modified sequence
atgattcccgcgaaggatatggccaaggtaatgatcgtgatgctggcaatttgtttcctcaccaagtctgatgggaagagtgtaaagaaacggtctgtttctgagattcagctgatgcataatctgggcaaacacctgaattctatggaacgcgttgaatggcttcggaagaaactccaagatgtccacaatttcgttgcgttaggcgcacccttagctcctcgagatgctggaagccagaggccacggaagaaagaagataacgtgctggtggagtctcatgagaaatcactgggcgaagcggataaggcagatgtaaatgtgttgaccaaagccaagagtcaatag

SEQ ID NO: 6782 - DNA, 348 bp, Artificial Sequence
  derived and/or modified sequence
atgatcccagcgaaggacatggcaaaggtgatgatcgtcatgctagcaatatgtttcttgacaaagagtgacggcaagtcagtgaagaaaagatcggtcagcgagattcagttaatgcacaacctcggcaagcatctgaatagtatggagagggtggaatggttacgaaagaaactccaggacgttcataacttcgtggcccttggtgcaccactcgccccgcgggatgctggttctcagaggccgcggaaaaaggaagataatgtactcgtagagtcgcacgaaaagagcctaggggaggccgataaagcagatgttaacgtccttacgaaagccaaatctcagtag

SEQ ID NO: 6783 - DNA, 348 bp, Artificial Sequence
  derived and/or modified sequence
atgattcccgcgaaggatatggccaaggtaatgatcgtgatgctggcaatttgtttcctcaccaagtctgatgggaagagtgtaaagaaacggtctgtttctgagattcagctgatgcataatctgggcaaacacctgaattctatggaacgcgttgaatggcttcggaagaaactccaagatgtccacaatttcgttgcgttaggcgcacccttagctcctcgagatgctggaagccagaggccacggaagaaagaagataacgtgctggtggagtctcatgagaaatcactgggcgaagctgataaggctgacgtaaatgtactcacaaaagcaaaatctcaatag

SEQ ID NO: 6784 - RNA, 348 nt, Artificial Sequence
  derived and/or modified sequence
augauccccgccaaagacauggccaaggucaugaucgugaugcuugcaauauguuuucuaaccaaguccgacgggaaguccgugaaaaaaaggucuguuagcgaaauccagcuuaugcacaaucucgggaagcacuugaauagcauggagagaguugaaugguugaggaagaagcuccaggacgugcauaauuuuguagcucucggcgccccucucgccccacgggacgcuggcagccaacgccccagaaaaaaagaggauaacguucuuguggagagucaugaaaagagccucggggaagcagacaaagcugacgucaacgucuuaacaaaagccaagagccaguag

SEQ ID NO: 6785 - RNA, 348 nt, Artificial Sequence
  derived and/or modified sequence
augauucccgcgaaggauauggccaagguaaugaucgugaugcuggcaauuuguuuccucaccaagucugaugggaagaguguaaagaaacggucuguuucugagauucagcugaugcauaaucugggcaaacaccugaauucuauggaacgcguugaauggcuucggaagaaacuccaagauguccacaauuucguugcguuaggcgcacccuuagcuccucgagaugcuggaagccagaggccacggaagaaagaagauaacgugcugguggagucucaugagaaaucacugggcgaagcggauaaggcagauguaaauguguugaccaaagccaagagucaauag

SEQ ID NO: 6786 - RNA, 348 nt, Artificial Sequence
  derived and/or modified sequence
augaucccagcgaaggacauggcaaaggugaugaucgucaugcuagcaauauguuucuugacaaagagugacggcaagucagugaagaaaagaucggucagcgagauucaguuaaugcacaaccucggcaagcaucugaauaguauggagaggguggaaugguuacgaaagaaacuccaggacguucauaacuucguggcccuuggugcaccacucgccccgcgggaugcugguucucagaggccgcggaaaaaggaagauaauguacucguagagucgcacgaaaagagccuaggggaggccgauaaagcagauguuaacguccuuacgaaagccaaaucucaguag

SEQ ID NO: 6787 - RNA, 348 nt, Artificial Sequence
  derived and/or modified sequence
augauucccgcgaaggauauggccaagguaaugaucgugaugcuggcaauuuguuuccucaccaagucugaugggaagaguguaaagaaacggucuguuucugagauucagcugaugcauaaucugggcaaacaccugaauucuauggaacgcguugaauggcuucggaagaaacuccaagauguccacaauuucguugcguuaggcgcacccuuagcuccucgagaugcuggaagccagaggccacggaagaaagaagauaacgugcugguggagucucaugagaaaucacugggcgaagcugauaaggcugacguaaauguacucacaaaagcaaaaucucaauag

SEQ ID NO: 6788 - protein, 593 aa, Artificial Sequence
  derived and/or modified sequence
MGTARIAPGLALLLCCPVLSSAYALVDADDVMTKEEQIFLLHRAQAQCEKRLKEVLQRPASIMESDKGWTSASTSGKPRKDKASGKLYPESEEDKEAPTGSRYRGRPCLPEWDHILCWPLGAPGEVVAVPCPDYIYDFNHKGHAYRRCDRNGSWELVPGHNRTWANYSECVKFLTNETREREVFDRLGMIYTVGYSVSLASLTVAVLILAYFRRLHCTRNYIHMHLFLSFMLRAVSIFVKDAVLYSGATLDEAERLTEEELRAIAQAPPPPATAAAGYAGCRVAVTFFLYFLATNYYWILVEGLYLHSLIFMAFFSEKKYLWGFTVFGWGLPAVFVAVWVSVRATLANTGCWDLSSGNKKWIIQVPILASIVLNFILFINIVRVLATKLRETNAGRCDTRQQYRKLLKSTLVLMPLFGVHYIVFMATPYTEVSGTLWQVQMHYEMLFNSFQGFFVAIIYCFCNGEVQAEIKKSWSRWTLALDFKRKARSGSSSYSYGPMVSHTSVTNVGPRVGLGLPLSPRLLPTATTNGHPQLPGHAKPGTPALETLETTPPAMAAPKDDGFLNGSCSGLDEEASGPERPPALLQEEWETVM

SEQ ID NO: 6789 - protein, 527 aa, Artificial Sequence
  derived and/or modified sequence
MGTARIAPGLALLLCCPVLSSAYALVDADDVMTKEEQIFLLHRAQAQCEKRLKEVLQRPASIMESDKGWTSASTSGKPRKDKASGKLYPESEEDKEAPTGSRYRGRPCLPEWDHILCWPLGAPGEVVAVPCPDYIYDFNHKGHAYRRCDRNGSWELVPGHNRTWANYSECVKFLTNETREREVFDRLGMIYTVGYSVSLASLTVAVLILAYFRRLHCTRNYIHMHLFLSFMLRAVSIFVKDAVLYSGATLDEAERLTEEELRAIAQAPPPPATAAAGYAGCRVAVTFFLYFLATNYYWILVEGLYLHSLIFMAFFSEKKYLWGFTVFGWGLPAVFVAVWVSVRATLANTGCWDLSSGNKKWIIQVPILASIVLNFILFINIVRVLATKLRETNAGRCDTRQQYRKLLKSTLVLMPLFGVHYIVFMATPYTEVSGTLWQVQMHYEMLFNSFQGFFVAIIYCFCNGEVQAEIKKSWSRWTLALDFKRKARSGSSSYSYGPMVSHTSVTNVGPRVGLGLPLSPRLLPTAT

SEQ ID NO: 6790 - protein, 333 aa, Artificial Sequence
  derived and/or modified sequence
MGTARIAPGLALLLCCPVLSSAYALVDADDVMTKEEQIFLLHRAQAQCEKRLKEVLQRPASIMESDKGWTSASTSGKPRKDKASGKLYPESEEDKEAPTGSRYRGRPCLPEWDHILCWPLGAPGEVVAVPCPDYIYDFNHKGHAYRRCDRNGSWELVPGHNRTWANYSECVKFLTNETREREVFDRLGMIYTVGYSVSLASLTVAVLILAYFRRLHCTRNYIHMHLFLSFMLRAVSIFVKDAVLYSGATLDEAERLTEEELRAIAQAPPPPATAAAGYAGCRVAVTFFLYFLATNYYWILVEGLYLHSLIFMAFFSEKKYLWGFTVFGWGAGT

SEQ ID NO: 6791 - DNA, 1782 bp, Artificial Sequence
  derived and/or modified sequence
atgggcaccgccagaatcgcccccggcctggccctgctgctgtgctgccccgtgctgagcagcgcctacgccctggtggacgccgacgacgtgatgaccaaggaggagcagatcttcctgctgcacagagcccaggcccagtgcgagaagagactgaaggaggtgctgcagagacccgccagcatcatggagagcgacaagggctggaccagcgccagcaccagcggcaagcccagaaaggacaaggccagcggcaagctgtaccccgagagcgaggaggacaaggaggcccccaccggcagcagatacagaggcagaccctgcctgcccgagtgggaccacatcctgtgctggcccctgggcgcccccggcgaggtggtggccgtgccctgccccgactacatctacgacttcaaccacaagggccacgcctacagaagatgcgacagaaacggcagctgggagctggtgcccggccacaacagaacctgggccaactacagcgagtgcgtgaagttcctgaccaacgagaccagagagagagaggtgttcgacagactgggcatgatctacaccgtgggctacagcgtgagcctggccagcctgaccgtggccgtgctgatcctggcctacttcagaagactgcactgcaccagaaactacatccacatgcacctgttcctgagcttcatgctgagagccgtgagcatcttcgtgaaggacgccgtgctgtacagcggcgccaccctggacgaggccgagagactgaccgaggaggagctgagagccatcgcccaggccccccccccccccgccaccgccgccgccggctacgccggctgcagagtggccgtgaccttcttcctgtacttcctggccaccaactactactggatcctggtggagggcctgtacctgcacagcctgatcttcatggccttcttcagcgagaagaagtacctgtggggcttcaccgtgttcggctggggcctgcccgccgtgttcgtggccgtgtgggtgagcgtgagagccaccctggccaacaccggctgctgggacctgagcagcggcaacaagaagtggatcatccaggtgcccatcctggccagcatcgtgctgaacttcatcctgttcatcaacatcgtgagagtgctggccaccaagctgagagagaccaacgccggcagatgcgacaccagacagcagtacagaaagctgctgaagagcaccctggtgctgatgcccctgttcggcgtgcactacatcgtgttcatggccaccccctacaccgaggtgagcggcaccctgtggcaggtgcagatgcactacgagatgctgttcaacagcttccagggcttcttcgtggccatcatctactgcttctgcaacggcgaggtgcaggccgagatcaagaagagctggagcagatggaccctggccctggacttcaagagaaaggccagaagcggcagcagcagctacagctacggccccatggtgagccacaccagcgtgaccaacgtgggccccagagtgggcctgggcctgcccctgagccccagactgctgcccaccgccaccaccaacggccacccccagctgcccggccacgccaagcccggcacccccgccctggagaccctggagaccaccccccccgccatggccgcccccaaggacgacggcttcctgaacggcagctgcagcggcctggacgaggaggccagcggccccgagagaccccccgccctgctgcaggaggagtgggagaccgtgatgtag

SEQ ID NO: 6792 - DNA, 1584 bp, Artificial Sequence
  derived and/or modified sequence
atgggcaccgccagaatcgcccccggcctggccctgctgctgtgctgccccgtgctgagcagcgcctacgccctggtggacgccgacgacgtgatgaccaaggaggagcagatcttcctgctgcacagagcccaggcccagtgcgagaagagactgaaggaggtgctgcagagacccgccagcatcatggagagcgacaagggctggaccagcgccagcaccagcggcaagcccagaaaggacaaggccagcggcaagctgtaccccgagagcgaggaggacaaggaggcccccaccggcagcagatacagaggcagaccctgcctgcccgagtgggaccacatcctgtgctggcccctgggcgcccccggcgaggtggtggccgtgccctgccccgactacatctacgacttcaaccacaagggccacgcctacagaagatgcgacagaaacggcagctgggagctggtgcccggccacaacagaacctgggccaactacagcgagtgcgtgaagttcctgaccaacgagaccagagagagagaggtgttcgacagactgggcatgatctacaccgtgggctacagcgtgagcctggccagcctgaccgtggccgtgctgatcctggcctacttcagaagactgcactgcaccagaaactacatccacatgcacctgttcctgagcttcatgctgagagccgtgagcatcttcgtgaaggacgccgtgctgtacagcggcgccaccctggacgaggccgagagactgaccgaggaggagctgagagccatcgcccaggccccccccccccccgccaccgccgccgccggctacgccggctgcagagtggccgtgaccttcttcctgtacttcctggccaccaactactactggatcctggtggagggcctgtacctgcacagcctgatcttcatggccttcttcagcgagaagaagtacctgtggggcttcaccgtgttcggctggggcctgcccgccgtgttcgtggccgtgtgggtgagcgtgagagccaccctggccaacaccggctgctgggacctgagcagcggcaacaagaagtggatcatccaggtgcccatcctggccagcatcgtgctgaacttcatcctgttcatcaacatcgtgagagtgctggccaccaagctgagagagaccaacgccggcagatgcgacaccagacagcagtacagaaagctgctgaagagcaccctggtgctgatgcccctgttcggcgtgcactacatcgtgttcatggccaccccctacaccgaggtgagcggcaccctgtggcaggtgcagatgcactacgagatgctgttcaacagcttccagggcttcttcgtggccatcatctactgcttctgcaacggcgaggtgcaggccgagatcaagaagagctggagcagatggaccctggccctggacttcaagagaaaggccagaagcggcagcagcagctacagctacggccccatggtgagccacaccagcgtgaccaacgtgggccccagagtgggcctgggcctgcccctgagccccagactgctgcccaccgccacctag

SEQ ID NO: 6793 - DNA, 1002 bp, Artificial Sequence
  derived and/or modified sequence
atgggcaccgccagaatcgcccccggcctggccctgctgctgtgctgccccgtgctgagcagcgcctacgccctggtggacgccgacgacgtgatgaccaaggaggagcagatcttcctgctgcacagagcccaggcccagtgcgagaagagactgaaggaggtgctgcagagacccgccagcatcatggagagcgacaagggctggaccagcgccagcaccagcggcaagcccagaaaggacaaggccagcggcaagctgtaccccgagagcgaggaggacaaggaggcccccaccggcagcagatacagaggcagaccctgcctgcccgagtgggaccacatcctgtgctggcccctgggcgcccccggcgaggtggtggccgtgccctgccccgactacatctacgacttcaaccacaagggccacgcctacagaagatgcgacagaaacggcagctgggagctggtgcccggccacaacagaacctgggccaactacagcgagtgcgtgaagttcctgaccaacgagaccagagagagagaggtgttcgacagactgggcatgatctacaccgtgggctacagcgtgagcctggccagcctgaccgtggccgtgctgatcctggcctacttcagaagactgcactgcaccagaaactacatccacatgcacctgttcctgagcttcatgctgagagccgtgagcatcttcgtgaaggacgccgtgctgtacagcggcgccaccctggacgaggccgagagactgaccgaggaggagctgagagccatcgcccaggccccccccccccccgccaccgccgccgccggctacgccggctgcagagtggccgtgaccttcttcctgtacttcctggccaccaactactactggatcctggtggagggcctgtacctgcacagcctgatcttcatggccttcttcagcgagaagaagtacctgtggggcttcaccgtgttcggctggggcgccggcacctag

SEQ ID NO: 6794 - DNA, 1782 bp, Artificial Sequence
  derived and/or modified sequence
atgggaactgcccggatagcacccggcttggcactgctgctgtgctgtcccgttttgtcaagtgcctacgcactggtggatgccgacgatgtaatgacaaaagaggagcaaatcttccttctccaccgtgcccaggctcagtgtgagaagaggttgaaggaggtgctacagaggcctgcctccatcatggaatctgataaaggctggacctccgcaagcacatccggcaagcctagaaaggacaaggcctccggcaaactctatcctgaaagcgaagaggataaggaggcccccaccggttccagataccgagggcgtccatgcctacccgaatgggaccacatactgtgctggccactgggcgcacccggggaagtggtcgcagtgccttgcccagattatatttatgatttcaatcataaggggcatgcctacaggaggtgtgacaggaacggaagctgggagttagtcccagggcataaccgcacctgggctaactattccgagtgcgttaagttcctgactaacgaaactcgcgaaagggaagtatttgacagattgggcatgatctacaccgtcggctacagcgtgagtctggcctccctaaccgtggccgtgctgatcttggcctacttcagacgactgcattgcacgagaaactatatacacatgcatctttttctgtccttcatgcttcgggccgtcagcatctttgttaaggatgctgtgctatactcgggcgcaacgctggacgaggccgaacgtcttactgaagaagaactaagagcaatcgcccaagccccacccccgcccgctacggccgccgccggctatgcaggttgcagggtagcagtcacattttttctgtacttcttggcaactaattactactggatcttggttgagggtctgtacttgcattctttgatcttcatggccttcttcagcgagaagaaatatttatgggggtttacagtgttcggatggggtttgccagcggtatttgtggccgtgtgggtttccgtgcgggccaccctagccaacacagggtgctgggatctttcctcgggcaacaaaaaatggatcattcaggttcctatactcgccagtatcgtcctgaactttattctgtttattaacatcgtgcgagtcctggcaacaaagctgcgcgagactaacgccggcagatgcgacacaagacagcagtatagaaaactgttgaaaagtactcttgtgctgatgcctcttttcggggttcactacatcgtatttatggccacgccctataccgaagtcagcggcacactgtggcaagtgcagatgcactacgaaatgttgttcaactcctttcagggattttttgtggccatcatatattgcttctgcaatggagaggtccaggccgagataaagaagtcctggtcccgttggacactagcactggactttaaaagaaaagcccgctcaggtagtagctcatacagctacggacctatggtgtcacatacgtcagtgactaatgtcggcccacgggtaggactggggctgcccctgtccccgaggcttctgcccaccgcgacgactaatggccaccctcagctgcccggacatgctaaacctggaacgcccgcactggagaccctggagaccactcctcctgccatggccgcacccaaagatgatggatttcttaacgggagctgctcagggctcgatgaggaagcctccggaccggaacgtcctccggcgctgctgcaggaggagtgggagactgtgatgtag

SEQ ID NO: 6795 - DNA, 1782 bp, Artificial Sequence
  derived and/or modified sequence
atgggcactgctaggattgcacctggactggccttgttgctttgttgcccagtattatcttcagcctacgcgttagtggatgcggacgacgtaatgacaaaggaagagcagatcttcttgctgcatcgtgcccaagctcagtgcgagaagaggctcaaagaggtgctgcagcgcccggcctccatcatggagtcggacaaaggctggacaagtgcatctacaagtggtaagccaaggaaagataaggcgtcaggcaaactgtaccccgagtctgaagaggacaaggaggctcccaccgggtcccgatacagaggccggccttgcctcccagagtgggaccatatactttgctggccgctgggagcaccaggcgaggttgtagcagtgccgtgccctgactatatttatgatttcaaccataagggtcatgcctataggcggtgtgaccgcaacgggtcctgggagctggtgcccgggcataaccgcacctgggctaactactcagaatgcgtcaagtttctcactaacgaaacccgagagagagaggtgtttgacaggctgggtatgatatatactgttggttatagtgtgagcctggcaagccttacagtcgcagtcctgatactagcttattttagacggcttcattgtacacgcaactacattcacatgcatctgtttctgtccttcatgctacgggcggtgagcatttttgtgaaagatgcagtcttgtattctggggccaccctggatgaagccgagcggctcacagaagaagagctgagagccattgcccaggccccaccccccccagcgactgcagctgccggatatgccgggtgccgcgttgccgtaaccttctttttatacttcctagcgacaaattactactggatcctcgttgaaggcctatacctccattcacttatctttatggccttcttcagcgagaagaaatacctctgggggtttacagtctttggatggggacttcccgctgtcttcgtcgcagtttgggtctctgtccgcgccaccttggccaacacaggctgctgggacctttcctccgggaataagaaatggattattcaggtgcctatcctcgcctccattgtcttaaactttatactcttcattaacatcgtccgcgtgcttgccaccaagctccgtgaaaccaacgccggacgctgcgatactaggcaacaatatcgcaaactgctcaaaagcactctggtgcttatgcctttgttcggggtccattacatagtcttcatggccaccccatatacagaagtctcagggaccttatggcaggttcagatgcattatgagatgctctttaattcctttcagggctttttcgtagcaatcatttactgtttctgcaacggggaggtgcaggctgagatcaaaaagtcctggtctcgatggacgcttgccctagatttcaagcgcaaggctcgctcaggctcttcatcttatagctatgggcctatggtgtcgcacaccagcgtgacgaacgtgggcccccgggttggcctgggactccctttgagtccccggctgctcccgacagcaaccactaacggccatccccagctcccaggccacgccaaacctggaaccccagcccttgaaacactcgaaaccacacctcctgccatggctgcgcccaaggatgacggtttcctgaacggcagctgctctggtttggatgaagaggcatccggaccggagcgccctccggcccttcttcaggaggaatgggaaaccgtgatgtag

SEQ ID NO: 6796 - DNA, 1584 bp, Artificial Sequence
  derived and/or modified sequence
atgggcactgccaggatcgcacctggcctggctctgctgctgtgctgcccagtcttatctagcgcctacgccctcgtcgatgccgacgatgttatgacgaaggaagaacagatatttctgctgcatcgagcccaggcccaatgcgagaaaaggctgaaggaggtgctgcagcgtcccgcttcgatcatggagtcggacaagggatggacttccgcctctaccagtggaaaaccgaggaaagataaagccagtgggaagctgtaccccgaaagtgaagaagacaaagaggctcccactgggagccgctatcgcggtagaccttgtctgccagagtgggaccacatattgtgctggccgttgggcgcccctggtgaagtggtggccgtgccatgccctgattatatctacgatttcaaccacaaaggtcacgcctatcggcgctgcgataggaacgggtcgtgggagctcgttcctgggcacaaccggacttgggccaactattccgagtgcgtcaaatttcttaccaacgagactcgcgaaagagaggtgttcgatcggctcggcatgatttacactgtaggttactctgtatcattagcgtccttaacagtggcggtgctgatcctggcctactttagacgtctgcattgcactcgcaactacattcacatgcacctgtttttgagcttcatgctccgcgctgtgagtattttcgtaaaggatgctgtgctgtattcaggagccacccttgatgaagccgaacggctgacggaggaggaacttagagcaattgcccaggctccccctcctcccgccacagcggcagccggctacgctgggtgccgcgtagccgtcacctttttcctttacttcctggccactaactactattggattctggtggagggactctaccttcactctttgatcttcatggctttttttagcgagaaaaagtatttgtggggcttcacagtgtttggctgggggctcccggccgtgtttgttgctgtctgggtctcagttcgggcaacattggctaacaccggttgttgggacctgagtagcggaaataagaaatggattatccaagttcccattcttgcaagcatagtattgaatttcatcctgtttattaacattgttagggtactggccacaaagctccgggaaactaacgcgggtcgttgtgacacacgccaacaataccgaaaactcctgaagtccaccctggtgctgatgccgctgtttggcgtacactatattgtcttcatggccaccccttacacggaggtcagcgggactctgtggcaggtgcagatgcactacgaaatgctgttcaactcctttcagggctttttcgttgccataatatattgtttctgcaatggtgaggtgcaggcagagattaagaagtcctggtcaagatggaccctcgccctggatttcaaacggaaggctcgaagcggttcttctagctactcctacggcccaatggtatctcacacttccgtcactaacgtgggaccacgggttggactaggcctgcctctatcacctagactgctgcccacggcaacctag

SEQ ID NO: 6797 - DNA, 1002 bp, Artificial Sequence
  derived and/or modified sequence
atgggaacagcacgaattgctcccggcctcgcattacttctatgctgcccggtcttatctagcgcctacgcactcgtggacgccgacgatgtgatgactaaggaggagcagatctttctacttcatagggctcaggcccagtgcgaaaagcggctgaaggaagtcttgcagcgacccgccagtatcatggagagcgacaagggttggacctccgcttccacatccgggaagcccagaaaggataaggccagcggcaagctctatccagaaagtgaagaagacaaggaggcgccaaccggctctcggtaccgcggacgcccctgcttgcctgaatgggaccatatactttgctggccgctaggagcgccaggagaggtggtcgctgtcccatgcccagactacatttacgatttcaaccacaaagggcatgcttaccgtcgatgcgacagaaatgggagttgggagctcgtccccgggcacaatcggacatgggctaactatagcgaatgtgtaaaattcctgactaatgaaacacgcgagcgggaggttttcgacagattgggcatgatttatacagtgggttacagtgtcagcttagctagtcttaccgtggcagtcctgatacttgcctacttccggagactgcactgcactagaaactacatacacatgcacctgttcctctcatttatgttacgcgcagtcagcatttttgtaaaggacgctgtgttgtacagcggggccacattggatgaggcggaacgcttgaccgaggaagaattgcgggccattgcccaggcacctcctcctccggccacagctgccgccggatatgctgggtgcagggtggcggtaacgtttttcttgtacttcctcgccaccaactattactggattcttgttgagggtctgtacctgcactctctcattttcatggcgtttttttctgagaaaaaatatctttggggattcaccgtttttggatggggagccggaacttag

SEQ ID NO: 6798 - DNA, 1782 bp, Artificial Sequence
  derived and/or modified sequence
atgggtacagcccgaatcgcccccggccttgcactcctgctgtgctgtccagtcctgtcctccgcgtacgccctggtcgacgctgatgatgttatgacaaaggaggagcaaattttcctgctgcaccgcgctcaggcgcagtgcgagaaacgcctgaaggaggtactccagaggcccgccagcattatggaaagtgacaagggatggacttcagcttcgacaagcggcaaaccgcgcaaggacaaagcctccgggaagctgtatcccgagtccgaggaggacaaggaggctccaaccggatctaggtatcgcgggagaccctgcctgcctgagtgggaccacattctgtgttggcctctgggagccccaggcgaagtggttgctgtgccttgtcccgattatatttatgatttcaatcacaaaggccacgcttatcgccgctgtgatagaaatggctcatgggaactcgtgcctggtcataaccgcacctgggccaactactctgaatgcgtgaagttcctaaccaatgagacccgcgagcgcgaagtctttgataggctgggcatgatttacacagtgggctattctgtgagcctggcaagtttaaccgtggctgtcctgatcctcgcatacttccgtaggttacactgtacaagaaattacattcacatgcatttattcctctcattcatgcttagagctgtcagtatattcgtgaaggacgccgtgctgtactcaggcgctaccttggacgaagccgaacgactaaccgaagaagagctgagggccatcgcccaggcccctcctccccctgctaccgcagcggcgggttacgccggctgccgggttgccgtgaccttttttctgtacttcctcgccactaattattactggatcttggtcgaggggctttacttgcacagcctcatcttcatggccttctttagcgagaaaaagtatctgtgggggtttactgttttcggctggggtctgcctgctgtgtttgtcgcagtctgggtgagcgtccgggccaccctggcgaataccggttgctgggatctgagcagcggcaacaaaaaatggattattcaggtgcccatattagcctccatagtactgaactttattctctttatcaatatagtgcgagtgctggccacaaagctgagggaaaccaatgcaggccggtgcgatactagacagcaatacagaaagcttctgaaatcaaccctcgtcctaatgccccttttcggggtacattatatagtcttcatggccactccttacacagaagtgtcaggaacattgtggcaggtccagatgcattacgagatgctctttaacagctttcaggggttcttcgtggccattatatactgtttttgcaatggtgaagtgcaggctgagattaaaaagagctggagccggtggaccctggccctggattttaaaaggaaggctcggagcggttcgtcatcttactcatacgggccgatggtgagccatacaagtgttaccaatgtcgggcctagggtgggtctgggactccctctaagcccccgactgcttcccacggcaaccacaaacggtcatccccaattacctggacatgcaaaacccgggacaccggccttggaaacgctggagactacgccgcctgcaatggcagccccaaaggatgatggcttcctgaatgggtcctgctctggccttgatgaggaagcatccggccccgaacggcctcccgcacttcttcaggaggagtgggaaactgtcatgtag

SEQ ID NO: 6799 - DNA, 1782 bp, Artificial Sequence
  derived and/or modified sequence
atgggtaccgccagaatagcacctggtttggccctacttctctgctgtcctgtgctttcatctgcatatgccctcgtagacgctgacgatgtgatgaccaaggaagagcagatatttctgctgcatagagctcaggcgcaatgcgaaaagagactcaaggaagttctccagcgccctgcttcgattatggaatccgataaagggtggactagtgccagcacatccggtaagccacgtaaggataaagcctctgggaagctgtaccccgaaagcgaggaggacaaagaagcccctacaggctctcgctacagagggagaccttgtctgcctgaatgggatcatatcttgtgttggcccctcggtgcccctggcgaggtcgtggccgtaccatgcccagactatatctacgatttcaaccataagggccacgcctatcggagatgcgaccgcaacggaagctgggagctggtgcccggacacaacagaacctgggccaactactcagaatgcgtcaagttcttaacaaacgaaaccagggaaagggaagttttcgataggttgggcatgatatacaccgtgggatacagcgtttctttggcatccctaacggtggcagttctgattcttgcatacttcagaagactgcattgtacacggaattacattcatatgcacctttttctgagctttatgcttcgagctgtttccatatttgtcaaagacgccgtactttatagtggagctactctcgatgaggctgaacggctgaccgaggaggagctccgggccatcgcgcaagcgcctccacctcccgcaactgccgccgcgggttacgctggatgtagggttgcagtcaccttttttttgtactttctggccacgaattattactggatcctagttgaaggtctgtatcttcactcattgatcttcatggcgttctttagcgagaaaaagtacctttggggctttacagtcttcgggtgggggttacctgctgtgttcgttgcagtgtgggtgtctgttcgtgcgacgctggccaacaccgggtgctgggacctcagctctgggaacaagaaatggattatccaggtgcctatcctggcaagcatagtgctgaatttcatactgttcatcaatatcgtgcgggtactggcgactaaacttagagagactaatgcaggcagatgcgacacgaggcagcagtacagaaagctcctgaaaagtaccttggtactcatgccccttttcggagtccactacatcgttttcatggccactccctacactgaagtatccggcaccctttggcaagtgcagatgcactacgaaatgctctttaattccttccagggtttcttcgtagctataatctattgcttctgtaacggtgaggtgcaagccgaaatcaaaaagtcctggtctaggtggactcttgcactggactttaagcggaaggcaagatcagggagttctagttactcgtacgggccaatggtgtctcacaccagcgtcactaacgtcggaccacgggttgggctgggccttcccttaagccccaggcttttgccaaccgccactaccaatggccaccctcagctccccggccacgcaaaaccaggcactccagctctggagacactggaaacaacaccgcccgccatggccgcccctaaggacgatggattcctgaacgggtcgtgtagtggcctagacgaggaagcatcgggtcctgagaggcctcctgccctgctgcaggaagagtgggagaccgtgatgtag

SEQ ID NO: 6800 - DNA, 1782 bp, Artificial Sequence
  derived and/or modified sequence
atgggcacagcccgcatcgcccctggcctggccctgctgctgtgctgccctgtgctgagcagcgcctatgccctggtggatgctgatgatgtgatgaccaaggaggagcagatcttcctgctgcaccgggcccaggcccagtgtgagaagaggctgaaggaggtgctgcagaggcctgccagcatcatggagagtgacaagggctggaccagcgccagcaccagcggcaagcccaggaaggacaaggccagcggcaagctgtacccagagagcgaggaggacaaggaggcccccaccggcagccgctaccggggccggccctgcctgcctgagtgggaccacatcctgtgctggcccctgggcgcccctggagaggtggtggccgtgccctgcccagactacatctatgacttcaaccacaagggccacgcctaccgccgctgtgacagaaatggctcctgggagctggtgcccggccacaacagaacctgggccaactacagtgaatgtgtgaagttcctgaccaatgagacccgggagcgggaggtgtttgaccggctgggcatgatctacacagtgggctacagcgtgtccctggccagcctgactgtggccgtgctgatcctggcctacttccggcggctgcactgcaccaggaactacatccacatgcacctgttcctgtccttcatgctgcgggctgtgtccatctttgtgaaggatgctgtgctgtacagcggggccaccctggatgaagctgagcggctgacagaggaggagctgcgggccatcgcccaggcccctcctcctccagccacagctgctgctggctacgccggctgccgggtggccgtgaccttcttcctgtacttcctggccaccaactactactggatcctggtggagggcctgtacctgcacagcctcatcttcatggccttcttcagcgagaagaagtacctgtggggcttcaccgtgtttggctggggcctgcctgctgtgtttgtggccgtgtgggtgtctgtgcgggccaccctggccaacacaggctgctgggacctgagcagcggcaacaagaagtggatcatccaggtgcccatcctggccagcatcgtgctgaacttcatcctcttcatcaacatcgtgcgggtgctggccaccaagctgcgggagaccaatgccggccgctgtgacacccggcagcagtacaggaagctgctgaagagcaccctggtgctgatgcccctgtttggagtgcactacatcgtgttcatggccaccccctacacagaggtgtctggcaccctgtggcaggtgcagatgcactatgagatgctgttcaacagcttccagggcttctttgtggccatcatctactgcttctgcaatggagaggtgcaggccgagatcaagaagtcctggagccgctggaccctggccctggacttcaagaggaaggcccggagcggcagcagcagctacagctatggccccatggtgagccacacctctgtgaccaacgtgggcccccgggtgggcctgggcctgcccctgagcccccggctgctgcccacagccaccaccaacggccacccccagctgcccggccacgccaagccaggcaccccagccctggagaccctggagaccaccccaccagccatggccgcccccaaggatgatggcttcctgaatggcagctgcagcggcctggatgaggaggccagcggccctgagcggcccccagccctgctgcaggaggagtgggagaccgtgatgtag

SEQ ID NO: 6801 - DNA, 1584 bp, Artificial Sequence
  derived and/or modified sequence
atgggcacagcccgcatcgcccctggcctggccctgctgctgtgctgccctgtgctgagcagcgcctatgccctggtggatgctgatgatgtgatgaccaaggaggagcagatcttcctgctgcaccgggcccaggcccagtgtgagaagaggctgaaggaggtgctgcagaggcctgccagcatcatggagagtgacaagggctggaccagcgccagcaccagcggcaagcccaggaaggacaaggccagcggcaagctgtacccagagagcgaggaggacaaggaggcccccaccggcagccgctaccggggccggccctgcctgcctgagtgggaccacatcctgtgctggcccctgggcgcccctggagaggtggtggccgtgccctgcccagactacatctatgacttcaaccacaagggccacgcctaccgccgctgtgacagaaatggctcctgggagctggtgcccggccacaacagaacctgggccaactacagtgaatgtgtgaagttcctgaccaatgagacccgggagcgggaggtgtttgaccggctgggcatgatctacacagtgggctacagcgtgtccctggccagcctgactgtggccgtgctgatcctggcctacttccggcggctgcactgcaccaggaactacatccacatgcacctgttcctgtccttcatgctgcgggctgtgtccatctttgtgaaggatgctgtgctgtacagcggggccaccctggatgaagctgagcggctgacagaggaggagctgcgggccatcgcccaggcccctcctcctccagccacagctgctgctggctacgccggctgccgggtggccgtgaccttcttcctgtacttcctggccaccaactactactggatcctggtggagggcctgtacctgcacagcctcatcttcatggccttcttcagcgagaagaagtacctgtggggcttcaccgtgtttggctggggcctgcctgctgtgtttgtggccgtgtgggtgtctgtgcgggccaccctggccaacacaggctgctgggacctgagcagcggcaacaagaagtggatcatccaggtgcccatcctggccagcatcgtgctgaacttcatcctcttcatcaacatcgtgcgggtgctggccaccaagctgcgggagaccaatgccggccgctgtgacacccggcagcagtacaggaagctgctgaagagcaccctggtgctgatgcccctgtttggagtgcactacatcgtgttcatggccaccccctacacagaggtgtctggcaccctgtggcaggtgcagatgcactatgagatgctgttcaacagcttccagggcttctttgtggccatcatctactgcttctgcaatggagaggtgcaggccgagatcaagaagtcctggagccgctggaccctggccctggacttcaagaggaaggcccggagcggcagcagcagctacagctatggccccatggtgagccacacctctgtgaccaacgtgggcccccgggtgggcctgggcctgcccctgagcccccggctgctgcccacagccacctag

SEQ ID NO: 6802 - DNA, 1002 bp, Artificial Sequence
  derived and/or modified sequence
atgggcacagcccgcatcgcccctggcctggccctgctgctgtgctgccctgtgctgagcagcgcctatgccctggtggatgctgatgatgtgatgaccaaggaggagcagatcttcctgctgcaccgggcccaggcccagtgtgagaagaggctgaaggaggtgctgcagaggcctgccagcatcatggagagtgacaagggctggaccagcgccagcaccagcggcaagcccaggaaggacaaggccagcggcaagctgtacccagagagcgaggaggacaaggaggcccccaccggcagccgctaccggggccggccctgcctgcctgagtgggaccacatcctgtgctggcccctgggcgcccctggagaggtggtggccgtgccctgcccagactacatctatgacttcaaccacaagggccacgcctaccgccgctgtgacagaaatggctcctgggagctggtgcccggccacaacagaacctgggccaactacagtgaatgtgtgaagttcctgaccaatgagacccgggagcgggaggtgtttgaccggctgggcatgatctacacagtgggctacagcgtgtccctggccagcctgactgtggccgtgctgatcctggcctacttccggcggctgcactgcaccaggaactacatccacatgcacctgttcctgtccttcatgctgcgggctgtgtccatctttgtgaaggatgctgtgctgtacagcggggccaccctggatgaagctgagcggctgacagaggaggagctgcgggccatcgcccaggcccctcctcctccagccacagctgctgctggctacgccggctgccgggtggccgtgaccttcttcctgtacttcctggccaccaactactactggatcctggtggagggcctgtacctgcacagcctcatcttcatggccttcttcagcgagaagaagtacctgtggggcttcaccgtgtttggctggggcgccggcacctag

SEQ ID NO: 6803 - DNA, 1782 bp, Artificial Sequence
  derived and/or modified sequence
atgggcaccgcccggatcgcccccggcctggccctgctgctgtgctgcccagtcctcagctccgcgtacgcattggtggacgctgacgacgtcatgaccaaagaagagcaaattttcctgctgcaccgggcccaggcacagtgtgagaagaggctgaaggaggtcttgcagcgcccggcatctattatggaaagcgacaaaggctggacaagcgcctctacgagcggcaagccccgcaaggataaagccagtggaaaactgtatcctgagagtgaggaggataaggaggcccccacagggagtcggtatagaggaaggccttgtctccctgaatgggatcatattctctgctggcccctgggggctccaggagaagtggtggccgtgccctgtcccgactatatctatgactttaatcacaaagggcacgcctacaggcggtgcgaccgtaatggatcttgggagctggtgcccgggcacaacagaacatgggccaactattctgagtgcgtgaagtttttgactaatgagacccgtgaacgcgaagtttttgacaggctgggaatgatttacaccgtcggctactctgtgtcccttgcatctctgactgtcgcggtcctcattcttgcctatttcagaaggctccattgcacacggaattacatacatatgcaccttttcctgagtttcatgcttagagctgtgagcatttttgtgaaagacgctgtactgtacagcggagccacgctggatgaggctgagcgattgaccgaggaagaactcagggctatcgcacaggcacctcctccaccagctacggccgcagccgggtacgccggatgtcgtgtggctgtgactttcttcctgtactttcttgccacgaattattattggattctggtcgaggggctctatctccactctctgattttcatggctttcttcagcgaaaaaaagtatctctggggatttacagtctttgggtggggtctgcccgctgtgttcgtggccgtctgggtgtctgtgcgcgcgacactcgccaatacaggatgctgggacctgtcctctgggaacaagaagtggatcattcaggtccccatccttgcgtccatagtcctgaacttcatactttttatcaatatagtgcgcgtcctagccaccaagctccgggagacaaatgctggccgctgcgacacacgacagcagtaccgcaagttgctcaaaagcaccctggttttgatgcccctgtttggtgtgcattacattgttttcatggctactccatacacggaggtgagtggaaccttgtggcaagtccaaatgcattatgagatgcttttcaacagctttcagggctttttcgtcgccataatttactgcttttgcaatggtgaagtgcaggccgagatcaagaagtcctggagtaggtggacgctcgccctagactttaaaagaaaagcacggagcggtagctcgtcatactcctacggccccatggtgtcccatacctccgtcactaacgttgggccccgtgttggattggggctgcccctcagcccacgcctgctgcccacagctaccaccaatggtcacccccagcttcccggacatgcgaagccaggaactccagcgcttgagacccttgagacaactcctcccgccatggcagcacccaaggacgacggctttctcaacgggtcctgcagcggtctggacgaagaagcgtctggaccagaacgccccccagcattacttcaggaggaatgggaaactgtcatgtag

SEQ ID NO: 6804 - DNA, 1782 bp, Artificial Sequence
  derived and/or modified sequence
atgggcaccgcccggatcgcccccggcctggccctgctgctgtgctgcccagtgttaagtagtgcctacgccctcgtggatgctgatgacgtgatgactaaggaggagcagatcttcctcctgcatcgggcccaggcgcagtgtgagaagagactgaaagaagttcttcagcggcctgcgtcgataatggagagcgacaaagggtggacatcagccagcacgtccgggaagcccaggaaagataaagcttcagggaaactttatcccgaatctgaagaagacaaggaggcacccactggatctcgttacaggggccgtccctgccttccagagtgggaccacatcctttgttggccgttgggagcacccggggaagtggttgctgttccctgcccggactacatttatgattttaaccataaggggcacgcctacaggcggtgcgaccgaaacgggagttgggagcttgtgccagggcacaatcgcacatgggcaaattactcggagtgcgtaaagtttctcactaatgaaactcgagagcgggaagtgttcgaccgtctcgggatgatctatactgtggggtattcggttagcctcgcatctctaacggtggctgtccttatcctagcctatttcagacgcctgcattgtacgcgtaattacatccacatgcatctgttcctctcctttatgctccgcgctgtgtctatctttgtgaaagacgccgtgctgtactccggcgctacacttgacgaagccgagcggctcacagaggaggagcttcgagcgatcgctcaagcccctcctcctcccgcgaccgccgctgccggctacgctgggtgtcgagtcgctgtaaccttctttctctacttcctggccaccaattactattggatcttagtggaaggcctgtatttacacagtctaattttcatggctttctttagcgaaaaaaagtacctatggggcttcactgtctttgggtggggccttccagcagtgtttgtcgctgtctgggtgtcagtacgcgccacgctggcaaatactgggtgctgggacctatcttcggggaacaaaaaatggatcatccaggtgccaatcctggcaagtatcgtactcaacttcatcctgtttatcaacatagtgagagtgctcgcaactaaactcagagaaacgaatgcagggcgctgcgacacgcgacagcagtaccgtaagctcttaaagagcacattagtccttatgcccctgttcggcgtgcactacattgtgttcatggccacaccatacacagaggtaagcggcacattatggcaagtgcagatgcactatgagatgctgtttaactcatttcaggggtttttcgtcgccattatctactgtttttgtaacggagaggttcaggctgaaatcaagaaatcttggtctcggtggaccctggctctggatttcaagagaaaagctcggagcgggagctcgtcttattcttacggcccaatggtatctcatacatcagttaccaatgtgggcccccgagtgggcttgggactgccattatctcccagattactgccaactgcaaccactaacggacacccccagctcccggggcatgcaaagccaggaacccccgctctcgagacgctcgagactacccctccggcgatggcagcccctaaagatgatggctttttaaatgggtcctgtagtgggttagacgaggaagcctccggtccagagagaccacccgcgctgctgcaggaggagtgggagacggtcatgtag

SEQ ID NO: 6805 - DNA, 1584 bp, Artificial Sequence
  derived and/or modified sequence
atgggcaccgcccggatcgcccccggcctggccctgctgctgtgctgccccgtgctgtctagtgcctacgctctggtggacgctgacgacgtgatgaccaaagaggagcagatatttctgcttcaccgggcgcaagcgcagtgcgagaaacgcttaaaagaggtactgcagaggccggccagcatcatggaatctgacaaggggtggactagtgcatctaccagcggcaaaccccggaaagataaggcctcaggcaaactctacccggaaagtgaggaggacaaagaggcaccaacgggtagccgatatcgagggcggccatgcctgcctgaatgggaccacatcctgtgctggcctctcggcgcgccaggagaggtcgtggccgtgccctgccccgactatatttacgatttcaaccataagggccatgcttaccgccggtgcgaccggaacggttcctgggagctggttccggggcacaaccgtacgtgggcaaactattccgagtgtgttaagttcctgacaaatgaaactagagagagagaggtgttcgatcgcctcggaatgatttataccgtcgggtacagcgtgtccctggcaagtctaaccgttgcggtgcttatcctggcctacttccggcgcttgcattgcacaaggaactatatccacatgcacctattcctctcattcatgctcagagccgtctctattttcgtgaaggatgccgtgttgtattccggggctactctggatgaggctgagaggctgactgaggaagagttgagggccatcgctcaagccccccctcccccggccactgccgctgcagggtatgctggatgtcgtgtggctgtaacgtttttcctgtatttcttagctaccaactactattggatcctggtcgaggggttgtatcttcacagtcttattttcatggccttcttctcagagaaaaaatacctgtggggcttcactgtgtttggatggggcctgcccgccgtcttcgtagcggtttgggtgagtgtgcgggccacattagccaatacaggctgctgggacttatcctcaggaaacaagaagtggattatacaggtcccaatactggcctccatagttctgaattttatcttattcataaatattgttcgcgttctggccactaaactgcgggagacaaacgcgggacgttgcgatactagacagcagtatcgcaagttactaaaatccacactcgtcctcatgccccttttcggcgtgcattatatcgtgttcatggccactccctacacagaagtgagcggaaccctgtggcaggtgcagatgcattatgaaatgctgttcaactcattccagggcttctttgtggccatcatctactgtttctgcaatggcgaagtgcaagccgagatcaagaagagttggtcacgttggactctggcactagacttcaaacgcaaggccaggagcggttctagcagttattcatacgggccaatggtgtcccatactagcgtaacgaatgtcgggccgcgcgtcgggctgggtctgcccctctctcctcgactcctgcccacagcgacatag

SEQ ID NO: 6806 - DNA, 1002 bp, Artificial Sequence
  derived and/or modified sequence
atgggcaccgcccggatcgcccccggcctggccctgctgctgtgctgtcccgtactctctagtgcttacgcactggtagacgcagacgatgtcatgaccaaggaggagcagatatttctcttgcaccgtgctcaggcacagtgcgagaagaggttgaaggaagttctgcaacgccccgctagtatcatggaatctgataaaggctggacgagcgcctctaccagtggcaagccaagaaaggacaaggcttccggaaaactctaccctgagagtgaggaggacaaagaagccccgactggctctagataccgcggcaggccttgcctgcccgagtgggatcacatcctttgttggcccctgggggcacccggcgaggtcgtcgctgtgccatgccccgattacatatacgacttcaatcataagggccatgcctatcgtcgctgtgatcggaacggcagctgggagcttgtgccagggcacaacaggacatgggccaactacagcgaatgtgtgaagtttctgacgaatgaaacccgggaaagagaggtgtttgatcgtctgggcatgatctacaccgtggggtacagtgtatcccttgcttcattgaccgtcgctgtgttaattctcgcctatttcagaaggctccattgtactcgcaactacatccatatgcaccttttcctgagcttcatgctgcgagccgttagcatcttcgtcaaagatgcagtactctacagcggagccacattagacgaggcagagagactgaccgaagaggaactgcgggccattgcccaggcccccccccctcctgctaccgccgccgccggatacgccgggtgtcgcgtggccgtcacgttcttcctctacttcctagccaccaattactattggatcctggtggaggggctgtatttgcatagcctgatcttcatggcgtttttcagtgagaagaagtatttatgggggttcacagtgttcggttggggtgccgggacttag

SEQ ID NO: 6807 - DNA, 1782 bp, Artificial Sequence
  derived and/or modified sequence
atgggcaccgcccggatcgcccccggcctggccctgctgctgtgctgtcccgtcttgtcatccgcctacgcactggtggacgcggatgatgttatgacaaaagaggagcagatatttctcctccaccgcgctcaggcccagtgcgagaaacggttgaaggaggtgcttcagcgacctgcgtctataatggagtctgacaaaggttggacttccgcatcaacctctggaaagcccagaaaggacaaagcatccggtaagctgtaccctgagtccgaagaagacaaagaggcaccaacagggtcaaggtacagagggcgtccctgtttgccagaatgggaccacatattgtgctggccgcttggtgctccaggagaagtcgtagctgtgccctgccctgactacatttatgatttcaatcacaaggggcacgcataccgcaggtgcgatcggaatgggtcttgggagttagtgcctggccataataggacatgggcgaattattctgagtgcgttaaattcctaacaaacgagaccagggagcgagaggttttcgatcggctcggtatgatctataccgtaggctattcggttagcttagcgagtctgactgtagccgtcttaattttggcatactttagacgcctccactgcacccggaattacattcacatgcacctgtttctgagctttatgttgcgcgccgtgtcaatattcgtgaaagatgccgtgctctacagtggggcgacactagacgaagccgagcggctcacagaggaggagctgcgggccattgcacaagcaccaccaccgcccgcaaccgcggccgctggatatgccgggtgccgcgtggccgtaacattttttctctactttttggcaaccaattattactggatcttggttgaaggactctatctccacagtctgatattcatggcgttcttctccgaaaagaaatatttatggggctttactgtcttcggttggggcctgccagcagtctttgtagctgtgtgggttagtgttagggccactctggcaaatacgggatgctgggatctgagctcaggcaacaagaaatggatcatccaggtgcctatcttagcctccattgtcctcaacttcattctgtttattaacatcgttcgggttttggctactaagctgcgcgagaccaacgccgggcgctgtgacactagacagcagtatcgcaagcttctgaaatccacattggttctgatgccactgtttggggtgcattatatagtctttatggctacaccctatacggaggtgagtggtacactgtggcaggtccaaatgcactatgagatgctcttcaattctttccagggttttttcgtcgcgattatctactgcttctgtaatggtgaggtgcaggccgagattaagaagtcatggtcccgctggacactggcccttgacttcaagagaaaggccaggtctggcagtagtagttactcttatggacctatggtgagccacactagcgtgacaaatgtggggccgcgtgttggtctgggcctgccactgtctccccggctgttgccgaccgctaccactaatggtcacccccagttaccggggcacgccaagccagggacaccagccttggagactttggaaacgactccccccgccatggccgcacctaaggacgatggattccttaatgggtcttgcagcggactggacgaagaggccagcggccccgagcgtcctcccgcgttactccaggaagagtgggagacagtaatgtag

SEQ ID NO: 6808 - DNA, 1782 bp, Artificial Sequence
  derived and/or modified sequence
atgggcaccgcccggatcgcccccggcctggccctgctgctgtgctgtcccgtgctatcctcagcatatgcacttgtggacgctgacgacgtgatgaccaaggaggagcaaattttcttattgcaccgcgcgcaagcccaatgtgaaaagcggctcaaggaggtcctccagcgcccagcgtccataatggagtccgataaggggtggacttccgcatcaactagcggcaagcctcgtaaggataaagctagcggcaagctgtatccagagtctgaagaagacaaggaggctccaaccggtagtcggtacagaggacgtccatgcttaccagagtgggaccatatcctgtgttggccacttggcgcccccggagaagtagtcgctgtgccttgtccagactatatctatgactttaatcataaagggcatgcgtatcggcgctgcgaccggaacggatcctgggaactcgttccagggcacaatcgtacctgggcgaattattccgagtgtgttaagtttctgactaatgagactcgcgagcgagaggttttcgataggttaggaatgatctataccgtcggctacagcgtgtccctcgcatcactgactgtagccgtgctgatactggcctatttccgacggctgcactgtactaggaattacatccacatgcacctctttctgtcattcatgctcagagcggtctctatcttcgtgaaagacgctgtcctgtatagcggggcgactcttgatgaggctgagcggctgaccgaggaagagctgcgtgctattgcacaggcccccccccctcccgccactgctgcagccggatatgccggttgcagggtcgccgtcactttcttcctctattttctggctacaaattactactggattctggtggagggcttgtatctacacagcctgatttttatggcctttttctccgagaaaaaatatctttggggatttaccgtgtttggttggggactgcctgccgtattcgtcgccgtttgggtatccgtgcgcgccaccctggcgaacactggatgctgggacctctctagtggaaataagaaatggattatacaagtgccaattctggcatctattgtcctgaattttatcctgtttatcaacatcgtgagggtgttggcaactaaacttcgggagactaatgcaggccgctgtgacacacgccagcagtatagaaagctcttaaaatccaccttggtcctgatgcctctgttcggggtacactatattgtgtttatggccacaccatataccgaggtctctggaaccctatggcaagtgcagatgcactatgaaatgttattcaactcttttcagggctttttcgtggcaatcatatactgtttttgtaacggtgaggtgcaggcagagatcaagaaaagctggtcccgctggactcttgctctcgactttaaacggaaggccaggtccggcagtagctcctattcttacggtcctatggtgtctcatacgtctgtcacgaacgtgggcccacgggtgggcctcggcttgcctctctcgcctcgcctcctccccacagccactactaatggacacccacagttgcctggtcacgctaaaccaggaaccccggcgcttgagactttggaaacaacacccccggccatggcagcccccaaagatgacggctttctgaacggcagctgttccggattagatgaggaagcttctggtcccgagcgcccccccgcactgctgcaggaggaatgggaaacagtgatgtag

SEQ ID NO: 6809 - DNA, 2123 bp, Artificial Sequence
  derived and/or modified sequence
cgctgctcgctcgctcgctcgctcgctcgccctcagcgcatgggccccgcgccgggccccggggcctcgggccgccgggacgccggggtcccataggccggggcgtgggcggggcggccagcctgacgcagctctgcaccccctaccaccaccagggccggcggcggcggctgccccgagggacgcggccctaggcggtggcgatggggaccgcccggatcgcacccggcctggcgctcctgctctgctgccccgtgctcagctccgcgtacgcgctggtggatgcagatgacgtcatgactaaagaggaacagatcttcctgctgcaccgtgctcaggcccagtgcgaaaaacggctcaaggaggtcctgcagaggccagccagcataatggaatcagacaagggatggacatctgcgtccacatcagggaagcccaggaaagataaggcatctgggaagctctaccctgagtctgaggaggacaaggaggcacccactggcagcaggtaccgagggcgcccctgtctgccggaatgggaccacatcctgtgctggccgctgggggcaccaggtgaggtggtggctgtgccctgtccggactacatttatgacttcaatcacaaaggccatgcctaccgacgctgtgaccgcaatggcagctgggagctggtgcctgggcacaacaggacgtgggccaactacagcgagtgtgtcaaatttctcaccaatgagactcgtgaacgggaggtgtttgaccgcctgggcatgatttacaccgtgggctactccgtgtccctggcgtccctcaccgtagctgtgctcatcctggcctactttaggcggctgcactgcacgcgcaactacatccacatgcacctgttcctgtccttcatgctgcgcgccgtgagcatcttcgtcaaggacgctgtgctctactctggcgccacgcttgatgaggctgagcgcctcaccgaggaggagctgcgcgccatcgcccaggcgcccccgccgcctgccaccgccgctgccggctacgcgggctgcagggtggctgtgaccttcttcctttacttcctggccaccaactactactggattctggtggaggggctgtacctgcacagcctcatcttcatggccttcttctcagagaagaagtacctgtggggcttcacagtcttcggctggggtctgcccgctgtcttcgtggctgtgtgggtcagtgtcagagctaccctggccaacaccgggtgctgggacttgagctccgggaacaaaaagtggatcatccaggtgcccatcctggcctccattgtgctcaacttcatcctcttcatcaatatcgtccgggtgctcgccaccaagctgcgggagaccaacgccggccggtgtgacacacggcagcagtaccggaagctgctcaaatccacgctggtgctcatgcccctctttggcgtccactacattgtcttcatggccacaccatacaccgaggtctcagggacgctctggcaagtccagatgcactatgagatgctcttcaactccttccagggattttttgtcgcaatcatatactgtttctgcaatggcgaggtacaagctgagatcaagaaatcttggagccgctggacactggcactggacttcaagcgaaaggcacgcagcgggagcagcagctatagctacggccccatggtgtcccacacaagtgtgaccaatgtcggcccccgtgtgggactcggcctgcccctcagcccccgcctactgcccactgccaccaccaacggccaccctcagctgcctggccatgccaagccagggaccccagccctggagaccctcgagaccacaccacctgccatggctgctcccaaggacgatgggttcctcaacggctcctgctcaggcctggacgaggaggcctctgggcctgagcggccacctgccctgctacaggaagagtgggagacagtcatgtgaccaggcgctgggggctggacctgctgacatagtggatggacagatggaccaaaagatgggtggttgaatgatttcccactcagggctggggccaagaggaaaaacagggaaaaaaagaaaaaaaaaagaaaaaggaaa

SEQ ID NO: 6810 - DNA, 2070 bp, Artificial Sequence
  derived and/or modified sequence
ggcagaagagtatgatcctggcagaggaagcagcaaggacaaagatgaggaaactgaggtccagacagccgaagagtggtagtgtccaggacacacaactgggccggcggcggcggctgccccgagggacgcggccctaggcggtggcgatggggaccgcccggatcgcacccggcctggcgctcctgctctgctgccccgtgctcagctccgcgtacgcgctggtggatgcagatgacgtcatgactaaagaggaacagatcttcctgctgcaccgtgctcaggcccagtgcgaaaaacggctcaaggaggtcctgcagaggccagccagcataatggaatcagacaagggatggacatctgcgtccacatcagggaagcccaggaaagataaggcatctgggaagctctaccctgagtctgaggaggacaaggaggcacccactggcagcaggtaccgagggcgcccctgtctgccggaatgggaccacatcctgtgctggccgctgggggcaccaggtgaggtggtggctgtgccctgtccggactacatttatgacttcaatcacaaaggccatgcctaccgacgctgtgaccgcaatggcagctgggagctggtgcctgggcacaacaggacgtgggccaactacagcgagtgtgtcaaatttctcaccaatgagactcgtgaacgggaggtgtttgaccgcctgggcatgatttacaccgtgggctactccgtgtccctggcgtccctcaccgtagctgtgctcatcctggcctactttaggcggctgcactgcacgcgcaactacatccacatgcacctgttcctgtccttcatgctgcgcgccgtgagcatcttcgtcaaggacgctgtgctctactctggcgccacgcttgatgaggctgagcgcctcaccgaggaggagctgcgcgccatcgcccaggcgcccccgccgcctgccaccgccgctgccggctacgcgggctgcagggtggctgtgaccttcttcctttacttcctggccaccaactactactggattctggtggaggggctgtacctgcacagcctcatcttcatggccttcttctcagagaagaagtacctgtggggcttcacagtcttcggctggggtctgcccgctgtcttcgtggctgtgtgggtcagtgtcagagctaccctggccaacaccgggtgctgggacttgagctccgggaacaaaaagtggatcatccaggtgcccatcctggcctccattgtgctcaacttcatcctcttcatcaatatcgtccgggtgctcgccaccaagctgcgggagaccaacgccggccggtgtgacacacggcagcagtaccggaagctgctcaaatccacgctggtgctcatgcccctctttggcgtccactacattgtcttcatggccacaccatacaccgaggtctcagggacgctctggcaagtccagatgcactatgagatgctcttcaactccttccagggattttttgtcgcaatcatatactgtttctgcaatggcgaggtacaagctgagatcaagaaatcttggagccgctggacactggcactggacttcaagcgaaaggcacgcagcgggagcagcagctatagctacggccccatggtgtcccacacaagtgtgaccaatgtcggcccccgtgtgggactcggcctgcccctcagcccccgcctactgcccactgccaccaccaacggccaccctcagctgcctggccatgccaagccagggaccccagccctggagaccctcgagaccacaccacctgccatggctgctcccaaggacgatgggttcctcaacggctcctgctcaggcctggacgaggaggcctctgggcctgagcggccacctgccctgctacaggaagagtgggagacagtcatgtgaccaggcgctgggggctggacctgctgacatagtggatggacagatggaccaaaagatgggtggttgaatgatttcccactcagggctggggccaagaggaaaaacagggaaaaaaagaaaaaaaaaagaaaaaggaaaa

SEQ ID NO: 6811 - DNA, 1914 bp, Artificial Sequence
  derived and/or modified sequence
gagggggtgggggcgggagaggcccgggagggcgcgggggagggaagaggcgcccggccggggagaaggggagcggcagacgccgaggcgagggatgcgcgcggcgggcggtggctccgagcggcggccgggcggggggcgctggaggccaggccggccagcggggggtatcccgagagctccatgaagtccccccggggccgcggacggggcgctggcttggggaggctgtcgggggggccccgacatccatggcaaggcgggggccgcggcggcgcgctcggaggccggcggcggcggctgccccgagggacgcggccctaggcggtggcgatggggaccgcccggatcgcacccggcctggcgctcctgctctgctgccccgtgctcagctccgcgtacgcgctggtggatgcagatgacgtcatgactaaagaggaacagatcttcctgctgcaccgtgctcaggcccagtgcgaaaaacggctcaaggaggtcctgcagaggccagccagcataatggaatcagacaagggatggacatctgcgtccacatcagggaagcccaggaaagataaggcatctgggaagctctaccctgagtctgaggaggacaaggaggcacccactggcagcaggtaccgagggcgcccctgtctgccggaatgggaccacatcctgtgctggccgctgggggcaccaggtgaggtggtggctgtgccctgtccggactacatttatgacttcaatcacaaaggccatgcctaccgacgctgtgaccgcaatggcagctgggagctggtgcctgggcacaacaggacgtgggccaactacagcgagtgtgtcaaatttctcaccaatgagactcgtgaacgggaggtgtttgaccgcctgggcatgatttacaccgtgggctactccgtgtccctggcgtccctcaccgtagctgtgctcatcctggcctactttaggcggctgcactgcacgcgcaactacatccacatgcacctgttcctgtccttcatgctgcgcgccgtgagcatcttcgtcaaggacgctgtgctctactctggcgccacgcttgatgaggctgagcgcctcaccgaggaggagctgcgcgccatcgcccaggcgcccccgccgcctgccaccgccgctgccggctacgcgggctgcagggtggctgtgaccttcttcctttacttcctggccaccaactactactggattctggtggaggggctgtacctgcacagcctcatcttcatggccttcttctcagagaagaagtacctgtggggcttcacagtcttcggctggggtctgcccgctgtcttcgtggctgtgtgggtcagtgtcagagctaccctggccaacaccgggtgctgggacttgagctccgggaacaaaaagtggatcatccaggtgcccatcctggcctccattgtgctcaacttcatcctcttcatcaatatcgtccgggtgctcgccaccaagctgcgggagaccaacgccggccggtgtgacacacggcagcagtaccggaagctgctcaaatccacgctggtgctcatgcccctctttggcgtccactacattgtcttcatggccacaccatacaccgaggtctcagggacgctctggcaagtccagatgcactatgagatgctcttcaactccttccagggattttttgtcgcaatcatatactgtttctgcaatggcgaggtacaagctgagatcaagaaatcttggagccgctggacactggcactggacttcaagcgaaaggcacgcagcgggagcagcagctatagctacggccccatggtgtcccacacaagtgtgaccaatgtcggcccccgtgtgggactcggcctgcccctcagcccccgcctactgcccactgccacc

SEQ ID NO: 6812 - DNA, 2063 bp, Artificial Sequence
  derived and/or modified sequence
cgctgctcgctcgctcgctcgctcgctcgccctcagcgcatgggccccgcgccgggccccggggcctcgggccgccgggacgccggggtcccataggccggggcgtgggcggggcggccagcctgacgcagctctgcaccccctaccaccaccagggccggcggcggcggctgccccgagggacgcggccctaggcggtggcgatggggaccgcccggatcgcacccggcctggcgctcctgctctgctgccccgtgctcagctccgcgtacgcgctggtggatgcagatgacgtcatgactaaagaggaacagatcttcctgctgcaccgtgctcaggcccagtgcgaaaaacggctcaaggaggtcctgcagaggccagccagcataatggaatcagacaagggatggacatctgcgtccacatcagggaagcccaggaaagataaggcatctgggaagctctaccctgagtctgaggaggacaaggaggcacccactggcagcaggtaccgagggcgcccctgtctgccggaatgggaccacatcctgtgctggccgctgggggcaccaggtgaggtggtggctgtgccctgtccggactacatttatgacttcaatcacaaaggccatgcctaccgacgctgtgaccgcaatggcagctgggagctggtgcctgggcacaacaggacgtgggccaactacagcgagtgtgtcaaatttctcaccaatgagactcgtgaacgggaggtgtttgaccgcctgggcatgatttacaccgtgggctactccgtgtccctggcgtccctcaccgtagctgtgctcatcctggcctactttaggcggctgcactgcacgcgcaactacatccacatgcacctgttcctgtccttcatgctgcgcgccgtgagcatcttcgtcaaggacgctgtgctctactctggcgccacgcttgatgaggctgagcgcctcaccgaggaggagctgcgcgccatcgcccaggcgcccccgccgcctgccaccgccgctgccggctacgcgggctgcagggtggctgtgaccttcttcctttacttcctggccaccaactactactggattctggtggaggggctgtacctgcacagcctcatcttcatggccttcttctcagagaagaagtacctgtggggcttcacagtcttcggctggggtgctgggacttgagctccgggaacaaaaagtggatcatccaggtgcccatcctggcctccattgtgctcaacttcatcctcttcatcaatatcgtccgggtgctcgccaccaagctgcgggagaccaacgccggccggtgtgacacacggcagcagtaccggaagctgctcaaatccacgctggtgctcatgcccctctttggcgtccactacattgtcttcatggccacaccatacaccgaggtctcagggacgctctggcaagtccagatgcactatgagatgctcttcaactccttccagggattttttgtcgcaatcatatactgtttctgcaatggcgaggtacaagctgagatcaagaaatcttggagccgctggacactggcactggacttcaagcgaaaggcacgcagcgggagcagcagctatagctacggccccatggtgtcccacacaagtgtgaccaatgtcggcccccgtgtgggactcggcctgcccctcagcccccgcctactgcccactgccaccaccaacggccaccctcagctgcctggccatgccaagccagggaccccagccctggagaccctcgagaccacaccacctgccatggctgctcccaaggacgatgggttcctcaacggctcctgctcaggcctggacgaggaggcctctgggcctgagcggccacctgccctgctacaggaagagtgggagacagtcatgtgaccaggcgctgggggctggacctgctgacatagtggatggacagatggaccaaaagatgggtggttgaatgatttcccactcagggctggggccaagaggaaaaacagggaaaaaaagaaaaaaaaaagaaaaaggaaaa

SEQ ID NO: 6813 - DNA, 1947 bp, Artificial Sequence
  derived and/or modified sequence
ggagcggcagacgccgagggccggcggcggcggctgccccgagggacgcggccctaggcggtggcgatggggaccgcccggatcgcacccggcctggcgctcctgctctgctgccccgtgctcagctccgcgtacgcgctggtggatgcagatgacgtcatgactaaagaggaacagatcttcctgctgcaccgtgctcaggcccagtgcgaaaaacggctcaaggaggtcctgcagaggccagccagcataatggaatcagacaagggatggacatctgcgtccacatcagggaagcccaggaaagataaggcatctgggaagctctaccctgagtctgaggaggacaaggaggcacccactggcagcaggtaccgagggcgcccctgtctgccggaatgggaccacatcctgtgctggccgctgggggcaccaggtgaggtggtggctgtgccctgtccggactacatttatgacttcaatcacaaaggccatgcctaccgacgctgtgaccgcaatggcagctgggagctggtgcctgggcacaacaggacgtgggccaactacagcgagtgtgtcaaatttctcaccaatgagactcgtgaacgggaggtgtttgaccgcctgggcatgatttacaccgtgggctactccgtgtccctggcgtccctcaccgtagctgtgctcatcctggcctactttaggcggctgcactgcacgcgcaactacatccacatgcacctgttcctgtccttcatgctgcgcgccgtgagcatcttcgtcaaggacgctgtgctctactctggcgccacgcttgatgaggctgagcgcctcaccgaggaggagctgcgcgccatcgcccaggcgcccccgccgcctgccaccgccgctgccggctacgcgggctgcagggtggctgtgaccttcttcctttacttcctggccaccaactactactggattctggtggaggggctgtacctgcacagcctcatcttcatggccttcttctcagagaagaagtacctgtggggcttcacagtcttcggctggggtctgcccgctgtcttcgtggctgtgtgggtcagtgtcagagctaccctggccaacaccgggtgctgggacttgagctccgggaacaaaaagtggatcatccaggtgcccatcctggcctccattgtgctcaacttcatcctcttcatcaatatcgtccgggtgctcgccaccaagctgcgggagaccaacgccggccggtgtgacacacggcagcagtaccggaagctgctcaaatccacgctggtgctcatgcccctctttggcgtccactacattgtcttcatggccacaccatacaccgaggtctcagggacgctctggcaagtccagatgcactatgagatgctcttcaactccttccagggattttttgtcgcaatcatatactgtttctgcaatggcgaggtacaagctgagatcaagaaatcttggagccgctggacactggcactggacttcaagcgaaaggcacgcagcgggagcagcagctatagctacggccccatggtgtcccacacaagtgtgaccaatgtcggcccccgtgtgggactcggcctgcccctcagcccccgcctactgcccactgccaccaccaacggccaccctcagctgcctggccatgccaagccagggaccccagccctggagaccctcgagaccacaccacctgccatggctgctcccaaggacgatgggttcctcaacggctcctgctcaggcctggacgaggaggcctctgggcctgagcggccacctgccctgctacaggaagagtgggagacagtcatgtgaccaggcgctgggggctggacctgctgacatagtggatggacagatggaccaaaagatgggtggttgaatgatttcccactcagggctggggccaagagg

SEQ ID NO: 6814 - DNA, 2123 bp, Artificial Sequence
  derived and/or modified sequence
ccacagaagctgctcagggactatccatggcctccccgtggccaacttgagtctgctctgcagctttaggcccgacttggaaggcccatgggctgcagatgaggaaactgaggtccagacagccgaagagtggtagtgtccaggacacacaactgggccggcggcggcggctgccccgagggacgcggccctaggcggtggcgatggggaccgcccggatcgcacccggcctggcgctcctgctctgctgccccgtgctcagctccgcgtacgcgctggtggatgcagatgacgtcatgactaaagaggaacagatcttcctgctgcaccgtgctcaggcccagtgcgaaaaacggctcaaggaggtcctgcagaggccagccagcataatggaatcagacaagggatggacatctgcgtccacatcagggaagcccaggaaagataaggcatctgggaagctctaccctgagtctgaggaggacaaggaggcacccactggcagcaggtaccgagggcgcccctgtctgccggaatgggaccacatcctgtgctggccgctgggggcaccaggtgaggtggtggctgtgccctgtccggactacatttatgacttcaatcacaaaggccatgcctaccgacgctgtgaccgcaatggcagctgggagctggtgcctgggcacaacaggacgtgggccaactacagcgagtgtgtcaaatttctcaccaatgagactcgtgaacgggaggtgtttgaccgcctgggcatgatttacaccgtgggctactccgtgtccctggcgtccctcaccgtagctgtgctcatcctggcctactttaggcggctgcactgcacgcgcaactacatccacatgcacctgttcctgtccttcatgctgcgcgccgtgagcatcttcgtcaaggacgctgtgctctactctggcgccacgcttgatgaggctgagcgcctcaccgaggaggagctgcgcgccatcgcccaggcgcccccgccgcctgccaccgccgctgccggctacgcgggctgcagggtggctgtgaccttcttcctttacttcctggccaccaactactactggattctggtggaggggctgtacctgcacagcctcatcttcatggccttcttctcagagaagaagtacctgtggggcttcacagtcttcggctggggtctgcccgctgtcttcgtggctgtgtgggtcagtgtcagagctaccctggccaacaccgggtgctgggacttgagctccgggaacaaaaagtggatcatccaggtgcccatcctggcctccattgtgctcaacttcatcctcttcatcaatatcgtccgggtgctcgccaccaagctgcgggagaccaacgccggccggtgtgacacacggcagcagtaccggaagctgctcaaatccacgctggtgctcatgcccctctttggcgtccactacattgtcttcatggccacaccatacaccgaggtctcagggacgctctggcaagtccagatgcactatgagatgctcttcaactccttccagggattttttgtcgcaatcatatactgtttctgcaatggcgaggtacaagctgagatcaagaaatcttggagccgctggacactggcactggacttcaagcgaaaggcacgcagcgggagcagcagctatagctacggccccatggtgtcccacacaagtgtgaccaatgtcggcccccgtgtgggactcggcctgcccctcagcccccgcctactgcccactgccaccaccaacggccaccctcagctgcctggccatgccaagccagggaccccagccctggagaccctcgagaccacaccacctgccatggctgctcccaaggacgatgggttcctcaacggctcctgctcaggcctggacgaggaggcctctgggcctgagcggccacctgccctgctacaggaagagtgggagacagtcatgtgaccaggcgctgggggctggacctgctgacatagtggatggacagatggaccaaaagatgggtggttgaatgatttcccactcagggctggggccaagaggaaaaacagggaaaaaaagaaaaaaaaaagaaaaaggaaa

SEQ ID NO: 6815 - DNA, 1782 bp, Artificial Sequence
  derived and/or modified sequence
atgggtacagccaggatcgctccaggactggctctgctgctttgctgtcctgtgctctccagcgcatacgcactggtcgacgcagacgacgtgatgaccaaggaggagcaaattttcctcctgcaccgcgctcaggcccagtgcgaaaagcgcctgaaagaagtcctccagaggcccgcatcaatcatggagtccgataaggggtggacatccgcgtccacttcaggcaaacctcgcaaggacaaggcaagtggaaagttgtaccctgaatcagaagaggataaagaagcaccaacagggtcacggtaccggggtagaccctgcctccccgaatgggaccatattctgtgctggccactgggggcacctggtgaagtggtcgcggtcccatgcccggactatatatatgacttcaatcacaagggccatgcttacaggagatgcgacagaaacggaagctgggagttagtgcctggacataaccgcacatgggctaattattctgagtgcgtgaaattcctgaccaacgaaacaagggagcgtgaggtctttgaccgtctcggaatgatttacaccgtgggctactccgtcagcctcgccagcctgacagtggcagttctgattttagcttattttcgcaggctccactgtactaggaattacatacatatgcacttgttcttatcattcatgctgagggcagtcagcatatttgtgaaagatgctgtcctgtattccggcgctactctcgatgaagcagaaaggctgacagaggaggagttgagagccatagctcaggccccaccccctccggctacagctgccgctggatacgcaggctgtcgtgtggccgttacatttttcctctacttcttggcaacaaactattactggattctagtcgaagggttgtatctgcactctctcatattcatggcttttttctcggagaagaagtacctctggggcttcactgttttcggatgggggctcccagccgttttcgtcgctgtctgggtgagcgtgcgcgcaaccctcgcgaacaccggctgctgggatctgtctagcggtaataaaaagtggatcattcaggtacctatactcgcgtcaattgtgttgaactttatcctattcatcaatatcgtccgagtgctggccaccaagctcagagaaactaacgccggacggtgtgatacccgccagcaatacaggaagctccttaaatccactcttgtgctcatgcctttgttcggagtacactatatcgtctttatggccacaccctatactgaggtaagcggtaccctgtggcaggtacagatgcactatgagatgctttttaattcattccaagggttcttcgtagctatcatctactgcttttgcaacggtgaagttcaggccgagatcaagaagagttggtccagatggacgcttgccctggacttcaagcgaaaggcccgatcgggctctagcagctattcttacggcccaatggtgtcccacacatccgtgactaatgtcgggccacgggtcgggctcggcctgccgctctccccaagactactgcccacggccaccacaaacgggcacccccagctccctggccatgccaagcccggaaccccagctctggagaccctggaaacgactcctcctgctatggccgctccaaaagacgacggattcctgaacggtagttgcagcggcctggacgaagaggcgtccggacccgaacgcccacctgcacttctgcaggaagagtgggaaacggtgatgtag

SEQ ID NO: 6816 - DNA, 1782 bp, Artificial Sequence
  derived and/or modified sequence
atgggcaccgcacgaattgcacctgggcttgccctcctgctgtgctgccccgttctctcttccgcctacgcactcgtggacgctgacgacgtcatgaccaaggaagaacaaatctttttgctgcaccgcgctcaggcgcagtgcgagaaacggttaaaggaggttctccaacggcctgcttcaatcatggagagtgataagggttggacttctgcatccactagcgggaagcccaggaaggataaagcatctggaaaactgtatcccgagtccgaagaagataaggaagcacccacaggctcaagatataggggccgaccatgtctgcctgaatgggaccacattctctgctggcctctcggggcaccaggcgaggtagtggctgtcccctgcccggactacatctatgactttaatcataagggccacgcatacaggagatgcgacaggaacgggagctgggagctcgtgcccggacacaaccggacctgggcaaattactcagaatgcgtcaagttcttaacaaacgagacccgggagagagaagtatttgatcggctcggaatgatttacactgttggctattccgtctctctcgccagcctgacagttgccgttctgatcctggcttactttcgcagactgcactgcactaggaattacattcatatgcatctcttcctgagcttcatgctgcgcgcagtgtccatctttgtgaaagacgctgtcctttacagcggagcaaccctggacgaagccgagcggctcaccgaagaggagctgagggccattgctcaagccccacctccaccggcaaccgcagcagctggatatgcgggttgccgtgtcgccgtcacttttttcctgtactttctggcgacaaactattattggatcttggttgaaggcctttacctgcactccctcatctttatggctttcttctcagagaagaagtacctgtggggcttcaccgtctttgggtggggcctcccggctgttttcgtggctgtgtgggtatccgtgagagctacgctggcaaacacaggatgttgggacctgagctctgggaacaaaaaatggatcatccaggtgcctatacttgcctccatcgtgttaaatttcatattgttcatcaacattgtgagagtccttgccactaagctgcgggagacaaacgctggcagatgtgacactaggcagcaatacaggaagctgctgaaatcgacccttgtcttgatgccgctgttcggtgtacactacattgtgtttatggcgaccccttacaccgaggtgagtggtacattgtggcaggtccaaatgcattatgagatgctgttcaattctttccaggggtttttcgtggctatcatctactgcttctgtaacggagaagtgcaggcagagatcaaaaaaagctggagtagatggacgctggccttggattttaagcggaaggccagaagcggcagtagcagttactcatatggtcccatggtcagccacacctccgtcactaacgtgggccctagggtgggcctgggcctccccctttctccaaggctgctgccaactgccactacgaatggccatccacagcttcccggacatgcaaagcccggtacgcccgcacttgagactttagagacaacaccacccgcaatggcagctccaaaggacgacgggtttctgaacggatcatgcagcgggctggatgaagaggccagcggccctgagcgacccccagccctgttacaggaggagtgggagacagtcatgtag

SEQ ID NO: 6817 - DNA, 1584 bp, Artificial Sequence
  derived and/or modified sequence
atggggacagctaggattgccccaggtttagctctcttactctgctgccccgtgttgtcctcggcgtacgccctagtagacgcagacgatgttatgacgaaggaggagcagatttttttgctgcaccgggcacaagctcagtgcgagaagcgactaaaagaggtgctgcagcggccagcatcaatcatggagtccgacaagggttggacctcagcaagcactagcgggaaaccccgaaaagacaaagcatccgggaagctttacccagaatctgaagaggataaagaggcccctactggaagtaggtataggggtcggccatgcctgccagaatgggatcatattctgtgttggcccctcggagcaccgggagaggtggtggccgtcccttgtcctgattacatttatgattttaaccataagggacacgcataccgacgatgcgatcggaatggatcctgggaactggtacctgggcacaacagaacctgggcaaactactctgagtgtgtgaagttcctcacaaatgagaccagggagcgcgaggtctttgaccgcttgggtatgatatataccgtcggctatagtgttagccttgcctctctgacagtggccgtgctcatactggcctactttaggcgactgcactgtacacggaactatattcatatgcacctgtttctgtcctttatgctgagggccgtttcaatcttcgttaaagatgccgtgttgtactctggggcaactcttgatgaagctgagcggctgaccgaggaggaacttagggccattgctcaggcgccacccccaccagctactgctgctgccggatatgcaggatgtcgcgtggccgtaacattctttctgtattttctggctacaaactactactggatcctcgtggaagggctgtatctccactcgcttatctttatggccttcttttcagaaaagaaatatttatggggattcacagtgttcggttggggactgccagccgtctttgtcgccgtttgggtgtccgtcagggccactctggctaacactggatgctgggatctctcatccggaaataagaaatggatcattcaagtgcctatacttgcaagcatcgtgctcaattttatcctctttattaatatcgtgagggtgctggccacgaagctgcgtgaaacaaacgccggacggtgtgatactcgtcagcagtatagaaaactgctgaagtctactctagtactgatgcccctctttggggtgcattacatagtatttatggctaccccttacaccgaagtttcaggtaccctttggcaagtccagatgcactatgagatgctgtttaatagctttcaaggcttctttgttgccattatctactgcttttgcaacggggaggtgcaggccgaaatcaagaagtcttggagccggtggacactcgctttagactttaaacggaaagccaggtcggggtcaagtagttattcatatggtcctatggtgagtcatacttctgtcacgaacgtggggccaagggttggtctgggactacccttgagccctagactactgccgacagccacctag

SEQ ID NO: 6818 - DNA, 1002 bp, Artificial Sequence
  derived and/or modified sequence
atgggaacagcccgtatcgcccctgggctggcactgctcctgtgctgccccgtgctgagcagcgcctatgctttagtggatgcggatgacgttatgacaaaagaagagcaaatttttctgctgcacagggctcaggcgcagtgtgagaaacggctgaaagaggtgctgcaacgtcctgccagtattatggaatcagacaaggggtggaccagtgcttccacttccggtaaacccagaaaagataaggcctctggaaaactttacccagagtctgaggaggataaagaagcacccacagggtcacggtatcgcggacggccatgtctgcccgagtgggaccatattttgtgctggccactcggcgcacctggcgaggtcgtggctgtaccctgccctgattacatttacgactttaaccacaaggggcatgcatatcgtcggtgtgaccggaacgggagttgggagctcgttcccggacataatcggacttgggccaactactcagagtgtgtcaagttcctgacgaacgagaccagagaaagagaagtctttgaccgtctgggaatgatatatactgttggatacagtgttagccttgcctcactgaccgtggccgttctcatactcgcttactttcgtaggttgcattgcacccggaactatattcacatgcacctgtttctttctttcatgttgagagccgtgtccatcttcgttaaagacgcagtcctgtactctggcgctacacttgacgaggcggagcgtctgacagaagaggagctgagggccattgcccaggctccacctccccctgcaactgctgctgcaggctacgcaggatgtcgagtggccgtgaccttctttttatatttccttgcaacaaactattactggattctggttgaagggctctatttgcattcactcatcttcatggcatttttttctgagaaaaaatatctctgggggttcactgtgtttgggtggggcgctggtacctag

SEQ ID NO: 6819 - DNA, 1782 bp, Artificial Sequence
  derived and/or modified sequence
atgggcactgctcggattgcccctggtctggccctgcttctgtgctgtcccgtgttgtcaagtgcatacgcgctggttgacgcagatgacgttatgacaaaagaagagcagatctttctcctgcacagggcccaggcccagtgtgagaagcgcctgaaggaagttctgcaacgccctgcttcgattatggaaagcgacaaagggtggaccagtgcttcaacttccgggaagccccgtaaagataaggcttcaggaaaactgtaccctgagtcagaggaggataaagaagcgcctaccggctcaagatatcgcggaagaccgtgcctgccagaatgggaccatatcctatgctggcccttgggggctcccggtgaggtggtcgcagtcccgtgccctgactatatctatgattttaatcataagggacacgcgtatcgcagatgcgaccgaaatggtagttgggaattagtgccaggacataatagaacctgggccaattactccgagtgtgttaaattcctcacgaatgaaacacgcgagagagaagtcttcgacaggctcggcatgatatacacagtgggctactccgtttcgctcgcttccctgactgtggctgtgctcattctggcctatttccggaggctgcattgtaccaggaattatatccatatgcacctgttcctgagtttcatgcttagagccgtgtccatcttcgttaaagacgcagtcctatactccggcgctactctggatgaggcagagaggctcaccgaagaagaactccgtgccattgcccaagcaccaccccctccggctactgcggcagccggttacgccggatgccgtgtggctgtaacgttcttcctgtattttcttgccactaattactattggatactggtggaagggttgtacctccactcactgatatttatggcattcttctctgagaagaaatatttgtgggggtttacagtctttgggtggggacttcctgccgtgtttgtggccgtgtgggtgagcgtaagggcgactctcgccaacacagggtgttgggatctttcctccggcaataaaaagtggatcattcaggtgcccatcttagctagtatcgtcctgaacttcattttgttcataaacattgtgcgggtgctggccacaaaacttcgagagaccaatgctggtcggtgcgacaccagacagcagtaccgaaaattgctcaaatcaacgctcgtcctcatgccgctcttcggcgttcattacatagtgtttatggccacgccttacactgaagtgtccgggactctgtggcaagtgcagatgcattatgaaatgctcttcaactcctttcagggattttttgtggctatcatctactgcttttgcaacggggaggtgcaagccgaaatcaagaagtcatggagtcgctggactttggcactggattttaaacggaaagcacggagcggctcgtcttcatacagttatggtcccatggtgtcccatacatccgtgaccaatgtgggacctagggttggcctgggactgcccttatcgccaaggctcctgccaactgccacaacaaatggtcacccacaacttccgggacacgctaagcctggaaccccagccctcgaaacactggagactactccaccagctatggccgcacccaaagacgacggattcctgaatgggtcatgtagtggcttggacgaagaggccagcggaccagagcgacctccagcattgctccaagaagagtgggaaactgttatgtag

SEQ ID NO: 6820 - DNA, 1782 bp, Artificial Sequence
  derived and/or modified sequence
atgggtacggccaggatagctcctggactagctttgctgttatgttgtccggtgttgtctagcgcttacgcacttgttgacgcagacgatgttatgactaaggaagaacagatctttctcctccaccgcgctcaggcccagtgtgaaaagaggctaaaagaggtgttgcagcgcccagcctctatcatggaatcggataaggggtggacgagcgctagcacctccggtaagcctcgtaaggataaagctagtggcaagctctatccggaatcagaggaggataaggaagccccaacaggaagccgataccgcggtcggccttgcctgcccgagtgggaccatatcctatgttggcccctaggcgcacctggcgaggtagtggctgttccttgcccagattatatatacgacttcaaccataagggccacgcatatcgcagatgcgaccgcaatggctcatgggagctggtgcctggtcataacaggacctgggccaactactccgagtgcgtgaaatttctcaccaatgagacccgtgagcgtgaagtgttcgaccgcctcgggatgatttacactgtgggttatagtgtgagcctggccagtttgaccgttgccgtcttgatactcgcctacttcagacgtttacactgcactcgtaattacatacacatgcatctgtttctgtccttcatgctgcgtgctgtgtcaatctttgtcaaagacgccgttctgtactctggtgcaaccctggacgaggctgagcgccttaccgaggaggagctgcgagctatcgcccaggcccctcccccacctgcaactgctgccgctggctatgccggatgtcgggtggcagtgaccttcttcctgtactttcttgcaaccaattattattggatccttgtcgagggactttaccttcatagtttgatctttatggcattcttcagcgagaagaagtacctgtggggctttacagtctttggctggggcttacccgctgtgtttgtggcagtgtgggtatcagtccgcgctacattagctaatactggctgctgggatttgagttcaggaaataaaaagtggatcattcaggtgccgatcctggcgtccatagtcttaaatttcatcctctttattaatattgtaagggtgttggcaaccaagctgagagagacgaacgccggtcggtgtgacacccgtcagcaatacaggaagctgttgaaatcaactcttgtgctgatgccactgttcggagtacattatatcgtctttatggctaccccgtataccgaggtgtcaggaactttatggcaagtgcagatgcattacgagatgctctttaactcattccagggttttttcgtggccatcatctattgtttttgcaacggagaagtgcaggcggagatcaagaagtcctggtcccggtggacgctggcacttgattttaaacgaaaagcacgctctggttctagctcatatagctacggccctatggtctcgcacacaagcgtcacaaatgtggggcctcgggtgggtctggggctgcccctgagtccacggcttttgccaactgctactaccaacgggcacccacagctgccgggacacgcgaaacccggtacgccagccctggaaaccttagaaacgactccaccagcaatggccgctcccaaggatgacggcttcctgaacgggagctgttcaggactagatgaagaggcctcagggccagagcgtcctccagctttgctgcaagaggagtgggagacagtgatgtag

SEQ ID NO: 6821 - protein, 13 aa, Artificial Sequence
  derived and/or modified sequence
YMEEAIMQPLDHK

SEQ ID NO: 6822 - protein, 145 aa, Artificial Sequence
  derived and/or modified sequence
MSTEGGGRRCQAQVSRRISFSASHRLYSKFLSDEENLKLFGKCNNPNGHGHNYKVVVTVHGEIDPATGMVMNLADLKKYMEEAIMQPLDHKNLDMDVPYFADVVSTTENVAVYIWDNLQKVLPVGVLYKVKVYETDNNIVVYKGE

SEQ ID NO: 6823 - DNA, 935 bp, Artificial Sequence
  derived and/or modified sequence
gcgcagccgcggtgggaggaggcaccggccgcgcggcgggaggaggtgccggccgagcaccgcagacagcgccgggaagatgagcacggaaggtggtggccgtcgctgccaggcacaagtgtcccgccgcatctccttcagcgcgagccaccgattgtacagtaaatttctaagtgatgaagaaaacttgaaactgtttgggaaatgcaacaatccaaatggccatgggcacaattataaagttgtggtgacagtacatggagagattgaccctgctacgggaatggttatgaatctggctgatctcaaaaaatatatggaggaggcgattatgcagccccttgatcataagaatctggatatggatgtgccatactttgcagatgtggtgagcacgactgaaaatgtagctgtttatatctgggacaacctccagaaagttcttcctgtaggagttctttataaagtaaaagtatacgaaactgacaataatattgtggtttataaaggagaatagctattggggttagcattgcacaaagcccagtttctttctgtgtttgaaaaagattttgatccccttggaatattaagaggtcaacacgtgattgttgtacgtacacattgtgctctggagtgcctatttattgaaatcattgtaagacctgttataaatttaagtctatttaaaactaaacttgtaatatacatcctgaaaatcatttagagagtcttttatttataaattaaaaatcacttcattttcacaaaatgttttggtgtgggattatttgaaagcaaaagaaatctaattttgttttctccattacctcattttagtattaatttttacttggtataatatacatggttaaaatgcttatgtgacttcgagtaggtgaatcttaaagaaataaaattcaagtgaccacaaa

SEQ ID NO: 6824 - DNA, 581 bp, Artificial Sequence
  derived and/or modified sequence
gggaaataagagagaaaagaagagtaagaagaaatataagagccaccatgtcgaccgagggtgggggaaggcgctgtcaggcgcaggtatcaagacgaatcagcttcagcgcgtcgcaccggctttactcaaagttcttgtcggatgaagagaacctcaagctgtttgggaagtgcaacaatcctaatggacatggacacaattacaaagtcgtggtcacggtgcacggcgaaatcgaccccgccacgggtatggtcatgaatttggccgacttgaagaagtacatggaagaggctattatgcaacccctggaccataagaacctcgatatggatgtcccgtattttgcggatgtagtctccactacagagaacgtggcagtatacatttgggacaaccttcagaaagtgctcccagtgggggtgctgtataaagtaaaagtctatgagacagacaataacatcgtggtgtacaaaggagaatgataagctgccttctgcggggcttgccttctggccatgcccttcttctctcccttgcacctgtacctcttggtctttgaataaagcctgagtaggaag

SEQ ID NO: 6825 - DNA, 438 bp, Artificial Sequence
  derived and/or modified sequence
atgagcaccgagggcggcggcagaagatgccaggcccaggtgagcagaagaatcagcttcagcgccagccacagactgtacagcaagttcctgagcgacgaggagaacctgaagctgttcggcaagtgcaacaaccccaacggccacggccacaactacaaggtggtggtgaccgtgcacggcgagatcgaccccgccaccggcatggtgatgaacctggccgacctgaagaagtacatggaggaggccatcatgcagcccctggaccacaagaacctggacatggacgtgccctacttcgccgacgtggtgagcaccaccgagaacgtggccgtgtacatctgggacaacctgcagaaggtgctgcccgtgggcgtgctgtacaaggtgaaggtgtacgagaccgacaacaacatcgtggtgtacaagggcgagtag

SEQ ID NO: 6826 - DNA, 438 bp, Artificial Sequence
  derived and/or modified sequence
atgtctactgaggggggcggtaggagatgtcaggcacaggtgtcccggaggatttctttcagcgcctcacacagactttacagcaaattcctgtcagacgaagagaatctcaagctgtttggaaagtgtaacaacccaaatggccatgggcacaactacaaggtggtagtcacggtccacggcgaaatcgatcccgccactgggatggtcatgaatttagccgatcttaagaaatacatggaggaggctattatgcaacccctggaccacaagaacttggacatggacgtgccatacttcgcagacgtggtctctaccacagaaaacgtcgcggtgtacatttgggacaacctccagaaggtcctgccggtgggcgttctgtacaaggtaaaggtgtatgagacagacaacaacatagtggtgtataaaggagagtag

SEQ ID NO: 6827 - DNA, 438 bp, Artificial Sequence
  derived and/or modified sequence
atgagcacagaaggaggcggccgccgctgccaggcccaggtgagccgccgcatctccttcagcgccagccaccggctgtacagcaagttcctgagtgatgaggagaacctgaagctgtttgggaagtgcaacaaccccaatggacatggccacaactacaaggtggtggtgacagtgcacggggagattgatcctgccaccggcatggtgatgaacctggccgacctgaagaagtacatggaggaggccatcatgcagcccctggaccacaagaacctggacatggatgtgccctactttgctgatgtggtgtccaccacagaaaatgtggccgtgtacatctgggacaacctgcagaaggtgctgcctgtgggcgtgctgtacaaggtgaaggtgtatgaaacagacaacaacatcgtggtgtacaagggggagtag

SEQ ID NO: 6828 - DNA, 438 bp, Artificial Sequence
  derived and/or modified sequence
atgagcaccgagggcggcggccggcggtgccaggcccaggtgagccgacgcattagcttttctgcatctcaccgcctctattctaaattcttatctgacgaggagaatctgaagctgttcggaaagtgtaacaatcctaacggccacgggcataactataaggtagttgtgactgtgcacggcgaaattgatccagccaccggaatggtgatgaatctagcagacctgaagaaatatatggaggaggctataatgcagcccctggatcataaaaacctggatatggatgtgccctacttcgctgacgtggtgtctaccaccgaaaatgttgcggtatacatttgggataacctgcagaaagtgttgccagtcggggtgctgtataaggtaaaagtgtacgagactgataacaacatcgtggtctataaaggggaatag

SEQ ID NO: 6829 - DNA, 438 bp, Artificial Sequence
  derived and/or modified sequence
atgagcaccgagggaggtggtagaagatgccaggcccaagttagccggcgaatttcctttagcgcgtcacaccgcctgtattccaaatttctcagcgacgaggaaaatctcaaattgttcggaaaatgtaataacccaaacgggcatgggcacaattataaggtggtcgtaactgtccacggagagattgaccctgcaacaggcatggtgatgaacctggccgatctgaaaaaatatatggaggaggcaatcatgcagcctttggaccacaaaaatcttgacatggatgtgccctatttcgctgatgtcgttagcaccaccgaaaacgtagccgtatacatttgggacaatctccagaaagtgttaccggtgggagttctgtacaaggtgaaggtgtatgaaactgataacaacatcgtggtatacaagggcgagtag

SEQ ID NO: 6830 - DNA, 438 bp, Artificial Sequence
  derived and/or modified sequence
atgagtacagagggcggcggacgccgatgccaggcacaagtatcccggcgaatctcattttcagcttcgcataggctgtatagcaagtttctgagcgacgaggagaacctgaaactgtttggcaagtgtaataatcccaatggacacggccataactataaagtagtcgtaactgtgcacggcgaaatagacccagctaccggaatggttatgaacctggcggatcttaagaaatatatggaggaggcaatcatgcagccattagaccacaagaatcttgacatggacgttccctacttcgcagatgttgtcagcactacagagaacgtggcagtgtacatatgggacaatttgcagaaagtactgccagttggagtgctctacaaagtaaaagtgtatgagaccgacaacaacattgttgtgtacaaaggcgagtag

SEQ ID NO: 6831 - DNA, 438 bp, Artificial Sequence
  derived and/or modified sequence
atgagtacagagggcggaggccgccgctgtcaggcccaggtgtctcggaggatttcttttagcgcaagtcaccgactttacagtaagtttctgtcagacgaagagaatctgaagctgtttggcaaatgtaataaccccaatgggcacggacacaattacaaagtggtagtaacggttcacggagagattgaccctgctacaggaatggtaatgaacctcgcggatctgaaaaaatacatggaggaggccatcatgcagccactggaccataagaatctcgatatggatgttccttacttcgctgacgtagtctccacaaccgaaaacgtagctgtgtacatctgggataatctgcaaaaggtgctgccagtgggagtgttgtataaagttaaagtttacgaaactgacaacaatatcgtggtttataaaggtgagtag

SEQ ID NO: 6832 - DNA, 435 bp, Artificial Sequence
  derived and/or modified sequence
atgagcactgagggaggtggacgccgctgtcaggctcaagtctcccgccgcatctccttcagtgcctcccaccggctgtacagcaagtttctgtcagatgaggagaacctaaagcttttcggtaagtgcaataaccccaacggccatggccataactacaaggtggtcgtgacggtccacggtgagattgatccagccacgggtatggtaatgaatctggcggacctcaaaaagtacatggaggaagccataatgcagccactcgatcataagaatttggatatggatgtgccgtacttcgcagatgtggtctccacgacggaaaatgtggctgtgtacatatgggacaacctacaaaaggtgctgccagtcggagtgttgtacaaagtcaaggtatatgaaacagacaataatatcgttgtgtacaagggcgag

SEQ ID NO: 6833 - DNA, 435 bp, Artificial Sequence
  derived and/or modified sequence
atgtccactgagggagggggccgccggtgccaggctcaggttagccggagaatcagcttcagtgctagtcatcgcttatacagcaagttcttatcggatgaagaaaacctaaagctcttcggaaaatgtaacaatcccaacggccacgggcacaattataaagtcgtggtgacagtgcacggggagatcgatcctgccacaggtatggtgatgaatctcgcagatctcaagaagtacatggaagaggcgataatgcagccattagaccacaaaaatcttgacatggatgtaccatactttgccgacgtggtttccaccactgagaacgtggcagtttacatctgggataacctgcagaaagtcttgcccgtcggggtcctctacaaggtcaaggtttacgaaacggataacaatatagttgtctacaaaggtgag

SEQ ID NO: 6834 - DNA, 435 bp, Artificial Sequence
  derived and/or modified sequence
atgtcaacagagggcggcggtagacggtgccaggctcaggtgtcacgacggattagcttcagcgcaagccaccggctctactccaagttcctgtccgatgaagaaaacctcaaactgttcggtaaatgcaataacccaaatggacatgggcataactataaggtcgtcgtgaccgtccacggggaaattgatccagcgacagggatggtgatgaaccttgcagaccttaagaaatacatggaggaagcaattatgcagcccttggatcacaaaaatttggatatggacgtgccctattttgcagacgtcgtgtcaaccaccgagaatgtggccgtgtacatttgggacaatctgcagaaggtgcttccggtgggagtactttacaaagtgaaggtgtacgaaacggataataacatcgtggtttacaagggagaa

SEQ ID NO: 6835 - DNA, 435 bp, Artificial Sequence
  derived and/or modified sequence
atgtctaccgagggcggcggcagaagatgtcaggctcaggtatctcggaggatttcatttagcgccagccacaggctctacagtaagttcctgagcgacgaagagaatctcaagcttttcggtaaatgtaacaacccgaatggccacgggcacaattacaaagtcgtcgtgacagtccacggtgaaattgacccagcaaccgggatggtaatgaacctggcggatctcaaaaaatacatggaagaagccatcatgcagcctctggaccacaagaatctcgatatggatgtcccttacttcgctgatgtggtctccacaactgagaatgtcgccgtgtacatttgggacaacctgcagaaggtcttgcctgtgggagtgctgtacaaggtcaaagtatacgaaacagacaacaacattgtggtgtacaagggggag

SEQ ID NO: 6836 - DNA, 435 bp, Artificial Sequence
  derived and/or modified sequence
atgtccaccgagggaggaggacgccggtgccaggcccaagtgtcccggcggatatccttcagcgcttcccatcgtctgtacagcaagttcctctcggacgaagaaaatctcaaattgttcgggaaatgtaacaatccgaatggtcatggccacaattacaaggtggtcgtcactgtgcatggtgaaattgatccagcaaccggcatggtcatgaaccttgcagatctcaaaaagtacatggaagaagccatcatgcagcctctcgatcacaagaacctggacatggacgtgccgtacttcgcagatgtggtgtcgaccactgagaatgtcgcggtgtacatttgggacaacttgcagaaggtcctgccggttggagtgctgtacaaggtgaaagtgtacgaaaccgacaataacattgtggtgtataagggcgaa

SEQ ID NO: 6837 - DNA, 435 bp, Artificial Sequence
  derived and/or modified sequence
atgtccactgaaggcggcggaaggaggtgtcaagcacaggtcagccgcaggatatccttctccgcaagccatcgtctctatagtaaattcctcagtgacgaagagaacctgaagttattcgggaagtgtaataacccaaatgggcatgggcacaattataaggtggtggtgactgtgcatggggaaatcgaccccgccaccggcatggtcatgaacctcgctgatttgaagaagtacatggaagaggccatcatgcaacctttggatcacaagaacctggacatggacgtaccttacttcgctgatgttgtgtccaccactgagaatgtagccgtgtatatttgggacaatctgcagaaggtgctacccgtcggtgtgttgtataaggtgaaagtgtacgagactgacaataacatagtggtttacaagggagaa

SEQ ID NO: 6838 - DNA, 435 bp, Artificial Sequence
  derived and/or modified sequence
atgagcactgaaggaggcggccggaggtgccaggcccaagtgtccaggcggatttcattctcggcctcgcaccggctgtactcgaagtttctgtccgacgaggagaatctgaaactgttcggtaagtgcaataaccctaacggacacgggcacaactacaaggtcgtggtcactgtccacggagagatcgacccggcaacgggaatggtgatgaacctcgcggacctcaagaagtacatggaagaggctatcatgcagccgttggatcacaagaatctggacatggatgtgccatacttcgctgacgtggtgtcgaccactgaaaacgtggccgtctacatttgggacaacctgcaaaaagtgctcccagtcggagtgttgtacaaggtgaaagtgtacgagactgataacaatatcgtcgtgtacaagggagag

SEQ ID NO: 6839 - DNA, 435 bp, Artificial Sequence
  derived and/or modified sequence
atgagcactgaggggggtggtaggcgctgccaagcacaggtctcccggcgtatctctttcagcgcctcgcacagactgtactccaaatttttgtcagatgaggaaaacttaaaactgttcggaaagtgcaacaaccccaacggtcacggccacaactacaaggtggtggtgacagtccatggtgaaatagatcccgcaaccgggatggtcatgaatctcgctgacttaaaaaaatacatggaggaagctatcatgcagcccttggaccataagaatctggacatggatgtaccctatttcgcggacgtggtctctactaccgagaatgtggcagtgtacatctgggacaacctgcagaaagtcctgccggtcggcgtcctgtacaaagtgaaagtatatgaaacagataataatatagttgtatacaaaggggag

SEQ ID NO: 6840 - DNA, 435 bp, Artificial Sequence
  derived and/or modified sequence
atgagcacggaagggggcgggcgtagatgtcaggctcaagtttcccgtaggatcagtttttcagcctcgcacagactgtacagtaagtttttatcggatgaggaaaaccttaagttgttcggaaagtgtaataacccaaatggccacggccacaactacaaagttgttgtaacagtccacggtgaaattgatccagcaacaggaatggtgatgaatctggctgatttaaagaaatacatggaagaggccatcatgcagccactcgaccacaaaaatcttgacatggatgtgccatatttcgctgacgtcgtgtctaccacggaaaacgtggctgtatacatatgggataacttacagaaggtgctgcccgtaggggtcctttacaaagtgaaggtttacgagaccgataataacatcgtcgtgtacaagggggag

SEQ ID NO: 6841 - DNA, 435 bp, Artificial Sequence
  derived and/or modified sequence
atgtccactgaaggtgggggcagaagatgccaggcacaagtgagccgacggatcagcttttccgcatcgcatcggttgtactcgaagtttctgtcggatgaggagaatctgaagctgttcggaaagtgtaacaaccccaacggtcatgggcacaactacaaggtggtggtcactgtgcatggagaaattgatccggccaccggtatggtgatgaaccttgcggacctcaagaaatacatggaggaagctattatgcaacctctggaccataagaatcttgatatggatgtcccttactttgccgacgtcgtgtccactaccgagaatgtggcagtttacatatgggataacctgcaaaaggtgctgcctgtgggagtgctgtacaaagtaaaggtctacgagactgacaacaatatcgtggtctacaagggtgag

SEQ ID NO: 6842 - DNA, 435 bp, Artificial Sequence
  derived and/or modified sequence
atgtctacagaaggaggcggacgccgatgccaggcgcaggtttcacgtcggattagttttagtgctagtcatcggttgtattcaaagtttttatcagatgaagaaaatcttaagttgttcggtaaatgcaacaatccgaatggtcatggtcacaattacaaagtcgtggttaccgtacatggggaaattgatccggcgacaggaatggttatgaacttagccgaccttaaaaaatacatggaggaagcgattatgcagcctttggatcataaaaatcttgatatggatgtgccttattttgcggatgttgtcagcacgacggaaaatgttgcggtatacatctgggataacctccagaaagtgctcccggttggagtcttatacaaagttaaagtctacgagaccgataataatatcgtagtctataaaggagag

SEQ ID NO: 6843 - DNA, 435 bp, Artificial Sequence
  derived and/or modified sequence
atgtccacagaaggcggtggaagaaggtgtcaggcgcaggtgtctagaagaataagctttagcgcatcccacagattgtactccaaattcctgtcagacgaagagaacctgaagcttttcggcaaatgtaacaatcctaacggccatggccataactataaggtggttgtgactgtgcacggtgaaatcgacccagcaacaggaatggtaatgaatttggccgacctgaagaaatacatggaggaggccattatgcagccgctggaccacaagaatctggatatggatgttccctatttcgccgatgtggtgtctactaccgagaacgtggcagtatacatatgggacaacctgcagaaagtgcttccggtcggagtactttacaaggtgaaagtgtacgagactgacaacaacatcgtggtttataagggagag

SEQ ID NO: 6844 - DNA, 435 bp, Artificial Sequence
  derived and/or modified sequence
atgagcaccgaagggggaggaaggcgctgccaagcgcaggtgtcgcgccggatatccttcagcgcctcccaccgcctgtattccaagttcctgtcagatgaggaaaatctgaaacttttcggaaaatgtaataacccgaacgggcacggacacaactacaaggtggtggtcaccgtgcatggtgagatcgacccggcgaccggtatggttatgaaccttgctgacctcaagaagtacatggaagaagccatcatgcagccactggaccataagaacctggacatggatgtgccatacttcgccgatgtggtgtccaccacggaaaatgtcgctgtgtacatttgggacaatcttcagaaagtgctccccgtgggagtcctctacaaggtgaaggtgtacgaaaccgataacaacatcgtggtgtacaaaggagaa

SEQ ID NO: 6845 - DNA, 435 bp, Artificial Sequence
  derived and/or modified sequence
atgtcaactgagggcggaggcagacggtgtcaagcccaggtgtcccgaagaataagctttagtgccagtcatcgactgtattccaaatttctttccgacgaagaaaacctgaaactgttcgggaagtgcaataaccccaatggacacgggcacaactacaaggtggtcgtgaccgtgcacggagagatcgaccctgctaccggtatggtcatgaacttggcggacttgaagaagtatatggaagaagcaatcatgcagccactcgaccataagaatttggacatggatgtgccttatttcgcagatgtcgtcagcactacagagaacgtggccgtctacatctgggacaacctgcagaaggttctgcccgtcggagtactctataaggtgaaggtgtatgagactgacaataacatagttgtttacaagggggag

SEQ ID NO: 6846 - DNA, 435 bp, Artificial Sequence
  derived and/or modified sequence
atgtccaccgagggaggaggacgccgctgtcaagcacaagtctcccggcgcatcagcttttcggcgagccatagactgtactctaagtttcttagcgacgaagaaaaccttaaactttttggtaagtgcaataacccgaatggtcacggtcataactacaaggtggtggtgactgttcacggggaaatcgacccggcaaccggcatggtgatgaatcttgctgatcttaagaagtacatggaggaagcgattatgcagccacttgaccataagaaccttgatatggatgtgccatacttcgccgatgtggtgtccaccaccgaaaacgtcgccgtgtatatctgggacaacctccaaaaggtgcttcctgtcggcgtcctctataaggtgaaggtctacgaaactgataacaatattgtggtgtacaaaggagaa

SEQ ID NO: 6847 - DNA, 435 bp, Artificial Sequence
  derived and/or modified sequence
atgtctacagaagggggcggacgcagatgccaagcccaggtgtctaggagaatcagtttctcagcatcacacagactgtactctaagtttcttagcgatgaggagaacctgaaactgtttggcaaatgtaataaccctaacggacatgggcacaactacaaagttgtcgtcacagttcacggagaaatcgacccagcaacaggcatggtcatgaatctggccgatctgaagaaatacatggaagaggccatcatgcagcccctggatcataagaacctggatatggatgtgccttatttcgccgatgtggtgtcgaccacagagaacgtcgctgtatatatttgggacaacctgcagaaggtgttgcctgtgggagttctttacaaagtgaaggtgtacgagaccgataataatattgtggtctataaaggggaa

SEQ ID NO: 6848 - DNA, 435 bp, Artificial Sequence
  derived and/or modified sequence
atgtcaaccgaaggaggtggacgcaggtgtcaggcgcaagtgtcgcggcggatctccttctcggcctcgcatcggctgtactcaaaattcctgtccgatgaggaaaatctcaagctgttcggaaagtgcaataatcccaacggccatggacataactacaaagtggtggtgaccgtccatggggagatcgatccggcgactggtatggtgatgaacctggccgacctgaagaagtacatggaggaagctatcatgcaaccgctggatcacaaaaatctcgacatggatgtgccgtacttcgccgacgtagtgtcgaccaccgaaaatgtggcagtgtacatctgggacaatctccagaaggtcctcccggtcggagtcctttacaaagtcaaggtctacgaaactgataacaatatcgtcgtgtacaagggcgag

SEQ ID NO: 6849 - DNA, 435 bp, Artificial Sequence
  derived and/or modified sequence
atgagcaccgagggaggaggacgccggtgtcaggcgcaagtctcgagacgcatctccttttccgcctcacaccgactttactcaaagttcctctctgacgaggaaaacctgaagctgtttggtaagtgcaataacccaaacggacacggccacaactataaagtggtggttacggtgcacggagagatcgatccagcgactggaatggtgatgaatctggcagacctcaagaaatacatggaggaggctattatgcaaccactggatcacaagaatcttgatatggacgtcccgtacttcgccgacgtggtgtccactactgaaaacgtggccgtgtacatttgggacaatctgcagaaggtccttcctgttggggttctttacaaggttaaggtgtacgaaaccgacaataacatcgtggtctacaagggagag

SEQ ID NO: 6850 - DNA, 435 bp, Artificial Sequence
  derived and/or modified sequence
atgtcaacggaaggtggcggaaggcgatgtcaggcacaggtctcacgcagaatttccttctctgcctcacataggttgtactctaaattcttgtcggacgaagaaaatcttaaactgttcggcaagtgtaataaccctaatggccatggacataattataaggtcgtcgttaccgttcatggtgagattgaccccgccacgggcatggtgatgaatcttgctgatttgaaaaaatatatggaggaagctatcatgcagccgctcgaccacaaaaatcttgatatggatgttccttactttgcggatgtggtaagcacaactgagaacgtcgcggtctacatttgggataaccttcaaaaggtcctacccgtcggtgtgctctacaaagttaaggtttacgaaacagacaataacattgtcgtgtataagggagag

SEQ ID NO: 6851 - DNA, 435 bp, Artificial Sequence
  derived and/or modified sequence
atgagcaccgagggtggcggcaggcgctgtcaagcccaagttagccgaaggatcagcttctccgcaagccataggctctattctaagttcctgtctgacgaggagaatctcaagctcttcggaaagtgtaataatcccaatgggcatggccacaactacaaggtggtggttactgttcatggcgaaatcgaccctgcaaccgggatggttatgaacctggccgatttaaaaaaatacatggaggaggcaattatgcaaccactggatcataagaacctggatatggatgtgccctattttgccgatgtggttagcaccaccgagaatgtggccgtgtacatctgggataatctgcagaaagtgctgcccgtgggagtgctgtataaggtgaaagtttatgaaactgacaataatatagtggtttacaaaggcgag

SEQ ID NO: 6852 - DNA, 435 bp, Artificial Sequence
  derived and/or modified sequence
atgtcaactgaaggaggaggtagacgctgtcaggctcaagtgtcgagacgaatctctttttccgcatcccatcgactctactcgaagttcctgtccgatgaggaaaaccttaaactttttgggaagtgcaataaccccaacggtcacggtcataactacaaggtggtggttaccgtgcacggagaaatcgatcctgcgacgggcatggtcatgaacctcgcagacctgaagaagtatatggaggaagcaattatgcaaccacttgatcacaagaatcttgacatggatgtgccatacttcgcagatgtcgtctcaaccaccgagaacgtggcagtttacatatgggataaccttcaaaaagtccttcccgtcggggtgctttacaaggtgaaagtttacgagactgacaacaacatcgtggtttacaagggcgaa

SEQ ID NO: 6853 - DNA, 435 bp, Artificial Sequence
  derived and/or modified sequence
atgtccaccgaaggaggaggccggcggtgtcaggctcaagtgtctagacggatttccttcagtgcctcacatcgactgtatagcaagttcttgtcagacgaggagaatctgaaactctttgggaaatgtaacaatcccaacggccatgggcataactataaagtggtggtgactgttcatggagagatcgacccagctactggcatggttatgaacctcgccgatcttaagaagtacatggaagaggctatcatgcaaccactcgatcacaagaatctcgacatggatgtcccttattttgcggatgttgtgagcacaaccgagaatgttgcagtatacatctgggacaacctgcagaaggtgcttccagtgggtgtgctctacaaggtcaaggtttatgagacggataacaatattgtagtctacaaaggcgag

SEQ ID NO: 6854 - DNA, 435 bp, Artificial Sequence
  derived and/or modified sequence
atgtcgacggaaggtggtggtcgtcgttgtcaagcgcaagtatcgcgtcgaatatcgttttcggcgtcgcatcgtttatattcgaaatttttatcggatgaagaaaatttaaaactatttggtaaatgtaataatccgaatggtcatggtcataattataaagttgttgttacggtacatggtgaaatagatccggcgacgggtatggttatgaatttagcggatttaaaaaaatatatggaagaagcgataatgcaaccgctagatcataaaaatttagatatggatgtaccgtattttgcggatgttgtatcgacgacggaaaatgttgcggtatatatatgggataatttacaaaaagtactaccggttggtgttttatataaagtaaaagtttatgaaacggataataatatagtagtttataaaggtgaa

SEQ ID NO: 6855 - DNA, 435 bp, Artificial Sequence
  derived and/or modified sequence
atgtcaaccgagggcggagggcgacggtgtcaagcgcaagtgtcaagacgaattagcttttctgcatcccacagactgtattccaagttccttagcgatgaagaaaatcttaagctgtttggaaaatgcaacaaccccaacggacacggacataactacaaggtggtggtgactgtgcatggtgaaattgacccggcaactgggatggtcatgaacctggctgacctgaagaagtacatggaagaggcaattatgcagcctctcgaccacaaaaacctcgatatggacgtgccgtactttgcggatgttgtgagcaccaccgaaaatgtggcagtgtacatatgggataatctgcaaaaggtcctgcctgtgggagtattgtacaaagtgaaggtttacgagactgacaataacatcgtcgtctacaaaggagaa

SEQ ID NO: 6856 - DNA, 435 bp, Artificial Sequence
  derived and/or modified sequence
atgtccaccgagggcggtggacggcggtgccaggcacaggtgagcagacgtatctcttttagcgcctcccacaggctatatagcaagttcctgagtgatgaagagaacctgaagttgttcgggaaatgtaacaatcccaatggacacggccataattataaagtggttgttaccgtccatggtgaaatcgaccccgcaactggtatggtgatgaatctcgccgacctcaaaaaatacatggaggaggcaattatgcaacctctggaccataaaaatctcgatatggatgtcccgtatttcgcagacgttgtttcgacgactgagaacgttgcagtgtatatatgggacaacctgcaaaaggttctccctgtgggggtgctgtacaaagtgaaagtgtatgaaacagataataatatcgttgtctacaagggagaa

SEQ ID NO: 6857 - DNA, 435 bp, Artificial Sequence
  derived and/or modified sequence
atgagcactgaaggcgggggaaggaggtgtcaagcccaggtctctcgaagaataagtttctccgcgtctcatcgcctctactccaaattcctgtccgacgaagagaatctgaagctgttcggcaagtgcaacaatcccaacggccatggacacaactataaagtcgtggtcaccgtgcatggtgaaattgatcccgccactggcatggtgatgaacctggccgatctgaaaaagtacatggaggaagccatcatgcaacccctggaccacaaaaaccttgatatggacgtgccatactttgcggatgtggttagcaccactgagaatgtcgctgtctatatctgggataaccttcagaaagtcctgcccgttggcgtgctttataaagtcaaggtgtacgagacagataacaacattgtggtctataaaggagag

SEQ ID NO: 6858 - DNA, 435 bp, Artificial Sequence
  derived and/or modified sequence
atgtcaactgaaggggggggtcgccgatgtcaggcacaggtgtcccgacgtatcagcttttcagcaagccacagactttactcaaagttcctgtcagacgaggaaaacctgaagttattcggaaagtgcaataatccaaacggacacggccacaattataaggtggtggtcacggtacacggcgaaatagatcctgcaactggcatggtgatgaaccttgctgaccttaagaagtacatggaggaagctattatgcaacccctggaccataagaacctagacatggacgtgccttacttcgctgatgtggtaagcaccactgagaacgtagccgtatatatatgggacaacctgcaaaaagtgctcccggttggtgtgttatataaggtgaaagtgtacgaaactgataataatattgtagtgtacaagggcgaa

SEQ ID NO: 6859 - DNA, 435 bp, Artificial Sequence
  derived and/or modified sequence
atgagcaccgagggcgggggtagacgatgccaagcccaagtgtcccggcgcatcagcttcagcgccagccatagactgtattcgaaattcttaagcgacgaggagaatctcaaactgttcgggaagtgcaataacccgaacggccatgggcacaattacaaggttgttgtgacagtgcacggagaaatcgacccagccacagggatggtcatgaatcttgccgatctgaagaagtacatggaggaagcaattatgcaaccattggatcacaaaaatctcgacatggacgtcccctactttgcagatgtcgtgtctacaacagagaacgtcgctgtctatatctgggacaatctgcagaaagtgctcccagtgggcgtgctgtacaaagtgaaggtttacgaaactgacaataatatcgtagtctataagggtgag

SEQ ID NO: 6860 - DNA, 435 bp, Artificial Sequence
  derived and/or modified sequence
atgtccacagaggggggtgggcgccgctgtcaggcccaggtttcacggaggatctctttcagtgcctcccaccggttgtacagcaagttcctttctgatgaggagaatctaaagctgttcggcaaatgtaacaaccccaacggccatggacacaactacaaggtggttgtcaccgtccatggcgaaatcgacccagcaaccggtatggttatgaatctcgctgacttgaaaaagtatatggaagaggcgatcatgcagcccctagaccataaaaatctggacatggatgttccttattttgccgatgtggtgagcacaacagagaatgtggcggtatacatctgggataaccttcagaaagtgttacctgtgggagtgctttacaaggtcaaagtctacgagacggacaacaacatagttgtctacaagggcgaa

SEQ ID NO: 6861 - DNA, 435 bp, Artificial Sequence
  derived and/or modified sequence
atgtccaccgaaggaggcggtaggcggtgtcaagcacaggtttcacggagaatttcgttctccgcatcgcatagactgtactcaaagttcctgagcgatgaagagaaccttaagctgttcggtaagtgtaataaccccaacggtcatgggcataactacaaagtggtggtgaccgtgcatggggagatcgatcctgcaactggtatggtcatgaacctggccgacttgaaaaagtacatggaggaggcaattatgcaaccacttgatcataagaaccttgacatggacgtgccttacttcgcggacgtggtgagcactaccgaaaatgtggccgtgtacatctgggataaccttcaaaaagtgcttcctgtcggagtgctttacaaggtgaaggtgtacgaaaccgataacaacatcgtggtgtacaagggagaa

SEQ ID NO: 6862 - DNA, 435 bp, Artificial Sequence
  derived and/or modified sequence
atgtctaccgagggcggcggacgtcgatgtcaggcccaggtatctaggcgcatctcattttccgcaagtcatagactatactcaaaatttctgtcagatgaagagaacttaaaactatttggcaaatgcaacaacccgaacgggcatggccataactacaaagttgtggtcacagtccacggcgagattgatccagccactggaatggttatgaatctcgccgacttaaagaagtacatggaggaagccatcatgcagccgctcgatcataagaacttagacatggatgtgccatacttcgccgatgttgtctccacaactgaaaacgtggctgtgtatatctgggacaacctgcaaaaagtcctcccagtgggggtcctctataaggtgaaagtatatgaaactgacaacaacatcgttgtgtataagggagag

SEQ ID NO: 6863 - DNA, 435 bp, Artificial Sequence
  derived and/or modified sequence
atgtctactgaggggggcggtcgccgttgtcaagcgcaggtgtcgcggaggatttccttctctgcatcgcaccggttgtacagcaagtttctgtccgatgaagaaaatcttaagctgtttggaaaatgcaacaatcccaatggtcatggacataactacaaggtggtggtgaccgtccatggagaaattgatccagcaactggtatggtgatgaatctcgcggatctcaaaaagtacatggaggaagccataatgcagccacttgatcacaaaaatctggacatggatgtgccttactttgccgatgtggtttcgaccactgagaacgtggcagtctacatatgggacaaccttcaaaaggtcttgccagtcggggtgctttacaaggtaaaagtgtacgaaacggacaacaacattgtcgtctacaagggagaa

SEQ ID NO: 6864 - DNA, 435 bp, Artificial Sequence
  derived and/or modified sequence
atgtcgaccgaaggtggaggaaggaggtgtcaggctcaagtatcccgccgaatttctttctctgcgagccatagattgtatagcaagttcctctccgacgaggagaatttaaagctgttcggtaagtgcaacaatcccaatggtcacggccataattacaaagtggtggttaccgttcacggcgagatcgatcctgcaaccggcatggtcatgaatctggcagatcttaagaaatatatggaggaagccattatgcaacctctggatcataagaacttggacatggatgttccatactttgccgacgtcgtatccacaacggagaatgttgccgtctatatatgggacaacctccagaaggttctgcctgtgggggtgctgtacaaagtgaaggtttacgagacagacaacaacatcgtggtctacaagggtgag

SEQ ID NO: 6865 - DNA, 435 bp, Artificial Sequence
  derived and/or modified sequence
atgagcacggagggcggggggcgcaggtgccaagcccaggtgtcgcggcgcatatctttctcagctagccatcgtttgtactcgaagttcctgtccgatgaggagaacctgaagttgtttggaaaatgtaacaatccaaacggacacggccataactataaggttgtggtgactgtgcacggcgaaattgacccggctaccggcatggtgatgaatctggccgacctcaagaagtacatggaagaagcgatcatgcagccgctcgaccacaaaaatctcgatatggacgtgccttacttcgcagacgtcgtgagcaccaccgagaacgtggccgtatacatctgggacaatcttcagaaagtcctcccggtcggagttttgtacaaggttaaggtctacgaaactgataacaacatcgtagtctacaagggtgaa

SEQ ID NO: 6866 - DNA, 435 bp, Artificial Sequence
  derived and/or modified sequence
atgtcaactgagggaggcgggcggagatgccaagcccaggtgtcccgccgcatctcctttagcgcttcgcaccggctgtactccaaattcctctccgacgaggaaaacctcaagttgttcggaaagtgtaacaacccaaacggacacggacataactataaggtggtggtgacggtgcacggggagattgacccggcgaccggaatggtgatgaacctggcggacttgaagaaatacatggaggaggccattatgcagcccctcgatcacaaaaatctcgacatggacgtgccatacttcgccgatgtggtgtcaaccaccgaaaacgtggcggtctacatctgggataatctgcagaaggtgttgccggtgggagtgctctacaaggtgaaggtgtacgagactgacaacaacatcgtggtgtacaaaggcgag

SEQ ID NO: 6867 - DNA, 435 bp, Artificial Sequence
  derived and/or modified sequence
atgtcgactgaaggaggaggaaggcggtgccaagcccaagtgtcgcggcggatctccttctccgcctcacaccgcctgtactcgaagttcctgagcgacgaagaaaacctgaagctgtttggtaaatgcaacaaccctaacggacacggacataactacaaggttgtggtgactgtccacggcgaaatcgacccggcgacgggaatggtgatgaatctggccgatttgaagaagtacatggaagaagccatcatgcaaccccttgatcacaaaaacctcgatatggacgttccgtacttcgctgacgtggtgtcgactaccgagaacgtcgcggtctacatctgggacaacctccagaaggtgctgcctgtgggcgtgctgtacaaggtgaaagtctacgagacggacaacaatatagtggtgtacaagggggaa

SEQ ID NO: 6868 - DNA, 435 bp, Artificial Sequence
  derived and/or modified sequence
atgtccaccgaaggtggaggtaggcgatgtcaagcgcaagtctcccggcgcatatctttcagtgcctcgcacagactctacagcaagtttctctcggatgaagagaaccttaaacttttcggaaaatgcaacaatccaaatggtcatggacacaattacaaggtggtcgtgactgtgcatggcgaaattgatcctgccaccggaatggtgatgaatctggcagatctgaaaaagtacatggaggaggccatcatgcagcctctggaccataagaatttggacatggatgtaccatactttgcggatgtggtgtccaccacggaaaacgtcgcagtgtacatttgggacaacctgcagaaagttctgcccgtaggggtgctctataaggtgaaggtgtacgaaactgataacaacatcgtcgtgtataagggagaa

SEQ ID NO: 6869 - DNA, 435 bp, Artificial Sequence
  derived and/or modified sequence
atgtcgactgagggaggcggacgccgttgccaagcacaggtcagcaggcgcatttccttttcggcatcccatagactgtacagcaagttcctgagcgatgaagaaaatctgaaactcttcggaaagtgtaacaacccaaacggacatggtcacaattacaaggtcgttgtgacggtgcatggggagattgaccccgccaccggtatggtgatgaacttggcagatctgaagaagtacatggaggaggcaatcatgcaaccactggatcacaagaacctcgacatggatgtgccttactttgcagatgttgtgtcgaccaccgaaaatgtcgcggtgtacatctgggataaccttcaaaaagtcctcccagtgggagtcttgtataaggtgaaggtgtatgaaaccgacaataacatcgtggtctacaagggagaa

SEQ ID NO: 6870 - DNA, 435 bp, Artificial Sequence
  derived and/or modified sequence
atgtcaactgaaggaggtggacgtcgatgtcaagcacaagtttcacgaagaatttctttctcagcatcgcaccgtttatattcaaaattcttatctgatgaagagaatttaaagttatttggtaaatgtaataatccaaatggacatggtcataattataaggtagtagtaaccgtacatggagaaattgacccagcaactggaatggttatgaatttagcagatcttaaaaaatatatggaagaagctattatgcaaccacttgatcataagaatttagatatggatgttccatattttgcagatgtagtaagcacaacagaaaatgtagctgtttatatttgggataatttacaaaaggttttaccagttggtgttttatataaagtaaaagtttatgaaacagataataatattgtagtttataaaggtgaa

SEQ ID NO: 6871 - DNA, 435 bp, Artificial Sequence
  derived and/or modified sequence
atgtccactgaagggggtggtagacggtgtcaagcacaggtgagccgccgcatttccttctccgcgtcgcatagattgtactcaaagtttctttcggatgaggagaatcttaagctgtttgggaaatgtaacaatcccaacggacacggtcataactacaaggtggtggttaccgtccacggcgagattgatcctgcaacgggtatggtgatgaatctcgcagacctgaagaaatacatggaggaagccatcatgcagccactcgatcacaagaatttggacatggacgtgccatactttgccgatgtggtgagtactactgagaacgtcgccgtgtacatctgggataacctgcagaaggtgctgcctgtgggagtcctgtacaaggtgaaggtctatgagactgataacaatattgtggtttacaagggagaa

SEQ ID NO: 6872 - DNA, 435 bp, Artificial Sequence
  derived and/or modified sequence
atgtcgaccgagggaggtgggagacggtgtcaagcccaggtcagccggcgcatatcattttccgcgtcccacaggctctacagcaaattcctgtccgatgaagaaaaccttaagttgtttggtaaatgtaacaatcccaacggccacggacacaattacaaggtagttgtgaccgtccatggcgaaatcgaccccgccactggcatggtgatgaatttggctgacctcaagaaatacatggaggaagctattatgcaacctctggatcataagaacctggacatggatgtgccatactttgccgacgtggtgtccactactgaaaacgtcgcagtctacatttgggacaacctgcagaaggtccttccagtgggggtcctgtacaaggttaaggtgtacgaaactgataacaacatagtcgtgtacaagggcgag

SEQ ID NO: 6873 - DNA, 435 bp, Artificial Sequence
  derived and/or modified sequence
atgtcgaccgaaggaggagggcggcgctgccaagcacaagtgtcacgtcggatttcgtttagcgcctcccaccgtctgtactccaagtttctttcggatgaggaaaatctcaagctgttcggtaagtgtaataaccccaacggccacggacataactacaaggtggtcgtcaccgtgcacggagaaattgatccggccactggcatggtgatgaaccttgcggaccttaagaaatacatggaagaggccatcatgcagccactcgatcacaagaacctggacatggacgtcccatactttgcagatgtcgtttcaaccaccgaaaacgtggcagtttacatctgggacaaccttcagaaggtgctgcctgtgggtgtgctttacaaggtgaaggtgtatgaaaccgacaataacattgtggtctacaaaggcgaa

SEQ ID NO: 6874 - DNA, 435 bp, Artificial Sequence
  derived and/or modified sequence
atgtcaactgagggcgggggaaggaggtgccaagcccaggtgagcagacgtatctcattctccgcaagtcaccgcctttattctaagtttctgtccgatgaggaaaatctgaagctttttggtaagtgtaacaatcccaacggacatggccataattataaagttgtcgtaacagtccatggcgagatcgatcctgctaccgggatggtgatgaatctggcggaccttaaaaagtacatggaagaagcaatcatgcagcctctggatcacaagaacttggatatggacgtgccctacttcgccgatgtagtgagcaccaccgagaacgtcgctgtttacatttgggacaacctgcaaaaggtccttccggtgggagtgttatataaagtcaaagtgtacgagaccgataataacatcgtcgtctacaagggagag

SEQ ID NO: 6875 - DNA, 435 bp, Artificial Sequence
  derived and/or modified sequence
atgtccaccgagggcggtgggaggcggtgtcaagcacaagtgtcgcgccgaatctcgttttccgcatcccatcggctttattccaagttcttgagtgatgaagaaaatctgaagctgtttggaaagtgcaacaacccgaacgggcatggacataactacaaagtagttgtgaccgttcatggagagatcgatccagcaactggtatggtcatgaacctggcggacttgaaaaagtacatggaagaagccattatgcagccactggatcacaagaacctcgatatggacgtgccttactttgcagatgtggtcagcacgactgaaaatgtcgcagtgtacatttgggataacctccagaaggtgctccctgttggcgtcctgtataaagtgaaagtgtacgagactgataacaatattgtggtgtacaagggagaa

SEQ ID NO: 6876 - DNA, 435 bp, Artificial Sequence
  derived and/or modified sequence
atgagcactgaaggcggtggacggcggtgccaggcccaagtatcaagaagaatttccttttcagcctcacaccgactttattccaagttcctgagtgacgaggaaaacttgaagttgtttggaaaatgcaacaatccgaacggccatggccataattacaaagtggtggtcacagttcacggagaaatcgacccagcgacgggcatggtcatgaacctggctgatctcaaaaagtatatggaagaagcaattatgcagcccctggatcacaaaaacttggacatggatgtgccctatttcgcggacgtggtgagtacaacagagaatgtcgcagtgtatatttgggacaacctgcagaaggtgctgcccgtgggggttctgtacaaggtcaaagtgtacgaaactgataacaacattgttgtttataagggtgaa

SEQ ID NO: 6877 - DNA, 435 bp, Artificial Sequence
  derived and/or modified sequence
atgtctaccgagggcggcggccgccgttgccaagcccaggtcagcagaagaatttcatttagtgcatcccaccgcctgtattcaaagtttctgtctgacgaggaaaacctcaagctcttcggtaaatgcaacaatcctaatggacacggccacaattacaaggtagtcgtgaccgtgcacggagagatagatcctgccaccggaatggtgatgaatctggctgatctgaaaaaatatatggaggaagcaatcatgcagcccctggatcataaaaacctggatatggatgtgccttatttcgccgatgtcgtctctaccactgaaaacgtcgccgtttacatctgggataacctgcagaaagttcttcccgtcggagtactgtataaagttaaagtgtacgagacagacaataacatcgttgtctataagggagag

SEQ ID NO: 6878 - DNA, 435 bp, Artificial Sequence
  derived and/or modified sequence
atgagcactgagggaggcggacgaagatgtcaggcccaggtaagtcgtcggatatccttttctgcgagccacaggctgtacagtaaattcctttctgatgaggagaatctgaagctgttcggcaagtgtaataatccgaatgggcacggccacaattataaggtggtcgtgacagtccacggggagatcgaccccgctaccggaatggtcatgaatctggctgacctgaaaaagtacatggaggaagccattatgcaacctctggatcataagaacctggatatggatgtcccatactttgccgacgtggtgagtacgaccgagaacgtggctgtgtacatctgggacaacctgcagaaagtgttgcctgttggcgtgctttacaaagtgaaggtgtatgagacagacaacaatattgtggtgtataagggcgaa

SEQ ID NO: 6879 - DNA, 435 bp, Artificial Sequence
  derived and/or modified sequence
atgtctacagaagggggagggaggcgttgtcaggctcaggtttcccgaagaataagtttcagtgcctcccatcggctctattctaaattcctctcagatgaagaaaatctgaaacttttcggaaaatgcaacaaccctaatgggcacggacataactataaggtggttgtgacggtccatggggaaatagatcccgccactgggatggtcatgaacctagccgatcttaagaaatatatggaagaggccataatgcagcccttagatcacaaaaatctcgatatggatgtgccatattttgcagatgtggtgagtactacagaaaatgtggctgtgtatatatgggataatcttcagaaagtgctccctgtgggggtcttatataaagtgaaagtttacgaaactgacaataatatcgtggtatacaagggggaa

SEQ ID NO: 6880 - DNA, 435 bp, Artificial Sequence
  derived and/or modified sequence
atgagtaccgaaggtggcggtcgaaggtgccaggcacaggtctccagacggatctccttctcggcgtcgcaccgtctttatagcaagttcctgtctgacgaggagaacctgaagctcttcggtaaatgcaacaaccccaacggtcacgggcataactacaaagtcgtggttacagttcatggagaaatcgacccagctactggtatggtcatgaatcttgccgatctcaagaagtacatggaagaggccataatgcagcccctggatcacaaaaatctcgacatggacgtgccttacttcgcagatgtcgtttctaccacagagaatgtcgccgtctatatctgggataacctgcagaaggtcttgcccgtgggtgtcctctacaaggtgaaggtgtacgagaccgataacaacatcgtagtctacaaaggcgag

SEQ ID NO: 6881 - DNA, 435 bp, Artificial Sequence
  derived and/or modified sequence
atgtcaacagagggcggggggagacgatgtcaggcccaggtctcacggcggatcagttttagtgcgtctcatcggctgtactctaaattcttgtccgacgaggagaacctcaaactctttggaaagtgcaacaacccgaacggccacggtcacaactacaaagtcgtggtgacagtgcatggcgaaattgatcctgctactgggatggtaatgaacttggccgatctaaagaaatacatggaagaagctattatgcagccactggatcacaaaaatctggatatggatgtaccgtattttgccgatgtggtgagtacaactgagaacgttgccgtgtatatctgggataaccttcaaaaggtcctgcccgtcggtgtgctatacaaagtgaaggtgtatgagaccgataacaacattgtggtgtataagggcgag

SEQ ID NO: 6882 - DNA, 435 bp, Artificial Sequence
  derived and/or modified sequence
atgtctaccgagggagggggccgtaggtgccaggcacaggtttcgcgtcgtatttccttttcagctagccatagattgtactcgaaatttctttctgacgaagaaaatctcaagcttttcggaaagtgcaacaaccccaacggtcatggtcataactataaagtcgtagtcaccgtgcacggggagattgaccccgcaacgggaatggttatgaatctggccgacctcaagaagtacatggaggaggctatcatgcagccacttgaccacaagaacctggacatggacgtgccgtatttcgccgatgtcgtttccacgaccgagaatgtggcagtatacatatgggacaacctacaaaaggtgctgcctgttggcgtgttatacaaagtcaaagtctacgaaacagataataatattgtagtgtacaaaggagaa

SEQ ID NO: 6883 - DNA, 435 bp, Artificial Sequence
  derived and/or modified sequence
atgtcgaccgaaggaggaggacgcagatgtcaggcgcaggtgtccagacgtatctctttttcggcctcgcatagattgtactccaagttcctgagcgatgaagagaacctgaagctgttcggaaagtgcaataatcctaacggccacggccacaattacaaggtggtggtgaccgtgcatggcgaaatcgaccctgccaccggaatggtcatgaatctggctgacctcaaaaagtacatggaagaggccatcatgcagccattggaccacaagaacctggatatggacgtgccctacttcgcagatgtcgtgagcactaccgaaaatgtggccgtctacatctgggataacctgcagaaagtgcttccggtgggagtgctctacaaggtgaaggtctacgaaaccgacaacaacatcgtggtctacaagggggaa

SEQ ID NO: 6884 - DNA, 435 bp, Artificial Sequence
  derived and/or modified sequence
atgtccaccgaaggtggaggccgtcgctgtcaggcacaggtgtcacgcaggattagcttttcagccagccaccgactgtattccaagtttctgtccgatgaagaaaatctgaagctctttggcaagtgcaacaaccccaacggacacggtcataactataaagtggtggtgaccgtgcacggagaaattgacccagcaacggggatggtgatgaatctggcagatctgaaaaagtacatggaggaagccatcatgcaaccacttgatcataagaacctcgacatggatgtgccctacttcgcagatgtcgtctccactaccgaaaacgtggctgtctacatttgggacaacttgcaaaaagttcttccagtcggagtgctgtacaaggtgaaggtctacgagactgataacaatatcgttgtctacaagggggag

SEQ ID NO: 6885 - DNA, 435 bp, Artificial Sequence
  derived and/or modified sequence
atgagcaccgagggtgggggccggcgatgccaggcacaagtaagtagacgaatctcgttctctgccagtcatcgattgtacagtaaattcctgtctgacgaggaaaacctgaaactctttggaaagtgcaataatccaaatgggcacgggcataactataaagtggtcgtgaccgttcatggtgagatagatcctgccacgggaatggtgatgaacttggcagatttgaaaaagtacatggaggaggctattatgcagccactcgatcataaaaatttggacatggatgtaccgtactttgccgatgtggtctcgactaccgaaaatgtggcagtgtatatttgggacaacctgcagaaggtattaccggtcggggtgctttacaaggttaaggtatacgaaaccgacaacaatatagttgtgtataagggagaa

SEQ ID NO: 6886 - DNA, 435 bp, Artificial Sequence
  derived and/or modified sequence
atgtcaactgagggaggagggcgccgctgtcaggcccaggtgtcaaggagaatctcgttctccgctagccatagactctactccaaatttctgtccgacgaggagaatctgaagctgttcggaaagtgcaataatccaaacggtcacggacacaactataaggtcgtggtcaccgtccacggtgaaattgatccggctaccgggatggtgatgaatctggccgacctgaaaaagtacatggaagaggcaatcatgcaaccgcttgatcataagaatttggacatggatgtgccttactttgcggatgtagtctctaccactgaaaacgtcgctgtgtacatttgggacaacctccagaaagtcctcccagtcggagtgctgtacaaagtcaaagtctacgaaaccgacaacaatatcgtggtctataagggtgag

SEQ ID NO: 6887 - DNA, 435 bp, Artificial Sequence
  derived and/or modified sequence
atgagtacagaaggtggaggcagacgctgccaggcccaagtttccaggagaatctcattttctgctagtcatcggctctattctaagtttctcagcgacgaggagaatttgaagcttttcggaaagtgtaacaacccaaatggacacggtcataactacaaggtcgttgtcaccgtgcatggagaaatcgaccctgctaccggtatggtgatgaacctggcggacttgaaaaaatatatggaagaagccatcatgcagccactggaccacaagaatctcgatatggacgttccttactttgccgacgtcgtgagcactacagaaaacgtcgccgtctacatttgggacaatttgcagaaagtcctccctgtgggggtgctgtataaggtgaaggtgtacgaaacagacaacaatatcgtagtgtacaaaggggaa

SEQ ID NO: 6888 - DNA, 435 bp, Artificial Sequence
  derived and/or modified sequence
atgagcactgagggaggcggtagacgatgtcaagcacaagtctcacgccgcatatctttttcggcctcgcacaggctgtattccaagtttctgagcgacgaagaaaacctgaaactttttgggaaatgtaacaatcctaacgggcacggtcacaattacaaggtggtcgtgaccgtccacggtgaaattgatccagcaaccgggatggtcatgaacttggcagatcttaagaaatacatggaggaagcaatcatgcaacctcttgaccataagaaccttgacatggacgtgccatactttgccgatgtcgtgtcaaccaccgaaaatgtggccgtgtacatttgggataatcttcagaaggtgctccccgtcggcgtgttgtacaaggtgaaagtgtacgaaaccgacaataacattgtggtctacaaaggcgaa

SEQ ID NO: 6889 - DNA, 435 bp, Artificial Sequence
  derived and/or modified sequence
atgagcactgagggcggaggtcgccgctgccaggctcaggtctcacgccgaatcagcttttctgcatctcatcgcctgtactcgaagttcctgtcagacgaggagaacttgaaactctttggtaagtgtaacaatccaaacggtcatggtcataattataaggttgtggtgacggtacatggagagatcgatccagccacggggatggtgatgaacttggctgatctaaagaagtatatggaggaggcaattatgcaaccgttagatcataaaaacttggatatggacgtcccctatttcgcggacgttgtcagtaccacggagaacgtggcggtttatatctgggacaatctccaaaaagttctgcctgttggggtgctatacaaggttaaagtgtacgaaactgacaataacatagtcgtttacaagggggaa

SEQ ID NO: 6890 - DNA, 435 bp, Artificial Sequence
  derived and/or modified sequence
atgagtacggagggcggtggtcgcagatgtcaggcccaggtatcccgacggatctctttttctgcctcccacagactgtactcgaagtttctgagtgatgaagagaacctgaagctcttcggtaaatgcaataaccccaacggtcatggacataattataaggtggtcgtcacggtccacggggagattgatccagctacaggtatggtgatgaatctcgctgacctcaagaaatacatggaagaggccattatgcagcccctggatcacaagaatctagacatggatgtgccttactttgccgatgtggtgtctaccacagagaacgtggcagtatatatctgggacaatcttcaaaaggtgctccccgtgggcgtcctgtacaaagtcaaggtctatgaaacggataataacatcgtggtgtacaagggagag

SEQ ID NO: 6891 - DNA, 435 bp, Artificial Sequence
  derived and/or modified sequence
atgtccacagaaggtggcggccgccgctgccaggctcaggtatctcgacgaataagctttagtgcaagccacagactgtatagcaagttcctgtcagacgaagaaaacctgaagctgtttggcaagtgtaataatcccaacggtcacgggcacaactataaggtggtggtaacggtgcacggggagattgatcctgcgaccggaatggtgatgaatctggccgatcttaagaaatatatggaggaggcgataatgcagccgttggatcataagaatctcgacatggatgtgccatacttcgcagatgtagtgtccacaaccgagaacgtcgctgtttacatttgggataacttgcagaaagtcctcccagtcggagtgttgtataaagtcaaagtctacgaaaccgacaataacatagtggtctacaaaggggaa

SEQ ID NO: 6892 - DNA, 435 bp, Artificial Sequence
  derived and/or modified sequence
atgtctaccgagggagggggcagacggtgtcaagctcaggtctctcgtaggatatcattcagcgcttctcacagattgtactcaaaattccttagtgatgaagagaacttaaagttgttcgggaagtgtaataaccctaatggacacggccataattacaaggttgtggtaactgtccacggcgaaattgatcctgcaaccggcatggtcatgaatctagcagatcttaagaagtacatggaagaggcaataatgcaacccttggatcacaaaaacctcgatatggatgtgccctatttcgctgatgttgtatccaccactgagaacgttgctgtatatatatgggataatctccaaaaggtgcttcccgtaggtgtactctataaagtgaaggtttatgagacggataacaatattgttgtttacaagggagaa

SEQ ID NO: 6893 - DNA, 435 bp, Artificial Sequence
  derived and/or modified sequence
atgtctaccgaagggggcggtaggcgatgccaggcccaagtttctcggcgaatctcattctccgcctcccaccgcttgtacagcaaatttcttagcgatgaagaaaacctgaagttattcgggaaatgcaacaatcctaatggacacggccacaattacaaagtggtggttaccgtgcacggggagattgatcccgcaaccggtatggtcatgaatttggctgacctgaagaaatacatggaggaggccatcatgcagccactggaccacaaaaatttagatatggacgtgccctacttcgccgacgtggtgagcacaactgaaaatgtagcagtgtacatctgggataatttgcagaaagtgctgccggttggggtgctgtacaaagtcaaagtttacgagaccgataacaacatcgtcgtttataaaggagaa

SEQ ID NO: 6894 - DNA, 435 bp, Artificial Sequence
  derived and/or modified sequence
atgtccactgaaggtggtggaaggagatgtcaggcccaggttagccggcgcatatctttttcggcgtcgcatcggctctacagcaagttcctgtcagacgaggagaatcttaaacttttcggtaagtgcaataatcctaacggacacggtcacaactacaaggtcgtcgtgaccgtgcacggagagatcgatccggccaccggaatggttatgaatctggctgacctgaagaaatacatggaagaagctatcatgcaaccactcgaccataaaaaccttgatatggacgtcccgtacttcgccgatgtggtgtccactacggagaacgtagcagtgtacatttgggataacctgcagaaggtgctgcctgtcggggtgctctacaaggtgaaagtgtatgaaaccgacaataacattgtggtgtacaagggggaa

SEQ ID NO: 6895 - DNA, 435 bp, Artificial Sequence
  derived and/or modified sequence
atgagcacagagggaggaggaagaagatgccaggcccaggtgtctagacgcatatcttttagtgcttctcaccggctgtacagcaaatttctgtcagacgaagagaatcttaagctgttcgggaagtgcaataatcctaatggacatgggcacaattacaaggtggtcgtgaccgttcatggggaaattgaccctgcgacagggatggtgatgaatctggcggacttaaagaaatacatggaggaagctataatgcagcctcttgaccacaagaatcttgacatggacgtaccatactttgcggatgttgtctcgaccactgaaaacgtagcagtgtatatctgggacaacctgcagaaagtgctacctgtcggagtgttgtataaggtgaaggtctatgaaactgataacaatatcgtcgtatataagggcgag

SEQ ID NO: 6896 - DNA, 435 bp, Artificial Sequence
  derived and/or modified sequence
atgtcaaccgaaggagggggaaggaggtgtcaggcccaggtgagtcggcggataagtttttctgcttcccaccgactttattcgaaatttctaagcgacgaggagaatctgaagctattcggaaaatgcaacaaccccaatggccacggacacaattataaggtggtggtcactgtgcatggcgaaattgacccagccacaggcatggtaatgaacttggccgatctgaaaaagtacatggaggaggcaattatgcagccattggaccacaagaacctggacatggatgtcccatattttgcagacgtggtgagtaccaccgagaatgttgcagtttacatctgggacaacctgcagaaggtgctcccagtgggagtgctctacaaagtgaaggtctatgagactgataataacatcgtagtgtacaagggcgag

SEQ ID NO: 6897 - DNA, 435 bp, Artificial Sequence
  derived and/or modified sequence
atgagcactgagggcgggggtaggcgctgccaggcccaggtgagccgcaggatctcgttttccgcttcgcacagattgtactcaaagttcctgtcggatgaagaaaacctgaagctgttcggtaagtgtaacaacccaaatgggcacggacataactacaaagtggtcgtgaccgtgcacggcgaaatcgaccccgcgaccggaatggtgatgaacctggccgaccttaagaagtacatggaggaagccatcatgcagccgctcgaccataagaacctggatatggatgtcccttactttgcggacgtcgtatccactaccgaaaatgtggcagtctacatttgggacaatctgcaaaaagtccttcccgtcggcgtcctctacaaagtcaaagtctacgaaactgataacaacatcgtggtctacaaaggggaa

SEQ ID NO: 6898 - DNA, 435 bp, Artificial Sequence
  derived and/or modified sequence
atgagtaccgaggggggcggccggaggtgtcaagctcaggtgtcacgccgcatcagcttcagcgcgagtcaccgcctctattctaaattcctgagcgatgaggagaacctcaaactctttgggaagtgtaataaccccaatggtcacggacataattacaaagtcgtggtaaccgttcatggcgagatagatccagctacaggcatggttatgaatcttgcagatctaaagaaatacatggaagaggcaatcatgcaacctctagatcataagaatctggatatggacgtgccgtatttcgccgatgtagtcagtactaccgaaaatgtggcagtgtacatctgggacaacctgcagaaggtattgccagtcggcgtcctttataaggtcaaagtgtacgaaaccgataataatatcgtcgtctataagggtgaa

SEQ ID NO: 6899 - DNA, 435 bp, Artificial Sequence
  derived and/or modified sequence
atgtcgactgagggaggcggccgacgttgtcaggcccaggtgtcgaggcggatcagcttctccgcttcgcatcgcctctactcaaagtttctctcagatgaagagaatctgaagctgttcggaaagtgcaacaacccaaatgggcatggacacaattacaaggtggtggtgaccgtccacggagagatcgatccggccaccggtatggtgatgaatttggcggacttgaagaaatacatggaggaagcgataatgcagcctctcgatcacaaaaatctggacatggatgttccatacttcgccgatgtagtctccacgaccgaaaacgtcgcagtgtacatttgggacaaccttcaaaaagtgctcccggttggggtcctgtacaaggtgaaagtctacgaaactgacaacaacatcgtggtgtataagggtgaa

SEQ ID NO: 6900 - DNA, 435 bp, Artificial Sequence
  derived and/or modified sequence
atgtctaccgaaggcggtgggagacgatgtcaggctcaagtgtccagacgcattagcttttcagcatctcacaggctgtactcaaaattcctcagcgatgaagaaaacctcaagctgtttgggaagtgcaacaacccgaatggacatggacataactacaaggtggtcgtgaccgtgcacggagaaatagatcctgccactggtatggtcatgaatctggcggacttgaaaaagtacatggaagaagccatcatgcaacccctcgaccataagaacttggacatggacgtcccatactttgctgacgtggtgagcactactgagaacgtggccgtgtacatttgggacaaccttcaaaaggtgctgcccgtgggagtcctttacaaagtgaaggtctacgagactgataacaacatcgtggtgtataagggcgaa

SEQ ID NO: 6901 - DNA, 435 bp, Artificial Sequence
  derived and/or modified sequence
atgtcaacggagggcgggggccggagatgtcaagcccaagtgtcccgccgcatttcatttagcgcgagccaccgactatactctaaattcctctcggacgaggagaatctgaagctctttgggaagtgcaataacccaaacggacacggtcacaactataaagttgttgtcacagttcatggcgaaatagatcctgctacaggcatggttatgaatttggccgatctaaagaagtatatggaggaggctataatgcagccactcgaccacaagaatcttgatatggatgtgccatacttcgccgacgtcgtgtccaccactgagaatgtcgcggtctacatctgggacaacctgcaaaaggtgttgcctgtgggagtactatataaagtcaaagtgtatgagaccgacaataacatcgtagtctacaagggggaa

SEQ ID NO: 6902 - DNA, 435 bp, Artificial Sequence
  derived and/or modified sequence
atgtcaactgaaggcggaggacgcagatgtcaggcacaggtgtcacgccggatctcgttcagcgcctcccacaggctgtactcgaagttcctgtccgatgaagagaatctgaaactgtttggtaagtgcaacaatccgaacggacacggacataactacaaagtcgtcgtgactgtgcacggggaaattgaccctgcgaccggcatggtcatgaacctcgcggacctcaagaagtacatggaggaggctatcatgcagccgctggatcataagaatcttgatatggacgtgccctacttcgccgatgtggtgagcacgaccgagaacgtcgccgtttacatctgggacaacctccaaaaggtgttgccagtgggagtgctgtacaaggtcaaagtgtatgaaaccgacaataacatcgtcgtgtacaagggcgaa

SEQ ID NO: 6903 - DNA, 435 bp, Artificial Sequence
  derived and/or modified sequence
atgagtacagaggggggagggcggagatgtcaggcacaggtatctagacgcatatcattctccgcctcccatcgactctatagtaaatttctctctgacgaagagaacctcaagctctttgggaaatgcaacaatcctaatggacatgggcataactacaaggtggttgtgacagtgcatggggagattgatcctgcaacaggaatggtaatgaatcttgcagatctaaaaaagtatatggaagaggcaataatgcagccacttgaccataagaaccttgatatggatgtgccatactttgctgacgtggtgagtactacagaaaatgtcgctgtgtatatatgggataatctgcagaaagtgcttcctgtgggagtgctgtataaagttaaagtttatgagactgataacaacatcgtagtctataagggggaa

SEQ ID NO: 6904 - DNA, 435 bp, Artificial Sequence
  derived and/or modified sequence
atgagcacggaaggtgggggcaggcgttgtcaagctcaggtctctaggagaattagtttcagcgcatctcaccggctgtattccaagttcttatccgatgaggaaaatctgaaactctttgggaagtgcaacaaccctaacgggcacgggcataactacaaggtggtcgtgaccgttcacggggagattgatcctgctaccgggatggttatgaacctggcagatttgaagaagtacatggaagaagccataatgcagccactagaccacaagaatctggacatggacgtcccatatttcgccgatgtcgtgagcacgaccgaaaacgtggccgtgtacatctgggacaatctgcaaaaagtgctccctgtgggagtgctctataaggtcaaagtgtacgaaaccgataacaacatcgtagtttacaaaggcgag

SEQ ID NO: 6905 - DNA, 435 bp, Artificial Sequence
  derived and/or modified sequence
atgagcactgaaggcggtgggcgccggtgtcaagcccaagtctctaggaggatctcattctcggcatcgcatcgcctctattccaagttcctgtcagatgaggaaaacctgaaactctttgggaagtgcaataacccaaacggtcatgggcataactacaaagtcgttgtaacggtccacggggaaatcgatccggctactggcatggtgatgaatctggcagacctgaagaaatacatggaggaagccattatgcagccgctggaccacaaaaatctcgacatggacgtcccatacttcgcggatgtcgtcagcaccaccgagaatgtggcggtgtacatctgggataatcttcagaaagtcctcccggtcggagtactctacaaggtgaaggtgtatgagactgacaacaatatcgtggtgtacaagggagag

SEQ ID NO: 6906 - DNA, 435 bp, Artificial Sequence
  derived and/or modified sequence
atgagcacggagggcggcggccggaggtgtcaggcccaggtgagcaggagaatttcctttagcgcttcgcaccgtctgtactcaaaattcctctctgacgaggagaatcttaagctgttcggaaaatgcaacaaccccaacggtcatggacacaattacaaggtcgtggtgacagtacacggcgaaatcgaccctgctaccggcatggtcatgaatctcgccgatttaaaaaagtacatggaggaagctataatgcaacctctggatcacaagaacctcgatatggacgttccgtacttcgcagatgttgtgtcgactaccgaaaacgtggccgtctatatttgggacaatctgcagaaggttctcccagtcggtgtcctgtataaggtcaaggtgtacgaaaccgataataacattgtggtgtataaaggtgaa

SEQ ID NO: 6907 - DNA, 435 bp, Artificial Sequence
  derived and/or modified sequence
atgtcgactgagggaggaggacgcaggtgccaggctcaagtcagcaggcggatctcattcagcgcaagccaccgcctgtacagcaaattcctgagcgacgaagagaacttgaagctgttcggaaagtgcaataacccaaacggccatggccacaactacaaagtcgttgtgaccgtgcacggagaaatcgatccagccactggaatggtgatgaacctcgcggacctgaagaaatacatggaggaagcgattatgcagccgctcgatcataagaatctggacatggacgtgccctactttgccgatgtcgtgtcgacgacggaaaatgtggcagtctacatctgggacaacctccagaaagtgctgccggttggggtgctgtacaaagtgaaagtgtatgaaaccgacaataacatagtcgtgtacaagggagag

SEQ ID NO: 6908 - DNA, 435 bp, Artificial Sequence
  derived and/or modified sequence
atgtcaaccgaaggaggcggaaggagatgtcaagcccaagtctcgcggagaatcagcttctcagcatcccaccggctctacagcaaatttctctcagacgaagaaaacctgaagctcttcggtaagtgtaacaacccaaatggacacggacataactacaaggtcgtggtgactgtgcacggtgaaatcgacccggccacggggatggtcatgaacctggccgacctgaagaaatacatggaggaagccattatgcaacctctggatcacaagaacctggacatggacgtgccatacttcgcagatgtagtgtccaccaccgagaatgtggcggtgtacatctgggacaacctgcagaaggtgctgccagtgggagtgctctataaggtgaaagtgtacgagactgataacaatatcgttgtgtacaaaggagaa

SEQ ID NO: 6909 - DNA, 435 bp, Artificial Sequence
  derived and/or modified sequence
atgtccacggaaggcggaggtcgccggtgccaggcgcaggttagccgccgcatcagcttctctgcctcacaccgcttgtactccaagtttttgtccgacgaggagaacctcaagctgttcggcaagtgtaataacccaaacggacatggtcacaactacaaggtcgtagtcaccgtccatggtgagatcgacccggccaccggcatggtcatgaatctggctgatctgaagaagtatatggaggaggctataatgcaacctctggatcacaagaacttagatatggacgtaccctactttgcggacgtcgtcagcacaaccgagaacgtcgccgtgtacatctgggataacctgcaaaaggtcctgcccgtcggagtgttatataaggtcaaggtttatgagacggataacaacatcgtcgtttataagggcgag

SEQ ID NO: 6910 - DNA, 435 bp, Artificial Sequence
  derived and/or modified sequence
atgtcgacggaaggtggtggacggcggtgccaggctcaagtcagcagacggatatcgttctcggcatcccacagactctattcaaagttcctctccgatgaagagaacctgaagttgtttggcaagtgcaataatccaaacggtcatggacacaactacaaggtggtcgtgaccgtgcacggggagattgatcccgcaactggaatggtcatgaacctcgcagatctgaagaagtacatggaagaagcaattatgcagcccctcgatcataagaatcttgatatggatgttccatactttgcagatgtggtgtcgaccactgagaatgttgcggtctatatctgggacaacctgcagaaagtcctgccggtgggagtgctctacaaagtcaaggtgtacgaaaccgacaacaatattgtcgtgtacaagggagag

SEQ ID NO: 6911 - DNA, 435 bp, Artificial Sequence
  derived and/or modified sequence
atgtcaactgagggcggcgggcgacgctgccaagctcaggtatcacggcgtatatcttttagcgccagccacaggctgtattccaagttcctttctgacgaagaaaatttgaagctttttgggaaatgtaacaaccccaatgggcacggacataattacaaggtagtcgtgacagtgcatggagagatcgaccccgcgacgggaatggtgatgaacctagccgatctgaaaaagtacatggaggaggcaataatgcagccactggaccataagaatctggacatggacgtgccctacttcgctgacgtggtgtcaacaacggagaatgtggcggtttatatctgggacaacctgcagaaagtgctacctgttggagtgctctacaaggtcaaggtttacgaaaccgataataatattgttgtgtataagggggag

SEQ ID NO: 6912 - DNA, 435 bp, Artificial Sequence
  derived and/or modified sequence
atgtcgactgagggaggaggaaggcgttgtcaggctcaagttagccgacgaatttctttcagcgcgtcgcatagattatactccaagttcctttctgatgaagagaatctaaaactctttggaaaatgtaataacccaaatggtcacggacacaattacaaggtcgtcgtgacagttcacggagaaatagatccagcgactggaatggtcatgaatctcgcagatctgaagaaatacatggaggaggctatcatgcaacctcttgatcacaaaaacctggatatggatgtgccgtactttgctgatgtagttagcacaacagaaaacgttgcagtgtatatttgggataacctacaaaaagttcttccagttggggttctctataaagtcaaagtttatgagacggacaataacattgttgtctataaaggtgag

SEQ ID NO: 6913 - DNA, 435 bp, Artificial Sequence
  derived and/or modified sequence
atgtccactgagggaggggggaggagatgtcaagcgcaggtttcgcggcgcatctccttcagcgcatcccatcgtctgtactcaaagttcctgtcggatgaggagaacttgaaactttttgggaagtgcaacaatccaaacggacatggccacaactataaggtggtggtgaccgtccacggagagatcgaccccgccactggaatggtgatgaatttggccgatctgaagaagtacatggaagaagccatcatgcagccgcttgaccacaaaaacctggacatggacgtcccgtacttcgctgacgtcgtgtcaactaccgaaaatgtggcggtctacatttgggataatctgcagaaggtgctcccggtgggtgtgctctacaaagtcaaggtgtacgaaaccgataacaacatagttgtgtacaagggagaa

SEQ ID NO: 6914 - DNA, 435 bp, Artificial Sequence
  derived and/or modified sequence
atgtcgaccgaaggaggaggccggcgatgccaggcacaagtcagtagaagaatctcgtttagcgcatcacaccgcttgtactccaagtttctgtccgatgaggaaaatctgaaactcttcgggaagtgtaataaccccaatggtcacggacataactataaagtcgtcgtgaccgtgcatggtgaaatcgaccctgccaccggcatggtgatgaacctggccgatcttaagaagtacatggaagaagctattatgcagccactggatcataagaacctggatatggacgtgccttacttcgcagatgtcgtgagcactacggaaaacgtggcagtctacatctgggataacctccaaaaggtcctccctgtgggcgtattgtacaaggttaaggtatatgagactgacaataacatagttgtgtacaaaggagag

SEQ ID NO: 6915 - DNA, 435 bp, Artificial Sequence
  derived and/or modified sequence
atgtccaccgaggggggaggacgaagatgccaggcgcaggttagcaggagaatcagtttctccgcatcccatcgcctctactctaagttcctgtctgatgaggagaatctcaaactcttcggcaagtgcaataaccccaatgggcacggacacaactacaaggtggtggtgacagtccatggagaaatcgatcctgctactggcatggtgatgaatttggctgacctgaagaagtacatggaggaagcaataatgcaacccttagaccataagaatctggacatggacgtaccttacttcgcagacgttgtgagtaccacagagaatgtcgctgtttacatttgggataacttacaaaaggtccttcctgtaggcgttctctataaggtgaaggtgtatgagacagataacaatatcgtggtgtataagggggag

SEQ ID NO: 6916 - DNA, 435 bp, Artificial Sequence
  derived and/or modified sequence
atgtcaactgagggtggaggtcgcagatgccaagcgcaggtgtctcgaagaatatctttcagcgccagtcatcgtctgtatagcaaatttctgagcgatgaagaaaatctgaagcttttcggaaagtgcaacaatccgaacggacatgggcacaactacaaggtagtggtgacagtgcacggtgaaatcgacccggcgacgggcatggtcatgaatctcgcagatcttaagaagtacatggaggaggctatcatgcagccgcttgaccataagaatctggacatggatgtgccgtattttgctgatgtagtgagcaccaccgagaatgtagccgtttatatatgggataacctacagaaagtcctccccgttggggttctgtataaggtcaaagtctatgagacagacaataatatcgttgtgtacaaaggggag

SEQ ID NO: 6917 - DNA, 435 bp, Artificial Sequence
  derived and/or modified sequence
atgagcactgaaggcggaggcaggcgctgtcaggcccaagtctcccggaggatctcgttctccgcctctcaccggctgtactcaaagttcctgtccgatgaggagaacctcaaattgtttggtaaatgcaataaccccaatggtcatggacacaactacaaggtggtcgttaccgtgcatggggaaattgacccagcgactggaatggtgatgaacttggccgatctgaagaagtacatggaggaggcgatcatgcagccgctggaccataagaatctggatatggatgtgccgtacttcgctgacgtcgtttccacgaccgaaaacgtggcagtgtacatctgggacaacctccagaaagtcctcccggttggtgtgctttacaaagtgaaggtctacgaaactgacaataacattgtggtgtacaagggcgaa

SEQ ID NO: 6918 - RNA, 581 nt, Artificial Sequence
  derived and/or modified sequence
gggaaauaagagagaaaagaagaguaagaagaaauauaagagccaccaugucgaccgagggugggggaaggcgcugucaggcgcagguaucaagacgaaucagcuucagcgcgucgcaccggcuuuacucaaaguucuugucggaugaagagaaccucaagcuguuugggaagugcaacaauccuaauggacauggacacaauuacaaagucguggucacggugcacggcgaaaucgaccccgccacggguauggucaugaauuuggccgacuugaagaaguacauggaagaggcuauuaugcaaccccuggaccauaagaaccucgauauggaugucccguauuuugcggauguagucuccacuacagagaacguggcaguauacauuugggacaaccuucagaaagugcucccagugggggugcuguauaaaguaaaagucuaugagacagacaauaacaucgugguguacaaaggagaaugauaagcugccuucugcggggcuugccuucuggccaugcccuucuucucucccuugcaccuguaccucuuggucuuugaauaaagccugaguaggaag

SEQ ID NO: 6919 - RNA, 438 nt, Artificial Sequence
  derived and/or modified sequence
augaguacagagggcggcggacgccgaugccaggcacaaguaucccggcgaaucucauuuucagcuucgcauaggcuguauagcaaguuucugagcgacgaggagaaccugaaacuguuuggcaaguguaauaaucccaauggacacggccauaacuauaaaguagucguaacugugcacggcgaaauagacccagcuaccggaaugguuaugaaccuggcggaucuuaagaaauauauggaggaggcaaucaugcagccauuagaccacaagaaucuugacauggacguucccuacuucgcagauguugucagcacuacagagaacguggcaguguacauaugggacaauuugcagaaaguacugccaguuggagugcucuacaaaguaaaaguguaugagaccgacaacaacauuguuguguacaaaggcgaguag

SEQ ID NO: 6920 - RNA, 438 nt, Artificial Sequence
  derived and/or modified sequence
augaguacagagggcggaggccgccgcugucaggcccaggugucucggaggauuucuuuuagcgcaagucaccgacuuuacaguaaguuucugucagacgaagagaaucugaagcuguuuggcaaauguaauaaccccaaugggcacggacacaauuacaaagugguaguaacgguucacggagagauugacccugcuacaggaaugguaaugaaccucgcggaucugaaaaaauacauggaggaggccaucaugcagccacuggaccauaagaaucucgauauggauguuccuuacuucgcugacguagucuccacaaccgaaaacguagcuguguacaucugggauaaucugcaaaaggugcugccagugggaguguuguauaaaguuaaaguuuacgaaacugacaacaauaucgugguuuauaaaggugaguag

SEQ ID NO: 6921 - protein, 631 aa, Artificial Sequence
  derived and/or modified sequence
MAMRELVEAECGGANPLMKLAGHFTQDKALRQEGLRPGPWPPGAPASEAASKPLGVASEDELVAEFLQDQNAPLVSRAPQTFKMDDLLAEMQQIEQSNFRQAPQRAPGVADLALSENWAQEFLAAGDAVDVTQDYNETDWSQEFISEVTDPLSVSPARWAEEYLEQSEEKLWLGEPEGTATDRWYDEYHPEEDLQHTASDFVAKVDDPKLANSEFLKFVRQIGEGQVSLESGAGSGRAQAEQWAAEFIQQQGTSDAWVDQFTRPVNTSALDMEFERAKSAIELQAELEEMAKRDAEAHPWLSDYDDLTSATYDKGYQFEEENPLRDHPQPFEEGLRRLQEGDLPNAVLLFEAAVQQDPKHMEAWQYLGTTQAENEQELLAISALRRCLELKPDNQTALMALAVSFTNESLQRQACETLRDWLRYTPAYAHLVTPAEEGAGGAGLGPSKRILGSLLSDSLFLEVKELFLAAVRLDPTSIDPDVQCGLGVLFNLSGEYDKAVDCFTAALSVRPNDYLLWNKLGATLANGNQSEEAVAAYRRALELQPGYIRSRYNLGISCINLGAHREAVEHFLEALNMQRKSRGPRGEGGAMSENIWSTLRLALSMLGQSDAYGAADARDLSTLLTMFGLPQ

SEQ ID NO: 6922 - protein, 114 aa, Artificial Sequence
  derived and/or modified sequence
MAMRELVEAECGGANPLMKLAGHFTQDKALRQEGLRPGPWPPGAPASEAASKPLGVASEDELVAEFLQDQNAPLVSRAPQTFKMDDLLAEMQQIEQSNFRQAPQRAPGVADLAL

SEQ ID NO: 6923 - protein, 248 aa, Artificial Sequence
  derived and/or modified sequence
MAMRELVEAECGGANPLMKLAGHFTQDKALRQEGLRPGPWPPGAPASEAASKPLGVASEDELVAEFLQDQNAPLVSRAPQTFKMDDLLAEMQQIEQSNFRQAPQRAPGVADLALSENWAQEFLAAGDAVDVTQDYNETDWSQEFISEVTDPLSVSPARWAEEYLEQSEEKLWLGEPEGTATDRWYDEYHPEEDLQHTASDFVAKVDDPKLANSEFLKFVRQIGEGQVSLESGAGSGRAQAEQWAAEFI

SEQ ID NO: 6924 - protein, 104 aa, Artificial Sequence
  derived and/or modified sequence
MAMRELVEAECGGANPLMKLAGHFTQDKALRQEGLRPGPWPPGAPASEAASKPLGVASEDELVAEFLQDQNAPLVSRAPQTFKMDDLLAEMQQIEQSNFRQAPQ

SEQ ID NO: 6925 - DNA, 1896 bp, Artificial Sequence
  derived and/or modified sequence
atggctatgagggaactggttgaagcagaatgcggaggcgctaatcccttgatgaagttggcaggccatttcactcaggataaagcgctgcgtcaagagggccttcgcccaggcccatggccccctggggcacctgcctcagaagctgctagcaagcccctgggcgtagcgagcgaggatgagctggttgcggaattcttgcaagatcagaacgctccattggtttcccgagcccctcagaccttcaaaatggatgatctgctggcagagatgcagcagattgagcaatctaatttccgacaggcgccacagcgtgctccaggggtggccgaccttgctctgagcgagaattgggcccaggagtttcttgcggccggcgacgcagtggacgtgacccaggattacaatgaaacagactggtcccaggaattcataagtgaagtgacagaccctttgtccgtgagccccgccagatgggcggaggagtacttagagcagagcgaggaaaagctttggctcggcgaacccgagggtacggccaccgataggtggtacgacgagtaccatcccgaggaggacttgcagcacaccgcttccgactttgttgcaaaagtggatgatcctaagcttgccaattccgagttcttgaaattcgtacggcagatcggcgaaggacaagtgtctctcgagagtggtgctggcagtggacgagcacaagctgagcagtgggccgcagagttcattcaacagcagggtacctccgatgcatgggtcgaccagttcacaagaccagtgaacacttccgcattagacatggagttcgaacgcgccaagtcagcaattgagctgcaggccgagctcgaggaaatggcaaagcgggacgccgaggctcacccctggcttagtgattacgatgacttgacctccgcaacttatgacaagggataccagttcgaggaggagaatccgcttagagaccatcctcagcccttcgaagaaggtctgcgtcgcctgcaggagggagatctgccgaatgccgtgctgctgtttgaagcagcagtgcagcaggatccaaaacacatggaggcttggcagtacctgggcacaactcaagctgagaatgaacaggaactgctcgccatcagtgcactgcggaggtgcttagaactgaaaccggacaaccagacggctctgatggcattggccgtttctttcactaacgaaagtctgcagcgccaagcgtgtgagacgctgcgcgactggctcagatatactccagcatacgcacatctcgtcactccagctgaagaaggagctgggggtgccgggctgggtccatcaaagagaatcctcggcagcctcctgagcgactcactgtttctggaggttaaggaattgtttctggcagcagttaggcttgaccctactagcattgacccagacgtgcagtgtggtctgggggtattgtttaacctttccggtgagtatgacaaagccgtcgattgcttcaccgcggctttgtccgtaaggcctaatgactatttactctggaataagctcggagctacgttggcgaacggcaatcagagtgaagaagctgtggcagcctatcgccgcgccctggaattgcagccaggctatattagatcacgctacaacctagggatttcgtgtattaatctaggggcacatcgcgaagcagtcgagcattttctcgaggcacttaatatgcagagaaagtctcggggcccccggggcgagggtggcgctatgtcagaaaatatctggagtaccctccgcctggcactaagtatgttaggacaatcggatgcctacggtgctgcagatgcccgggacctctctacccttttgacaatgtttggtttgccacagtag

SEQ ID NO: 6926 - DNA, 747 bp, Artificial Sequence
  derived and/or modified sequence
atggcaatgagagaactggtcgaagccgaatgtggtggtgcaaaccccctgatgaaacttgcaggtcacttcacccaggataaggctttacgccaagagggactccgccccggcccatggcctcctggggctcccgcatcggaggccgcaagtaagccactgggggtagcctctgaagacgaactggtcgcagagtttctgcaggaccagaatgccccactcgtgtctagagccccccagactttcaagatggatgacctgctagccgaaatgcagcagattgaacagtctaacttcaggcaagctccacagcgtgcgcccggtgtagccgatcttgctctctctgagaactgggcgcaggaattcctggcggccggagacgctgtggacgttacccaggattacaacgagacagactggtcccaagaattcatctctgaggtcacagaccccctgtcagtctcacccgctcggtgggctgaagagtaccttgagcagtctgaggaaaagctctggctgggggagccagagggtacagctacagatcgttggtatgacgagtaccatcccgaagaggacctgcaacacaccgccagtgactttgtagcaaaggtggatgacccaaagttggctaactcagaatttctcaagtttgtgcgccaaattggcgagggacaagtgagcctggagagcggcgctggctctgggagggcccaggccgagcagtgggccgcagaattcatctag

SEQ ID NO: 6927 - DNA, 1896 bp, Artificial Sequence
  derived and/or modified sequence
atggccatgagggagctggtggaggccgagtgtggcggggccaaccccctgatgaagctggccggccacttcacccaggacaaggccctgcggcaggagggcctgcggcccggcccctggcccccaggggccccagccagcgaggccgccagcaagcccctgggcgtggcctctgaagatgagctggtggccgagttcctgcaggaccagaatgcccccctggtgtcccgggccccccagaccttcaagatggatgacctgctggccgagatgcagcagatcgagcagagcaacttccggcaggccccccagagggcccctggggtggccgacctggccctgtctgagaactgggcccaggagttcctggccgctggagatgctgtggatgtgacccaggactacaatgaaacagactggagccaggagttcatcagcgaggtgacagaccccctgtctgtgtccccagcccgctgggccgaggagtacctggagcagagcgaggagaagctgtggctgggggagcctgagggcacagccacagaccgctggtatgatgagtaccaccctgaggaggacctgcagcacacagccagtgactttgtggccaaggtggatgaccccaagctggccaacagcgagttcctgaagtttgtgcggcagatcggggagggccaggtgtccctggagagcggggccggcagcggccgggcccaggccgagcagtgggccgctgagttcatccagcagcagggcaccagtgatgcctgggtggaccagttcaccaggcctgtgaacaccagcgccctggacatggagtttgagcgggccaagagcgccatcgagctgcaggccgagctggaggagatggccaagagagatgctgaggcccacccctggctgagtgactatgatgacctgaccagcgccacctatgacaagggctaccagtttgaggaggagaaccccctgcgggaccacccccagccctttgaggagggcctgcggcggctgcaggagggggacctgcccaatgctgtgctgctgtttgaggccgctgtgcagcaggaccccaagcacatggaggcctggcagtacctgggcaccacccaggctgaaaatgagcaggagctgctggccatcagcgccctgcggcgctgcctggagctgaagccagacaaccagacagccctgatggccctggccgtgtccttcaccaatgaaagcctgcagaggcaggcctgtgagaccctgcgggactggctgcgctacaccccagcctatgcccacctggtgaccccagctgaggagggcgccggcggggccggcctgggccccagcaagaggatcctgggcagcctgctgagtgacagcctcttcctggaggtgaaggagctgttcctggccgctgtgcggctggaccccaccagcattgatcctgatgtgcagtgtggcctgggcgtgctcttcaacctgtctggagaatatgacaaggctgtggactgcttcaccgctgccctgtctgtgcggcccaatgactacctgctgtggaacaagctgggcgccaccctggccaacggcaaccagagcgaggaggccgtggccgcctaccgccgggccctggagctgcagcccggctacatccgcagccgctacaacctgggcatcagctgcatcaacctgggcgcccaccgggaggccgtggagcacttcctggaggccctgaacatgcagaggaagagccggggccccagaggagagggcggggccatgtctgagaacatctggagcaccctgcggctggccctgtccatgctgggccagagtgatgcctacggggctgctgatgcccgggacctgagcaccctgctgaccatgtttggcctgccccagtag

SEQ ID NO: 6928 - DNA, 747 bp, Artificial Sequence
  derived and/or modified sequence
atggccatgagggagctggtggaggccgagtgtggcggggccaaccccctgatgaagctggccggccacttcacccaggacaaggccctgcggcaggagggcctgcggcccggcccctggcccccaggggccccagccagcgaggccgccagcaagcccctgggcgtggcctctgaagatgagctggtggccgagttcctgcaggaccagaatgcccccctggtgtcccgggccccccagaccttcaagatggatgacctgctggccgagatgcagcagatcgagcagagcaacttccggcaggccccccagagggcccctggggtggccgacctggccctgtctgagaactgggcccaggagttcctggccgctggagatgctgtggatgtgacccaggactacaatgaaacagactggagccaggagttcatcagcgaggtgacagaccccctgtctgtgtccccagcccgctgggccgaggagtacctggagcagagcgaggagaagctgtggctgggggagcctgagggcacagccacagaccgctggtatgatgagtaccaccctgaggaggacctgcagcacacagccagtgactttgtggccaaggtggatgaccccaagctggccaacagcgagttcctgaagtttgtgcggcagatcggggagggccaggtgtccctggagagcggggccggcagcggccgggcccaggccgagcagtgggccgctgagttcatctag

SEQ ID NO: 6929 - DNA, 1896 bp, Artificial Sequence
  derived and/or modified sequence
atggccatgcgggagctggtggaggccgagtgcggcggcgccaaccctcttatgaaactagctgggcactttactcaggacaaagctctacggcaagagggcctccgccccggcccttggccacccggagctccggcctctgaggccgccagtaagccactcggtgttgccagcgaggacgaacttgttgcagagttcttgcaggaccaaaacgccccactggtgtctcgggctcctcaaaccttcaaaatggatgatcttctggccgagatgcagcaaatcgaacaatccaattttagacaggccccccaaagagccccaggggtcgctgacttagcactgtccgagaactgggctcaggaatttttagcagccggcgacgccgttgacgttacccaggactataacgaaactgactggtctcaagagtttatctcagaagttaccgacccacttagcgtatccccagctcggtgggcagaagagtatttggaacagtccgaggagaagctttggttgggcgagccagaagggaccgctacagaccggtggtatgacgagtatcaccctgaggaagacttgcaacatactgcatctgacttcgtagccaaagtcgacgatccaaagcttgccaactccgaattcctaaaatttgtccgccagattggagaaggtcaggtgtccctcgaatccggagccgggagcggcagagctcaagctgagcaatgggctgctgagttcatccagcagcaggggacatccgacgcctgggtcgaccaatttacacggcctgttaatacctccgccctcgatatggagtttgagcgggcaaagtcggccatagagctccaggcagagctggaggagatggcgaagcgtgacgccgaggcacacccatggttatctgattatgacgacttgacatctgcaacttatgacaaaggctaccaatttgaggaagagaaccccctgagagaccaccctcagccattcgaagaggggctgaggagactgcaagagggcgatcttcctaacgccgtcctgctgttcgaggctgctgttcagcaagaccccaagcacatggaagcatggcagtacctcggaaccacccaggctgagaatgagcaggagctcttagccatcagcgccttgaggcgttgcctggaactgaaacctgataatcagactgcgctgatggctctggctgtgtctttcacgaacgagtctctgcaacggcaggcatgtgaaaccctcagagactggttgagatacacaccagcctacgcacatctggttacacccgccgaggaaggcgctggtggtgcaggccttggaccaagcaagcgcatcctcggttccctgctctcagacagcctgtttctagaagtgaaagagctcttcctggcagctgttagactcgacccaacgtcaattgaccctgacgttcagtgtgggctcggggtgctcttcaacttatctggagaatacgacaaggccgtcgactgctttaccgccgctctaagcgtacgacccaatgactacctgctatggaacaagctgggcgcgacactggccaatgggaaccagagtgaggaagcagtggctgcatataggcgggccctggagttgcagccaggatacatacgctcaagatacaatctggggatatcttgtatcaatcttggcgcccaccgcgaagcagttgaacacttccttgaggctttgaacatgcagcgtaagagcagagggcctagaggcgaaggcggtgctatgagcgaaaacatttggtctacactgaggctggccttgtcaatgcttggtcagtctgacgcctacggtgcggccgacgctcgcgacctcagtactttgctcacaatgtttggcctgccccagtag

SEQ ID NO: 6930 - DNA, 747 bp, Artificial Sequence
  derived and/or modified sequence
atggccatgcgggagctggtggaggccgagtgcggcggcgccaaccccttgatgaagctagctgggcatttcacacaagacaaggctctccgccaggagggcctgcgccctgggccatggccccccggagcccctgctagcgaggcagcctctaagcccctgggagtggcaagcgaagacgagctggtggctgagttcctgcaggaccagaacgctcctctggtatccagagcaccccagacctttaaaatggacgacttgttggcggagatgcagcaaatcgagcaatcaaatttccgccaggcacctcaacgtgcccccggcgtggctgatttggccctgtccgagaattgggcacaagaatttttagcggctggcgatgcggtggatgttacacaggattacaatgagaccgactggtcgcaggagttcatcagcgaggtgactgaccctctgtcggtttcccctgcccgctgggcagaggagtacctggaacagagcgaagaaaaattatggttgggtgagccagagggcacggcgactgatagatggtacgatgagtatcatcctgaggaggacttgcagcataccgcaagtgacttcgtcgctaaagtggatgacccaaagctcgccaactctgaattcctcaaattcgttcgacagatcggtgaggggcaggtgagcttggagagcggagcaggcagcggccgcgcacaggcagagcaatgggcagccgagtttatttag

SEQ ID NO: 6931 - DNA, 1896 bp, Artificial Sequence
  derived and/or modified sequence
atggccatgcgcgagcttgtagaggccgaatgcggcggtgccaatcccctcatgaagttagccggacatttcacacaggacaaggccctgcgacaagagggactcaggccaggcccatggcccccaggagctccggcatcagaggccgcttccaagcccctgggtgttgcttccgaggatgaactggtggccgaattcctgcaggatcagaacgctcctctggtctctcgcgctccacaaacatttaaaatggacgatctgctggcagagatgcagcagatagagcagtccaacttccggcaggcccctcagagggcccctggagtagccgatctagccctgtctgagaattgggcccaggaattcctggcagcaggagatgccgtggacgttacccaggactataatgagacagattggagccaagaatttataagcgaggtgactgatcccttgtcggtgtccccagccagatgggcagaagaatacctggagcagtcagaagagaaactgtggcttggcgaaccggagggcactgctaccgacagatggtacgatgagtatcaccccgaggaggatttacaacataccgcttcggatttcgtcgccaaggttgatgaccctaaactggccaattccgaatttctaaagtttgttcggcagatcggtgaagggcaagttagcctggagtctggtgcaggctccgggagagcccaggcggagcagtgggctgctgaattcattcagcaacaggggacctccgacgcatgggttgaccagtttacaagaccggttaatactagtgcgcttgacatggagtttgagcgtgccaaaagtgccatagagctccaggctgagctcgaagaaatggccaagagggatgcagaggcccatccatggctttcagactacgacgatctaacatccgcaacctacgacaaaggttaccagtttgaggaggagaatccactaagggatcacccgcagcctttcgaagaggggcttcgtcgactgcaagagggcgacctgcccaacgccgtcctcctgttcgaagccgcagtccaacaggatcctaaacatatggaagcgtggcagtacctgggtacgacgcaggcagagaatgagcaggaactgcttgccatctctgccctgaggcgttgtctagagctgaaaccagataatcaaaccgccttgatggccctggctgttagcttcactaacgaaagcctacaaaggcaagcctgtgagactttgcgcgactggctcagatacacacccgcatacgcccatttagtgacccctgctgaggagggggcaggcggtgccggactggggccttcaaaacgcatactcggtagtctgctgagcgactcgctctttctggaagttaaagagctttttcttgctgcagtcaggctggatccaacgtctatcgacccagacgtgcaatgcggcttaggagtgttgtttaacctctccggggagtacgataaggccgtggattgttttacagccgctctaagtgtgagaccaaacgattacctcttatggaacaaacttggcgctaccctggctaacgggaaccagagcgaggaagccgtggccgcataccggagggctctagaactgcagccagggtacataaggtcacgttacaatctgggaatttcctgtatcaacctgggagcgcacagagaagcagtcgaacatttcttggaggcactgaacatgcaacgaaaatccagagggccaagaggtgagggcggagccatgtccgaaaacatctggagcaccctccgactcgccctaagcatgctgggccagagcgacgcatacggagctgctgacgcccgagatctgtccacgttgttgacaatgttcgggctccctcaatag

SEQ ID NO: 6932 - DNA, 747 bp, Artificial Sequence
  derived and/or modified sequence
atggcaatgcgcgagctcgtcgaggcagagtgtgggggagcaaaccctctcatgaaactggctgggcacttcactcaagacaaagctctgaggcaggagggattacgccctggtccatggccaccaggagcccctgctagcgaggctgcctccaagcctctgggcgtggcctcggaggacgaactcgtggctgaatttctgcaagatcagaacgctccactggtttccagggccccacaaacatttaagatggatgacctcttggcagaaatgcagcagattgaacagtccaactttagacaggctccccagcgcgctcccggtgtggctgacttggcactgtctgaaaattgggctcaggaatttttagccgctggcgacgctgtcgacgtgacacaagattacaacgaaaccgactggtcacaggaattcatttctgaggtgacagacccgctctccgtcagcccggcacggtgggccgaagagtatttagaacagtcggaagaaaagctgtggctcggggaacccgagggcaccgccacggaccgatggtacgatgaataccatcccgaagaggatctgcagcataccgcgagcgacttcgtcgccaaggtggatgatccaaagttggccaatagtgaatttctgaagtttgtgcggcagattggggaaggacaggtgtccctcgagagtggcgctgggtcaggaagggcgcaggctgagcagtgggctgccgagttcatctag

SEQ ID NO: 6933 - DNA, 1896 bp, Artificial Sequence
  derived and/or modified sequence
atggccatgagagagctggtggaggccgagtgcggcggcgccaaccccctgatgaagctggccggccacttcacccaggacaaggccctgagacaggagggcctgagacccggcccctggccccccggcgcccccgccagcgaggccgccagcaagcccctgggcgtggccagcgaggacgagctggtggccgagttcctgcaggaccagaacgcccccctggtgagcagagccccccagaccttcaagatggacgacctgctggccgagatgcagcagatcgagcagagcaacttcagacaggccccccagagagcccccggcgtggccgacctggccctgagcgagaactgggcccaggagttcctggccgccggcgacgccgtggacgtgacccaggactacaacgagaccgactggagccaggagttcatcagcgaggtgaccgaccccctgagcgtgagccccgccagatgggccgaggagtacctggagcagagcgaggagaagctgtggctgggcgagcccgagggcaccgccaccgacagatggtacgacgagtaccaccccgaggaggacctgcagcacaccgccagcgacttcgtggccaaggtggacgaccccaagctggccaacagcgagttcctgaagttcgtgagacagatcggcgagggccaggtgagcctggagagcggcgccggcagcggcagagcccaggccgagcagtgggccgccgagttcatccagcagcagggcaccagcgacgcctgggtggaccagttcaccagacccgtgaacaccagcgccctggacatggagttcgagagagccaagagcgccatcgagctgcaggccgagctggaggagatggccaagagagacgccgaggcccacccctggctgagcgactacgacgacctgaccagcgccacctacgacaagggctaccagttcgaggaggagaaccccctgagagaccacccccagcccttcgaggagggcctgagaagactgcaggagggcgacctgcccaacgccgtgctgctgttcgaggccgccgtgcagcaggaccccaagcacatggaggcctggcagtacctgggcaccacccaggccgagaacgagcaggagctgctggccatcagcgccctgagaagatgcctggagctgaagcccgacaaccagaccgccctgatggccctggccgtgagcttcaccaacgagagcctgcagagacaggcctgcgagaccctgagagactggctgagatacacccccgcctacgcccacctggtgacccccgccgaggagggcgccggcggcgccggcctgggccccagcaagagaatcctgggcagcctgctgagcgacagcctgttcctggaggtgaaggagctgttcctggccgccgtgagactggaccccaccagcatcgaccccgacgtgcagtgcggcctgggcgtgctgttcaacctgagcggcgagtacgacaaggccgtggactgcttcaccgccgccctgagcgtgagacccaacgactacctgctgtggaacaagctgggcgccaccctggccaacggcaaccagagcgaggaggccgtggccgcctacagaagagccctggagctgcagcccggctacatcagaagcagatacaacctgggcatcagctgcatcaacctgggcgcccacagagaggccgtggagcacttcctggaggccctgaacatgcagagaaagagcagaggccccagaggcgagggcggcgccatgagcgagaacatctggagcaccctgagactggccctgagcatgctgggccagagcgacgcctacggcgccgccgacgccagagacctgagcaccctgctgaccatgttcggcctgccccagtag

SEQ ID NO: 6934 - DNA, 747 bp, Artificial Sequence
  derived and/or modified sequence
atggccatgagagagctggtggaggccgagtgcggcggcgccaaccccctgatgaagctggccggccacttcacccaggacaaggccctgagacaggagggcctgagacccggcccctggccccccggcgcccccgccagcgaggccgccagcaagcccctgggcgtggccagcgaggacgagctggtggccgagttcctgcaggaccagaacgcccccctggtgagcagagccccccagaccttcaagatggacgacctgctggccgagatgcagcagatcgagcagagcaacttcagacaggccccccagagagcccccggcgtggccgacctggccctgagcgagaactgggcccaggagttcctggccgccggcgacgccgtggacgtgacccaggactacaacgagaccgactggagccaggagttcatcagcgaggtgaccgaccccctgagcgtgagccccgccagatgggccgaggagtacctggagcagagcgaggagaagctgtggctgggcgagcccgagggcaccgccaccgacagatggtacgacgagtaccaccccgaggaggacctgcagcacaccgccagcgacttcgtggccaaggtggacgaccccaagctggccaacagcgagttcctgaagttcgtgagacagatcggcgagggccaggtgagcctggagagcggcgccggcagcggcagagcccaggccgagcagtgggccgccgagttcatctag

SEQ ID NO: 6935 - protein, 244 aa, Artificial Sequence
  derived and/or modified sequence
MAAAAAAGEARRVLVYGGRGALGSRCVQAFRARNWWVASVDVVENEEASASIIVKMTDSFTEQADQVTAEVGKLLGEEKVDAILCVAGGWAGGNAKSKSLFKNCDLMWKQSIWTSTISSHLATKHLKEGGLLTLAGAKAALDGTPGMIGYGMAKGAVHQLCQSLAGKNSGMPPGAAAIAVLPVTLDTPMNRKSMPEADFSSWTPLEFLVETFHDWITGKNRPSSGSLIQVVTTEGRTELTPAYF

SEQ ID NO: 6936 - DNA, 735 bp, Artificial Sequence
  derived and/or modified sequence
atggccgccgcagccgcagccggcgaggctcgaagggtactggtgtacggcgggcgcggtgccctgggctccagatgtgtgcaggcatttcgtgcccgcaattggtgggttgcctctgttgatgtggttgagaatgaagaagccagcgctagtatcatagtgaagatgaccgactcattcacagaacaggcagatcaggttaccgctgaagttggcaagctgctgggcgaggaaaaagtagatgcaattttatgcgtagccggcggatgggcgggcggcaacgccaaaagcaaatctttgttcaaaaactgtgatcttatgtggaagcagtcgatttggacgagcaccatcagctcccatctggctacaaaacatctgaaggagggaggactgcttactctggcgggagcaaaggccgccctggacggaacaccgggaatgatagggtacggtatggcaaagggtgctgtacaccagttgtgtcaatctctggctggtaagaactctggaatgccacccggggccgccgccatagccgtgctgcccgtgactctggatacaccaatgaaccgaaaatcaatgcctgaggcagactttagctcctggacacctttggaattcttggtggagactttccacgattggatcactggaaagaaccgaccttctagtggcagtttgatccaggttgtgaccaccgaggggaggacagagttgacaccggcatacttttag

SEQ ID NO: 6937 - DNA, 735 bp, Artificial Sequence
  derived and/or modified sequence
atggctgctgctgctgctgctggggaggccaggagagtgctggtgtatggaggccgcggggccctgggcagccgctgtgtgcaggccttccgggccaggaactggtgggtggcctctgtggatgtggtggagaatgaggaggccagcgccagcatcatcgtgaagatgacagacagcttcacagagcaggccgaccaggtgacagctgaggtgggcaagctgctgggggaggagaaggtggatgccatcctgtgtgtggccggcggctgggccggcggcaatgccaagagcaagagcctcttcaagaactgtgacctgatgtggaagcagagcatctggaccagcaccatcagcagccacctggccaccaagcacctgaaggagggcggcctgctgaccctggccggggccaaggccgccctggatggcaccccaggcatgattggctacggcatggccaagggagctgtgcaccagctgtgccagagcctggccggcaagaacagcggcatgcctcctggagctgctgccatcgctgtgctgcctgtgaccctggacacccccatgaacaggaagtccatgcctgaggccgacttcagctcctggacccccctggagttcctggtggagaccttccatgactggatcaccgggaagaaccggcccagcagcggcagcctcatccaggtggtgaccacagagggccgcacagagctgaccccagcctacttctag

SEQ ID NO: 6938 - DNA, 735 bp, Artificial Sequence
  derived and/or modified sequence
atggccgccgccgccgccgccggcgaggcccggcgggtgctggtgtatgggggaagaggggccctcggaagtcgctgcgtgcaggcttttcgagcccggaattggtgggtagcttctgttgacgtggtggagaacgaagaagcttcagcgtccatcattgtaaaaatgacagattctttcactgaacaggccgatcaggtgacggctgaggtgggaaaattacttggcgaagagaaggtggacgcaatattgtgtgtcgccggaggttgggcaggcggcaacgccaagagcaagtctctgttcaagaattgtgatctaatgtggaagcagtcaatttggacaagcacaatttcttcccacctggccaccaagcacctaaaagaaggaggtctccttaccctggctggcgcaaaagccgcactagatggcacccctggcatgatcggatacggcatggcaaagggggctgtgcatcaactgtgtcagagcctggctgggaaaaactctggtatgccccctggcgctgctgccattgcagtattgccggtgaccttggatacccccatgaatagaaaatccatgcctgaggctgacttctctagttggactccactggaatttcttgtcgagacatttcatgattggatcacaggcaagaacaggccctcctcagggtcactgattcaggtggtgaccaccgaaggtagaaccgagttgacgccagcatacttctag

SEQ ID NO: 6939 - DNA, 735 bp, Artificial Sequence
  derived and/or modified sequence
atggctgccgctgcagctgcaggagaagctcgtcgagtattggtgtacggcggacgcggagctttgggatcacgctgtgtccaggcatttcgtgcacgcaactggtgggtcgcgagtgtggacgttgttgagaatgaggaggcgtctgcctccataatcgttaaaatgacagattcttttactgagcaagcggatcaagtaacggccgaggtgggaaaattacttggggaggaaaaggtagatgccatcctctgtgtagctggcggatgggccggaggaaacgctaagagcaagtcacttttcaagaattgtgacctgatgtggaagcagtcaatatggaccagtaccatctcctctcaccttgctactaagcacctcaaggagggcggactgctcaccctggccggagcgaaggcagcactggatggcacccccggtatgatcggatacgggatggccaaaggagcagtccatcaactgtgccagtcactcgctgggaagaatagcgggatgcccccaggagccgcagcaatcgccgtcctgcccgtgacgctggatacacccatgaatcggaagtccatgcccgaagccgacttttccagctggacccctctggagtttctggtcgagacctttcacgattggatcacggggaagaaccggccatctagtggatctcttatccaggtcgtgaccacggaggggaggacagagctgacccctgcctatttctag

SEQ ID NO: 6940 - DNA, 1648 bp, Artificial Sequence
  derived and/or modified sequence
acagtccctccgggtggcggggcgccccgagcgtggcagcgcgctaggcggcagcagcgggcgcggagcggggcgcggccgccgcgcgttccctcttggcggggttggccggccggggcggggcgcggcgctccggctcgaggcattcggagctgcgggagccgggctggcaggagcaggatggcggcggcggcggctgcaggcgaggcgcgccgggtgctggtgtacggcggcaggggcgctctgggttctcgatgcgtgcaggcttttcgggcccgcaactggtgggttgccagcgttgatgtggtggagaatgaagaggccagcgctagcatcattgttaaaatgacagactcgttcactgagcaggctgaccaggtgactgctgaggttggaaagctcttgggtgaagagaaggtggatgcaattctttgcgttgctggaggatgggccgggggcaatgccaaatccaagtctctctttaagaactgtgacctgatgtggaagcagagcatatggacatcgaccatctccagccatctggctaccaagcatctcaaggaaggaggcctcctgaccttggctggcgcaaaggctgccctggatgggactcctggtatgatcgggtacggcatggccaagggtgctgttcaccagctctgccagagcctggctgggaagaacagcggcatgccgcccggggcagccgccatcgctgtgctcccggttaccctggataccccgatgaacaggaaatcaatgcctgaggctgacttcagctcctggacacccttagaattcctagttgaaactttccatgactggatcacagggaaaaaccgaccgagctcaggaagcctaatccaggtggtaaccacagaaggaaggacggaactcaccccagcatatttttaggcctcatctcagtgcctatgaggggcctgccagaaaagtcactaacctgtctcagtgtggccttgtccagccttgtgttttctgtaacccctgtttgtggtacgagataatgagtcctatttttctctcacataatatgcatttgctctcctaggacagtgtaatacatttatgtgaagtaaagacatgcgagactggtggcctgcaaatagcatccgttgatctgtgttaactgcatagggagggctctgcatagcacctgctatagcggtgtcatgttggatcgcttttgtgactgttcatctgtccttgacagtggctgtcatcttgactactttgttgatttgttggtattggggacattttaaaggctgagttatttttgaatgtcatgtttatgtcatagacgtagttttcgcatccttgaattaaactgccttaactccttttgtggtataagcaaaactacatggactctgtcctggtatccttttcctgtgtggttgccccgtgtcctctggcctagggttaagtgtgcaagataactactcgtgagtattcagaatgttgttcctaataaatgcacttgttgtctgtcttctttaatcaaatcacatcttatatacagcagtcagagatgagtatactagaatcatggattgctggaggtcttttaatctgatgttctcagaagggggtggatttaaatcctgaaataaatatttcaacacaa

SEQ ID NO: 6941 - DNA, 735 bp, Artificial Sequence
  derived and/or modified sequence
atggccgccgccgccgccgccggcgaggccagaagagtgctggtgtacggcggcagaggcgccctgggcagcagatgcgtgcaggccttcagagccagaaactggtgggtggccagcgtggacgtggtggagaacgaggaggccagcgccagcatcatcgtgaagatgaccgacagcttcaccgagcaggccgaccaggtgaccgccgaggtgggcaagctgctgggcgaggagaaggtggacgccatcctgtgcgtggccggcggctgggccggcggcaacgccaagagcaagagcctgttcaagaactgcgacctgatgtggaagcagagcatctggaccagcaccatcagcagccacctggccaccaagcacctgaaggagggcggcctgctgaccctggccggcgccaaggccgccctggacggcacccccggcatgatcggctacggcatggccaagggcgccgtgcaccagctgtgccagagcctggccggcaagaacagcggcatgccccccggcgccgccgccatcgccgtgctgcccgtgaccctggacacccccatgaacagaaagagcatgcccgaggccgacttcagcagctggacccccctggagttcctggtggagaccttccacgactggatcaccggcaagaacagacccagcagcggcagcctgatccaggtggtgaccaccgagggcagaaccgagctgacccccgcctacttctag

SEQ ID NO: 6942 - protein, 928 aa, Artificial Sequence
  derived and/or modified sequence
MPPKTPRKTAATAAAAAAEPPAPPPPPPPEEDPEQDSGPEDLPLVRLEFEETEEPDFTALCQKLKIPDHVRERAWLTWEKVSSVDGVLGGYIQKKKELWGICIFIAAVDLDEMSFTFTELQKNIEISVHKFFNLLKEIDTSTKVDNAMSRLLKKYDVLFALFSKLERTCELIYLTQPSSSISTEINSALVLKVSWITFLLAKGEVLQMEDDLVISFQLMLCVLDYFIKLSPPMLLKEPYKTAVIPINGSPRTPRRGQNRSARIAKQLENDTRIIEVLCKEHECNIDEVKNVYFKNFIPFMNSLGLVTSNGLPEVENLSKRYEEIYLKNKDLDARLFLDHDKTLQTDSIDSFETQRTPRKSNLDEEVNVIPPHTPVRTVMNTIQQLMMILNSASDQPSENLISYFNNCTVNPKESILKRVKDIGYIFKEKFAKAVGQGCVEIGSQRYKLGVRLYYRVMESMLKSEEERLSIQNFSKLLNDNIFHMSLLACALEVVMATYSRSTSQNLDSGTDLSFPWILNVLNLKAFDFYKVIESFIKAEGNLTREMIKHLERCEHRIMESLAWLSDSPLFDLIKQSKDREGPTDHLESACPLNLPLQNNHTAADMYLSPVRSPKKKGSTTRVNSTANAETQATSAFQTQKPLKSTSLSLFYKKVYRLAYLRLNTLCERLLSEHPELEHIIWTLFQHTLQNEYELMRDRHLDQIMMCSMYGICKVKNIDLKFKIIVTAYKDLPHAVQETFKRVLIKEEEYDSIIVFYNSVFMQRLKTNILQYASTRPPTLSPIPHIPRSPYKFPSSPLRIPGGNIYISPLKSPYKISEGLPTPTKMTPRSRILVSIGESFGTSEKFQKINQMVCNSDRVLKRSAEGSNPPKPLKKLRFDIEGSDEADGSKHLPGESKFQQKLAEMTSTRTRMQKQKMNDSMDTSNKEEK

SEQ ID NO: 6943 - protein, 53 aa, Artificial Sequence
  derived and/or modified sequence
MPPKTPRKTAATAAAAAAEPPAPPPPPPPEEDPEQDSGPEDLPLVRGSITNGR

SEQ ID NO: 6944 - protein, 907 aa, Artificial Sequence
  derived and/or modified sequence
MPPKTPPPEEDPEQDSGPEDLPLVRLEFEETEEPDFTALCQKLKIPDHVRERAWLTWEKVSSVDGVLGGYIQKKKELWGICIFIAAVDLDEMSFTFTELQKNIEISVHKFFNLLKEIDTSTKVDNAMSRLLKKYDVLFALFSKLERTCELIYLTQPSSSISTEINSALVLKVSWITFLLAKGEVLQMEDDLVISFQLMLCVLDYFIKLSPPMLLKEPYKTAVIPINGSPRTPRRGQNRSARIAKQLENDTRIIEVLCKEHECNIDEVKNVYFKNFIPFMNSLGLVTSNGLPEVENLSKRYEEIYLKNKDLDARLFLDHDKTLQTDSIDSFETQRTPRKSNLDEEVNVIPPHTPVRTVMNTIQQLMMILNSASDQPSENLISYFNNCTVNPKESILKRVKDIGYIFKEKFAKAVGQGCVEIGSQRYKLGVRLYYRVMESMLKSEEERLSIQNFSKLLNDNIFHMSLLACALEVVMATYSRSTSQNLDSGTDLSFPWILNVLNLKAFDFYKVIESFIKAEGNLTREMIKHLERCEHRIMESLAWLSDSPLFDLIKQSKDREGPTDHLESACPLNLPLQNNHTAADMYLSPVRSPKKKGSTTRVNSTANAETQATSAFQTQKPLKSTSLSLFYKKVYRLAYLRLNTLCERLLSEHPELEHIIWTLFQHTLQNEYELMRDRHLDQIMMCSMYGICKVKNIDLKFKIIVTAYKDLPHAVQETFKRVLIKEEEYDSIIVFYNSVFMQRLKTNILQYASTRPPTLSPIPHIPRSPYKFPSSPLRIPGGNIYISPLKSPYKISEGLPTPTKMTPRSRILVSIGESFGTSEKFQKINQMVCNSDRVLKRSAEGSNPPKPLKKLRFDIEGSDEADGSKHLPGESKFQQKLAEMTSTRTRMQKQKMNDSMDTSNKEEK

SEQ ID NO: 6945 - DNA, 4772 bp, Artificial Sequence
  derived and/or modified sequence
gctcagttgccgggcgggggagggcgcgtccggtttttctcaggggacgttgaaattatttttgtaacgggagtcgggagaggacggggcgtgccccgacgtgcgcgcgcgtcgtcctccccggcgctcctccacagctcgctggctcccgccgcggaaaggcgtcatgccgcccaaaaccccccgaaaaacggccgccaccgccgccgctgccgccgcggaacccccggcaccgccgccgccgccccctcctgaggaggacccagagcaggacagcggcccggaggacctgcctctcgtcaggcttgagtttgaagaaacagaagaacctgattttactgcattatgtcagaaattaaagataccagatcatgtcagagagagagcttggttaacttgggagaaagtttcatctgtggatggagtattgggaggttatattcaaaagaaaaaggaactgtggggaatctgtatctttattgcagcagttgacctagatgagatgtcgttcacttttactgagctacagaaaaacatagaaatcagtgtccataaattctttaacttactaaaagaaattgataccagtaccaaagttgataatgctatgtcaagactgttgaagaagtatgatgtattgtttgcactcttcagcaaattggaaaggacatgtgaacttatatatttgacacaacccagcagttcgatatctactgaaataaattctgcattggtgctaaaagtttcttggatcacatttttattagctaaaggggaagtattacaaatggaagatgatctggtgatttcatttcagttaatgctatgtgtccttgactattttattaaactctcacctcccatgttgctcaaagaaccatataaaacagctgttatacccattaatggttcacctcgaacacccaggcgaggtcagaacaggagtgcacggatagcaaaacaactagaaaatgatacaagaattattgaagttctctgtaaagaacatgaatgtaatatagatgaggtgaaaaatgtttatttcaaaaattttataccttttatgaattctcttggacttgtaacatctaatggacttccagaggttgaaaatctttctaaacgatacgaagaaatttatcttaaaaataaagatctagatgcaagattatttttggatcatgataaaactcttcagactgattctatagacagttttgaaacacagagaacaccacgaaaaagtaaccttgatgaagaggtgaatgtaattcctccacacactccagttaggactgttatgaacactatccaacaattaatgatgattttaaattcagcaagtgatcaaccttcagaaaatctgatttcctattttaacaactgcacagtgaatccaaaagaaagtatactgaaaagagtgaaggatataggatacatctttaaagagaaatttgctaaagctgtgggacagggttgtgtcgaaattggatcacagcgatacaaacttggagttcgcttgtattaccgagtaatggaatccatgcttaaatcagaagaagaacgattatccattcaaaattttagcaaacttctgaatgacaacatttttcatatgtctttattggcgtgcgctcttgaggttgtaatggccacatatagcagaagtacatctcagaatcttgattctggaacagatttgtctttcccatggattctgaatgtgcttaatttaaaagcctttgatttttacaaagtgatcgaaagttttatcaaagcagaaggcaacttgacaagagaaatgataaaacatttagaacgatgtgaacatcgaatcatggaatcccttgcatggctctcagattcacctttatttgatcttattaaacaatcaaaggaccgagaaggaccaactgatcaccttgaatctgcttgtcctcttaatcttcctctccagaataatcacactgcagcagatatgtatctttctcctgtaagatctccaaagaaaaaaggttcaactacgcgtgtaaattctactgcaaatgcagagacacaagcaacctcagccttccagacccagaagccattgaaatctacctctctttcactgttttataaaaaagtgtatcggctagcctatctccggctaaatacactttgtgaacgccttctgtctgagcacccagaattagaacatatcatctggacccttttccagcacaccctgcagaatgagtatgaactcatgagagacaggcatttggaccaaattatgatgtgttccatgtatggcatatgcaaagtgaagaatatagaccttaaattcaaaatcattgtaacagcatacaaggatcttcctcatgctgttcaggagacattcaaacgtgttttgatcaaagaagaggagtatgattctattatagtattctataactcggtcttcatgcagagactgaaaacaaatattttgcagtatgcttccaccaggccccctaccttgtcaccaatacctcacattcctcgaagcccttacaagtttcctagttcacccttacggattcctggagggaacatctatatttcacccctgaagagtccatataaaatttcagaaggtctgccaacaccaacaaaaatgactccaagatcaagaatcttagtatcaattggtgaatcattcgggacttctgagaagttccagaaaataaatcagatggtatgtaacagcgaccgtgtgctcaaaagaagtgctgaaggaagcaaccctcctaaaccactgaaaaaactacgctttgatattgaaggatcagatgaagcagatggaagtaaacatctcccaggagagtccaaatttcagcagaaactggcagaaatgacttctactcgaacacgaatgcaaaagcagaaaatgaatgatagcatggatacctcaaacaaggaagagaaatgaggatctcaggaccttggtggacactgtgtacacctctggattcattgtctctcacagatgtgactgtataactttcccaggttctgtttatggccacatttaatatcttcagctctttttgtggatataaaatgtgcagatgcaattgtttgggtgattcctaagccacttgaaatgttagtcattgttatttatacaagattgaaaatcttgtgtaaatcctgccatttaaaaagttgtagcagattgtttcctcttccaaagtaaaattgctgtgctttatggatagtaagaatggccctagagtgggagtcctgataacccaggcctgtctgactactttgccttcttttgtagcatataggtgatgtttgctcttgtttttattaatttatatgtatatttttttaatttaacatgaacacccttagaaaatgtgtcctatctatcttccaaatgcaatttgattgactgcccattcaccaaaattatcctgaactcttctgcaaaaatggatattattagaaattagaaaaaaattactaattttacacattagattttattttactattggaatctgatatactgtgtgcttgttttataaaattttgcttttaattaaataaaagctggaagcaaagtataaccatatgatactatcatactactgaaacagatttcatacctcagaatgtaaaagaacttactgattattttcttcatccaacttatgtttttaaatgaggattattgatagtactcttggtttttataccattcagatcactgaatttataaagtacccatctagtacttgaaaaagtaaagtgttctgccagatcttaggtatagaggaccctaacacagtatatcccaagtgcactttctaatgtttctgggtcctgaagaattaagatacaaattaattttactccataaacagactgttaattataggagccttaatttttttttcatagagatttgtctaattgcatctcaaaattattctgccctccttaatttgggaaggtttgtgttttctctggaatggtacatgtcttccatgtatcttttgaactggcaattgtctatttatcttttatttttttaagtcagtatggtctaacactggcatgttcaaagccacattatttctagtccaaaattacaagtaatcaagggtcattatgggttaggcattaatgtttctatctgattttgtgcaaaagcttcaaattaaaacagctgcattagaaaaagaggcgcttctcccctcccctacacctaaaggtgtatttaaactatcttgtgtgattaacttatttagagatgctgtaacttaaaataggggatatttaaggtagcttcagctagcttttaggaaaatcactttgtctaactcagaattatttttaaaaagaaatctggtcttgttagaaaacaaaattttattttgtgctcatttaagtttcaaacttactattttgacagttattttgataacaatgacactagaaaacttgactccatttcatcattgtttctgcatgaatatcatacaaatcagttagtttttaggtcaagggcttactatttctgggtcttttgctactaagttcacattagaattagtgccagaattttaggaacttcagagatcgtgtattgagatttcttaaataatgcttcagatattattgctttattgcttttttgtattggttaaaactgtacatttaaaattgctatgttactattttctacaattaatagtttgtctattttaaaataaattagttgttaagagtcttaa

SEQ ID NO: 6946 - DNA, 2787 bp, Artificial Sequence
  derived and/or modified sequence
atgccccccaagacccccagaaagaccgccgccaccgccgccgccgccgccgccgagccccccgcccccccccccccccccccccccgaggaggaccccgagcaggacagcggccccgaggacctgcccctggtgagactggagttcgaggagaccgaggagcccgacttcaccgccctgtgccagaagctgaagatccccgaccacgtgagagagagagcctggctgacctgggagaaggtgagcagcgtggacggcgtgctgggcggctacatccagaagaagaaggagctgtggggcatctgcatcttcatcgccgccgtggacctggacgagatgagcttcaccttcaccgagctgcagaagaacatcgagatcagcgtgcacaagttcttcaacctgctgaaggagatcgacaccagcaccaaggtggacaacgccatgagcagactgctgaagaagtacgacgtgctgttcgccctgttcagcaagctggagagaacctgcgagctgatctacctgacccagcccagcagcagcatcagcaccgagatcaacagcgccctggtgctgaaggtgagctggatcaccttcctgctggccaagggcgaggtgctgcagatggaggacgacctggtgatcagcttccagctgatgctgtgcgtgctggactacttcatcaagctgagcccccccatgctgctgaaggagccctacaagaccgccgtgatccccatcaacggcagccccagaacccccagaagaggccagaacagaagcgccagaatcgccaagcagctggagaacgacaccagaatcatcgaggtgctgtgcaaggagcacgagtgcaacatcgacgaggtgaagaacgtgtacttcaagaacttcatccccttcatgaacagcctgggcctggtgaccagcaacggcctgcccgaggtggagaacctgagcaagagatacgaggagatctacctgaagaacaaggacctggacgccagactgttcctggaccacgacaagaccctgcagaccgacagcatcgacagcttcgagacccagagaacccccagaaagagcaacctggacgaggaggtgaacgtgatccccccccacacccccgtgagaaccgtgatgaacaccatccagcagctgatgatgatcctgaacagcgccagcgaccagcccagcgagaacctgatcagctacttcaacaactgcaccgtgaaccccaaggagagcatcctgaagagagtgaaggacatcggctacatcttcaaggagaagttcgccaaggccgtgggccagggctgcgtggagatcggcagccagagatacaagctgggcgtgagactgtactacagagtgatggagagcatgctgaagagcgaggaggagagactgagcatccagaacttcagcaagctgctgaacgacaacatcttccacatgagcctgctggcctgcgccctggaggtggtgatggccacctacagcagaagcaccagccagaacctggacagcggcaccgacctgagcttcccctggatcctgaacgtgctgaacctgaaggccttcgacttctacaaggtgatcgagagcttcatcaaggccgagggcaacctgaccagagagatgatcaagcacctggagagatgcgagcacagaatcatggagagcctggcctggctgagcgacagccccctgttcgacctgatcaagcagagcaaggacagagagggccccaccgaccacctggagagcgcctgccccctgaacctgcccctgcagaacaaccacaccgccgccgacatgtacctgagccccgtgagaagccccaagaagaagggcagcaccaccagagtgaacagcaccgccaacgccgagacccaggccaccagcgccttccagacccagaagcccctgaagagcaccagcctgagcctgttctacaagaaggtgtacagactggcctacctgagactgaacaccctgtgcgagagactgctgagcgagcaccccgagctggagcacatcatctggaccctgttccagcacaccctgcagaacgagtacgagctgatgagagacagacacctggaccagatcatgatgtgcagcatgtacggcatctgcaaggtgaagaacatcgacctgaagttcaagatcatcgtgaccgcctacaaggacctgccccacgccgtgcaggagaccttcaagagagtgctgatcaaggaggaggagtacgacagcatcatcgtgttctacaacagcgtgttcatgcagagactgaagaccaacatcctgcagtacgccagcaccagaccccccaccctgagccccatcccccacatccccagaagcccctacaagttccccagcagccccctgagaatccccggcggcaacatctacatcagccccctgaagagcccctacaagatcagcgagggcctgcccacccccaccaagatgacccccagaagcagaatcctggtgagcatcggcgagagcttcggcaccagcgagaagttccagaagatcaaccagatggtgtgcaacagcgacagagtgctgaagagaagcgccgagggcagcaacccccccaagcccctgaagaagctgagattcgacatcgagggcagcgacgaggccgacggcagcaagcacctgcccggcgagagcaagttccagcagaagctggccgagatgaccagcaccagaaccagaatgcagaagcagaagatgaacgacagcatggacaccagcaacaaggaggagaagtag

SEQ ID NO: 6947 - DNA, 162 bp, Artificial Sequence
  derived and/or modified sequence
atgccccccaagacccccagaaagaccgccgccaccgccgccgccgccgccgccgagccccccgcccccccccccccccccccccccgaggaggaccccgagcaggacagcggccccgaggacctgcccctggtgagaggcagcatcaccaacggcagatag

SEQ ID NO: 6948 - DNA, 2724 bp, Artificial Sequence
  derived and/or modified sequence
atgccccccaagacccccccccccgaggaggaccccgagcaggacagcggccccgaggacctgcccctggtgagactggagttcgaggagaccgaggagcccgacttcaccgccctgtgccagaagctgaagatccccgaccacgtgagagagagagcctggctgacctgggagaaggtgagcagcgtggacggcgtgctgggcggctacatccagaagaagaaggagctgtggggcatctgcatcttcatcgccgccgtggacctggacgagatgagcttcaccttcaccgagctgcagaagaacatcgagatcagcgtgcacaagttcttcaacctgctgaaggagatcgacaccagcaccaaggtggacaacgccatgagcagactgctgaagaagtacgacgtgctgttcgccctgttcagcaagctggagagaacctgcgagctgatctacctgacccagcccagcagcagcatcagcaccgagatcaacagcgccctggtgctgaaggtgagctggatcaccttcctgctggccaagggcgaggtgctgcagatggaggacgacctggtgatcagcttccagctgatgctgtgcgtgctggactacttcatcaagctgagcccccccatgctgctgaaggagccctacaagaccgccgtgatccccatcaacggcagccccagaacccccagaagaggccagaacagaagcgccagaatcgccaagcagctggagaacgacaccagaatcatcgaggtgctgtgcaaggagcacgagtgcaacatcgacgaggtgaagaacgtgtacttcaagaacttcatccccttcatgaacagcctgggcctggtgaccagcaacggcctgcccgaggtggagaacctgagcaagagatacgaggagatctacctgaagaacaaggacctggacgccagactgttcctggaccacgacaagaccctgcagaccgacagcatcgacagcttcgagacccagagaacccccagaaagagcaacctggacgaggaggtgaacgtgatccccccccacacccccgtgagaaccgtgatgaacaccatccagcagctgatgatgatcctgaacagcgccagcgaccagcccagcgagaacctgatcagctacttcaacaactgcaccgtgaaccccaaggagagcatcctgaagagagtgaaggacatcggctacatcttcaaggagaagttcgccaaggccgtgggccagggctgcgtggagatcggcagccagagatacaagctgggcgtgagactgtactacagagtgatggagagcatgctgaagagcgaggaggagagactgagcatccagaacttcagcaagctgctgaacgacaacatcttccacatgagcctgctggcctgcgccctggaggtggtgatggccacctacagcagaagcaccagccagaacctggacagcggcaccgacctgagcttcccctggatcctgaacgtgctgaacctgaaggccttcgacttctacaaggtgatcgagagcttcatcaaggccgagggcaacctgaccagagagatgatcaagcacctggagagatgcgagcacagaatcatggagagcctggcctggctgagcgacagccccctgttcgacctgatcaagcagagcaaggacagagagggccccaccgaccacctggagagcgcctgccccctgaacctgcccctgcagaacaaccacaccgccgccgacatgtacctgagccccgtgagaagccccaagaagaagggcagcaccaccagagtgaacagcaccgccaacgccgagacccaggccaccagcgccttccagacccagaagcccctgaagagcaccagcctgagcctgttctacaagaaggtgtacagactggcctacctgagactgaacaccctgtgcgagagactgctgagcgagcaccccgagctggagcacatcatctggaccctgttccagcacaccctgcagaacgagtacgagctgatgagagacagacacctggaccagatcatgatgtgcagcatgtacggcatctgcaaggtgaagaacatcgacctgaagttcaagatcatcgtgaccgcctacaaggacctgccccacgccgtgcaggagaccttcaagagagtgctgatcaaggaggaggagtacgacagcatcatcgtgttctacaacagcgtgttcatgcagagactgaagaccaacatcctgcagtacgccagcaccagaccccccaccctgagccccatcccccacatccccagaagcccctacaagttccccagcagccccctgagaatccccggcggcaacatctacatcagccccctgaagagcccctacaagatcagcgagggcctgcccacccccaccaagatgacccccagaagcagaatcctggtgagcatcggcgagagcttcggcaccagcgagaagttccagaagatcaaccagatggtgtgcaacagcgacagagtgctgaagagaagcgccgagggcagcaacccccccaagcccctgaagaagctgagattcgacatcgagggcagcgacgaggccgacggcagcaagcacctgcccggcgagagcaagttccagcagaagctggccgagatgaccagcaccagaaccagaatgcagaagcagaagatgaacgacagcatggacaccagcaacaaggaggagaagtag

SEQ ID NO: 6949 - DNA, 2787 bp, Artificial Sequence
  derived and/or modified sequence
atgccacctaagactccgaggaagacagccgctaccgcagcggcggctgccgctgagcctcccgctccacctccaccccccccaccagaggaggaccctgagcaggattccggaccagaagacctgcctctggtgagactggaatttgaagagactgaagagcctgatttcactgcattgtgtcaaaaactgaagattccggatcacgtgcgggaaagagcatggttgacttgggaaaaggtaagctctgtggacggggtactgggcggatatatacagaagaagaaagagctgtggggtatctgtatcttcatcgccgcagtggacctggacgaaatgtctttcaccttcaccgagctccagaaaaatatcgagatttccgtacacaaattcttcaacctgctgaaagaaatcgatactagcaccaaggtcgacaacgccatgagtcggcttttgaagaagtacgatgttcttttcgctttgttttcaaagctcgaacgaacgtgtgagctcatctaccttacacagccatctagttccatatccactgagattaactccgctttggttcttaaggtttcttggattaccttccttctggcgaaaggcgaggtccttcagatggaggacgacctggtgatttccttccagttgatgctgtgcgtgctggattacttcattaaactctctcctcctatgctgctgaaggagccctacaaaaccgcagtgatcccgattaatggaagccctaggaccccacgacgaggtcagaacaggtcagctaggatagcgaaacagttggagaatgatacacgcattatcgaagttctgtgcaaagaacatgagtgcaatatcgatgaggtcaaaaacgtatatttcaagaactttataccattcatgaacagtctgggcttggtgacctccaatgggctgccggaggttgagaacctgagtaaaagatatgaagagatctaccttaaaaacaaagacctagatgcccgtctctttctggaccacgacaagacccttcaaaccgacagcatcgattctttcgaaacccaacgcacccccaggaagtccaacttggatgaggaagtgaatgtaatccctccccacacacccgttaggactgtcatgaatactatccagcagcttatgatgattctaaactccgccagtgaccagccaagtgaaaatctcattagctatttcaataattgcacagttaatccaaaggaatccatccttaagagagtgaaggacatcggctacatctttaaagaaaaattcgctaaagctgttggacagggctgtgtggaaattggaagtcagagatacaaattaggtgtgagattgtactatcgtgtaatggagtcaatgcttaaaagtgaagaagaacggcttagtatccagaacttctcaaaactgttgaatgacaatatattccacatgagccttctcgcttgcgctctggaagttgtgatggcgacttattcaagatccacatcccagaatctggactctggcacagatctaagcttcccgtggatcttgaatgttctgaatcttaaggcttttgatttttataaggtgatcgagagctttataaaagccgaggggaacctgacacgcgaaatgatcaagcacctggaaagatgcgagcataggattatggaaagtctggcctggctgagcgacagccctctatttgacctgatcaagcaatccaaggatcgtgagggtcctactgaccacctggaaagtgcgtgtcctttgaacctgccactacagaataatcacaccgctgccgacatgtacctgagccccgtaagatcaccaaaaaagaagggttcaactacgcgcgtcaatagtaccgccaatgccgagacgcaggctacttcggccttccaaacacagaagccactgaagtccacctcacttagcctcttttacaagaaggtctaccgtctggcttacttaagattaaacaccctatgtgaaaggttgctgtccgagcaccccgaactagaacacattatttggactctgtttcagcatacgctccagaacgaatacgagctcatgcgcgataggcatctggatcaaattatgatgtgtagtatgtacggcatttgtaaggtgaaaaacatcgatctgaagttcaaaatcatcgttacagcatataaggaccttccccacgccgtacaagaaactttcaagcgcgtactgatcaaagaggaagagtacgacagtataatcgttttctacaatagtgtgttcatgcagagactgaagaccaacatcctgcaatacgcctccaccagaccacctacgttgagccccataccccacattccaaggtccccttataagtttccctctagccccttgcgtatccctggcggcaacatctatatctccccactgaagagtccctacaagataagcgaggggctgcccacacccaccaaaatgacacccaggtcccggatcctggtgagcatcggagaatcattcggtacgagtgagaaattccagaagatcaaccagatggtctgcaacagcgaccgggtgctgaagcgctctgcggagggaagcaacccacccaagcctttgaagaagctaagatttgatattgaggggtctgacgaggctgatgggtcaaaacacctgccaggcgagagtaagttccagcagaagctagcagagatgacctccaccagaaccagaatgcagaaacagaagatgaatgattccatggacacaagtaacaaagaggagaaatag

SEQ ID NO: 6950 - DNA, 162 bp, Artificial Sequence
  derived and/or modified sequence
atgcctcccaagacaccaagaaagactgcagctaccgcggcagctgcagccgctgagcccccggccccccctcctcccccccctcctgaagaggatcccgagcaggattctggaccagaggacttacccttagtccgcggttccattacaaatggccggtag

SEQ ID NO: 6951 - DNA, 2724 bp, Artificial Sequence
  derived and/or modified sequence
atgcctcctaagaccccaccacctgaggaggacccggagcaggacagtgggcccgaagatttgccgctggtgcgcctcgagtttgaggaaacagaggaacctgacttcaccgcgctctgccagaagctgaagattcctgatcatgttagagagcgagcctggctgacatgggagaaagtttcatccgtggacggagtccttggcggctacattcagaaaaagaaagagctgtgggggatttgtatctttattgctgcagtagatttagacgagatgagctttacattcacggaactacagaaaaatatcgagattagcgttcataagttttttaacctgctcaaggaaattgatacctcaactaaggtggacaacgcgatgtcccgccttctcaagaaatacgacgtgctgttcgcccttttttccaagctggaaagaacctgcgagcttatttacttgacacagccctcctcctctatttctacagagattaattctgcactggttcttaaggtttcttggatcactttcctactggccaagggggaggttttgcagatggaagacgacttggtgatcagttttcagttaatgctctgcgtgctggattactttattaagctcagccctcctatgctgctcaaggaaccctataaaaccgcggtgataccaataaacggttccccacggaccccccggcggggacaaaaccggtctgccagaatcgccaaacaactggagaacgacacacgtatcatcgaagtcctgtgcaaagaacatgagtgtaatatcgacgaggtgaaaaatgtctactttaagaatttcattcccttcatgaactcgctaggactagtgacatctaacggccttcctgaagtagagaacctgagtaaacgatacgaagagatttacctgaaaaataaagaccttgatgcccggttgttcttggatcacgacaaaacactgcagactgattccatcgacagctttgagacacagagaaccccccggaaaagtaatttggatgaagaggtgaatgtgatcccccctcatacgcccgtccgtaccgtgatgaatacaatacaacaactcatgatgatcctgaattctgcctcggatcagccatccgagaacctgatttcatacttcaacaactgtaccgtcaatcccaaagagtcgattttgaagcgggttaaggatattggatatatatttaaggagaaatttgccaaggctgtcggtcaagggtgcgtggagattgggtcccagagatacaagctgggagtccggctctactacagagttatggaaagcatgctaaaatctgaggaggaaagactttcaattcaaaacttctcaaagctgttgaacgataacattttccacatgtccctactggcctgcgcattagaggtcgtcatggccacttattctcgttccacaagtcagaaccttgatagcggtactgacctgtcatttccttggattctaaatgttcttaatctcaaggcctttgacttttacaaagtcatcgagtcctttattaaggctgaaggcaatctgactcgggagatgatcaagcacttggaaagatgtgagcaccgcataatggagtccctagcctggctcagcgacagtccattgttcgatcttatcaagcagtccaaagatcgggaggggccaactgaccatcttgaaagcgcttgtcctctcaacctccccctccagaataatcatactgcagccgacatgtatctctcaccagttcggtccccaaagaagaagggctctactacaagggtcaattccaccgcaaatgcagagactcaggctacgtctgcctttcaaacccagaaacccttgaaaagcacctctttgagcctgttctataagaaggtgtatagactggcctacctccgtctaaacacattatgtgagcgcctcttgtccgagcatccagagctggagcatattatttggaccttgtttcagcatactttgcagaacgagtacgaactgatgagggatagacacctggaccaaatcatgatgtgttcgatgtatggtatttgcaaggttaaaaacattgacttgaagttcaaaatcattgtcaccgcttataaggaccttcctcacgccgtgcaggaaaccttcaagagagtgttgattaaggaagaagagtacgattctattatcgtgttttacaacagtgtgtttatgcagagactgaagaccaacattctgcagtatgcctcaacaagacctcccactctctcccccatccctcatattccacggtcgccatacaaatttccatcgagtccccttaggatccctggcggtaatatttacattagtcctctgaaaagcccatacaagatcagcgagggcctgccaacccctaccaagatgactccgagatcacggatcctcgtgtcgataggggagagcttcgggacatcagagaagtttcagaagatcaatcagatggtatgtaattccgaccgcgtgctgaaacgatccgccgaagggagcaaccctcccaaaccactgaagaaactgcgctttgacattgaagggagcgatgaggctgacggatcaaaacaccttccaggggagagcaagtttcagcagaagctcgcagagatgaccagcaccaggacaaggatgcagaaacaaaaaatgaatgattcgatggatacttctaataaagaagaaaagtag

SEQ ID NO: 6952 - DNA, 2787 bp, Artificial Sequence
  derived and/or modified sequence
atgccacccaagacccccaggaagacagctgccacagctgctgctgctgctgctgagcccccagcccctcctcctcctcctcctccagaagaagatcctgagcaggacagcggccctgaggacctgcccctggtgcggctggagtttgaggagacagaggagccagacttcaccgccctgtgccagaagctgaagatcccagaccacgtgcgggagcgggcctggctgacctgggagaaggtgtcctctgtggatggagtgctgggcggctacatccagaagaagaaggagctgtggggcatctgcatcttcatcgctgctgtggacctggatgagatgtccttcaccttcacagagctgcagaagaacatcgagatctctgtgcacaagttcttcaacctgctgaaggagattgacaccagcaccaaggtggacaatgccatgagccggctgctgaagaagtatgatgtgctgtttgccctcttcagcaagctggagaggacctgtgagctgatctacctgacccagcccagcagcagcatcagcacagagatcaacagcgccctggtgctgaaggtgtcctggatcaccttcctgctggccaagggggaggtgctgcagatggaggatgacctggtgatctccttccagctgatgctgtgtgtgctggactacttcatcaagctgagcccccccatgctgctgaaggagccctacaagacagctgtgatccccatcaatggcagccccaggaccccccggcggggccagaacagaagtgccagaattgccaagcagctggagaatgacacccgcatcatcgaggtgctgtgcaaggagcacgagtgcaacattgatgaggtgaagaatgtgtacttcaagaacttcatccccttcatgaacagcctgggcctggtgaccagcaatggcctgcctgaggtggagaacctgagcaagagatatgaggagatctacctgaagaacaaggacctggatgcccggctcttcctggaccatgacaagaccctgcagacagacagcattgacagctttgagacccagaggacccccaggaagagcaacctggatgaggaggtgaatgtcatccccccccacacccctgtgaggacagtgatgaacaccatccagcagctgatgatgatcctgaacagcgccagtgaccagcccagcgagaacctgatctcctacttcaacaactgcaccgtgaaccccaaggagagcatcctgaagagggtgaaggacatcggctacatcttcaaggagaagtttgccaaggctgtgggccagggctgtgtggagatcggcagccagcgctacaagctgggcgtgcggctgtactacagagtgatggagagcatgctgaagtctgaggaggagcggctgagcatccagaacttcagcaagctgctgaatgacaacatcttccacatgagcctgctggcctgtgccctggaggtggtgatggccacctacagccgcagcaccagccagaacctggacagcggcacagacctgtccttcccctggatcctgaatgtgctgaacctgaaggcctttgacttctacaaggtgattgagagcttcatcaaggccgagggcaacctgacccgggagatgatcaagcacctggagcgctgtgagcaccgcatcatggagagcctggcctggctgagtgacagccccctgtttgacctgatcaagcagagcaaggaccgggagggccccacagaccacctggagagcgcctgccccctgaacctgcccctgcagaacaaccacacagctgctgacatgtacctgagccctgtgcgcagccccaagaagaagggcagcaccaccagggtgaacagcacagccaatgctgagacccaggccaccagcgccttccagacccagaagcccctgaagagcaccagcctgagcctcttctacaagaaggtgtaccgcctggcctacctgcggctgaacaccctgtgtgagcggctgctgtctgagcaccctgagctggagcacatcatctggaccctcttccagcacaccctgcagaatgaatatgagctgatgagggacagacacctggaccagatcatgatgtgcagcatgtatggcatctgcaaggtgaagaacatcgacctgaagttcaagatcatcgtgacagcctacaaggacctgccccatgctgtgcaggagaccttcaagagggtgctgatcaaggaggaggagtatgacagcatcatcgtgttctacaacagcgtcttcatgcagaggctgaagaccaacatcctgcagtatgccagcacccggccccccaccctgagccccatcccccacatccccaggagcccctacaagttccccagcagccccctgcgcatccctgggggcaacatctacatcagccccctgaagagcccctacaagatcagcgagggcctgcccacccccaccaagatgacccccaggagccgcatcctggtgtccattggagagagctttggcaccagcgagaagttccagaagatcaaccagatggtgtgcaacagcgacagagtgctgaagaggtctgctgagggcagcaacccccccaagcccctgaagaagctgcgctttgatattgagggcagtgatgaagcagatggcagcaagcacctgcccggggagagcaagttccagcagaagctggccgagatgaccagcaccaggaccaggatgcagaagcagaagatgaatgacagcatggacaccagcaacaaggaggagaagtag

SEQ ID NO: 6953 - DNA, 162 bp, Artificial Sequence
  derived and/or modified sequence
atgccacccaagacccccaggaagacagctgccacagctgctgctgctgctgctgagcccccagcccctcctcctcctcctcctccagaagaagatcctgagcaggacagcggccctgaggacctgcccctggtgcggggcagcatcaccaatggaagatag

SEQ ID NO: 6954 - DNA, 2724 bp, Artificial Sequence
  derived and/or modified sequence
atgccacccaagaccccacctcctgaggaggaccctgagcaggacagcggccctgaggacctgcccctggtgcggctggagtttgaggagacagaggagccagacttcaccgccctgtgccagaagctgaagatcccagaccacgtgcgggagcgggcctggctgacctgggagaaggtgtcctctgtggatggagtgctgggcggctacatccagaagaagaaggagctgtggggcatctgcatcttcatcgctgctgtggacctggatgagatgtccttcaccttcacagagctgcagaagaacatcgagatctctgtgcacaagttcttcaacctgctgaaggagattgacaccagcaccaaggtggacaatgccatgagccggctgctgaagaagtatgatgtgctgtttgccctcttcagcaagctggagaggacctgtgagctgatctacctgacccagcccagcagcagcatcagcacagagatcaacagcgccctggtgctgaaggtgtcctggatcaccttcctgctggccaagggggaggtgctgcagatggaggatgacctggtgatctccttccagctgatgctgtgtgtgctggactacttcatcaagctgagcccccccatgctgctgaaggagccctacaagacagctgtgatccccatcaatggcagccccaggaccccaagaagaggccagaacagaagtgcccgcatcgccaagcagctggagaatgacacccgcatcatcgaggtgctgtgcaaggagcacgagtgcaacattgatgaggtgaagaatgtgtacttcaagaacttcatccccttcatgaacagcctgggcctggtgaccagcaatggcctgcctgaggtggagaacctgagcaagagatatgaggagatctacctgaagaacaaggacctggatgcccggctcttcctggaccatgacaagaccctgcagacagacagcattgacagctttgagacccagaggacccccaggaagagcaacctggatgaggaggtgaatgtcatccccccccacacccctgtgaggacagtgatgaacaccatccagcagctgatgatgatcctgaacagcgccagtgaccagcccagtgaaaatctcatctcctacttcaacaactgcaccgtgaaccccaaggagagcatcctgaagagggtgaaggacatcggctacatcttcaaggagaagtttgccaaggctgtgggccagggctgtgtggagatcggcagccagcgctacaagctgggcgtgcggctgtactacagagtgatggagagcatgctgaagtctgaggaggagcggctgagcatccagaacttcagcaagctgctgaatgacaacatcttccacatgagcctgctggcctgtgccctggaggtggtgatggccacctacagccgcagcaccagccagaacctggacagcggcacagacctgtccttcccctggatcctgaatgtgctgaacctgaaggcctttgacttctacaaggtgattgagagcttcatcaaggccgagggcaacctgacccgggagatgatcaagcacctggagcgctgtgagcaccgcatcatggagagcctggcctggctgagtgacagccccctgtttgacctgatcaagcagagcaaggaccgggagggccccacagaccacctggagagcgcctgccccctgaacctgcccctgcagaacaaccacacagctgctgacatgtacctgagccctgtgcgcagccccaagaagaagggcagcaccaccagggtgaacagcacagccaatgctgagacccaggccaccagcgccttccagacccagaagcccctgaagagcaccagcctgagcctcttctacaagaaggtgtaccgcctggcctacctgcggctgaacaccctgtgtgagcggctgctgtctgagcaccctgagctggagcacatcatctggaccctcttccagcacaccctgcagaatgaatatgagctgatgagggacagacacctggaccagatcatgatgtgcagcatgtatggcatctgcaaggtgaagaacatcgacctgaagttcaagatcatcgtgacagcctacaaggacctgccccatgctgtgcaggagaccttcaagagggtgctgatcaaggaggaggagtatgacagcatcatcgtgttctacaacagcgtcttcatgcagaggctgaagaccaacatcctgcagtatgccagcaccaggcctcccaccctgagccccatcccccacatccccaggagcccctacaagttccccagcagccccctgcgcatccctgggggcaacatctacatcagccccctgaagagcccctacaagatcagcgagggcctgcccacccccaccaagatgacccccaggagccgcatcctggtgtccatcggggagagctttggcaccagcgagaagttccagaagatcaaccagatggtgtgcaacagcgacagagtgctgaagaggtctgctgagggcagcaacccccccaagcccctgaagaagctgcgctttgacatcgagggcagtgatgaagcagatggcagcaagcacctgcctggagagagcaagttccagcagaagctggccgagatgaccagcaccaggaccaggatgcagaagcagaagatgaatgacagcatggacaccagcaacaaggaggagaagtag

SEQ ID NO: 6955 - DNA, 2787 bp, Artificial Sequence
  derived and/or modified sequence
atgccccccaagaccccccggaagaccgccgccaccgccgccgccgcggctgcagagcccccagcccctccacctcctcccccaccagaagaagacccagaacaagactctggccctgaggatcttcccctggttaggctcgaatttgaggaaactgaggagccagacttcaccgctctctgccagaagcttaagatcccagaccatgtaagagaaagagcgtggcttacgtgggaaaaagttagctctgtggatggcgtgctcgggggctatatacagaagaagaaagaactgtgggggatctgtatctttattgccgcggttgatctggatgagatgtccttcacattcaccgagctgcagaagaacatagaaattagcgtgcacaaattttttaatctgctcaaggaaattgacaccagcacaaaagtagacaacgccatgagcaggttactcaagaaatatgacgtgctgtttgctctgtttagcaagttggagcgaacatgtgaactgatttatctgacccagccctcctcttccatctcaacagaaatcaactccgcactggtgctaaaagttagctggattacctttctgttagccaaaggtgaggtgctgcagatggaggatgaccttgtgattagtttccaattgatgctgtgtgttctggattacttcataaaactgtcgccccccatgctgctcaaggaaccctacaaaacagctgtaatcccaattaacggtagtccgagaactccccgtaggggccagaataggtctgcaagaatcgcaaagcagctagagaacgacactcgaatcatagaagtgctgtgtaaggaacacgagtgcaatattgacgaagtgaaaaacgtttatttcaagaacttcataccattcatgaattctctgggtcttgtcacatcaaacgggctgcccgaggtcgagaatctttcaaagaggtatgaagaaatttacctcaagaacaaggacctcgacgcgagactgtttctcgatcatgataagacactgcaaaccgactccattgatagcttcgaaacgcaaagaacaccaagaaagtctaacttggacgaggaggtcaacgtgatcccaccacacaccccagtgagaacagtgatgaatacaatccaacagctgatgatgattttgaattccgcaagcgaccagccttcagaaaacttgattagttatttcaacaactgcacagttaaccctaaggagagcatcctgaaacgcgtgaaagacattggctatatattcaaggagaagttcgccaaggctgtggggcagggatgtgtggagatcggaagccagcgctataagctaggcgtaagactttactaccgcgtgatggaatcaatgttaaaatccgaggaggaaaggttatccattcaaaatttctccaagctgctgaatgacaatatttttcatatgtcactgctggcgtgcgcactcgaagtagtgatggccacttactccaggtcaacttcccaaaatttggactcgggaactgacctgagcttcccatggatcttgaacgtgcttaacctaaaggcgtttgatttctacaaggtcatcgaatcctttattaaggctgagggaaatctgacccgggagatgatcaaacatcttgaaaggtgcgagcatcggatcatggagagcctggcatggctgagcgattcaccactgtttgacttgatcaagcagtctaaggaccgggagggcccaaccgaccacctggagtctgcctgccctctcaacctgcctctgcagaataaccacaccgccgctgacatgtatctgtctccggtgcggtcccccaaaaagaaaggctcaaccacccgcgtaaacagcacggccaatgccgaaactcaggctacaagtgcattccaaacacagaagcccctgaaatctacatctctatcactgttctacaaaaaggtttatcgccttgcctatctcaggttgaatactctctgcgagcgcctgttgagcgagcatcctgaattagagcacattatctggacattgttccagcataccctgcaaaacgaatacgaactcatgcgggatagacacctggaccagattatgatgtgcagcatgtacggcatctgtaaggtcaaaaatatcgacctgaaatttaagattatcgtgactgcttacaaagatctgccacatgctgtccaggaaactttcaagcgggtgctgataaaagaggaggaatacgactcaattatcgtattctacaatagtgtgtttatgcagcggctgaaaaccaacatcctccagtatgcctccactcgcccccctacactctctcccattccacatatccctcggagcccttacaagttcccctcttcccctctgcgcataccaggtgggaacatctacatctctcccctgaagtccccctacaaaatcagtgagggcctgccgactccaaccaagatgaccccgagatcccgaattctggtcagcattggggagagcttcgggactagcgaaaaattccaaaagattaaccagatggtatgcaattctgaccgggtccttaagcggagcgccgagggctcgaaccctcctaagccacttaaaaagctgcgcttcgatattgagggcagtgacgaagcagatggaagtaagcaccttcccggtgagagcaagtttcaacagaaattggcagagatgaccagtacacgcacacgcatgcagaagcagaagatgaacgatagcatggacacctccaataaagaagaaaaatag

SEQ ID NO: 6956 - DNA, 162 bp, Artificial Sequence
  derived and/or modified sequence
atgccccccaagaccccccggaagaccgccgccaccgccgccgccgccgcggctgagcctccggcccctccacctccaccccctcctgaagaagaccccgaacaggactccggacccgaagatctgcctctcgttcgcggatctattacaaacggaagatag

SEQ ID NO: 6957 - DNA, 2724 bp, Artificial Sequence
  derived and/or modified sequence
atgccccccaagacccccccccccgaggaggaccccgagcaggacagtggccccgaagacctgccgctggtgcgcctggagttcgaagaaacggaagagcctgacttcaccgccctctgtcagaaactgaaaatcccagatcacgttagggagagagcctggctgacgtgggaaaaggtgtcctccgtcgacggcgttctgggcggctacatacagaagaaaaaggagctgtggggcatctgtatatttatcgccgcagtagacctggacgagatgagctttacatttacagagctgcaaaaaaatattgaaatttccgtgcataagttttttaacctgcttaaagagatcgatacctcaaccaaggtagataacgctatgagtcggcttttaaagaagtatgatgtcctcttcgccctgtttagtaaactggagcggacttgcgagctcatttatttaacccaaccaagctcctctatctctaccgagatcaactccgcactcgtgctgaaggtgagctggatcacgttccttctggcaaagggagaagtgttgcagatggaggacgaccttgtgatcagtttccagctaatgctctgcgtcttggactactttatcaagctctccccccccatgctgctgaaagagccatataaaaccgctgtcatccccataaacgggtcgcctaggacacccagaagggggcagaacagatctgctcggatagccaagcagttggaaaatgatacacgaatcatcgaagtattgtgcaaggagcacgagtgtaatattgatgaggtaaaaaacgtatattttaaaaacttcataccgttcatgaactcgctgggcctggtgacttccaatgggctgccagaggtggaaaatttgtccaagcggtacgaagaaatttatctgaagaacaaggatttggatgcccgcctcttcctggatcatgataaaaccctgcagactgacagtattgatagcttcgagacacagagaacacctaggaaaagtaatttggacgaggaggtgaatgtgattcccccccacacgcccgtgaggacagtgatgaataccatacaacaactgatgatgatactcaactcagcgagtgatcaaccaagcgaaaatctgatcagctactttaacaactgcactgtaaacccaaaagagtctatacttaagcgagtcaaggatatcgggtatatctttaaggagaagtttgccaaggctgtgggtcaaggatgcgtagaaattggatcccaaagatataaactgggagtgagactctactaccgggtgatggaatctatgctgaagagtgaggaggagagattgagcatccagaatttctcaaaactgctgaatgacaacattttccatatgtcgctccttgcctgcgcccttgaggtggtgatggccacgtactcccgatcaacctctcaaaatctcgattctggcacagatctcagcttcccctggatcctcaatgttctaaatctgaaggcattcgatttctacaaggtcatcgaatctttcatcaaggcggaaggtaatctgacgagagaaatgatcaagcatcttgagcgctgtgagcatcgcatcatggagtcacttgcatggttatccgactcacccctcttcgatctcattaagcaatcaaaagacagagagggtccaacagaccaccttgaatccgcctgcccccttaacctgcctctgcagaacaaccacaccgccgccgatatgtacctgtctcctgtgaggtcacctaaaaagaaaggatctactacacgcgtcaatagcaccgccaatgccgagacacaagccacaagcgcctttcagactcagaagcccctcaagtcgacctccctgagcttattttacaaaaaggtctacagactggcctacctaagactcaataccctctgcgaacgccttctgtcagagcaccctgaacttgagcatattatttggacattgtttcagcataccctgcagaacgagtatgagcttatgcgggataggcatctcgaccaaattatgatgtgcagcatgtacggcatctgcaaggtcaagaacattgacctgaagttcaaaatcatagtgaccgcttacaaggacctgcctcatgctgttcaggaaaccttcaaaagggtgctgatcaaagaagaggagtacgatagcattatcgtgttttataattcagtatttatgcagcgtctgaaaaccaacatcttacaatacgctagtacgcgccctccaacgctgtcccctattccacatatccctcgcagtccatacaagtttccttcttcaccactccgcattccaggcggcaatatttacatctcacctctgaaatcgccctacaaaataagtgaggggttacctacccctacaaagatgacccctagaagcagaattctcgtgagcataggggagagtttcggtacttcagagaaatttcaaaagatcaaccaaatggtgtgcaacagcgatcgtgtccttaaacgcagtgctgagggcagcaacccccccaaacccttaaaaaaactgcgttttgacatcgagggatctgacgaggcagacggatcaaaacatctgcccggggaatccaagtttcagcaaaagctggccgagatgacctctacaagaacccgaatgcagaaacagaagatgaatgattctatggatacctcgaacaaggaagagaagtag

SEQ ID NO: 6958 - DNA, 2787 bp, Artificial Sequence
  derived and/or modified sequence
atgcctccaaaaacccccagaaaaactgccgctacggccgcagcagctgccgcagaacctcccgcacctccccctccaccacctcccgaggaagaccccgaacaggatagcggcccagaagacctgccactcgtccggctcgaatttgaagaaaccgaagagcccgacttcacggccctgtgccaaaaactaaaaatccctgaccatgtgagagagagggcctggcttacatgggagaaggtctcctccgtcgacggcgtcctcggcggatacatccaaaaaaagaaggaactatggggaatctgcatattcatcgccgcagtggacctcgacgagatgtcctttaccttcacagagctgcagaaaaatatcgagataagcgtgcataagtttttcaatcttctgaaagagattgatacatcaaccaaggtcgacaatgcaatgtctcgtcttctcaaaaagtacgatgtcctcttcgctctgtttagcaagctggagcgcacatgtgaactgatatacctgacccagccctcgtcgtcaattagcacggaaatcaacagtgccctagtcctgaaggtgagctggatcacattcttgctggccaaaggcgaagtgttacagatggaggatgacctggttatcagctttcagctgatgctctgtgtgctggattacttcatcaaactgtctccaccaatgctcttgaaggagccatataagactgctgttattcccattaatgggagtccacgcactcccagacgcggtcagaaccggtcagcccgaatcgccaaacagttagaaaacgacacgagaatcattgaggtgctctgtaaggagcatgaatgcaatattgatgaggttaagaatgtatatttcaaaaactttatcccatttatgaactcactcgggctggttacgagcaatggtttgccagaagttgaaaacctgtccaagaggtacgaagagatctatctgaagaataaggacctggatgctagactgttcctggaccatgacaagactttgcaaaccgatagtatcgatagcttcgagacgcagcgcacacctaggaaatctaatttagacgaggaggtcaatgttatcccacctcacaccccagtcagaaccgtgatgaatacaattcaacagctcatgatgatccttaattccgccagcgaccagcctagcgaaaatctgattagttattttaataattgtacggtaaatccgaaggagagcatactgaagcgcgttaaggatattggatacatcttcaaggagaaatttgcgaaagcagtcggccaaggatgcgtggagatcggttcccagaggtataaactcggggtgaggctctactacagagttatggagtcaatgctgaagtcagaggaagagcgcctcagcattcagaatttcagtaaactcctgaacgacaatatttttcacatgtccctcctggcctgcgctctggaggtcgttatggctacgtacagtcgttccacatcacaaaatctcgattccggcacggatttatccttcccttggattctcaacgtgctgaacctgaaggctttcgatttttacaaagttatagagtcctttattaaggcggaaggcaacctgacgcgagagatgatcaaacacttggagcgttgtgagcaccgcatcatggaatctctcgcatggctgagcgactctccactgtttgatctgattaaacaatccaaggaccgggagggccctactgatcacctggagtcggcttgtccgctcaacctccctcttcagaataaccataccgccgcagacatgtatctcagccccgtccgttcgccaaaaaagaaaggctccacaacaagagtgaactcaacggctaacgcagagactcaagctacatccgccttccagacccaaaagccactgaaatcgacctccctcagtctgttttataaaaaagtttatagactcgcttatctgaggctgaacaccctgtgtgaacggctgctgtcggaacatccggaactggaacatataatatggaccttgtttcagcatactctgcagaatgagtacgagctcatgcgggaccggcacctggatcagattatgatgtgttcgatgtatggcatctgtaaggtgaagaacatagacctgaagtttaagattattgtcaccgcgtacaaagatctgccccacgcggtccaggaaaccttcaagcgagtgttgatcaaggaggaggagtatgacagcataatcgtgttctacaatagcgtctttatgcaaagactgaaaaccaatatccttcagtacgctagcactcgtcctccaacgctgtcaccaattccgcatatcccccgtagcccctacaagttcccttcatcacctctgcgtatccctgggggaaacatttacatctctccactgaaatccccctataagatcagcgaaggcctgcctacccctaccaaaatgactccacgctcaaggatcctcgtgtctattggcgaatcttttgggaccagcgagaagtttcagaagatcaatcagatggtttgcaacagtgaccgggtgctgaagcgatctgcagagggaagcaaccctccgaagccactcaagaagctgcgcttcgacattgaagggagtgacgaggcagatgggtccaagcacctaccgggagagtctaaatttcagcaaaagctagcagaaatgacatccacccggactcgcatgcagaagcagaaaatgaacgattctatggacacctccaacaaagaggaaaagtag

SEQ ID NO: 6959 - DNA, 162 bp, Artificial Sequence
  derived and/or modified sequence
atgcccccaaaaaccccaaggaagactgcggcaacagcagcggctgccgctgctgaaccacctgcacctcctccccctcctcctccagaagaggatccggagcaggattccggccctgaggacttgccactcgtccggggatccattaccaacggacgatag

SEQ ID NO: 6960 - DNA, 2724 bp, Artificial Sequence
  derived and/or modified sequence
atgccccctaaaacaccaccccctgaggaagatcccgagcaagactctggtcctgaggatctcccactggtcagactggagttcgaagaaaccgaagaaccagacttcaccgctctgtgtcagaaacttaagattcccgatcacgttcgggagcgagcgtggttgacgtgggaaaaagtttcatctgtggatggcgtgttggggggatacatacagaaaaaaaaggagctttggggcatttgtattttcatcgccgcagtcgacctcgatgagatgagctttacgttcactgaattgcagaagaatatcgaaatttctgtacacaagttctttaacttactgaaggagatcgacacctctacaaaggtggataatgcaatgagcaggcttctgaaaaaatacgacgttctgtttgcgctcttcagcaaattagagcgcacatgcgagctcatttacctcacacagccttcctcctctataagcacagagatcaactccgcacttgtgttgaaggtctcatggattacctttctgctggcaaaaggtgaagtgctacagatggaggacgacctggtcatctcctttcagctcatgctttgtgtgctcgactactttatcaagctttcacctcctatgcttctgaaggagccctataagaccgctgtcatccccattaatggatctcctcgaaccccacggagagggcagaatcgcagtgcacggatagctaaacaactggaaaatgacaccagaataattgaggtgctgtgcaaagagcacgagtgcaacatcgacgaagtaaaaaacgtttactttaagaactttattccattcatgaatagcttgggtttggtcacaagtaatggtctgccagaggtggaaaatcttagcaagaggtacgaagagatctacttaaagaataaagatcttgacgcacggctctttttagatcatgataagacactgcaaaccgattcaatcgacagcttcgagacacaacgtactcccaggaagtctaacttggatgaggaggtcaacgtgatccccccacatacgcctgtgcgcacagtgatgaacacgattcaacaactgatgatgatcctaaactctgccagtgatcagcctagcgagaacctgatctcctattttaacaattgcactgtcaaccccaaggagtctatacttaagagagtcaaagacattggttacatcttcaaagagaagttcgctaaagctgtcggccagggctgtgtggagattggctcacagcgctacaaactgggggtgcggctgtattacagggtgatggaaagtatgctgaagagtgaggaggaacggctgtccatccagaatttctccaaactgttgaatgataacatttttcatatgtcattgttggcatgcgcgctggaagtggtaatggctacatacagtcggtcaaccagccagaatttagactccgggaccgatctcagttttccgtggattcttaacgtcctgaatcttaaggcgtttgatttttacaaggtcatcgaaagttttatcaaggcggaggggaacttgacgcgcgagatgatcaaacacctggaaaggtgtgagcatagaataatggagagtttggcttggttgagcgactctccattgttcgacctgatcaagcagagtaaagacagggagggaccgactgatcatcttgagagcgcatgccccctcaaccttccgctgcagaacaatcatacagccgcagatatgtatctctcccccgttcgttcgcctaagaagaaaggctccacaacccgcgtgaatagcaccgccaatgccgaaacccaggcaacgagtgcgtttcagacccaaaagcctctgaagtctactagtctaagtctgttttacaagaaggtctacaggctggcctaccttcgtttaaatacactgtgcgagcgcttgctatcagaacaccctgagctcgaacatatcatttggacattgtttcaacacacactgcagaatgagtatgagctcatgagggacaggcacctggaccagatcatgatgtgttctatgtacgggatctgtaaagttaaaaacatcgatctcaagtttaagattatcgttacagcctacaaggacctgccacacgccgtgcaagaaaccttcaaaagagttcttatcaaggaggaagaatatgactctatcattgtcttttacaactccgtatttatgcagcgactcaaaactaacatcctccagtacgcctctactcggccaccgaccctgagcccgattccacatatccctaggtccccctataaatttccaagttccccgctgcgaataccagggggaaacatctacattagtcccctgaagagcccgtacaaaataagtgaaggcctgcctaccccgacgaagatgacaccgagatcaaggattctggtgagtattggtgaatccttcggaactagtgaaaagtttcagaaaattaaccaaatggtgtgcaactccgatcgtgtcttaaaacggtctgccgaaggttccaaccccccaaaacccctgaaaaagctgcgtttcgatatagaggggtccgatgaagcggacgggtccaagcacctgcccggagaatccaagttccaacagaaactggccgagatgacgagtacacgcacaagaatgcagaaacagaagatgaacgattctatggatacatccaacaaggaggagaaatag

SEQ ID NO: 6961 - DNA, 4840 bp, Artificial Sequence
  derived and/or modified sequence
tccggtttttctcaggggacgttgaaattatttttgtaacgggagtcgggagaggacggggcgtgccccgacgtgcgcgcgcgtcgtcctccccggcgctcctccacagctcgctggctcccgccgcggaaaggcgtcatgccgcccaaaaccccccgaaaaacggccgccaccgccgccgctgccgccgcggaacccccggcaccgccgccgccgccccctcctgaggaggacccagagcaggacagcggcccggaggacctgcctctcgtcaggcttgagtttgaagaaacagaagaacctgattttactgcattatgtcagaaattaaagataccagatcatgtcagagagagagcttggttaacttgggagaaagtttcatctgtggatggagtattgggaggttatattcaaaagaaaaaggaactgtggggaatctgtatctttattgcagcagttgacctagatgagatgtcgttcacttttactgagctacagaaaaacatagaaatcagtgtccataaattctttaacttactaaaagaaattgataccagtaccaaagttgataatgctatgtcaagactgttgaagaagtatgatgtattgtttgcactcttcagcaaattggaaaggacatgtgaacttatatatttgacacaacccagcagttcgatatctactgaaataaattctgcattggtgctaaaagtttcttggatcacatttttattagctaaaggggaagtattacaaatggaagatgatctggtgatttcatttcagttaatgctatgtgtccttgactattttattaaactctcacctcccatgttgctcaaagaaccatataaaacagctgttatacccattaatggttcacctcgaacacccaggcgaggtcagaacaggagtgcacggatagcaaaacaactagaaaatgatacaagaattattgaagttctctgtaaagaacatgaatgtaatatagatgaggtgaaaaatgtttatttcaaaaattttataccttttatgaattctcttggacttgtaacatctaatggacttccagaggttgaaaatctttctaaacgatacgaagaaatttatcttaaaaataaagatctagatgcaagattatttttggatcatgataaaactcttcagactgattctatagacagttttgaaacacagagaacaccacgaaaaagtaaccttgatgaagaggtgaatgtaattcctccacacactccagttaggactgttatgaacactatccaacaattaatgatgattttaaattcagcaagtgatcaaccttcagaaaatctgatttcctattttaacaactgcacagtgaatccaaaagaaagtatactgaaaagagtgaaggatataggatacatctttaaagagaaatttgctaaagctgtgggacagggttgtgtcgaaattggatcacagcgatacaaacttggagttcgcttgtattaccgagtaatggaatccatgcttaaatcagaagaagaacgattatccattcaaaattttagcaaacttctgaatgacaacatttttcatatgtctttattggcgtgcgctcttgaggttgtaatggccacatatagcagaagtacatctcagaatcttgattctggaacagatttgtctttcccatggattctgaatgtgcttaatttaaaagcctttgatttttacaaagtgatcgaaagttttatcaaagcagaaggcaacttgacaagagaaatgataaaacatttagaacgatgtgaacatcgaatcatggaatcccttgcatggctctcagattcacctttatttgatcttattaaacaatcaaaggaccgagaaggaccaactgatcaccttgaatctgcttgtcctcttaatcttcctctccagaataatcacactgcagcagatatgtatctttctcctgtaagatctccaaagaaaaaaggttcaactacgcgtgtaaattctactgcaaatgcagagacacaagcaacctcagccttccagacccagaagccattgaaatctacctctctttcactgttttataaaaaagtgtatcggctagcctatctccggctaaatacactttgtgaacgccttctgtctgagcacccagaattagaacatatcatctggacccttttccagcacaccctgcagaatgagtatgaactcatgagagacaggcatttggaccaaattatgatgtgttccatgtatggcatatgcaaagtgaagaatatagaccttaaattcaaaatcattgtaacagcatacaaggatcttcctcatgctgttcaggagacattcaaacgtgttttgatcaaagaagaggagtatgattctattatagtattctataactcggtcttcatgcagagactgaaaacaaatattttgcagtatgcttccaccaggccccctaccttgtcaccaatacctcacattcctcgaagcccttacaagtttcctagttcacccttacggattcctggagggaacatctatatttcacccctgaagagtccatataaaatttcagaaggtctgccaacaccaacaaaaatgactccaagatcaagaatcttagtatcaattggtgaatcattcgggacttctgagaagttccagaaaataaatcagatggtatgtaacagcgaccgtgtgctcaaaagaagtgctgaaggaagcaaccctcctaaaccactgaaaaaactacgctttgatattgaaggatcagatgaagcagatggaagtaaacatctcccaggagagtccaaatttcagcagaaactggcagaaatgacttctactcgaacacgaatgcaaaagcagaaaatgaatgatagcatggatacctcaaacaaggaagagaaatgaggatctcaggaccttggtggacactgtgtacacctctggattcattgtctctcacagatgtgactgtataactttcccaggttctgtttatggccacatttaatatcttcagctctttttgtggatataaaatgtgcagatgcaattgtttgggtgattcctaagccacttgaaatgttagtcattgttatttatacaagattgaaaatcttgtgtaaatcctgccatttaaaaagttgtagcagattgtttcctcttccaaagtaaaattgctgtgctttatggatagtaagaatggccctagagtgggagtcctgataacccaggcctgtctgactactttgccttcttttgtagcatataggtgatgtttgctcttgtttttattaatttatatgtatatttttttaatttaacatgaacacccttagaaaatgtgtcctatctatcttccaaatgcaatttgattgactgcccattcaccaaaattatcctgaactcttctgcaaaaatggatattattagaaattagaaaaaaattactaattttacacattagattttattttactattggaatctgatatactgtgtgcttgttttataaaattttgcttttaattaaataaaagctggaagcaaagtataaccatatgatactatcatactactgaaacagatttcatacctcagaatgtaaaagaacttactgattattttcttcatccaacttatgtttttaaatgaggattattgatagtactcttggtttttataccattcagatcactgaatttataaagtacccatctagtacttgaaaaagtaaagtgttctgccagatcttaggtatagaggaccctaacacagtatatcccaagtgcactttctaatgtttctgggtcctgaagaattaagatacaaattaattttactccataaacagactgttaattataggagccttaatttttttttcatagagatttgtctaattgcatctcaaaattattctgccctccttaatttgggaaggtttgtgttttctctggaatggtacatgtcttccatgtatcttttgaactggcaattgtctatttatcttttatttttttaagtcagtatggtctaacactggcatgttcaaagccacattatttctagtccaaaattacaagtaatcaagggtcattatgggttaggcattaatgtttctatctgattttgtgcaaaagcttcaaattaaaacagctgcattagaaaaagaggcgcttctcccctcccctacacctaaaggtgtatttaaactatcttgtgtgattaacttatttagagatgctgtaacttaaaataggggatatttaaggtagcttcagctagcttttaggaaaatcactttgtctaactcagaattatttttaaaaagaaatctggtcttgttagaaaacaaaattttattttgtgctcatttaagtttcaaacttactattttgacagttattttgataacaatgacactagaaaacttgactccatttcatcattgtttctgcatgaatatcatacaaatcagttagtttttaggtcaagggcttactatttctgggtcttttgctactaagttcacattagaattagtgccagaattttaggaacttcagagatcgtgtattgagatttcttaaataatgcttcagatattattgctttattgcttttttgtattggttaaaactgtacatttaaaattgctatgttactattttctacaattaatagtttgtctattttaaaataaattagttgttaagagtcttaatggtctgatgttgtgttctttgtattaagtacactaatgttctcttttctgtctaggagaagatagatagaagataactctcctagtatctcatcc

SEQ ID NO: 6962 - DNA, 3150 bp, Artificial Sequence
  derived and/or modified sequence
gctcagttgccgggcgggggagggcgcgtccggtttttctcaggggacgttgaaattatttttgtaacgggagtcgggagaggacggggcgtgccccgacgtgcgcgcgcgtcgtcctccccggcgctcctccacagctcgctggctcccgccgcggaaaggcgtcatgccgcccaaaaccccccctcctgaggaggacccagagcaggacagcggcccggaggacctgcctctcgtcaggcttgagtttgaagaaacagaagaacctgattttactgcattatgtcagaaattaaagataccagatcatgtcagagagagagcttggttaacttgggagaaagtttcatctgtggatggagtattgggaggttatattcaaaagaaaaaggaactgtggggaatctgtatctttattgcagcagttgacctagatgagatgtcgttcacttttactgagctacagaaaaacatagaaatcagtgtccataaattctttaacttactaaaagaaattgataccagtaccaaagttgataatgctatgtcaagactgttgaagaagtatgatgtattgtttgcactcttcagcaaattggaaaggacatgtgaacttatatatttgacacaacccagcagttcgatatctactgaaataaattctgcattggtgctaaaagtttcttggatcacatttttattagctaaaggggaagtattacaaatggaagatgatctggtgatttcatttcagttaatgctatgtgtccttgactattttattaaactctcacctcccatgttgctcaaagaaccatataaaacagctgttatacccattaatggttcacctcgaacacccaggcgaggtcagaacaggagtgcacggatagcaaaacaactagaaaatgatacaagaattattgaagttctctgtaaagaacatgaatgtaatatagatgaggtgaaaaatgtttatttcaaaaattttataccttttatgaattctcttggacttgtaacatctaatggacttccagaggttgaaaatctttctaaacgatacgaagaaatttatcttaaaaataaagatctagatgcaagattatttttggatcatgataaaactcttcagactgattctatagacagttttgaaacacagagaacaccacgaaaaagtaaccttgatgaagaggtgaatgtaattcctccacacactccagttaggactgttatgaacactatccaacaattaatgatgattttaaattcagcaagtgatcaaccttcagaaaatctgatttcctattttaacaactgcacagtgaatccaaaagaaagtatactgaaaagagtgaaggatataggatacatctttaaagagaaatttgctaaagctgtgggacagggttgtgtcgaaattggatcacagcgatacaaacttggagttcgcttgtattaccgagtaatggaatccatgcttaaatcagaagaagaacgattatccattcaaaattttagcaaacttctgaatgacaacatttttcatatgtctttattggcgtgcgctcttgaggttgtaatggccacatatagcagaagtacatctcagaatcttgattctggaacagatttgtctttcccatggattctgaatgtgcttaatttaaaagcctttgatttttacaaagtgatcgaaagttttatcaaagcagaaggcaacttgacaagagaaatgataaaacatttagaacgatgtgaacatcgaatcatggaatcccttgcatggctctcagattcacctttatttgatcttattaaacaatcaaaggaccgagaaggaccaactgatcaccttgaatctgcttgtcctcttaatcttcctctccagaataatcacactgcagcagatatgtatctttctcctgtaagatctccaaagaaaaaaggttcaactacgcgtgtaaattctactgcaaatgcagagacacaagcaacctcagccttccagacccagaagccattgaaatctacctctctttcactgttttataaaaaagtgtatcggctagcctatctccggctaaatacactttgtgaacgccttctgtctgagcacccagaattagaacatatcatctggacccttttccagcacaccctgcagaatgagtatgaactcatgagagacaggcatttggaccaaattatgatgtgttccatgtatggcatatgcaaagtgaagaatatagaccttaaattcaaaatcattgtaacagcatacaaggatcttcctcatgctgttcaggagacattcaaacgtgttttgatcaaagaagaggagtatgattctattatagtattctataactcggtcttcatgcagagactgaaaacaaatattttgcagtatgcttccaccaggccccctaccttgtcaccaatacctcacattcctcgaagcccttacaagtttcctagttcacccttacggattcctggagggaacatctatatttcacccctgaagagtccatataaaatttcagaaggtctgccaacaccaacaaaaatgactccaagatcaagaatcttagtatcaattggtgaatcattcgggacttctgagaagttccagaaaataaatcagatggtatgtaacagcgaccgtgtgctcaaaagaagtgctgaaggaagcaaccctcctaaaccactgaaaaaactacgctttgatattgaaggatcagatgaagcagatggaagtaaacatctcccaggagagtccaaatttcagcagaaactggcagaaatgacttctactcgaacacgaatgcaaaagcagaaaatgaatgatagcatggatacctcaaacaaggaagagaaatgaggatctcaggaccttggtggacactgtgtacacctctggattcattgtctctcacagatgtgactgtataactttcccaggttctgtttatggccacatttaatatcttcagctctttttgtggatataaaatgtgcagatgcaattgtttgggtgattcctaagccacttgaaatgttagtcattgttatttatacaagattgaaaatcttgtgtaaatcctgccatttaaaaagttgtagcagattgtttcctcttcc

SEQ ID NO: 6963 - protein, 346 aa, Artificial Sequence
  derived and/or modified sequence
MALLKVKFDQKKRVKLAQGLWLMNWFSVLAGIIIFSLGLFLKIELRKRSDVMNNSESHFVPNSLIGMGVLSCVFNSLAGKICYDALDPAKYARWKPWLKPYLAICVLFNIILFLVALCCFLLRGSLENTLGQGLKNGMKYYRDTDTPGRCFMKKTIDMLQIEFKCCGNNGFRDWFEIQWISNRYLDFSSKEVKDRIKSNVDGRYLVDGVPFSCCNPSSPRPCIQYQITNNSAHYSYDHQTEELNLWVRGCRAALLSYYSSLMNSMGVVTLLIWLFEVTITIGLRYLQTSLDGVSNPEESESESQGWLLERSVPETWKAFLESVKKLGKGNQVEAEGADAGQAPEAG

SEQ ID NO: 6964 - DNA, 1041 bp, Artificial Sequence
  derived and/or modified sequence
atggccctgctcaaagtgaaatttgatcaaaagaagcgagtcaaactggcccaggggctatggctgatgaactggttttccgtgctcgccggcattatcattttcagcctcgggttattcctgaaaatcgaactgcggaagaggtccgatgtgatgaataattcggaatcccacttcgtgcccaacagtctaattggaatgggagtgcttagctgtgtattcaacagcttagccggcaaaatttgttatgatgctttggacccagctaagtacgcgcgatggaaaccatggctcaagccatacttggctatctgcgtgctgttcaatataatcctcttcctggtcgccttgtgttgttttctactgcgtgggagtctggaaaataccctggggcagggcctgaagaatggtatgaagtactaccgcgacacagacacccccggccggtgtttcatgaaaaaaactatcgacatgctgcagatcgaatttaagtgctgcggaaacaatggcttcagagattggttcgaaatccaatggattagtaacaggtacctcgatttcagctcaaaggaagtgaaggatcgcatcaagtcaaacgtagatgggcgatatctcgttgacggggttcccttttcttgttgtaatccttcatcaccacgcccgtgtattcagtatcagatcacaaacaacagtgcgcactatagttacgaccaccaaacagaggagttaaatctctgggtcagagggtgtagagctgccctcctgtcttactatagcagtctcatgaattccatgggggtcgtcacactcctgatctggctgttcgaggtaaccatcacaattgggctcaggtatcttcagacttcactggatggcgtttccaatcccgaagaatcagagtcagagtcccaaggatggctgttggaacggtcagtgccagaaacgtggaaggctttcttggaatccgtcaagaagctgggcaaaggcaatcaagtggaggcagagggcgctgatgcgggccaggcccccgaagccgggtag

SEQ ID NO: 6965 - DNA, 1041 bp, Artificial Sequence
  derived and/or modified sequence
atggccctgctgaaggtgaagtttgaccagaagaagagggtgaagctggcccagggcctgtggctgatgaactggttctctgtgctggccggcatcatcatcttcagcctgggcctcttcctgaagattgagctgaggaagagaagtgatgtgatgaacaacagcgagagccactttgtgcccaacagcctgattggcatgggcgtgctgagctgtgtgttcaacagcctggccggcaagatctgctatgatgccctggaccctgccaagtatgcccgctggaagccctggctgaagccctacctggccatctgtgtgctcttcaacatcatcctcttcctggtggccctgtgctgcttcctgctgcggggcagcctggagaacaccctgggccagggcctgaagaatggcatgaagtactacagagacacagacaccccaggccgctgcttcatgaagaagaccatcgacatgctgcagatcgagttcaagtgctgcggcaacaacggcttccgggactggtttgagatccagtggatcagcaaccgctacctggacttcagcagcaaggaggtgaaggaccgcatcaagagcaatgtggatggccgctacctggtggatggagtgcccttcagctgctgcaaccccagcagcccccggccctgcatccagtaccagatcaccaacaacagcgcccactacagctatgaccaccagacagaggagctgaacctgtgggtgcggggctgccgggccgccctgctgagctactacagcagcctgatgaacagcatgggcgtggtgaccctgctgatctggctgtttgaggtgaccatcaccatcggcctgcgctacctgcagaccagcctggatggagtgagcaaccctgaggagagcgagagcgagagccagggctggctgctggagaggtctgtgcctgagacctggaaggccttcctggagagcgtgaagaagctgggcaagggcaaccaggtggaggccgagggcgcagatgctggccaggcccctgaggccggctag

SEQ ID NO: 6966 - DNA, 1041 bp, Artificial Sequence
  derived and/or modified sequence
atggccctgctgaaggtgaagttcgaccagaagaagcgggtgaagctggcccagggcctgtggcttatgaactggttctcggtccttgccgggattatcattttttcgctcggtctgttcctgaagatcgagttgcgcaaaagatcagacgtcatgaataacagtgagtcacacttcgtcccaaactccctgattggcatgggtgtcctgagttgcgtatttaattcgctggctgggaaaatctgctacgatgctctcgatccagctaagtacgcaagatggaaaccctggctcaagccttacttggcaatctgtgtgctgttcaatattatcctcttcctggtggccctgtgttgctttttgctgagaggaagccttgagaacaccttgggccagggcctgaagaacggcatgaaatattacagagataccgacacaccagggcgctgttttatgaagaaaaccatagatatgctgcagatcgaattcaagtgctgtggtaataacggttttcgggactggttcgagatacaatggatctcgaaccggtacttagacttttcctctaaagaggtaaaagatcggattaaaagtaatgttgacggacggtacctcgttgacggagtaccattttcttgctgcaatccaagcagcccgagaccgtgtattcaatatcagataactaacaatagtgctcattatagttacgaccaccagactgaagagcttaatctgtgggtgcgcggttgtagagcagcgcttttatcctattactcctctctgatgaacagtatgggcgtcgtaaccttattgatttggctttttgaggtgactataactatcggtctacgctatttgcaaacgtctctggacggcgtgtccaatcccgaggagagtgagtctgaaagtcagggttggctcttggagcggtcagtgccagagacatggaaagcattcctggagtccgtaaagaagttaggaaagggcaatcaagtggaggcggaaggcgcagacgctggtcaagcccctgaggcaggatag

SEQ ID NO: 6967 - DNA, 2974 bp, Artificial Sequence
  derived and/or modified sequence
caacgcccaggaccaggactatcccctgctcaagctgtgattccgagacccctgccaccactactgcattcacggggatcccaggctagtgggactcgacatgggtagcccccagggcagctccctacagcttgggccatctgcacttttcccaaggccctaagtctccgcctctgggctcgttaaggtttggggtgggagctgtgctgtgggaagcaacccggactacacttggcaagcatggcgctactgaaagtcaagtttgaccagaagaagcgggtcaagttggcccaagggctctggctcatgaactggttctccgtgttggctggcatcatcatcttcagcctaggactgttcctgaagattgaactccgaaagaggagcgatgtgatgaataattctgagagccattttgtgcccaactcattgatagggatgggggtgctatcctgtgtcttcaactcgctggctgggaagatctgctacgacgccctggacccagccaagtatgccagatggaagccctggctgaagccgtacctggctatctgtgttctcttcaacatcatcctcttccttgtggctctctgctgctttctgcttcggggctcgctggagaacaccctgggccaagggctcaagaacggcatgaagtactaccgggacacagacacccctggcaggtgtttcatgaagaagaccatcgacatgctgcagatcgagttcaaatgctgcggcaacaacggttttcgggactggtttgagattcagtggatcagcaatcgctacctggacttttcctccaaagaagtcaaagatcgaatcaagagcaacgtggatgggcggtacctggtggacggcgtccctttcagctgctgcaatcctagctcgccacggccctgcatccagtatcagatcaccaacaactcagcacactacagttacgaccaccagacggaggagctcaacctgtgggtgcgtggctgcagggctgccctgctgagctactacagcagcctcatgaactccatgggtgtcgtcacgctcctcatttggctcttcgaggtgaccattacaattgggctgcgctacctacagacgtcgctggatggtgtgtccaaccccgaggaatctgagagcgagagccagggctggctgctggagaggagcgtgccggagacctggaaggcctttctggagagtgtgaagaagctgggcaagggcaaccaggtggaagccgagggcgcagacgcaggccaggccccagaggctggctgagggccctggggcccctcccctcccgaacactgagaaatagtgcactccaagaaacgtggatctccccctcatccaactccgaaagtctgaatctcccaaggagggcaccatcttacagagactctccctgacggtggaatttaagtttagggtccctaaaagcatttgacacacagttgttgaatgactgacccaaaatgtgaatgaagctaatgtgaatgtgagtgaagctcccttcaggcccgctgccctaggatatgccctcctggtgactcgggggctgtctcagacgactagcccaggacccatctttctcacacggatttagtcccaccctatggccactggccgtatctgagggctgctccccttttagaatttacctcttatgagctccatgttgcttcactctatccaaagtgtcacttggtgcataagcacagaaatctgaaaaatggccatgttgtcttttttttttttttttaatgccaagattgacaggttggccgtttgcttaatgccagaagttgggggaaagttacgcttttctaagaataatggactcttaaggcattgagggctctaaacaggattctttaatcatggagcaagagaatttcaaggcaggggattttatcccccaccaaaaacacagtgaaaggcctgcttttgtgtcccattcacatgccctcggtcactgagtctggagtgaaccacgggttgaggaagtcaggctgttggcgtgtcccagcaccacaccacccctaaagtgccaggtgatctcctgtggctcatcggtggaagcagtggggtaggctgctgccctgctgtggaagaggagcaacaatcagacatgagtccaccctttggagaccaggcctcagctcttggtgggcccagggacacccacacaggtggccatcacagccccatggacaacactaattgtccacagcaaagggcaaggaatcctctgggagcttcttccgtttcttccccccagatacccatcttgaaaaacactatttctggaatgcttctgcatcaaaggagattctttgagatagcccatcttcctgagctagcaaatacaggagttttcactttctttaggaaagagaagctttcaggggaaggagagaatgattttgctgacttcccaagccctggtgaccagaccaaggcagggcccagcataattcctccagttggatgaacattcaagagagctcgttcctacctggctggagaccgaggccagaaggcaaaaaccagaaagggaacagtccataacttacctctgcttctgaccgatggtgtttgggaataggttactttggactgagtttgggttctctgctgtcctaagaacttcagtgtagagaaaataagacttctggtgctgctggggtatgttctgggcttaattcccccaagcagaagaccagatccaagatgtttggacaccctgtcagacgttggtcccaagtttaattagatttctgaatctcgttgaggccaaggaatgatccatactgaaaaaatgctgagccagccatctttggcaaaggtccctgagctcttgctatctctcaagagtgctgagaaccacggtgaaagtgctgctctaggcccacaagtgtaactatgctgttaacagctgtcaatagataattaaaattcatactgtatg

SEQ ID NO: 6968 - DNA, 1041 bp, Artificial Sequence
  derived and/or modified sequence
atggcacttctcaaggtaaagttcgatcaaaagaagagggtgaaactggcccagggcctatggctgatgaactggttttctgtactcgccggaatcattatatttagcctggggttgtttctgaagatcgagttgcgaaagcgcagtgacgttatgaataactcagaaagccatttcgttcccaacagcctgattggcatgggcgtcttgagctgtgtattcaactctctcgcaggaaaaatctgctatgacgcacttgatccggctaagtatgcgaggtggaagccatggctgaagccataccttgcaatctgtgtcctgttcaatattattttattcctggtcgccttgtgttgcttcctgctgaggggcagtttagagaatacactggggcagggactgaaaaacggaatgaaatactatcgggatacagatacacctggcagatgtttcatgaagaaaacaatcgacatgttgcagattgagtttaagtgctgtggcaataacggtttcagagactggttcgagatccaatggatatccaaccgttacttggatttctcctccaaggaggtgaaggatagaattaagtcaaatgtcgacggccgatacctggtggatggcgtgcctttctcctgttgtaatccatcatccccacgcccttgcattcagtaccagattacgaacaactctgctcattactcttatgatcaccagactgaggaattgaatctctgggtgagagggtgcagggccgctctgcttagttattactcctccctcatgaactctatgggtgtagtgacgctgctgatttggctgtttgaggttacaatcactatcggtctccgttaccttcagacctctcttgatggagtcagcaaccccgaagaatctgagtctgagtctcagggctggcttctggagagatccgtccctgaaacctggaaggctttcctcgagtcagtaaagaaattggggaaaggcaatcaagttgaggcagaaggtgccgatgccggacaggctcccgaggcaggctag

SEQ ID NO: 6969 - DNA, 1041 bp, Artificial Sequence
  derived and/or modified sequence
atggccctgctgaaggtgaagttcgaccagaagaagagagtgaagctggcccagggcctgtggctgatgaactggttcagcgtgctggccggcatcatcatcttcagcctgggcctgttcctgaagatcgagctgagaaagagaagcgacgtgatgaacaacagcgagagccacttcgtgcccaacagcctgatcggcatgggcgtgctgagctgcgtgttcaacagcctggccggcaagatctgctacgacgccctggaccccgccaagtacgccagatggaagccctggctgaagccctacctggccatctgcgtgctgttcaacatcatcctgttcctggtggccctgtgctgcttcctgctgagaggcagcctggagaacaccctgggccagggcctgaagaacggcatgaagtactacagagacaccgacacccccggcagatgcttcatgaagaagaccatcgacatgctgcagatcgagttcaagtgctgcggcaacaacggcttcagagactggttcgagatccagtggatcagcaacagatacctggacttcagcagcaaggaggtgaaggacagaatcaagagcaacgtggacggcagatacctggtggacggcgtgcccttcagctgctgcaaccccagcagccccagaccctgcatccagtaccagatcaccaacaacagcgcccactacagctacgaccaccagaccgaggagctgaacctgtgggtgagaggctgcagagccgccctgctgagctactacagcagcctgatgaacagcatgggcgtggtgaccctgctgatctggctgttcgaggtgaccatcaccatcggcctgagatacctgcagaccagcctggacggcgtgagcaaccccgaggagagcgagagcgagagccagggctggctgctggagagaagcgtgcccgagacctggaaggccttcctggagagcgtgaagaagctgggcaagggcaaccaggtggaggccgagggcgccgacgccggccaggcccccgaggccggctag

SEQ ID NO: 6970 - protein, 351 aa, Artificial Sequence
  derived and/or modified sequence
MRFTFPLMAIVLEIAMIVLFGLFVEYETDQTVLEQLNITKPTDMGIFFELYPLFQDVHVMIFVGFGFLMTFLKKYGFSSVGINLLVAALGLQWGTIVQGILQSQGQKFNIGIKNMINADFSAATVLISFGAVLGKTSPTQMLIMTILEIVFFAHNEYLVSEIFKASDIGASMTIHAFGAYFGLAVAGILYRSGLRKGHENEESAYYSDLFAMIGTLFLWMFWPSFNSAIAEPGDKQCRAIVNTYFSLAACVLTAFAFSSLVEHRGKLNMVHIQNATLAGGVAVGTCADMAIHPFGSMIIGSIAGMVSVLGYKFLTVYGHAGSCTGFLYRNSSCWRSDDRFNSKVASLGTAI

SEQ ID NO: 6971 - protein, 409 aa, Artificial Sequence
  derived and/or modified sequence
MRFTFPLMAIVLEIAMIVLFGLFVEYETDQTVLEQLNITKPTDMGIFFELYPLFQDVHVMIFVGFGFLMTFLKKYGFSSVGINLLVAALGLQWGTIVQGILQSQGQKFNIGIKNMINADFSAATVLISFGAVLGKTSPTQMLIMTILEIVFFAHNEYLVSEIFKASDIGASMTIHAFGAYFGLAVAGILYRSGLRKGHENEESAYYSDLFAMIGTLFLWMFWPSFNSAIAEPGDKQCRAIVNTYFSLAACVLTAFAFSSLVEHRGKLNMVHIQNATLAGGVAVGTCADMAIHPFGSMIIGSIAGMVSVLGYKFLTPLFTTKLRIHDTCGVHNLHGLPGVVGGLAGIVAVAMGASNTSMAMQAAALGSSIGTAVVGGLMTGLILKLPLWGQPSDQNCYDDSVYWKVPKTR

SEQ ID NO: 6972 - protein, 410 aa, Artificial Sequence [sequence omitted]

SEQ ID NO: 6973 - protein, 381 aa, Artificial Sequence [sequence omitted]

SEQ ID NO: 6974 - DNA, 1230 bp, Artificial Sequence
  derived and/or modified sequence
atgagattcacctttccgttgatggctatagtgctggagatcgcgatgattgtgctgttcggactgtttgtggagtacgagaccgatcagaccgtgctggagcagctcaacattaccaagccgaccgacatgggcatattttttgaactgtatcccctgtttcaagacgtccacgttatgatttttgttgggttcgggtttttgatgaccttcctgaagaaatacgggtttagcagcgtggggatcaatctgctggtcgcagccctcgggttgcagtggggtaccatcgtccaggggatactgcagagccaaggacagaagttcaatataggaatcaaaaatatgatcaatgccgatttcagcgcagcaacagtactgattagctttggagcagtattgggcaagaccagtccaactcaaatgttgattatgaccatccttgagatcgttttcttcgcccacaacgagtacctggtgtccgaaatcttcaaagcgagtgacatcggtgcaagcatgaccatacacgctttcggggcatatttcggtttagccgttgccggaatcctgtatcgatctggcctcagaaagggtcatgagaatgaggaatccgcctattacagcgatctttttgccatgattggcacactgttcctttggatgttttggccaagctttaatagcgccatcgctgagcccggcgataagcagtgtcgggccattgtcaacacctacttctctcttgcagcctgcgtgctgaccgcatttgcgttcagtagtttagttgagcaccggggcaaattgaatatggttcatatccagaatgcaacactggccgggggcgttgcagtaggcacatgtgcggacatggctattcacccttttggctcgatgatcattggaagcatcgccgggatggtatctgtgctgggatacaaattcctcactcctctgttcacaacaaaactgaggattcatgacacatgtggggtccataacctccatgggctgcctggcgtcgtgggcggattagcgggaattgtagccgtggcaatgggggcaagtaatacctcgatggcaatgcaggcagccgcactggggtcttcaattggcactgctgtggtgggagggctgatgactggactgattttgaaactgcctttgtggggacaacccagtgatcagaactgttatgatgatagcgtatattggaaagtacccaagacacggtag

SEQ ID NO: 6975 - DNA, 1233 bp, Artificial Sequence
  derived and/or modified sequence
atgcggtttaccttccccctaatggcaatagtactggagatcgctatgattgtgctgttcggcctcttcgtggaatatgaaacagaccagactgtgctcgagcaactgaatattaccaagcctacggacatgggtattttctttgaactgtaccctctcttccaggatgtccatgtgatgatctttgtcggcttcggcttcctcatgacatttctcaagaagtacggctttagcagtgtggggataaaccttttggtggccgcgctgggcctccagtggggcacaatagtgcaggggatccttcagagccagggccagaagttcaatattggaatcaaaaatatgattaacgctgatttttcagcagcaacggtcctgatttccttcggcgccgtgttagggaagacttctcctacccaaatgttgattatgacaattctggagatcgtgtttttcgcgcacaatgagtatttggttagtgagatctttaaagcctcagacattggggcctctatgaccatacacgcgtttggcgcatacttcggcctggccgtggccggcatactctataggtcaggactgcgtaagggccacgaaaatgaggaatccgcctactactccgatctgttcgctatgataggaactctgttcctttggatgttctggccctccttcaattccgccatcgcagagccgggggacaaacagtgccgtgcaatcgtgaacacctatttctcattggctgcctgcgttttgaccgcctttgccttcagtagtttggttgagcacaggggtaaactgaacatggtgcatattcaaaatgccaccctggccggcggcgtggcagtgggcacctgtgcagacatggccatccatcccttcggctctatgataatagggtcaattgccgggatggttagtgtactgggatataagtttttgactcccctgtttactacaaagttgaggatccacgacacctgcggcgttcacaacttacatggactgcctggggtagttgggggactggccggcattgttgccgttgccatgggagcaagcaacacttctatggcaatgcaggctgcagctctgggcagcagtataggtacagcggtggttggtggtctgatgacaggtttaatcctcaagctgccactctggggccagccctctgaccagaactgctacgacgacagtgtatactggaaggtgccaaaaacccgcgtatag

SEQ ID NO: 6976 - DNA, 1146 bp, Artificial Sequence
  derived and/or modified sequence
atgcggttcacttttcctttgatggccattgttctggagatcgccatgatagttctattcggtttattcgttgagtatgaaaccgatcaaaccgtgcttgaacagctgaacatcactaagccaactgatatggggatcttcttcgaactgtacccgctgttccaggacgtgcacgtgatgatattcgtaggcttcgggttcttaatgacctttctcaaaaaatatggcttctcttccgtgggtatcaaccttctggtcgccgccctcggtttgcagtggggcaccatcgtccaggggatcttgcagtctcagggacagaagttcaacatcggcataaagaacatgattaatgcagatttctccgctgcaacagtgcttatctcctttggcgctgtattgggcaagacctccccgacacagatgctcatcatgaccattctggagatcgtgttctttgcacataacgaatatctggtgtcggagatctttaaggcctcagatattggagcgtcaatgactatccacgcattcggcgcgtacttcgggcttgccgtggcggggatcctataccgtagcggactccgtaaaggccacgaaaacgaagaatccgcctattattccgaccttttcgctatgataggcacactctttctgtggatgttttggcctagtttcaacagcgcaatcgcggagcctggagacaagcagtgcagagcaattgtgaacacttatttctctttggccgcctgtgttctgactgcgtttgccttttcctcgttggtggagcacagagggaagctcaatatggtgcacatccaaaatgctacactggcaggaggagtggccgtgggtacttgcgccgacatggccattcacccatttgggtctatgataatagggtctatcgctgggatggtctctgtcctcgggtataagtttctgacaccactgttcaccacaaaattgaggattcatgacacctgcggggtccataacctgcatggcctgccgggggttgtgggcggcctggccggaattgtggccgttgcgatgggggccagcaatacttctatggctatgcaggccgccgcactaggttcttcaatcggcactgcggtggtaggaggactgatgacagggacatag

SEQ ID NO: 6977 - DNA, 1056 bp, Artificial Sequence
  derived and/or modified sequence
atgcggtttaccttccctctgatggctattgtcttggaaatcgccatgattgttcttttcgggctgtttgttgagtatgaaaccgaccaaaccgttcttgagcagttgaatataaccaaacctactgatatggggatcttctttgagctgtacccactatttcaggacgtccatgtgatgatctttgtaggtttcggattcctcatgactttcctcaaaaagtatgggttctcatcggtggggataaatctgctggtcgccgccttgggcttgcagtggggcacgattgttcagggaatattacagagtcagggccaaaaatttaacattggcattaagaacatgatcaacgccgatttttccgctgccaccgtgctcataagcttcggcgcagtactggggaagacgtctcctacccaaatgttgattatgacgatcctcgaaatcgttttctttgcacacaacgaataccttgtcagcgagatctttaaggcgagcgatatcggcgcaagtatgactattcacgctttcggggcctattttggcctggctgtggcaggcatcctctaccggtctgggctccggaaaggccacgagaatgaggagtcagcatattacagtgacctgttcgctatgatcgggacactattcctttggatgttctggcccagcttcaacagtgctatcgccgagcccggtgacaagcagtgtcgggccattgtgaacacctactttagtctggctgcttgcgtgctgactgcttttgccttttcctcgcttgtggagcaccggggcaaactaaacatggttcatatccagaacgctacattggcgggcggggtagccgtaggcacatgcgccgacatggccattcatccttttggatccatgattattggcagtatcgcggggatggtgtctgtcctggggtataaattcctgacagtttacggccatgcggggagctgcacaggcttcttataccggaattcttcttgttggaggagcgacgataggttcaactcgaaggtggcctccctcgggactgccatttag

SEQ ID NO: 6978 - DNA, 1230 bp, Artificial Sequence
  derived and/or modified sequence
atgaggttcaccttccccctgatggccatcgtgctggagatcgccatgattgtgctgtttggcctgtttgtggagtatgaaacagaccagacagtgctggagcagctgaacatcaccaagcccacagacatgggcatcttctttgagctgtaccccctcttccaggatgtgcacgtgatgatctttgtgggcttcggcttcctgatgaccttcctgaagaagtatggcttcagctctgtgggcatcaacctgctggtggccgccctgggcctgcagtggggcaccatcgtgcagggcatcctgcagagccagggccagaagttcaacatcggcatcaagaacatgatcaatgctgacttctctgctgccaccgtgctgatcagctttggagctgtgctgggcaagaccagccccacccagatgctgatcatgaccatcctggagatcgtgttctttgcccacaatgagtacctggtgtctgagatcttcaaggccagtgacatcggggcctccatgaccatccacgcctttggagcctacttcggcctggccgtggccggcatcctgtaccgcagcggcctgaggaagggccatgaaaatgaggagagcgcctactacagcgacctgtttgccatgattggcaccctcttcctgtggatgttctggcccagcttcaacagcgccatcgccgagcccggggacaagcagtgccgggccatcgtgaacacctacttcagcctggccgcctgtgtgctgacagcctttgccttcagcagcctggtggagcaccggggcaagctgaacatggtgcacatccagaatgccaccctggccggcggcgtggccgtgggcacctgtgccgacatggccatccaccccttcggctccatgatcatcggcagcattgctggcatggtgtctgtgctgggctacaagttcctgacccccctcttcaccaccaagctgcgcatccatgacacctgtggggtgcacaacctgcacggcctgcccggggtggtgggcggcctggccggcatcgtggccgtggccatgggcgccagcaacacctccatggccatgcaggccgccgccctgggcagcagcattggaacagctgtggtgggcggcctgatgacaggcctcatcctgaagctgcccctgtggggccagcccagcgaccagaactgctatgatgacagcgtgtactggaaggtgcccaagaccaggtag

SEQ ID NO: 6979 - DNA, 1233 bp, Artificial Sequence
  derived and/or modified sequence
atgaggttcaccttccccctgatggccatcgtgctggagatcgccatgattgtgctgtttggcctgtttgtggagtatgaaacagaccagacagtgctggagcagctgaacatcaccaagcccacagacatgggcatcttctttgagctgtaccccctcttccaggatgtgcacgtgatgatctttgtgggcttcggcttcctgatgaccttcctgaagaagtatggcttcagctctgtgggcatcaacctgctggtggccgccctgggcctgcagtggggcaccatcgtgcagggcatcctgcagagccagggccagaagttcaacatcggcatcaagaacatgatcaatgctgacttctctgctgccaccgtgctgatcagctttggagctgtgctgggcaagaccagccccacccagatgctgatcatgaccatcctggagatcgtgttctttgcccacaatgagtacctggtgtctgagatcttcaaggccagtgacatcggggcctccatgaccatccacgcctttggagcctacttcggcctggccgtggccggcatcctgtaccgcagcggcctgaggaagggccatgaaaatgaggagagcgcctactacagcgacctgtttgccatgattggcaccctcttcctgtggatgttctggcccagcttcaacagcgccatcgccgagcccggggacaagcagtgccgggccatcgtgaacacctacttcagcctggccgcctgtgtgctgacagcctttgccttcagcagcctggtggagcaccggggcaagctgaacatggtgcacatccagaatgccaccctggccggcggcgtggccgtgggcacctgtgccgacatggccatccaccccttcggctccatgatcatcggcagcattgctggcatggtgtctgtgctgggctacaagttcctgacccccctcttcaccaccaagctgcgcatccatgacacctgtggggtgcacaacctgcacggcctgcccggggtggtgggcggcctggccggcatcgtggccgtggccatgggcgccagcaacacctccatggccatgcaggccgccgccctgggcagcagcattggaacagctgtggtgggcggcctgatgacaggcctcatcctgaagctgcccctgtggggccagcccagcgaccagaactgctatgatgacagcgtgtactggaaggtgcccaagaccagggtgtag

SEQ ID NO: 6980 - DNA, 1146 bp, Artificial Sequence
  derived and/or modified sequence
atgaggttcaccttccccctgatggccatcgtgctggagatcgccatgattgtgctgtttggcctgtttgtggagtatgaaacagaccagacagtgctggagcagctgaacatcaccaagcccacagacatgggcatcttctttgagctgtaccccctcttccaggatgtgcacgtgatgatctttgtgggcttcggcttcctgatgaccttcctgaagaagtatggcttcagctctgtgggcatcaacctgctggtggccgccctgggcctgcagtggggcaccatcgtgcagggcatcctgcagagccagggccagaagttcaacatcggcatcaagaacatgatcaatgctgacttctctgctgccaccgtgctgatcagctttggagctgtgctgggcaagaccagccccacccagatgctgatcatgaccatcctggagatcgtgttctttgcccacaatgagtacctggtgtctgagatcttcaaggccagtgacatcggggcctccatgaccatccacgcctttggagcctacttcggcctggccgtggccggcatcctgtaccgcagcggcctgaggaagggccatgaaaatgaggagagcgcctactacagcgacctgtttgccatgattggcaccctcttcctgtggatgttctggcccagcttcaacagcgccatcgccgagcccggggacaagcagtgccgggccatcgtgaacacctacttcagcctggccgcctgtgtgctgacagcctttgccttcagcagcctggtggagcaccggggcaagctgaacatggtgcacatccagaatgccaccctggccggcggcgtggccgtgggcacctgtgccgacatggccatccaccccttcggctccatgatcatcggcagcattgctggcatggtgtctgtgctgggctacaagttcctgacccccctcttcaccaccaagctgcgcatccatgacacctgtggggtgcacaacctgcacggcctgcccggggtggtgggcggcctggccggcatcgtggccgtggccatgggcgccagcaacacctccatggccatgcaggccgccgccctgggcagcagcattggaacagctgtggtgggcggcctgatgacaggcacctag

SEQ ID NO: 6981 - DNA, 1056 bp, Artificial Sequence
  derived and/or modified sequence
atgaggttcaccttccccctgatggccatcgtgctggagatcgccatgattgtgctgtttggcctgtttgtggagtatgaaacagaccagacagtgctggagcagctgaacatcaccaagcccacagacatgggcatcttctttgagctgtaccccctcttccaggatgtgcacgtgatgatctttgtgggcttcggcttcctgatgaccttcctgaagaagtatggcttcagctctgtgggcatcaacctgctggtggccgccctgggcctgcagtggggcaccatcgtgcagggcatcctgcagagccagggccagaagttcaacatcggcatcaagaacatgatcaatgctgacttctctgctgccaccgtgctgatcagctttggagctgtgctgggcaagaccagccccacccagatgctgatcatgaccatcctggagatcgtgttctttgcccacaatgagtacctggtgtctgagatcttcaaggccagtgacatcggggcctccatgaccatccacgcctttggagcctacttcggcctggccgtggccggcatcctgtaccgcagcggcctgaggaagggccatgaaaatgaggagagcgcctactacagcgacctgtttgccatgattggcaccctcttcctgtggatgttctggcccagcttcaacagcgccatcgccgagcccggggacaagcagtgccgggccatcgtgaacacctacttcagcctggccgcctgtgtgctgacagcctttgccttcagcagcctggtggagcaccggggcaagctgaacatggtgcacatccagaatgccaccctggccggcggcgtggccgtgggcacctgtgccgacatggccatccaccccttcggctccatgatcatcggcagcattgctggcatggtgtctgtgctgggctacaagttcctgactgtgtatggccacgccggcagctgcaccggcttcctgtacagaaacagcagctgctggaggagtgatgaccgcttcaacagcaaggtggccagcctgggcacagccatctag

SEQ ID NO: 6982 - DNA, 1230 bp, Artificial Sequence
  derived and/or modified sequence
atgcggttcaccttccccctgatggccatcgtgctggagatcgccatgatcgttctgtttgggctgttcgtagagtatgagaccgaccagaccgtgctggaacaactgaacataactaagcctaccgatatggggatcttttttgagctgtaccctcttttccaagatgtccatgtgatgatcttcgtgggctttggctttctgatgacattccttaaaaagtacgggtttagtagcgttggtattaacttactggtggctgcgctaggccttcagtgggggaccattgtccagggaattctgcaatctcagggacagaaatttaacatcggtatcaaaaacatgatcaacgccgactttagcgctgctaccgttttgatttctttcggagccgtacttggcaagaccagtcccacacagatgttgataatgaccattctcgaaatagtattcttcgctcataatgagtacctcgtgtccgaaatcttcaaggcttccgacatcggggcgagtatgaccatccacgctttcggggcctacttcggattggcggtggcaggaatcctttatagaagcgggctgaggaaaggccatgagaatgaggagtcggcttactactcggacctgtttgcgatgataggcactctttttttgtggatgttttggcctagtttcaattcagcaattgcggaacctggggataaacagtgtcgtgctatcgtgaacacgtacttctccctagccgcctgcgttctgactgcattcgcattcagctcactagtggaacatcgcggaaaacttaatatggtgcacattcagaacgccaccttggctggtggcgtggcagtcggaacatgtgccgacatggccattcatccctttggatccatgatcataggatctattgccggaatggtgtccgtgttaggttacaagttccttaccccattgtttaccaccaagctgcgtattcacgatacctgcggtgttcacaacctgcacggcctccccggcgtcgtgggtggcctcgccggcatagtggccgtcgcgatgggcgcctcaaatacatcaatggcgatgcaggccgcagcactgggctctagcatcggtactgccgtcgtcgggggcctgatgacggggctcattctcaaattgcctctgtggggccagccaagcgatcagaactgctatgatgattccgtttactggaaggtgcccaagacccgctag

SEQ ID NO: 6983 - DNA, 1233 bp, Artificial Sequence
  derived and/or modified sequence
atgcggttcaccttccccctgatggccatcgtgctggagatcgccatgatcgtacttttcgggctgttcgtcgagtatgaaacggaccaaacagtgctggagcagctgaacatcaccaagcctaccgacatgggcatctttttcgagctctatcccctattccaggatgtgcacgtgatgatcttcgttggctttggttttttgatgactttcttgaagaaatacggattctcatctgtgggcatcaaccttttggtggccgcattgggactccaatggggcacaatcgtgcaagggattctccagtcgcagggtcagaagtttaatataggtattaagaacatgataaatgcagatttttcagccgctacagtcctgatcagtttcggcgcggtgttgggcaagactagccccacccagatgttgataatgacaatccttgagatcgtcttcttcgcgcacaacgagtacttagtgtcagaaatctttaaagctagcgatatcggggctagcatgacgatacatgcctttggtgcatactttggactcgccgtcgccggcatcctgtatcgatccgggcttagaaaggggcatgaaaacgaggaatcagcatactactccgatctttttgccatgattggcactttatttctatggatgttttggccctccttcaacagcgccatcgccgaaccaggcgataagcagtgtcgggcgattgtcaatacttacttcagcctcgctgcatgtgtactcacggccttcgccttctctagtctcgtggaacatcgagggaaacttaacatggtgcacatccaaaatgctacgctcgctggcggggtcgctgtgggaacatgcgccgacatggccatccatccttttgggagcatgataattggtagtattgcagggatggtgtccgtactgggttacaagtttctgactccattgtttacgaccaagttgagaatccatgacacatgtggagtgcacaacttgcatggcctgccaggggtggtgggcggcctagctggaatcgtcgctgtggccatgggtgcctcaaatacttctatggccatgcaggccgcagctttggggtcctcaatcgggactgccgtcgtgggcggcctgatgacaggcttaatattgaaactacctctgtggggtcagccgtcagatcagaattgctatgacgacagcgtttactggaaggtacccaagactagggtgtag

SEQ ID NO: 6984 - DNA, 1146 bp, Artificial Sequence
  derived and/or modified sequence
atgcggttcaccttccccctgatggccatcgtgctggagatcgccatgattgtcctattcggtttatttgttgaatatgagacggatcagactgttctagaacagctgaacattactaaacctacagatatggggatctttttcgagctgtatcctctcttccaggatgtacatgttatgatctttgttggcttcggcttcctgatgactttcctgaaaaagtatggtttttcaagcgttggcatcaatcttctggtggccgctttgggactccagtggggtaccattgttcagggcatcctacagagccagggccagaagtttaatatcggcatcaagaacatgatcaacgccgacttctcagctgctaccgttctgattagtttcggtgctgtgctggggaagacatctcctacacagatgctgatcatgacgatccttgaaatcgtgttttttgcccacaatgagtacctggtgtctgaaatctttaaagccagcgatatcggagcaagtatgacaatccatgcgttcggcgcctacttcggcctagccgtagccgggatcctctataggtccggtctgcgcaaggggcacgagaatgaggagtccgcttattactccgacctcttcgctatgatcggaactttgtttttgtggatgttttggcccagtttcaatagtgcaatcgccgaacccggggacaagcaatgccgggccattgtgaatacgtatttttccttagccgcctgcgtcctgaccgcttttgcattttcttccttggtggagcatagaggaaagctaaatatggtccatatacagaacgctactctggcaggaggcgtcgcagtggggacatgcgcagacatggcgatccatccctttggctctatgatcataggaagtatcgccgggatggtttccgtgctgggctacaagttcctcaccccgctgttcactacgaagctgcggattcacgacacttgcggcgtccacaacctccatggcctcccgggagttgtcggtggcttggccggaatcgtcgccgtcgcaatgggagcttccaatacctccatggccatgcaggctgccgcactgggctcctccatcggcacagccgtggttggcgggctgatgacaggcacctag

SEQ ID NO: 6985 - DNA, 1056 bp, Artificial Sequence
  derived and/or modified sequence
atgcggttcaccttccccctgatggccatcgtgctggagatcgccatgatcgtgctgttcggcctgttcgtggaatatgaaacagatcagactgtactcgagcaactcaacatcactaagcctaccgatatgggcatcttctttgaactgtaccctctattccaggatgtgcacgtaatgatctttgtcgggtttggattcctaatgaccttcctgaagaagtacggtttttcatcagttgggatcaatttgctggtggcagcacttgggctgcaatggggtacaatagtacaggggatattgcagagtcagggacaaaaattcaatatcgggatcaaaaacatgatcaacgctgacttctctgcagctaccgtccttatcagctttggcgcagttctgggcaagacatccccgacacagatgctgatcatgacgatcctcgagatcgtgttctttgctcataatgaatacctagtctccgagatttttaaagcctctgacataggggctagtatgacaattcatgcttttggcgcatacttcggcctagccgtagccgggatcctgtataggtccggcctacgaaaaggacatgaaaacgaagagagtgcatattattccgacctcttcgccatgataggtaccctcttcctttggatgttttggccttctttcaacagcgccattgcagaacccggagacaagcagtgccgcgcaatagtgaatacctatttttctctcgccgcatgcgtgctcaccgcattcgctttctcctcactagtggagcatagaggcaagctaaatatggtgcacattcagaacgctaccctggctgggggcgtcgcagtcggcacttgcgctgacatggccatccatccatttgggtctatgattattgggtctatcgccgggatggtatctgtgctgggctataagtttctgacagtttatggacatgcaggatcatgtactgggtttctgtataggaattcttcatgctggcgcagtgatgaccggtttaatagcaaggtcgcctctctgggaacagccatctag

SEQ ID NO: 6986 - DNA, 1230 bp, Artificial Sequence
  derived and/or modified sequence
atgcgcttcaccttcccgcttatggcaatcgttttagaaatcgcgatgattgtcctctttggtttatttgtcgagtatgaaactgaccagactgtgctggaacaacttaacatcactaagccaaccgacatgggcattttcttcgagctctacccacttttccaggacgtgcacgtgatgatcttcgtcggatttgggttcctcatgacctttcttaagaaatacggcttctcgtcagttggaatcaacttgctggtagccgctcttggcctccagtgggggacaatcgtacaggggatcctacagagccagggccaaaagtttaacatagggattaaaaatatgattaacgctgacttttccgctgctactgtgctgatttctttcggcgcagtgttgggcaagaccagcccaacgcagatgttaatcatgactattttggagatcgttttcttcgcacacaacgagtaccttgtgtccgaaatctttaaagcgagcgacatcggcgcatctatgacaattcacgctttcggggcttatttcggactcgccgtggctggaattctctacaggagcgggctcaggaaaggacacgagaacgaggagtctgcgtattattccgatttgttcgccatgataggcactctgttcctgtggatgttctggccctccttcaatagcgctattgccgagcctggggataagcaatgtcgtgctatcgtgaacacctacttttctctggccgcttgtgtactaactgcgttcgcattttcctccctcgtcgaacaccgaggcaaattgaacatggtccacatccagaacgctactctggccggtggcgtggccgtgggaacctgtgccgacatggctattcaccctttcggatctatgatcattgggtccatcgcaggaatggtgagcgtgctaggatacaagtttctgaccccactcttcacaactaagttgaggatccacgacacctgtggcgtgcataacctgcacggcttgcctggagtagtgggtgggctcgcgggtatagttgcggtagcgatgggagcttctaatacctctatggccatgcaggcagccgctttgggatcatctattggtacagcagtagtgggagggctcatgactggtttgattctaaaactaccactctggggacagccttccgatcagaattgttatgacgactcagtgtactggaaggtgccgaaaactcgatag

SEQ ID NO: 6987 - DNA, 1233 bp, Artificial Sequence
  derived and/or modified sequence
atgagattcacatttccattgatggccattgtcctggagattgctatgatcgtgctgtttggtttatttgtggagtatgagaccgatcagacggtgctggaacaacttaatatcactaagccgacagatatgggcatctttttcgaattgtatcctctatttcaggatgtccacgtaatgatcttcgtgggtttcggattcctgatgacttttttgaaaaagtacgggttcagctctgtcggaattaatctgctggtggccgctctgggactgcagtggggcactatagtacaaggcattctccaatcacaaggccaaaagtttaacatcggaattaaaaacatgataaatgcagatttttccgctgcaacagtcctgatatcctttggggctgtgctagggaaaacctctccgacacaaatgctgatcatgacaatcctggaaatcgtattttttgcccataacgagtatctggtctccgaaattttcaaggcttctgacattggagcaagcatgactattcatgcatttggagcctattttggcctagccgtggccggaattctatatcgctccgggctccgcaaagggcatgaaaacgaggaatccgcctactatagcgacctgttcgccatgatcggcaccctatttttgtggatgttctggccgtctttcaattcagctattgccgagccaggagacaagcagtgccgggcaattgtgaacacttacttctccctggcggcatgtgtccttacggctttcgccttcagttccctagtggagcatcgagggaaactcaacatggtgcatatacagaacgcgacattagctggtggagtggcagttggcacgtgtgctgacatggccattcatccatttggcagtatgattatcggttcaatcgctggtatggtcagcgtgcttgggtataagtttttaacccccctattcaccactaaactgagaatacatgacacctgcggggtgcacaatttgcacggcttgccaggcgtggtcggcggtctggccggaatagtcgccgtggcaatgggagcaagcaacacttccatggcgatgcaggcggcagccctgggctcctctattgggaccgccgtcgtcggcggtcttatgacggggctgattcttaagctgccactgtggggtcaacccagcgaccagaactgttacgatgatagcgtttattggaaggtgcctaagaccagagtctag

SEQ ID NO: 6988 - DNA, 1146 bp, Artificial Sequence
  derived and/or modified sequence
atgcgtttcacttttcctctcatggccatagtattagaaattgcaatgattgttttgtttgggctattcgtggaatacgagaccgaccagacagtcctggagcaactgaacattaccaagccaacagacatggggatttttttcgaactgtatccattgtttcaggatgtgcacgttatgatctttgtggggtttggctttctaatgacctttctgaaaaagtacggcttctccagcgtgggaatcaatcttctcgtcgccgcacttggcttgcaatgggggaccatagttcagggcatcctgcagagccaggggcagaaatttaacataggaattaagaacatgatcaacgccgactttagcgccgctaccgtcctgatatctttcggagccgtgttggggaagacttcccccacccaaatgctgattatgactatcttagaaatcgtgttttttgcccacaatgaatatctggtgtctgagatattcaaagcctcagacattggcgctagtatgacaatccacgcctttggtgcctattttggtcttgctgtggccggtatcttgtaccgcagtggccttaggaaggggcacgaaaacgaagaatctgcctactattctgatttatttgctatgatagggacactgttcctatggatgttttggccctctttcaactcagccattgccgagccgggagacaagcagtgtagagccatcgtgaatacctatttttccctggcagcttgcgtacttaccgcgtttgctttttctagcctggtagagcatcgaggaaaactaaatatggtccacatccaaaacgctaccttagccggtggagtggccgtaggtacctgcgctgatatggccatccacccattcggcagtatgatcatcggttcaatcgctggaatggtctccgttctcggctataagttcctaacgccactcttcaccacaaagctccgaattcatgacacatgcggcgtccacaatctgcacggtctacctggcgttgtcgggggacttgcaggaattgtggctgtggctatgggtgcatctaacactagtatggcgatgcaggccgctgctttggggtctagcatcgggaccgcagtggtagggggactgatgacaggcacttag

SEQ ID NO: 6989 - DNA, 1056 bp, Artificial Sequence
  derived and/or modified sequence
atgaggtttaccttccctttgatggcaatagtgctggaaatcgctatgatcgttctgtttggcctgtttgtagagtatgagacagatcagactgtgcttgagcagctgaacattaccaagccaacggatatggggatctttttcgaactgtaccctcttttccaagacgtacacgtgatgatcttcgtgggcttcggttttctcatgacgttcctcaagaaatatggcttttcttcggtgggtatcaatctgctcgttgctgccctcggcctgcagtgggggacgatcgtccagggtattctccagagtcaagggcagaagtttaatatcggcattaagaacatgataaatgctgattttagtgccgcaactgtgctgataagctttggagccgtgcttggcaaaacttctccaacccagatgctcattatgaccatcctggagatagtgttctttgcgcacaacgaatatctcgtgagcgagatttttaaagcttctgatataggcgctagcatgacaatacacgccttcggtgcctacttcgggcttgccgttgccggaatcttgtatcgttcaggactccggaagggccacgagaatgaggagagcgcgtactattccgatcttttcgccatgattgggaccttattcctatggatgttctggcctagttttaatagcgctattgccgaacccggagacaagcagtgtcgggctatagtcaacacttatttctcactcgcagcgtgtgtcctaaccgctttcgccttcagttcattggtcgagcacagaggtaagttgaacatggttcacattcaaaatgccacactggcagggggagttgcagttggcacctgtgccgatatggctatccatccgtttggcagtatgattatcggctccattgctggaatggtgagcgttctgggatacaaatttctcaccgtgtatggccacgcgggatcctgcaccggatttttgtatcggaatagcagttgttggaggtcagacgacaggtttaattccaaagtcgcctccctggggacagccatctag

SEQ ID NO: 6990 - DNA, 1225 bp, Artificial Sequence
  derived and/or modified sequence
agtgtgcctctgtcctttgccacaaacatgaggttcacattccctctcatggctatagtcctggaaattgccatgattgttttatttggattatttgttgagtatgaaacggaccagactgttctcgagcagctcaacatcaccaagccaacagacatgggcatattctttgagttatatcctctgttccaagatgtacatgttatgatatttgttgggtttggcttcctcatgaccttcctgaagaaatatggcttcagcagtgtgggtatcaacctactcgttgctgctttgggcctccagtggggcactattgtacagggaatcctgcaaagccagggacagaaatttaacattggaatcaaaaacatgataaatgcagacttcagtgcagccacagttctgatatcttttggagctgtcctgggaaaaacgagccccacccaaatgctgatcatgacaattttagaaattgttttctttgcccacaatgaatacctggttagtgaaatatttaaggcctctgacattggagcatcaatgacgatccatgcctttggggcctactttggcttggctgtagcaggcatcttgtatcgatctggactgagaaaggggcatgaaaatgaagagtccgcatactactcagacttgtttgcaatgattgggactctctttctgtggatgttttggcccagctttaactcggccattgctgaacctggagacaaacagtgcagggccattgtaaacacgtacttctctctcgctgcctgtgtgctcacagcctttgccttctccagcctagtggagcaccgaggcaagctcaacatggttcacattcagaatgccacccttgctggaggagttgctgtgggcacttgtgcggatatggcaattcacccatttggttctatgattattgggagcattgcaggaatggtctctgtgcttggatacaagttcctgactgtctatggccatgcaggcagctgcactgggttcctctatcggaacagcagttgttggaggtctgatgacaggtttaattctaaagttgcctctctggggacagccatctgaccagaactgctatgatgattctgtttattggaaggtccctaagacgagataacttgacaatcagttccatggacatggtgaccacagccagctggaacctgaagtctaaacaccattcctgctctccagcttcctttcccat

SEQ ID NO: 6991 - DNA, 1912 bp, Artificial Sequence
  derived and/or modified sequence
agtgtgcctctgtcctttgccacaaacatgaggttcacattccctctcatggctatagtcctggaaattgccatgattgttttatttggattatttgttgagtatgaaacggaccagactgttctcgagcagctcaacatcaccaagccaacagacatgggcatattctttgagttatatcctctgttccaagatgtacatgttatgatatttgttgggtttggcttcctcatgaccttcctgaagaaatatggcttcagcagtgtgggtatcaacctactcgttgctgctttgggcctccagtggggcactattgtacagggaatcctgcaaagccagggacagaaatttaacattggaatcaaaaacatgataaatgcagacttcagtgcagccacagttctgatatcttttggagctgtcctgggaaaaacgagccccacccaaatgctgatcatgacaattttagaaattgttttctttgcccacaatgaatacctggttagtgaaatatttaaggcctctgacattggagcatcaatgacgatccatgcctttggggcctactttggcttggctgtagcaggcatcttgtatcgatctggactgagaaaggggcatgaaaatgaagagtccgcatactactcagacttgtttgcaatgattgggactctctttctgtggatgttttggcccagctttaactcggccattgctgaacctggagacaaacagtgcagggccattgtaaacacgtacttctctctcgctgcctgtgtgctcacagcctttgccttctccagcctagtggagcaccgaggcaagctcaacatggttcacattcagaatgccacccttgctggaggagttgctgtgggcacttgtgcggatatggcaattcacccatttggttctatgattattgggagcattgcaggaatggtctctgtgcttggatacaagttcctgactccactttttactactaaactgaggatccatgatacatgtggggtccataacctccacggcttacctggtgtagtgggaggccttgcaggcattgtggcagtagcaatgggcgcctccaacacgtctatggccatgcaggcagctgcactgggttcctctatcggaacagcagttgttggaggtctgatgacaggtttaattctaaagttgcctctctggggacagccatctgaccagaactgctatgatgattctgtttattggaaggtccctaagacgagataacttgacaatcagttccatggacatggtgaccacagccagctggaacctgaagtctaaacaccattcctgctctccagcttcctttcccattatccagaatcaagtccaaataaacaaaaagggagtaaccaaagagagtatggaccagagtgaatagatcctaagtcccaaatggccagtgtaaaaatgtccttatgtctgatgctgtctcttgctcttcaatgattaattgaggggatgttactcataaaacagataatcaaatagatcttctccaggattcccaaaaagcttttggcagtgagtaaatacagagtaaacatgtcagtttcttaatgtagacactatgtcttcaatcccaaaaattataaaactgaaacccatgaagcaagaatagatgtgagaaatctatgtaaaaaaataattaaagaaatgcatgtgtgtaaagtagtaatatgatgattttaggtagtgctttttattttaaaaatagtctagttagtaatgttgtatccttgcatgaatattattcttaattccttttgcatgttgactatttgcaacgagctcaaatgctatctgatcaaagtctattttgcataaaatgtccaataattaaatattgttataaaataaaacatcagtctttgactct

SEQ ID NO: 6992 - DNA, 1283 bp, Artificial Sequence
  derived and/or modified sequence
agtgtgcctctgtcctttgccacaaacatgaggttcacattccctctcatggctatagtcctggaaattgccatgattgttttatttggattatttgttgagtatgaaacggaccagactgttctcgagcagctcaacatcaccaagccaacagacatgggcatattctttgagttatatcctctgttccaagatgtacatgttatgatatttgttgggtttggcttcctcatgaccttcctgaagaaatatggcttcagcagtgtgggtatcaacctactcgttgctgctttgggcctccagtggggcactattgtacagggaatcctgcaaagccagggacagaaatttaacattggaatcaaaaacatgataaatgcagacttcagtgcagccacagttctgatatcttttggagctgtcctgggaaaaacgagccccacccaaatgctgatcatgacaattttagaaattgttttctttgcccacaatgaatacctggttagtgaaatatttaaggcctctgacattggagcatcaatgacgatccatgcctttggggcctactttggcttggctgtagcaggcatcttgtatcgatctggactgagaaaggggcatgaaaatgaagagtccgcatactactcagacttgtttgcaatgattgggactctctttctgtggatgttttggcccagctttaactcggccattgctgaacctggagacaaacagtgcagggccattgtaaacacgtacttctctctcgctgcctgtgtgctcacagcctttgccttctccagcctagtggagcaccgaggcaagctcaacatggttcacattcagaatgccacccttgctggaggagttgctgtgggcacttgtgcggatatggcaattcacccatttggttctatgattattgggagcattgcaggaatggtctctgtgcttggatacaagttcctgactccactttttactactaaactgaggatccatgatacatgtggggtccataacctccacggcttacctggtgtagtgggaggccttgcaggcattgtggcagtagcaatgggcgcctccaacacgtctatggccatgcaggcagctgcactgggttcctctatcggaacagcagttgttggaggtctgatgacaggtttaattctaaagttgcctctctggggacagccatctgaccagaactgctatgatgattctgtttattggaaggtccctaagacgagagtctaaacaccattcctgctctccagctt

SEQ ID NO: 6993 - DNA, 1203 bp, Artificial Sequence
  derived and/or modified sequence
agtgtgcctctgtcctttgccacaaacatgaggttcacattccctctcatggctatagtcctggaaattgccatgattgttttatttggattatttgttgagtatgaaacggaccagactgttctcgagcagctcaacatcaccaagccaacagacatgggcatattctttgagttatatcctctgttccaagatgtacatgttatgatatttgttgggtttggcttcctcatgaccttcctgaagaaatatggcttcagcagtgtgggtatcaacctactcgttgctgctttgggcctccagtggggcactattgtacagggaatcctgcaaagccagggacagaaatttaacattggaatcaaaaacatgataaatgcagacttcagtgcagccacagttctgatatcttttggagctgtcctgggaaaaacgagccccacccaaatgctgatcatgacaattttagaaattgttttctttgcccacaatgaatacctggttagtgaaatatttaaggcctctgacattggagcatcaatgacgatccatgcctttggggcctactttggcttggctgtagcaggcatcttgtatcgatctggactgagaaaggggcatgaaaatgaagagtccgcatactactcagacttgtttgcaatgattgggactctctttctgtggatgttttggcccagctttaactcggccattgctgaacctggagacaaacagtgcagggccattgtaaacacgtacttctctctcgctgcctgtgtgctcacagcctttgccttctccagcctagtggagcaccgaggcaagctcaacatggttcacattcagaatgccacccttgctggaggagttgctgtgggcacttgtgcggatatggcaattcacccatttggttctatgattattgggagcattgcaggaatggtctctgtgcttggatacaagttcctgactccactttttactactaaactgaggatccatgatacatgtggggtccataacctccacggcttacctggtgtagtgggaggccttgcaggcattgtggcagtagcaatgggcgcctccaacacgtctatggccatgcaggcagctgcactgggttcctctatcggaacagcagttgttggaggtctgatgacaggaacctgaagtctaaacaccattcctgctctccagctt

SEQ ID NO: 6994 - DNA, 1230 bp, Artificial Sequence
  derived and/or modified sequence
atgagattcaccttccccctgatggccatcgtgctggagatcgccatgatcgtgctgttcggcctgttcgtggagtacgagaccgaccagaccgtgctggagcagctgaacatcaccaagcccaccgacatgggcatcttcttcgagctgtaccccctgttccaggacgtgcacgtgatgatcttcgtgggcttcggcttcctgatgaccttcctgaagaagtacggcttcagcagcgtgggcatcaacctgctggtggccgccctgggcctgcagtggggcaccatcgtgcagggcatcctgcagagccagggccagaagttcaacatcggcatcaagaacatgatcaacgccgacttcagcgccgccaccgtgctgatcagcttcggcgccgtgctgggcaagaccagccccacccagatgctgatcatgaccatcctggagatcgtgttcttcgcccacaacgagtacctggtgagcgagatcttcaaggccagcgacatcggcgccagcatgaccatccacgccttcggcgcctacttcggcctggccgtggccggcatcctgtacagaagcggcctgagaaagggccacgagaacgaggagagcgcctactacagcgacctgttcgccatgatcggcaccctgttcctgtggatgttctggcccagcttcaacagcgccatcgccgagcccggcgacaagcagtgcagagccatcgtgaacacctacttcagcctggccgcctgcgtgctgaccgccttcgccttcagcagcctggtggagcacagaggcaagctgaacatggtgcacatccagaacgccaccctggccggcggcgtggccgtgggcacctgcgccgacatggccatccaccccttcggcagcatgatcatcggcagcatcgccggcatggtgagcgtgctgggctacaagttcctgacccccctgttcaccaccaagctgagaatccacgacacctgcggcgtgcacaacctgcacggcctgcccggcgtggtgggcggcctggccggcatcgtggccgtggccatgggcgccagcaacaccagcatggccatgcaggccgccgccctgggcagcagcatcggcaccgccgtggtgggcggcctgatgaccggcctgatcctgaagctgcccctgtggggccagcccagcgaccagaactgctacgacgacagcgtgtactggaaggtgcccaagaccagatag

SEQ ID NO: 6995 - DNA, 1233 bp, Artificial Sequence
  derived and/or modified sequence
atgagattcaccttccccctgatggccatcgtgctggagatcgccatgatcgtgctgttcggcctgttcgtggagtacgagaccgaccagaccgtgctggagcagctgaacatcaccaagcccaccgacatgggcatcttcttcgagctgtaccccctgttccaggacgtgcacgtgatgatcttcgtgggcttcggcttcctgatgaccttcctgaagaagtacggcttcagcagcgtgggcatcaacctgctggtggccgccctgggcctgcagtggggcaccatcgtgcagggcatcctgcagagccagggccagaagttcaacatcggcatcaagaacatgatcaacgccgacttcagcgccgccaccgtgctgatcagcttcggcgccgtgctgggcaagaccagccccacccagatgctgatcatgaccatcctggagatcgtgttcttcgcccacaacgagtacctggtgagcgagatcttcaaggccagcgacatcggcgccagcatgaccatccacgccttcggcgcctacttcggcctggccgtggccggcatcctgtacagaagcggcctgagaaagggccacgagaacgaggagagcgcctactacagcgacctgttcgccatgatcggcaccctgttcctgtggatgttctggcccagcttcaacagcgccatcgccgagcccggcgacaagcagtgcagagccatcgtgaacacctacttcagcctggccgcctgcgtgctgaccgccttcgccttcagcagcctggtggagcacagaggcaagctgaacatggtgcacatccagaacgccaccctggccggcggcgtggccgtgggcacctgcgccgacatggccatccaccccttcggcagcatgatcatcggcagcatcgccggcatggtgagcgtgctgggctacaagttcctgacccccctgttcaccaccaagctgagaatccacgacacctgcggcgtgcacaacctgcacggcctgcccggcgtggtgggcggcctggccggcatcgtggccgtggccatgggcgccagcaacaccagcatggccatgcaggccgccgccctgggcagcagcatcggcaccgccgtggtgggcggcctgatgaccggcctgatcctgaagctgcccctgtggggccagcccagcgaccagaactgctacgacgacagcgtgtactggaaggtgcccaagaccagagtgtag

SEQ ID NO: 6996 - DNA, 1146 bp, Artificial Sequence
  derived and/or modified sequence
atgagattcaccttccccctgatggccatcgtgctggagatcgccatgatcgtgctgttcggcctgttcgtggagtacgagaccgaccagaccgtgctggagcagctgaacatcaccaagcccaccgacatgggcatcttcttcgagctgtaccccctgttccaggacgtgcacgtgatgatcttcgtgggcttcggcttcctgatgaccttcctgaagaagtacggcttcagcagcgtgggcatcaacctgctggtggccgccctgggcctgcagtggggcaccatcgtgcagggcatcctgcagagccagggccagaagttcaacatcggcatcaagaacatgatcaacgccgacttcagcgccgccaccgtgctgatcagcttcggcgccgtgctgggcaagaccagccccacccagatgctgatcatgaccatcctggagatcgtgttcttcgcccacaacgagtacctggtgagcgagatcttcaaggccagcgacatcggcgccagcatgaccatccacgccttcggcgcctacttcggcctggccgtggccggcatcctgtacagaagcggcctgagaaagggccacgagaacgaggagagcgcctactacagcgacctgttcgccatgatcggcaccctgttcctgtggatgttctggcccagcttcaacagcgccatcgccgagcccggcgacaagcagtgcagagccatcgtgaacacctacttcagcctggccgcctgcgtgctgaccgccttcgccttcagcagcctggtggagcacagaggcaagctgaacatggtgcacatccagaacgccaccctggccggcggcgtggccgtgggcacctgcgccgacatggccatccaccccttcggcagcatgatcatcggcagcatcgccggcatggtgagcgtgctgggctacaagttcctgacccccctgttcaccaccaagctgagaatccacgacacctgcggcgtgcacaacctgcacggcctgcccggcgtggtgggcggcctggccggcatcgtggccgtggccatgggcgccagcaacaccagcatggccatgcaggccgccgccctgggcagcagcatcggcaccgccgtggtgggcggcctgatgaccggcacctag

SEQ ID NO: 6997 - DNA, 1056 bp, Artificial Sequence
  derived and/or modified sequence
atgagattcaccttccccctgatggccatcgtgctggagatcgccatgatcgtgctgttcggcctgttcgtggagtacgagaccgaccagaccgtgctggagcagctgaacatcaccaagcccaccgacatgggcatcttcttcgagctgtaccccctgttccaggacgtgcacgtgatgatcttcgtgggcttcggcttcctgatgaccttcctgaagaagtacggcttcagcagcgtgggcatcaacctgctggtggccgccctgggcctgcagtggggcaccatcgtgcagggcatcctgcagagccagggccagaagttcaacatcggcatcaagaacatgatcaacgccgacttcagcgccgccaccgtgctgatcagcttcggcgccgtgctgggcaagaccagccccacccagatgctgatcatgaccatcctggagatcgtgttcttcgcccacaacgagtacctggtgagcgagatcttcaaggccagcgacatcggcgccagcatgaccatccacgccttcggcgcctacttcggcctggccgtggccggcatcctgtacagaagcggcctgagaaagggccacgagaacgaggagagcgcctactacagcgacctgttcgccatgatcggcaccctgttcctgtggatgttctggcccagcttcaacagcgccatcgccgagcccggcgacaagcagtgcagagccatcgtgaacacctacttcagcctggccgcctgcgtgctgaccgccttcgccttcagcagcctggtggagcacagaggcaagctgaacatggtgcacatccagaacgccaccctggccggcggcgtggccgtgggcacctgcgccgacatggccatccaccccttcggcagcatgatcatcggcagcatcgccggcatggtgagcgtgctgggctacaagttcctgaccgtgtacggccacgccggcagctgcaccggcttcctgtacagaaacagcagctgctggagaagcgacgacagattcaacagcaaggtggccagcctgggcaccgccatctag

SEQ ID NO: 6998 - protein, 324 aa, Artificial Sequence
  derived and/or modified sequence
MNCMKGPLHLEHRAAGTKLSAVSSSSCHHPQPLAMASVLAPGQPRSLDSSKHRLEVHTISDTSSPEAAEKDKSQQGKNEDVGAEDPSKKKRQRRQRTHFTSQQLQELEATFQRNRYPDMSTREEIAVWTNLTEARVRVWFKNRRAKWRKRERNQQAELCKNGFGPQFNGLMQPYDDMYPGYSYNNWAAKGLTSASLSTKSFPFFNSMNVNPLSSQSMFSPPNSISSMSMSSSMVPSAVTGVPGSSLNSLNNLNNLSSPSLNSAVPTPACPYAPPTPPYVYRDTCNSSLASLRLKAKQHSSFGYASVQNPASNLSACQYAVDRPV

SEQ ID NO: 6999 - DNA, 2337 bp, Artificial Sequence
  derived and/or modified sequence
gttaggccaacagggaagcgcggagccgcagatctggtccgtcgctcgcctgggtgcctggagctgagctgcggcaaggcccggctcctgttcgaccgcccgaggggtgtgcgtgtgcgcgttgcggagggtgcgctcagagggccgcgtcgtggctgcagcggctgctgccgccgcaggggatctaatatcacctacctgtccctgtcactcttgacacttctctgtcagggctgccgcgtggggggggggcgggcagagcgcggtcggcgttagctttccttattggaggggttcttgggggagggagggagagaagaagggggtctttgcccactcttgtttcgctttggagcttggaagcctgctccctaaagacgctctgagtggtgcccttctgcccacatcccatgtcttcgtttgcccgctgactttccgtctccggactttttcgcttgagccttccggaggagacgggggcagcttggcttgagaactcggcgggggttgcgtcccctggctctccccgcagcggggaaactccgcgcctagagcgcgacccggagcgggcagcggcggctacgggggctcggcggggcagtagccaaggactagtagagcgtcgcgctccctcgtccatgaactgcatgaaaggcccgcttcacttggagcaccgagcagcggggaccaagctgtcggccgtctcctcatcttcctgtcaccatccccagccgttagccatggcttcggttctggctcccggtcagccccggtcgctggactcctccaagcacaggctggaggtgcacaccatctccgacacctccagcccggaggccgcagagaaagataaaagccagcaggggaagaatgaggacgtgggcgccgaggacccgtctaagaagaagcggcaaaggcggcagcggactcactttaccagccagcagctccaggagctggaggccactttccagaggaaccgctacccggacatgtccacacgcgaagaaatcgctgtgtggaccaaccttacggaagcccgagtccgggtttggttcaagaatcgtcgggccaaatggagaaagagggagcgcaaccagcaggccgagctatgcaagaatggcttcgggccgcagttcaatgggctcatgcagccctacgacgacatgtacccaggctattcctacaacaactgggccgccaagggccttacatccgcctccctatccaccaagagcttccccttcttcaactctatgaacgtcaaccccctgtcatcacagagcatgttttccccacccaactctatctcgtccatgagcatgtcgtccagcatggtgccctcagcagtgacaggcgtcccgggctccagtctcaacagcctgaataacttgaacaacctgagtagcccgtcgctgaattccgcggtgccgacgcctgcctgtccttacgcgccgccgactcctccgtatgtttatagggacacgtgtaactcgagcctggccagcctgagactgaaagcaaagcagcactccagcttcggctacgccagcgtgcagaacccggcctccaacctgagtgcttgccagtatgcagtggaccggcccgtgtgagccgcacccacagcgccgggatcctaggaccttgccggatggggcaactccgcccttgaaagactgggaattatgctagaaggtcgtgggcactaaagaaagggagagaaagagaagctatatagagaaaaggaaaccactgaatcaaagagagagctcctttgatttcaaagggatgtcctcagtgtctgacatctttcactacaagtatttctaacagttgcaaggacacatacacaaacaaatgtttgactggatatgacattttaacattactataagcttgttattttttaagtttagcattgttaacatttaaatgactgaaaggatgtatatatatcgaaatgtcaaattaattttataaaagcagttgttagtaatatcacaacagtgtttttaaaggttaggctttaaaataaagcatgttatacagaagcgattaggatttttcgcttgcgagcaagggagtgtatatactaaatgccacactgtatgtttctaacatattattattattataaaaaatgtgtgaatatcagttttagaatagtttctctggtggatgcaatgatgtttctgaaactgctatgtacaacctaccctgtgtataacatttcgtacaatattattgttttacttttcagcaaatatgaaacaaatgtgttttatttcatgggagtaaaatatactgcatacaaaaaaaaaaaaaaaaaaaaaaaaa

SEQ ID NO: 7000 - DNA, 975 bp, Artificial Sequence
  derived and/or modified sequence
atgaattgcatgaagggccctctgcatctggaacaccgcgccgcgggcaccaagctgtcggccgtcagctcttcgagctgtcaccacccacaacccctcgcgatggctagtgtgttggccccagggcagccaagatcattagattccagtaaacaccgcctcgaggtccacactatttccgataccagttcccccgaggcagctgagaaggacaaaagccaacagggcaaaaatgaagacgtgggtgccgaagacccctccaaaaaaaaacggcagcgcaggcagagaacccatttcacttcccagcaactgcaggagctcgaggccacttttcagcgaaacagatatcctgacatgtctacacgggaagagatcgcagtttggactaatctgaccgaagcgcgcgtccgagtgtggttcaaaaacaggcgcgcaaagtggcggaagagggaaaggaaccagcaggctgaactgtgtaaaaacggttttggtcctcaatttaatgggctcatgcagccatacgatgacatgtatcccggctactcctataacaattgggctgctaaggggctgacatccgcctcactgtctacaaaaagttttccattttttaattctatgaatgtaaatcctctgagctctcagtcaatgttctctccccctaactcaatcagtagcatgtccatgtcatcctcaatggtcccaagcgccgtgactggtgttccaggaagcagcctaaattccttaaacaacctgaacaacctgagcagcccatcacttaattctgctgtccccacacccgcttgtccttatgccccaccaacgcctccatatgtctaccgggacacctgcaattctagcctagcatctctacgtctgaaggcaaaacaacacagctctttcggctacgctagtgtccagaaccctgctagtaatctgtctgcctgccagtatgccgttgataggccagtctag

SEQ ID NO: 7001 - DNA, 975 bp, Artificial Sequence
  derived and/or modified sequence
atgaactgcatgaagggccccctgcacctggagcacagagctgctggcaccaagctgtctgctgtgagcagcagcagctgccaccacccccagcccctggccatggcctctgtgctggcccctggccagcccaggagcctggacagcagcaagcaccggctggaggtgcacaccatcagtgacaccagcagccctgaggccgctgagaaggacaagagccagcagggcaagaatgaagatgtgggcgctgaggaccccagcaagaagaagaggcagaggcggcagaggacccacttcaccagccagcagctgcaggagctggaggccaccttccagaggaaccgctacccagacatgagcacccgggaggagattgctgtgtggaccaacctgacagaggcccgggtgcgggtgtggttcaagaacagaagagccaagtggaggaagcgggagaggaaccagcaggccgagctgtgcaagaatggatttggcccccagttcaacggcctgatgcagccctatgatgacatgtacccaggctacagctacaacaactgggccgccaagggcctgaccagcgccagcctgagcaccaagagcttccccttcttcaacagcatgaatgtgaaccccctgagcagccagagcatgttcagcccccccaacagcatcagctccatgtccatgagcagctccatggtgcccagcgctgtgactggagtgcccggcagcagcctgaacagcctgaacaacctgaacaacctgagcagccccagcctgaacagcgctgtgcccaccccagcctgcccctatgccccacccaccccaccctacgtgtacagagacacctgcaacagcagcctggccagcctgcggctgaaggccaagcagcacagcagctttggctacgcctctgtgcagaacccagccagcaacctgagcgcctgccagtatgctgtggacaggcctgtgtag

SEQ ID NO: 7002 - DNA, 975 bp, Artificial Sequence
  derived and/or modified sequence
atgaactgcatgaagggccccctgcacctggagcaccgggccgccgggaccaaactgtcggccgtgtcctcttcctcttgtcaccacccccagccactggcgatggcgtctgtgttagctccaggccagccaaggtcactagactcaagcaaacacagactggaggtgcatactataagtgatacatcctcaccagaagccgcagaaaaagacaaaagtcagcaagggaagaacgaggacgtgggcgccgaggacccatctaagaaaaagagacagaggaggcagcggacccacttcacctctcaacaattgcaagaactcgaagcaacgtttcaaagaaacaggtatccagacatgagtacacgggaagaaatcgctgtgtggaccaatctgaccgaggcgagggtacgggtctggtttaaaaacaggcgggcaaaatggagaaaacgggaacggaaccagcaggccgaactatgtaaaaacggctttggcccccagtttaatggactgatgcaaccatacgacgacatgtatccgggatacagctacaacaactgggctgcgaaggggctgacatcagcaagcctgtctaccaaatccttcccattctttaattctatgaacgtcaatccgcttagctcccagtccatgttcagtcctcctaattccatcagttccatgagcatgagttcctcaatggtccctagtgccgtgactggtgtgccggggtccagtctgaattcgctgaataatctcaataacctctcatccccgagcctgaactctgccgtgccaacaccagcatgtccctatgcccctccaactccaccatacgtgtatagagacacatgcaatagcagtctcgcatccctgcgcctcaaagccaaacagcacagctctttcggctatgctagcgtgcagaacccggctagtaacctgtccgcttgccaatatgcagtggacaggccagtttag

SEQ ID NO: 7003 - DNA, 2320 bp, Artificial Sequence
  derived and/or modified sequence
aagatgttaggccaacagggaagcgcggagccgcagatctggtccgtcgctcgcctgggtgcctggagctgagctgcggcaaggcccggctcctgttcgaccgcccgaggggtgtgcgtgtgcgcgttgcggagggtgcgctcagagggccgcgtcgtggctgcagcggctgctgccgccgcaggggatctaatatcacctacctgtccctgtcactcttgacacttctctgtcagggctgccgcgtggggggggggcgggcagagcgcggtcggcgttagctttccttattggaggggttcttgggggagggagggagagaagaagggggtctttgcccactcttgtttcgctttggagcttggaagcctgctccctaaagacgctctgagtggtgcccttctgcccacatcccatgtcttcgtttgcccgctgactttccgtctccggactttttcgcttgagccttccggaggagacgggggcagcttggcttgagaactcggcgggggttgcgtcccctggctctccccgcagcggggaaactccgcgcctagagcgcgacccggagcgggcagcggcggctacgggggctcggcggggcagtagccaaggactagtagagcgtcgcgctccctcgtccatgaactgcatgaaaggcccgcttcacttggagcaccgagcagcggggaccaagctgtcggccgtctcctcatcttcctgtcaccatccccagccgttagccatggcttcggttctggctcccggtcagccccggtcgctggactcctccaagcacaggctggaggtgcacaccatctccgacacctccagcccggaggccgcagagaaagataaaagccagcaggggaagaatgaggacgtgggcgccgaggacccgtctaagaagaagcggcaaaggcggcagcggactcactttaccagccagcagctccaggagctggaggccactttccagaggaaccgctacccggacatgtccacacgcgaagaaatcgctgtgtggaccaaccttacggaagcccgagtccgggtttggttcaagaatcgtcgggccaaatggagaaagagggagcgcaaccagcaggccgagctatgcaagaatggcttcgggccgcagttcaatgggctcatgcagccctacgacgacatgtacccaggctattcctacaacaactgggccgccaagggccttacatccgcctccctatccaccaagagcttccccttcttcaactctatgaacgtcaaccccctgtcatcacagagcatgttttccccacccaactctatctcgtccatgagcatgtcgtccagcatggtgccctcagcagtgacaggcgtcccgggctccagtctcaacagcctgaataacttgaacaacctgagtagcccgtcgctgaattccgcggtgccgacgcctgcctgtccttacgcgccgccgactcctccgtatgtttatagggacacgtgtaactcgagcctggccagcctgagactgaaagcaaagcagcactccagcttcggctacgccagcgtgcagaacccggcctccaacctgagtgcttgccagtatgcagtggaccggcccgtgtgagccgcacccacagcgccgggatcctaggaccttgccggatggggcaactccgcccttgaaagactgggaattatgctagaaggtcgtgggcactaaagaaagggagagaaagagaagctatatagagaaaaggaaaccactgaatcaaagagagagctcctttgatttcaaagggatgtcctcagtgtctgacatctttcactacaagtatttctaacagttgcaaggacacatacacaaacaaatgtttgactggatatgacattttaacattactataagcttgttattttttaagtttagcattgttaacatttaaatgactgaaaggatgtatatatatcgaaatgtcaaattaattttataaaagcagttgttagtaatatcacaacagtgtttttaaaggttaggctttaaaataaagcatgttatacagaagcgattaggatttttcgcttgcgagcaagggagtgtatatactaaatgccacactgtatgtttctaacatattattattattataaaaaatgtgtgaatatcagttttagaatagtttctctggtggatgcaatgatgtttctgaaactgctatgtacaacctaccctgtgtataacatttcgtacaatattattgttttacttttcagcaaatatgaaacaaatgtgttttatttcatgggagtaaaatatactgcatacaaa

SEQ ID NO: 7004 - DNA, 975 bp, Artificial Sequence
  derived and/or modified sequence
atgaactgcatgaaagggcctctgcacttggaacaccgcgctgctggcaccaaactctctgctgtgtccagctcttcatgccaccacccacaaccactggcgatggcatccgtcctggcccctggccaacctcggagtctggactcttctaagcatcgcttggaggtacatacaatttcggacacaagctccccagaggccgctgagaaggataagtctcagcagggaaaaaatgaagatgtcggggctgaagacccatccaaaaaaaaaagacagcggagacaaaggactcattttacatctcagcaactgcaggaactcgaggccactttccaacggaacaggtatcctgatatgtcgaccagagaagaaatagccgtgtggactaacctgaccgaggcccgagtgcgagtctggtttaagaataggcgggctaagtggaggaagagggagcgcaatcaacaggccgagctgtgtaagaacggctttggtccccaattcaatgggttaatgcaaccgtatgacgatatgtacccaggatacagctataacaactgggcggcaaaaggcctgacgagtgcttcactgtcaacaaagagtttcccttttttcaattctatgaatgtgaatccgttaagctcacagagtatgtttagtcctccaaacagtatttcctctatgagcatgtcaagctccatggtgccatcagccgtgaccggagtacccggtagcagccttaacagtctgaacaatctcaataacctgtctagcccttctcttaacagtgccgtacctacgcctgcctgcccttacgcgccacctacacctccctacgtgtaccgggatacctgcaattctagtctggctagcctgagactgaaggctaaacagcactcctcatttggctacgcatcagttcaaaaccctgcgagtaacctctcagcctgccagtatgctgtggaccgccctgtttag

SEQ ID NO: 7005 - DNA, 975 bp, Artificial Sequence
  derived and/or modified sequence
atgaactgcatgaagggccccctgcacctggagcacagagccgccggcaccaagctgagcgccgtgagcagcagcagctgccaccacccccagcccctggccatggccagcgtgctggcccccggccagcccagaagcctggacagcagcaagcacagactggaggtgcacaccatcagcgacaccagcagccccgaggccgccgagaaggacaagagccagcagggcaagaacgaggacgtgggcgccgaggaccccagcaagaagaagagacagagaagacagagaacccacttcaccagccagcagctgcaggagctggaggccaccttccagagaaacagataccccgacatgagcaccagagaggagatcgccgtgtggaccaacctgaccgaggccagagtgagagtgtggttcaagaacagaagagccaagtggagaaagagagagagaaaccagcaggccgagctgtgcaagaacggcttcggcccccagttcaacggcctgatgcagccctacgacgacatgtaccccggctacagctacaacaactgggccgccaagggcctgaccagcgccagcctgagcaccaagagcttccccttcttcaacagcatgaacgtgaaccccctgagcagccagagcatgttcagcccccccaacagcatcagcagcatgagcatgagcagcagcatggtgcccagcgccgtgaccggcgtgcccggcagcagcctgaacagcctgaacaacctgaacaacctgagcagccccagcctgaacagcgccgtgcccacccccgcctgcccctacgccccccccacccccccctacgtgtacagagacacctgcaacagcagcctggccagcctgagactgaaggccaagcagcacagcagcttcggctacgccagcgtgcagaaccccgccagcaacctgagcgcctgccagtacgccgtggacagacccgtgtag

SEQ ID NO: 7006 - protein, 351 aa, Artificial Sequence
  derived and/or modified sequence
MAPVLPLVLPLQPRIRLAQGLWLLSWLLALAGGVILLCSGHLLVQLRHLGTFLAPSCQFPVLPQAALAAGAVALGTGLVGVGASRASLNAALYPPWRGVLGPLLVAGTAGGGGLLVVGLGLALALPGSLDEALEEGLVTALAHYKDTEVPGHCQAKRLVDELQLRYHCCGRHGYKDWFGVQWVSSRYLDPGDRDVADRIQSNVEGLYLTDGVPFSCCNPHSPRPCLQNRLSDSYAHPLFDPRQPNQNLWAQGCHEVLLEHLQDLAGTLGSMLAVTFLLQALVLLGLRYLQTALEGLGGVIDAGGETQGYLFPSGLKDMLKTAWLQGGVACRPAPEEAPPGEAPPKEDLSEA

SEQ ID NO: 7007 - DNA, 1056 bp, Artificial Sequence
  derived and/or modified sequence
atggcccccgtcttgccgctggtactaccactgcagcctcggatccggcttgcacagggtttatggctgttatcatggctgctggcactggctggaggagtgattcttctctgttctgggcatcttctcgtccagttgaggcacctgggcactttcctggcacccagttgccagttccccgtcttgccgcaggcagctctggcggcgggcgccgtggcattaggcaccggtttagttggggtgggggcttcgagggcgtctctcaacgctgcactgtatcccccctggaggggcgtgctcggccctttgctggtcgcaggcacagccggaggtggcggattgctcgtggttgggctgggcctcgcactggcccttcccggatcactggatgaggctctggaggaggggcttgtgaccgccctcgcacactacaaagataccgaagtcccaggccactgtcaggccaagcgacttgtagacgagctgcaactacgctaccattgttgcggtcgccacgggtacaaggattggtttggggtgcagtgggtgtcatctcggtacctagaccccggcgatcgagacgtggccgaccggatacagtcaaacgtagagggcctctatttaaccgacggcgtgcccttttcgtgttgtaatccccactcgcctaggccctgtttgcagaaccggctgtctgattcctacgcccatccattgttcgatcctcggcagcctaatcaaaatttatgggctcaaggctgccacgaggtcctcctggaacatctgcaggacttggctggtaccctggggtccatgctcgctgtgacctttttattacaggcactggtgttgcttgggttaaggtatctgcagacagccctggaagggctgggaggcgtcattgatgccggcggcgaaacccagggctacctctttcccagcggacttaaggacatgctcaagaccgcatggctccaggggggcgtggcatgccgccccgcccccgaggaagccccgcctggcgaagcacctcccaaggaagatctgtcagaggcatag

SEQ ID NO: 7008 - DNA, 1056 bp, Artificial Sequence
  derived and/or modified sequence
atggcccctgtgctgcccctggtgctgcccctgcagccccgcatccggctggcccagggcctgtggctgctgtcctggctgctggccctggccggcggcgtcatcctgctgtgcagcggccacctgctggtgcagctgcggcacctgggcaccttcctggcccccagctgccagtttcctgtgctgccccaggccgccctggccgccggggctgtggccctgggcaccggcctggtgggcgtgggcgccagccgggccagcctgaatgctgccctgtacccaccctggaggggcgtgctgggccccctgctggtggccggcacagctgggggcggcggcctgctggtggtgggcctgggcctggccctggccctgcccggcagcctggatgaggccctggaggagggcctggtgacagccctggcccactacaaggacacagaggtgcccggccactgccaggccaagaggctggtggatgagctgcagctgcgctaccactgctgcggccgccacggctacaaggactggtttggagtgcagtgggtgagcagccgctacctggaccccggggacagagatgtggccgaccgcatccagagcaatgtggagggcctgtacctgacagatggagtgcccttcagctgctgcaacccccacagcccccggccctgcctgcagaaccggctgagtgacagctatgcccaccccctgtttgacccccggcagcccaaccagaacctgtgggcccagggctgccacgaggtgctgctggagcacctgcaggacctggccggcaccctgggctccatgctggccgtgaccttcctgctgcaggccctggtgctgctgggcctgcgctacctgcagacagccctggagggcctgggcggcgtgattgatgctggaggagagacccagggctacctgttccccagcggcctgaaggacatgctgaagacagcctggctgcagggcggcgtggcctgcaggcctgcccctgaggaggcccctcctggagaggccccacccaaggaggacctgtctgaggcctag

SEQ ID NO: 7009 - DNA, 1056 bp, Artificial Sequence
  derived and/or modified sequence
atggcccccgtgctgcccctggtgctgcccctgcagccccggatccgcctagcccagggactatggcttttgagctggctgctcgcgctggccggcggggttatactgctgtgctcaggccacctgctagtgcagctgaggcaccttggcactttcctggcacctagctgccaattccctgtactgccgcaggccgcattggctgccggtgccgttgccctggggaccggacttgtgggcgtgggagcctcaagagccagcctgaacgctgcattgtatcctccctggaggggcgtactgggacctctgcttgtggccggtaccgctgggggcggcgggctccttgtggtgggactgggtctggctcttgccctcccaggttctctggatgaagctcttgaggaaggcctggttacagccctcgcacactataaagataccgaggtgcctggccattgtcaggctaaaaggctggtggatgagctgcagctgcgatatcactgttgtggccggcatggatataaagactggtttggggtgcagtgggtgtccagccggtatttggatcccggggatagagatgtggccgatcggattcaaagtaatgtcgagggcctgtacctgactgacggggtcccattttcatgctgtaacccccatagtcctagaccctgcctccagaacaggctttctgattcctacgcccacccgttgtttgatcctcggcagcccaatcagaacctttgggcccagggatgtcatgaggtgctcctggaacatttgcaggatttggccggtaccctggggagcatgctggctgtcacctttctgttgcaggccctggtcctattaggtctaaggtatctgcaaaccgctttggaaggattaggcggcgtcatcgatgctggtggggaaacccagggttacttgttcccttcaggactgaaagatatgctgaagacagcatggctacaaggtggcgttgcctgtaggccggctcccgaagaggctcccccgggggaagcaccaccaaaggaagatctttcagaggcctag

SEQ ID NO: 7010 - DNA, 1056 bp, Artificial Sequence
  derived and/or modified sequence
atggctccggtccttccactggtgctgccactgcagcctaggatcaggctggctcaaggactgtggctgttgagctggttactggctctggcagggggtgtcattctgctgtgtagtggtcacttgctcgtccagcttcgtcatttagggacttttctggctccttcttgccagtttcccgtgctgccacaagctgcactcgccgctggggcagttgcactggggaccggtctcgtgggggtcggtgcaagcagggcttctctgaacgctgctctatatcctccttggcgcggagtgctaggccctctactggtggcaggaacagccggtggaggcggtctgctggtcgttggtctgggactagctctggccctcccgggaagcttagacgaagccctggaagaaggattagtgactgccctggctcattacaaggataccgaagtccccggtcactgccaggctaagaggctggttgacgagctacagctgaggtatcactgttgcggacgccacggatacaaggattggtttggagtgcagtgggtctcaagcagatatttggacccaggagacagggacgtggcggatcggattcagagcaatgtggaggggctgtacctgacagacggtgtccctttttcttgctgcaacccccactccccgcgtccctgcctgcagaacagattatctgattcttatgctcaccccctattcgacccgaggcagcccaatcagaatctctgggcccaggggtgccacgaggtcctgctggagcacctccaggaccttgcaggaactcttgggtccatgctggctgtgactttcttactgcaggcactggtgctcctagggcttcggtatctccaaacagcgttggagggactgggaggagtcattgacgcagggggagagactcaagggtacctattccctagtgggctgaaagatatgctcaaaacagcttggctgcagggcggagttgcctgtagacctgccccagaagaggcgccaccaggcgaggcccctcccaaggaggacctgagtgaggcctag

SEQ ID NO: 7011 - DNA, 1878 bp, Artificial Sequence
  derived and/or modified sequence
acaaacaggcgccggacgcggagccgccaggaagcgcgggagggggggcgggcccgagggggggccgggccgcttggtaacccctccctgtccgggcctcgccgctcagtacgggggcggggctagccggctgaccccctggcctactcccggcctccggctccaggcccttcccggatccccgcccccggattcccaggggacggggaagggagcgcccgccccgatatctccgccccccagcccctaacccctcagggttgagcggaccaaccccaccacttccgcgaggggcaggggcggggtcacaaaacgggccctcggcctaggggcggagtttctcgtaaggggcaaggccaaggcatcttgtattggggctgacaggggggcgggttattagggctgaggatgggaggatgctcagggtattggggtcagggtggcattagcccagctcaagccgggccgggctgactcagcatcctgccccagccagcttccatccctgacacctctgcattcccttgggcagagatgggagatggcgccggtgttgcccctggtgctgcccctgcagccccgcatccgcctggcacaagggctctggctcctctcctggctgctggcgctggctggtggcgtcatcctcctctgtagtgggcacctcctggtccagctaaggcaccttggcaccttcctggctccctcctgtcagttccctgtcctgccccaggctgccctggcagcgggcgcggtggctctgggcacaggactagtgggtgtaggagccagccgggcaagtctgaatgcagctctataccctccctggcgaggggtcctgggcccgctgctggtggctggcacggctggtgggggggggctcctggtcgtcggcctcgggctagccctggctttgcctgggagtctggatgaggcgctggaggagggcctggtgactgccttggctcactacaaggacacagaggtgcctgggcactgtcaggccaaaaggctggtggatgagctgcaactgaggtaccactgctgcgggcgccacgggtacaaggattggtttggggtccagtgggtcagcagccgttacctggatcccggtgaccgggatgtggctgaccggatccagagcaatgtagaaggcctatacctgactgatggggtccctttctcctgttgcaacccccactcaccccggccttgcctgcaaaaccgtctttcagactcctacgcccaccccctgttcgatccccgacaacccaaccaaaacctctgggcccaagggtgccatgaggtgctgctggagcacttgcaggacttggcaggcacactgggtagcatgctggctgtcaccttcctactgcaggctctggtgctccttggcctgcggtacctgcaaacagcactggaggggcttggaggggtcattgatgcgggaggagagacccagggctatctctttcccagtgggctgaaagatatgctgaaaacagcatggctacagggaggggttgcctgcaggccagcacctgaggaggccccaccaggagaagcacctcccaaggaggatctatctgaggcctagaggcctggagcttggggtgaggaagagggagggatggacaagtctgaaaacctcacaactccttaccaaggctccaggttggggggatcgtaggattagaggggctaaggatagtcagcgagctggactggggtaagaaagaaaaccagatgtcctagggcctagcccttgtagtcagaaccaccagggaacagcaaagaacagagtgatgggaaagtgacatgagaaggcctggaggctgattctgatatagactcaataaagtttttggatggaagcaa

SEQ ID NO: 7012 - DNA, 1056 bp, Artificial Sequence
  derived and/or modified sequence
atggcccccgtgctgcccctggtgctgcccctgcagcccagaatcagactggcccagggcctgtggctgctgagctggctgctggccctggccggcggcgtgatcctgctgtgcagcggccacctgctggtgcagctgagacacctgggcaccttcctggcccccagctgccagttccccgtgctgccccaggccgccctggccgccggcgccgtggccctgggcaccggcctggtgggcgtgggcgccagcagagccagcctgaacgccgccctgtaccccccctggagaggcgtgctgggccccctgctggtggccggcaccgccggcggcggcggcctgctggtggtgggcctgggcctggccctggccctgcccggcagcctggacgaggccctggaggagggcctggtgaccgccctggcccactacaaggacaccgaggtgcccggccactgccaggccaagagactggtggacgagctgcagctgagataccactgctgcggcagacacggctacaaggactggttcggcgtgcagtgggtgagcagcagatacctggaccccggcgacagagacgtggccgacagaatccagagcaacgtggagggcctgtacctgaccgacggcgtgcccttcagctgctgcaacccccacagccccagaccctgcctgcagaacagactgagcgacagctacgcccaccccctgttcgaccccagacagcccaaccagaacctgtgggcccagggctgccacgaggtgctgctggagcacctgcaggacctggccggcaccctgggcagcatgctggccgtgaccttcctgctgcaggccctggtgctgctgggcctgagatacctgcagaccgccctggagggcctgggcggcgtgatcgacgccggcggcgagacccagggctacctgttccccagcggcctgaaggacatgctgaagaccgcctggctgcagggcggcgtggcctgcagacccgcccccgaggaggccccccccggcgaggccccccccaaggaggacctgagcgaggcctag

SEQ ID NO: 7013 - protein, 753 aa, Artificial Sequence
  derived and/or modified sequence
MREPEELMPDSGAVFTFGKSKFAENNPGKFWFKNDVPVHLSCGDEHSAVVTGNNKLYMFGSNNWGQLGLGSKSAISKPTCVKALKPEKVKLAACGRNHTLVSTEGGNVYATGGNNEGQLGLGDTEERNTFHVISFFTSEHKIKQLSAGSNTSAALTEDGRLFMWGDNSEGQIGLKNVSNVCVPQQVTIGKPVSWISCGYYHSAFVTTDGELYVFGEPENGKLGLPNQLLGNHRTPQLVSEIPEKVIQVACGGEHTVVLTENAVYTFGLGQFGQLGLGTFLFETSEPKVIENIRDQTISYISCGENHTALITDIGLMYTFGDGRHGKLGLGLENFTNHFIPTLCSNFLRFIVKLERSPDSFSMRRTLPPIEGTLGLSACFLPNSVFPRCSERNLQESVLSEQDLMQPEEPDYLLDEMTKEAEIDNSSTVESLGETTDILNMTHIMSLNSNEKSLKLSPVQKQKKQQTIGELTQDTALTENDDSDEYEEMSEMKEGKACKQHVSQGIFMTQPATTIEAFSDEEVEIPEEKEGAEDSKGNGIEEQEVEANEENVKVHGGRKEKTEILSDDLTDKAEDHEFSKTEELKLEDVDEEINAENVESKKKTVGDDESVPTGYHSKTEGAERTNDDSSAETIEKKEKANLEERAICEYNENPKGYMLDDADSSSLEILENSETTPSKDMKKTKKIFLFKRVPSINQKIVKNNNEPLPEIKSIGDQIILKSDNKDADQNHMSQNHQNIPPTNTERRSKSCTIL

SEQ ID NO: 7014 - protein, 815 aa, Artificial Sequence
  derived and/or modified sequence
MREPEELMPDSGAVFTFGKSKFAENNPGKFWFKNDVPVHLSCGDEHSAVVTGNNKLYMFGSNNWGQLGLGSKSAISKPTCVKALKPEKVKLAACGRNHTLVSTEGGNVYATGGNNEGQLGLGDTEERNTFHVISFFTSEHKIKQLSAGSNTSAALTEDGRLFMWGDNSEGQIGLKNVSNVCVPQQVTIGKPVSWISCGYYHSAFVTTDGELYVFGEPENGKLGLPNQLLGNHRTPQLVSEIPEKVIQVACGGEHTVVLTENAVYTFGLGQFGQLGLGTFLFETSEPKVIENIRDQTISYISCGENHTALITDIGLMYTFGDGRHGKLGLGLENFTNHFIPTLCSNFLRFIVKLVACGGCHMVVFAAPHRGVAKEIEFDEINDTCLSVATFLPYSSLTSGNVLQRTLSARMRRRERERSPDSFSMRRTLPPIEGTLGLSACFLPNSVFPRCSERNLQESVLSEQDLMQPEEPDYLLDEMTKEAEIDNSSTVESLGETTDILNMTHIMSLNSNEKSLKLSPVQKQKKQQTIGELTQDTALTENDDSDEYEEMSEMKEGKACKQHVSQGIFMTQPATTIEAFSDEEVEIPEEKEGAEDSKGNGIEEQEVEANEENVKVHGGRKEKTEILSDDLTDKAEDHEFSKTEELKLEDVDEEINAENVESKKKTVGDDESVPTGYHSKTEGAERTNDDSSAETIEKKEKANLEERAICEYNENPKGYMLDDADSSSLEILENSETTPSKDMKKTKKIFLFKRVPSINQKIVKNNNEPLPEIKSIGDQIILKSDNKDADQNHMSQNHQNIPPTNTERRSKSCTIL

SEQ ID NO: 7015 - protein, 1020 aa, Artificial Sequence
  derived and/or modified sequence
MREPEELMPDSGAVFTFGKSKFAENNPGKFWFKNDVPVHLSCGDEHSAVVTGNNKLYMFGSNNWGQLGLGSKSAISKPTCVKALKPEKVKLAACGRNHTLVSTEGGNVYATGGNNEGQLGLGDTEERNTFHVISFFTSEHKIKQLSAGSNTSAALTEDGRLFMWGDNSEGQIGLKNVSNVCVPQQVTIGKPVSWISCGYYHSAFVTTDGELYVFGEPENGKLGLPNQLLGNHRTPQLVSEIPEKVIQVACGGEHTVVLTENAVYTFGLGQFGQLGLGTFLFETSEPKVIENIRDQTISYISCGENHTALITDIGLMYTFGDGRHGKLGLGLENFTNHFIPTLCSNFLRFIVKLVACGGCHMVVFAAPHRGVAKEIEFDEINDTCLSVATFLPYSSLTSGNVLQRTLSARMRRRERERSPDSFSMRRTLPPIEGTLGLSACFLPNSVFPRCSERNLQESVLSEQDLMQPEEPDYLLDEMTKEAEIDNSSTVESLGETTDILNMTHIMSLNSNEKSLKLSPVQKQKKQQTIGELTQDTALTENDDSDEYEEMSEMKEGKACKQHVSQGIFMTQPATTIEAFSDEEVGNDTGQVGPQADTDGEGLQKEVYRHENNNGVDQLDAKEIEKESDGGHSQKESEAEEIDSEKETKLAEIAGMKDLREREKSTKKMSPFFGNLPDRGMNTESEENKDFVKKRESCKQDVIFDSERESVEKPDSYMEGASESQQGIADGFQQPEAIEFSSGEKEDDEVETDQNIRYGRKLIEQGNEKETKPIISKSMAKYDFKCDRLSEIPEEKEGAEDSKGNGIEEQEVEANEENVKVHGGRKEKTEILSDDLTDKAEDHEFSKTEELKLEDVDEEINAENVESKKKTVGDDESVPTGYHSKTEGAERTNDDSSAETIEKKEKANLEERAICEYNENPKGYMLDDADSSSLEILENSETTPSKDMKKTKKIFLFKRVPSINQKIVKNNNEPLPEIKSIGDQIILKSDNKDADQNHMSQNHQNIPPTNTERRSKSCTIL

SEQ ID NO: 7016 - DNA, 2262 bp, Artificial Sequence
  derived and/or modified sequence
atgcgcgagcccgaagagttgatgccggactccggcgctgtgtttacctttggcaaatcaaagttcgcggaaaacaaccccggcaagttttggttcaaaaatgacgttcctgtccacctctcctgtggggatgaacattccgcggtggtcactggcaacaataagctgtatatgttcggcagtaacaattgggggcagctgggtcttggcagcaagtccgctatttctaaacctacttgtgtgaaagctctaaagcccgagaaggtcaagttagccgcctgtggtcgaaatcacaccttggtgtcaaccgagggcggcaacgtgtacgctaccggcgggaacaacgaggggcagcttggcctgggcgacacagaagagcgaaatacctttcatgtcatttcatttttcacatcggagcacaaaatcaagcagctgagcgccggatccaatacaagcgcagcgttaaccgaggatggccgactgtttatgtggggagataacagcgagggacaaattggattgaaaaacgtgagtaacgtctgcgtccctcagcaggtgactattggcaagcctgtgagctggatttcatgtgggtactaccatagtgcttttgtaactaccgacggggagttgtatgtatttggagagcccgaaaatggtaaattgggcctgcccaaccagctactgggcaatcacaggacgcctcagctggtttcagaaataccggaaaaagtaattcaagttgcttgtggcggcgagcacaccgtggtgcttactgaaaatgctgtgtatacttttggtctcgggcagtttggacagcttgggcttggaaccttcttgttcgaaactagtgaacctaaggtgatcgagaatatcagagaccagacaataagttatatttcttgcggcgaaaaccacactgctctgatcactgatatcggactgatgtatacatttggcgacggccggcacgggaaacttggcctgggtcttgagaacttcacgaaccacttcatccccacactctgctctaattttttgagattcattgtgaaacttgagcgatcacctgatagcttttccatgcgaagaacgctgcctcccattgaaggcactctcggtctatctgcatgcttcctccccaacagtgtgtttccgcgctgtagcgagcgtaacctgcaggaatcggtgcttagcgagcaggacttaatgcagcccgaagaaccagattatttgcttgacgagatgactaaggaggctgaaatcgacaatagcagcacagtggaatctttgggcgagaccactgatattcttaacatgactcacatcatgagtctcaatagtaatgagaagagcctgaaactgagtcctgtgcagaagcagaagaagcagcagaccataggagaacttactcaagacacagcactgaccgaaaacgatgacagcgacgaatatgaggagatgtcagagatgaaggagggcaaagcttgcaaacagcatgttagccaaggcattttcatgactcagcctgcaaccactatcgaagctttttccgacgaggaggtggagattcctgaggagaaagagggcgcagaagattccaagggcaacgggatagaggagcaggaagtggaggcaaacgaagaaaacgtaaaggtgcacggcggcagaaaagagaagactgaaattctgtccgacgatttgacagataaggccgaggaccatgagtttagcaagactgaagagctgaagctggaagatgtggacgaagaaatcaacgccgagaacgtcgagtccaagaagaagacagtgggagacgatgaatcggtgcccactggctaccatagcaagactgagggcgccgagcgcaccaacgacgactcctctgcagagacaatcgagaaaaaggaaaaggcgaatctcgaggagagggcaatctgtgagtataacgaaaatccaaaagggtacatgctggacgacgccgacagcagttctctggaaatcctggaaaacagtgaaaccacgccaagcaaggatatgaagaaaaccaagaagatcttcttattcaaaagagtgccatctattaaccagaagatcgtgaaaaacaacaacgagcccctgcctgaaattaaaagcatcggcgatcaaatcatccttaagagtgacaataaagacgccgatcaaaaccatatgtctcagaatcaccaaaatatccctcccacaaatacagagaggcggtccaagtcttgcacgatcctgtag

SEQ ID NO: 7017 - DNA, 2448 bp, Artificial Sequence
  derived and/or modified sequence
atgcgggagcctgaagaactgatgccagactcaggcgcagttttcacattcggcaagtccaaattcgccgaaaacaatccagggaagttttggttcaagaatgatgtgccagtgcacctatcatgcggtgatgagcacagcgctgtggtaactggcaacaataagctgtacatgtttggctctaataattgggggcaactaggcttggggtctaaaagtgcgataagcaaacccacttgcgtgaaagctctgaagcccgagaaggtgaagcttgccgcatgtggaaggaatcacaccctggtcagtaccgaaggtggtaacgtctatgccaccggcggcaataacgaagggcaattgggattaggtgatactgaggagagaaacaccttccatgttattagctttttcacttctgagcacaaaattaaacagttatcagcagggtcaaacacctccgccgctttgacagaagacggcaggctgtttatgtggggggataacagtgaaggacaaattggtctcaaaaacgtgagtaatgtgtgcgtgccccagcaggttaccattggaaagcctgtttcatggatctcctgcggctactaccattcagccttcgttacaacagacggagagctttacgtgttcggggagccagagaacgggaagctgggcctgcctaaccagttgctaggtaatcaccggactcctcagctagtcagtgaaatacctgagaaagttattcaggtggcctgtgggggtgagcacaccgtggtgttgaccgagaacgctgtctacacctttgggctgggccagtttgggcagctgggactggggacattcctctttgaaacaagcgaacccaaagtaatcgaaaatattcgtgatcagacgatcagctacatctcctgcggggaaaatcatacagccctgattaccgatataggcctcatgtacacatttggcgatgggcgacatggaaaactgggccttggcctggaaaactttactaaccacttcattccaacactgtgttccaactttctccggttcatcgtgaaacttgtggcttgcgggggttgccacatggtagtgtttgccgctccccaccggggggtggccaaggagatcgagttcgatgagatcaatgacacttgcctcagcgtagcgacctttctgccctattcctcattaacaagcggtaacgtgctgcagagaaccttgagcgccagaatgcgccgtcgcgagagagaaaggtcaccagactcttttagtatgcgtagaaccctgccgcctatcgaggggactcttggcctgtcagcctgtttccttccaaattctgtattcccccgctgttccgagagaaaccttcaggagagcgtgctctcagagcaggatctcatgcagccggaggagcctgactacttgctcgacgagatgacaaaggaggccgagatagataactctagcacagtggagtcactgggagaaacaacagatattctaaacatgacccacattatgtcactaaacagtaatgaaaagtcactgaagttgtcgcctgtgcagaagcagaagaagcagcagaccatcggggaactgacacaggacacagcactgacagagaacgacgattcagacgagtatgaagaaatgagtgagatgaaagagggcaaggcttgcaagcaacacgtgtctcagggcattttcatgacacagccggccacaacaatcgaagctttttccgatgaggaagtagaaatccccgaagagaaggagggcgccgaggactccaagggcaatgggatagaggaacaagaagttgaagccaatgaggaaaacgtgaaagttcacggcggacgcaaggagaagacggagattctgtcagacgatctgaccgacaaagcagaggatcacgaattcagcaagactgaggagctgaagttggaggatgttgacgaagagattaacgccgagaatgtggaatctaagaaaaagacagtgggggacgatgagtctgtaccaaccgggtaccattctaagaccgagggagcagaaaggactaacgatgattctagcgctgagacgatcgagaaaaaagagaaagccaatctcgaagagcgcgccatctgtgagtacaatgagaatcccaagggatacatgcttgatgacgctgatagtagcagcctggagatcttagaaaattctgaaactaccccgtcgaaggatatgaagaaaacaaaaaaaatcttcctgttcaagcgggtcccttcgatcaatcagaagattgtgaaaaacaacaacgaacccctgccagagataaagagcataggagatcagatcattctcaaaagcgataataaggacgccgatcagaaccacatgagccagaaccatcagaatatccctccaacgaatactgaacgcagaagcaagtcatgtacgatattgtag

SEQ ID NO: 7018 - DNA, 2262 bp, Artificial Sequence
  derived and/or modified sequence
atgagggagcctgaggagctgatgccagattctggagctgtgttcaccttcggcaagagcaagtttgctgagaacaaccctgggaagttctggttcaagaatgatgtgcctgtgcacctgagctgtggagatgagcacagcgctgtggtgactggaaacaacaagctgtacatgtttggcagcaacaactggggccagctgggcctgggcagcaagagcgccatcagcaagcccacctgtgtgaaggccctgaagccagagaaggtgaagctggccgcctgtggcaggaaccacaccctggtgtccacagaaggaggaaatgtgtatgccactggaggcaacaatgaaggccagctgggcctgggggacacagaggagaggaacaccttccacgtgatctccttcttcaccagcgagcacaagatcaagcagctgtctgctggcagcaacaccagcgctgccctgacagaagatggccgcctcttcatgtggggagacaacagcgagggccagatcggcctgaagaatgtgtccaatgtgtgtgtgccccagcaggtgaccatcggcaagcctgtgtcctggatcagctgtggctactaccacagcgcctttgtgaccacagatggagagctgtatgtgtttggagagccagaaaatggcaagctgggcctgcccaaccagctgctgggcaaccacaggaccccccagctggtgtctgagatccctgagaaggtgatccaggtggcctgtggcggggagcacacagtggtgctgacagaaaatgctgtgtacaccttcggcctgggccagtttggccagctgggcctgggcaccttcctgtttgagaccagcgagcccaaggtgattgagaacatccgggaccagaccatctcctacatcagctgtggggagaaccacacagccctgatcacagacatcggcctgatgtacacctttggagatggccgccacggcaagctgggcctgggcctggagaacttcaccaaccacttcatccccaccctgtgcagcaacttcctgcgcttcatcgtgaagctggagaggagcccagacagcttctccatgaggaggaccctgccccccatcgagggcaccctgggcctgagcgcctgcttcctgcccaacagcgtcttcccccgctgcagcgagaggaacctgcaggagagcgtgctgtctgagcaggacctgatgcagcctgaggagccagactacctgctggatgagatgaccaaggaggccgagattgacaacagcagcacagtggagagcctgggggagaccacagacatcctgaacatgacccacatcatgagcctgaacagcaatgagaagagcctgaagctgagccctgtgcagaagcagaagaagcagcagaccatcggggagctgacccaggacacagccctgacagaaaatgatgacagtgatgaatatgaggagatgtctgagatgaaggagggcaaggcctgcaagcagcacgtgtcccagggcatcttcatgacccagcctgccaccaccatcgaggccttcagtgatgaggaggtggagatccctgaggagaaggagggcgctgaggacagcaaaggaaatggaattgaggagcaggaggtggaggccaatgaagaaaatgtgaaggtgcacggcggcaggaaggagaagacagagatcctgagtgatgacctgacagacaaggcagaagatcatgagttcagcaagacagaggagctgaagctggaggatgtggatgaggagatcaatgcagaaaatgtggagagcaagaagaagacagtgggagatgatgaatctgtgcccaccggctaccacagcaagacagagggcgctgagaggaccaatgatgacagcagcgctgagaccatcgagaagaaggagaaggccaacctggaggagcgggccatctgtgagtacaatgaaaaccccaagggctacatgctggatgatgctgacagcagcagcctggagatcctggagaacagcgagaccacccccagcaaggacatgaagaagaccaagaagatcttcctgttcaagagggtgcccagcatcaaccagaagatcgtgaagaacaacaatgagcccctgcctgagatcaagagcattggagaccagatcatcctgaagagtgacaacaaggatgctgaccagaaccacatgagccagaaccaccagaacatcccccccaccaacacagaaagaagaagcaagagctgcaccatcctgtag

SEQ ID NO: 7019 - DNA, 2448 bp, Artificial Sequence
  derived and/or modified sequence
atgagggagcctgaggagctgatgccagattctggagctgtgttcaccttcggcaagagcaagtttgctgagaacaaccctgggaagttctggttcaagaatgatgtgcctgtgcacctgagctgtggagatgagcacagcgctgtggtgactggaaacaacaagctgtacatgtttggcagcaacaactggggccagctgggcctgggcagcaagagcgccatcagcaagcccacctgtgtgaaggccctgaagccagagaaggtgaagctggccgcctgtggcaggaaccacaccctggtgtccacagaaggaggaaatgtgtatgccactggaggcaacaatgaaggccagctgggcctgggggacacagaggagaggaacaccttccacgtgatctccttcttcaccagcgagcacaagatcaagcagctgtctgctggcagcaacaccagcgctgccctgacagaagatggccgcctcttcatgtggggagacaacagcgagggccagatcggcctgaagaatgtgtccaatgtgtgtgtgccccagcaggtgaccatcggcaagcctgtgtcctggatcagctgtggctactaccacagcgcctttgtgaccacagatggagagctgtatgtgtttggagagccagaaaatggcaagctgggcctgcccaaccagctgctgggcaaccacaggaccccccagctggtgtctgagatccctgagaaggtgatccaggtggcctgtggcggggagcacacagtggtgctgacagaaaatgctgtgtacaccttcggcctgggccagtttggccagctgggcctgggcaccttcctgtttgagaccagcgagcccaaggtgattgagaacatccgggaccagaccatctcctacatcagctgtggggagaaccacacagccctgatcacagacatcggcctgatgtacacctttggagatggccgccacggcaagctgggcctgggcctggagaacttcaccaaccacttcatccccaccctgtgcagcaacttcctgcgcttcatcgtgaagctggtggcctgtggcggctgccacatggtggtgtttgctgccccccaccggggcgtggccaaggagattgaatttgatgagatcaatgacacctgcctgtctgtggccaccttcctgccctacagcagcctgaccagcggaaatgtgctgcagaggaccctgagcgccaggatgagaagaagagagcgggagaggagcccagacagcttctccatgaggaggaccctgccccccatcgagggcaccctgggcctgagcgcctgcttcctgcccaacagcgtcttcccccgctgcagcgagaggaacctgcaggagagcgtgctgtctgagcaggacctgatgcagcctgaggagccagactacctgctggatgagatgaccaaggaggccgagattgacaacagcagcacagtggagagcctgggggagaccacagacatcctgaacatgacccacatcatgagcctgaacagcaatgagaagagcctgaagctgagccctgtgcagaagcagaagaagcagcagaccatcggggagctgacccaggacacagccctgacagaaaatgatgacagtgatgaatatgaggagatgtctgagatgaaggagggcaaggcctgcaagcagcacgtgtcccagggcatcttcatgacccagcctgccaccaccatcgaggccttcagtgatgaggaggtggagatccctgaggagaaggagggcgctgaggacagcaaaggaaatggaattgaggagcaggaggtggaggccaatgaagaaaatgtgaaggtgcacggcggcaggaaggagaagacagagatcctgagtgatgacctgacagacaaggcagaagatcatgagttcagcaagacagaggagctgaagctggaggatgtggatgaggagatcaatgcagaaaatgtggagagcaagaagaagacagtgggagatgatgaatctgtgcccaccggctaccacagcaagacagagggcgctgagaggaccaatgatgacagcagcgctgagaccatcgagaagaaggagaaggccaacctggaggagcgggccatctgtgagtacaatgaaaaccccaagggctacatgctggatgatgctgacagcagcagcctggagatcctggagaacagcgagaccacccccagcaaggacatgaagaagaccaagaagatcttcctgttcaagagggtgcccagcatcaaccagaagatcgtgaagaacaacaatgagcccctgcctgagatcaagagcattggagaccagatcatcctgaagagtgacaacaaggatgctgaccagaaccacatgagccagaaccaccagaacatcccccccaccaacacagaaagaagaagcaagagctgcaccatcctgtag

SEQ ID NO: 7020 - DNA, 2262 bp, Artificial Sequence
  derived and/or modified sequence
atgcgggagcccgaggagctgatgcccgacagcggcgccgtgttcactttcggcaaatccaagtttgccgaaaacaatcctgggaagttctggtttaagaacgatgtcccagtgcacttgagctgtggcgacgaacatagtgccgtcgtaacaggcaacaataagctgtacatgtttggtagcaataactggggtcagctgggccttggatctaagagcgcaattagcaaaccaacctgtgtgaaggcccttaaacccgaaaaggtcaaacttgctgcgtgcggccgtaatcacacattagtgtctacagagggggggaacgtctacgcaacaggaggaaacaatgagggccaactgggactgggcgacaccgaggaacgaaacaccttccacgtaatctccttttttaccagcgagcacaagatcaaacaactgagtgcgggctccaatacatcagcagcacttaccgaggacggcaggctctttatgtggggggataactccgaaggtcagattgggctgaaaaatgtgagcaatgtctgtgtgcctcagcaggtcacaattggcaagccggtgtcctggatttcttgtggctactatcattccgctttcgtgacgaccgatggagagctttacgtgttcggggagcccgagaatggcaaacttggactgcccaaccagctgctaggcaatcatcggacgccacagctggtttcagaaattcctgagaaagtcatccaggttgcttgcggcggcgaacacaccgtcgtgcttacagagaatgcagtgtacactttcggtttaggacagtttggacaactgggattagggacgttcctctttgaaacatccgaacctaaggtaattgagaacatccgtgaccagaccatatcgtatatatcctgtggtgaaaaccataccgcgttgattacggacataggcctaatgtacacattcggagatggcagacacggaaagctgggactgggactggaaaacttcaccaatcatttcatccccacactttgcagcaacttcttgcgtttcattgtcaaactcgaacggtctcccgacagcttctccatgcgccgaaccctgccacccatcgaaggaacgttgggactgagcgcatgtttccttccaaatagtgtgtttccccggtgctcagaaagaaacctgcaagagtcagtgctctctgagcaagatctgatgcagccagaagagcccgattaccttctggacgagatgaccaaagaagccgaaatcgacaattctagcaccgtcgaaagcctcggcgagaccacggatattctcaatatgacccacatcatgagcttaaacagtaatgaaaaaagcctgaagctgagtcccgtccaaaaacagaaaaagcaacagacaatcggcgagctgacccaggacactgccctgaccgaaaatgacgacagcgatgaatacgaggagatgtctgaaatgaaagagggaaaagcgtgcaaacagcacgtgagtcagggaatttttatgactcaacctgcaaccaccatagaagccttttcagatgaagaggtggaaataccagaagaaaaggaaggagctgaggattcgaaggggaacggtatagaggaacaggaggtcgaagccaacgaggaaaacgtcaaagtgcacggcgggcgcaaggagaaaactgaaattctgtcagacgaccttaccgacaaggcggaggaccatgagtttagtaagacagaagaactcaaactagaggatgtagatgaagaaataaacgccgaaaatgttgaatccaagaaaaaaacagtgggcgacgacgagtctgtcccaacagggtatcattctaaaaccgaaggagcagaacgaactaatgacgattcctccgcagagaccatcgaaaagaaggagaaggccaacttagaagagcgggcaatctgcgaatacaatgaaaacccaaaagggtacatgctcgatgatgctgattcatcatccctggagatcctggagaattcggaaactacacccagcaaagatatgaagaagacaaagaagatcttcctgttcaagcgtgttcccagtattaatcaaaaaattgtgaagaataacaacgaacccctccccgagattaaaagtatcggggaccaaataattcttaaaagcgacaacaaagatgcggaccagaatcacatgagtcagaatcaccagaatattccccctaccaatacagagcgcagaagcaagtcttgtaccatcctgtag

SEQ ID NO: 7021 - DNA, 2448 bp, Artificial Sequence
  derived and/or modified sequence
atgcgggagcccgaggagctgatgcccgacagcggcgccgtgttcacgttcgggaaatccaagtttgcagaaaataaccccggtaaattttggttcaaaaatgatgtgcccgtccacttgtcctgtggggatgaacactcagcagtggtgacagggaacaacaaattgtacatgttcgggtctaataattggggtcaactagggttgggtagtaagagcgctatcagtaagccaacatgcgtcaaggcattaaaacccgagaaagttaagctggctgcctgtggccggaatcacacattggtgtctacagaggggggcaatgtctatgccaccggcggcaacaatgaggggcagctgggtctgggtgatactgaggagcgcaacaccttccatgtgatcagtttcttcaccagtgaacacaaaatcaaacagctgagcgccggcagcaacacgtccgcggcactaaccgaggacggtaggctgtttatgtggggggataacagcgaaggccagatcggccttaagaacgtctcaaacgtgtgtgtacctcagcaagtgacgattgggaagccagtgagctggataagttgcggctattaccattcagcattcgtgaccaccgatggggaactttatgtcttcggggagcccgagaacgggaaattgggtttgcccaatcagctcctaggcaaccatcgcaccccacagctggtgtctgaaattcccgagaaagtcatccaggtggcctgcgggggcgaacataccgtggtcctcacagagaatgccgtgtacaccttcggtctgggccaatttgggcagctgggactgggcacatttctgttcgaaactagtgagcctaaagtcatcgagaacatccgtgaccagaccatcagttatattagctgcggggagaaccataccgcactgatcactgatattggtctgatgtacacttttggggatggtaggcacggaaagctcgggctgggccttgagaactttactaatcacttcattccaaccttgtgtagcaactttctgagattcattgtgaaacttgtagcatgtggggggtgtcatatggttgttttcgcggctcctcatcggggagtcgctaaagagatcgaatttgacgaaatcaacgacacatgcctgtctgtcgccacatttttgccttacagcagcttaacttcaggaaacgtcctccaacgcaccctcagcgcgcggatgcggagacgggagcgggaaaggtctccggattcgtttagtatgcgacgcacactaccccccattgaggggacactcgggctgtccgcatgctttctccctaattcagtgttccctaggtgctcagaaagaaatctgcaggaaagcgttctttctgaacaagatctcatgcagccagaggaacctgactacctgctcgatgaaatgacaaaggaagccgagatcgacaattcttctacagtcgagtccctgggggaaactactgacatcctgaacatgactcatattatgagcctaaactctaacgagaagagcctgaaactcagcccagtccagaagcagaaaaagcagcagacaataggtgaactgactcaagacacagcccttacggagaatgatgatagcgacgagtatgaagaaatgtccgaaatgaaggaggggaaagcctgcaaacagcacgtgagtcagggcattttcatgacacagcctgccactactatcgaggcgttttcagacgaggaggtagaaatccctgaggaaaaggaaggagctgaagattccaaaggtaacgggatagaggagcaggaagtggaggctaatgaggaaaacgtgaaagtgcacggggggaggaaagaaaagacggaaatcctgtctgacgacctaactgacaaggcagaagatcacgagttctccaaaaccgaagagctaaaactggaggacgtagacgaggagattaacgccgaaaatgtagaatccaaaaaaaagaccgtgggggatgatgagtccgtgccgaccggctaccactctaagactgagggggctgaacgaaccaatgacgactctagcgcagagaccatcgagaaaaaggagaaagccaatctggaggagagggctatatgcgaatacaacgagaatcccaagggttatatgctcgatgatgcagatagtagcagcctggagattttggaaaacagtgaaaccaccccttctaaggacatgaaaaaaactaaaaaaattttcctgtttaaacgggtcccatctatcaaccagaagatcgtgaagaataataacgaaccgctccctgagatcaaatctataggggatcagattattctcaaaagcgataacaaggatgcggaccagaaccatatgtctcagaatcaccagaatatcccccccaccaatactgagagacgaagtaaaagctgcacaattctgtag

SEQ ID NO: 7022 - DNA, 2262 bp, Artificial Sequence
  derived and/or modified sequence
atgcgggagcctgaagagctcatgccagactctggcgcagttttcacatttggaaagtcaaagttcgcagaaaacaaccctggtaaattttggtttaagaatgacgtgcccgtgcatctgagctgtggggacgaacattcggccgtcgtcacaggtaataacaagttatatatgttcggttccaataattgggggcagttggggctgggaagcaagtccgccatctctaagcccacgtgcgtgaaagcattaaagcctgaaaaggtgaagcttgccgcttgtggccgaaaccatacgctggtgtctacggagggaggcaacgtctatgcaacaggagggaataacgagggccagttaggactgggggataccgaggagagaaatacatttcatgtcataagtttttttacaagtgaacacaagatcaagcagctcagtgctggttccaacacttcagctgcccttactgaggatggaaggttattcatgtggggagacaactcggaggggcagataggtctcaagaacgtgtcaaacgtgtgtgttccccagcaggtgaccatcggcaagcctgtgtcttggatctcatgcggctattaccacagcgcattcgttacgacagacggcgaactttacgtttttggcgagccagagaacggcaagcttggattgccaaatcagctgctcgggaaccaccggacgccccagctggtgtcggagatccctgaaaaagtcattcaagtggcatgcggtggcgaacacaccgtggtactgaccgaaaatgcagtctacaccttcggcttgggacagtttggccagctgggcctgggcactttccttttcgaaacgtccgaaccaaaagtgatcgaaaacatacgggaccagaccatctcttatatttcatgcggtgaaaatcatacagccctgataaccgacataggattgatgtatacattcggcgacggcaggcatgggaaactgggcctggggctggagaatttcaccaaccatttcatccccaccctatgctctaattttctgcggtttatcgtgaagctggagagaagccccgacagcttctctatgaggcgtacgttaccgccaatcgaaggtaccctgggtttgagtgcatgctttttgcccaattctgtcttcccacgttgttccgagaggaatcttcaagagtctgtcttgtcagaacaggatctgatgcagcccgaagagcccgactacctcttggacgagatgactaaagaggccgagattgacaatagttctactgtggagtctctaggagaaaccaccgacatcctgaacatgacccacataatgagtcttaacagcaacgaaaagtctttgaagcttagccccgtacaaaaacagaaaaaacaacagacaattggtgaactcacgcaggacacagccctcaccgagaatgacgattccgatgagtacgaggagatgtcagaaatgaaggaaggaaaggcctgtaaacagcacgtaagtcagggcatcttcatgactcagcccgcaaccactattgaagcattcagtgacgaggaggtcgagattcccgaggagaaagagggagcagaggactcaaaggggaacgggattgaagaacaggaggtggaagccaacgaagaaaatgtgaaagtgcatggaggccgtaaggaaaaaacggaaattttatccgatgacctcactgataaggcagaagatcacgaattcagcaaaacggaagagctcaaactcgaggacgtggacgaggagatcaatgccgagaatgtggaatcaaagaagaagactgtaggagacgacgaaagcgtccctaccggctaccattcaaagaccgaaggcgctgagcggaccaacgacgactccagcgcggagacgatcgaaaagaaggagaaagccaatctggaggagcgagcaatctgcgaatataacgaaaaccccaaggggtacatgctcgatgacgcagattcctcctccctcgagattctggagaacagcgagaccacacctagtaaggatatgaaaaaaaccaagaaaatcttcctgtttaagagagtcccatcaatcaaccagaaaatcgtcaaaaacaataacgaaccactgccagaaattaagagtatcggcgatcagatcatcctgaagtccgacaataaggacgcagatcaaaaccatatgagtcagaaccaccagaacattcctccgacaaacacagaaagaaggtcaaagtcctgtacgattctgtag

SEQ ID NO: 7023 - DNA, 2448 bp, Artificial Sequence
  derived and/or modified sequence
atgagggaaccagaggaattgatgcctgattctggcgcagtgttcactttcggcaaatctaagttcgctgagaacaatcccggaaagttctggtttaaaaacgacgtccccgtgcacctgagctgcggcgacgaacactcggcggttgtcacagggaataacaaactctatatgtttggaagtaataattggggccagctggggctgggctccaagtccgccatttccaagccaacctgcgtgaaagctctcaagccagaaaaagtgaagttggccgcttgtggcaggaatcatacgctggtgtccaccgaaggcggtaacgtgtacgcgacaggcggaaataatgagggccagctggggcttggggatacagaggagcggaatacctttcacgttatcagcttttttacctctgagcataagatcaagcagcttagcgccggttccaacacttcggccgctctgaccgaggatggcaggcttttcatgtggggggacaatagtgaagggcagattgggctgaaaaatgtgtcaaatgtatgcgtgccacagcaggtgactatagggaaaccagtctcctggatctcctgtggctactaccatagtgcattcgtcacaaccgacggtgagctatacgtttttggagaacccgagaatgggaagttgggacttcctaaccagcttttgggcaaccaccgtacccctcagctggtgtccgaaattcctgagaaagtgatacaggtcgcctgtggaggtgaacatactgtggtactgactgaaaatgcagtatacaccttcggtctcggacagttcggccagcttgggctcggcaccttcctgtttgaaacaagcgaacccaaggttatcgagaacattcgggaccagaccataagctatatatcttgtggggagaaccatacagcactaattacagacatcggcctgatgtatacttttggcgatggaaggcacggcaagctggggctcggcctggagaactttacaaaccacttcattcccaccctatgttctaatttcttgcgttttatcgtcaagttagtggcctgcggtgggtgtcatatggttgtgttcgcggctccccatcgaggtgtggccaaagagattgagtttgatgagatcaacgacacctgcttgtcagttgcgacatttctcccttactcctcactgacttcaggcaacgtactccagcgaactctgtctgctcggatgcggaggagagagcgggagcgatccccagattctttcagcatgcgcagaaccctaccccctattgagggtacactgggactgagtgcgtgttttttgcctaatagcgttttcccacgctgctccgaacgcaacctccaagaaagcgtactgagtgagcaggacctcatgcagcccgaagaaccagattacttgttggatgagatgacaaaggaggccgagatagataacagctcaactgtggagtccttgggggagacgacagatatcctgaatatgacgcacattatgtccctgaattcgaatgaaaagtcgctgaaactctcacctgtgcaaaagcaaaaaaaacaacagactatcggggagctcactcaagacacagccctgactgaaaacgatgatagtgatgagtatgaggaaatgtctgagatgaaagagggcaaagcctgcaaacagcacgtgtcacagggtatctttatgacccagcctgccaccaccattgaggccttctccgatgaagaagtggagattcccgaagagaaagaaggcgctgaggattctaagggcaacggtatcgaggagcaagaggtagaggccaatgaggaaaacgttaaggtgcacggcggaaggaaagagaagactgagattctgagtgacgacctcaccgataaagcggaggaccacgagtttagcaagactgaggagcttaaactggaggacgttgacgaagagattaacgcagaaaacgttgaatctaagaagaagaccgtcggtgatgacgagtcggtgcctactggataccattccaaaactgaaggggctgaacggactaacgatgactcgagtgcagagacgatcgagaagaaggaaaaagcaaacttagaggaacgcgctatctgtgaatacaacgagaacccaaagggctatatgctggatgatgcagattcttcctcgcttgagatccttgagaactccgagaccacgcccagtaaggacatgaaaaaaacaaaaaaaatctttttgtttaaacgggttccgagcatcaatcaaaagatcgttaagaacaataatgagcctttaccagaaattaagtcaatcggcgaccagatcattcttaagagcgataataaggatgcggaccagaaccacatgtcccagaatcaccagaacatcccccctactaacaccgagcgcagaagcaaatcttgtacaattctgtag

SEQ ID NO: 7024 - DNA, 2885 bp, Artificial Sequence
  derived and/or modified sequence
gtttgttgacttccgggagcgcggttgtagttgatctccggagtttcgccatgcggaacttgggggctttcgcggcccgcgtcggtgcggagtagctgctttagccccgaccaaaccgtcctctacagcctcctggccccggcgcaggctgcccgtactgcccgtggcatgagggagccggaagagctgatgcccgattcgggtgctgtgtttacatttgggaaaagtaaatttgctgaaaataatcccggtaaattctggtttaaaaatgatgtccctgtacatctttcatgtggagatgaacattctgctgttgttaccggaaataataaactttacatgtttggcagtaacaactggggtcagttaggattaggatcaaagtcagccatcagcaagccaacatgtgtcaaagctctaaaacctgaaaaagtgaaattagctgcctgtggaaggaaccacaccctggtgtcaacagaaggaggcaatgtatatgcaactggtggaaataatgaaggacagttggggcttggtgacaccgaagaaagaaacacttttcatgtaattagcttttttacatccgagcataagattaagcagctgtctgctggatctaatacttcagctgccctaactgaggatggaagactttttatgtggggtgacaattccgaagggcaaattggtttaaaaaatgtaagtaatgtctgtgtccctcagcaagtgaccattgggaaacctgtctcctggatctcttgtggatattaccattcagcttttgtaacaacagatggtgagctatatgtgtttggagaacctgagaatgggaagttaggtcttcccaatcagctcctgggcaatcacagaacaccccagctggtgtctgaaattccggagaaggtgatccaagtagcctgtggtggagagcatactgtggttctcacggagaatgctgtgtatacctttgggctgggacaatttggtcagctgggtcttggcacttttctttttgaaacttcagaacccaaagtcattgagaatattagggatcaaacaataagttatatttcttgtggagaaaatcacacagctttgataacagatatcggccttatgtatacttttggagatggtcgccacggaaaattaggacttggactggagaattttaccaatcacttcattcctactttgtgctctaattttttgaggtttatagttaaattggagaggtctccagattctttttcaatgaggagaacactacctccaatagaagggactcttggcctttctgcttgttttctccccaattcagtctttccacgatgttctgagagaaacctccaagagagtgtcttatctgaacaggacctcatgcagccagaggaaccagattatttgctagatgaaatgaccaaagaagcagagatagataattcttcaactgtagaaagccttggagaaactactgatatcttaaacatgacacacatcatgagcctgaattccaatgaaaagtcattaaaattatcaccagttcagaaacaaaagaaacaacaaacaattggggaactgacgcaggatacagctcttactgaaaacgatgatagtgatgaatatgaagaaatgtcagaaatgaaagaagggaaagcatgtaaacaacatgtgtcacaagggattttcatgacgcagccagctacgactatcgaagcattttcagatgaggaagtagagatcccagaggagaaggaaggagcagaggattcaaaaggaaatggaatagaggagcaagaggtagaagcaaatgaggaaaatgtgaaggtgcatggaggaagaaaggagaaaacagagatcctatcagatgaccttacagacaaagcagaggatcatgaattttctaaaactgaggaactaaaactagaagatgtggatgaggaaattaatgctgaaaatgtggaaagcaagaagaaaactgtgggagatgatgaaagtgttcctacaggttatcacagtaaaacagaaggagcagaaagaaccaatgatgatagctcagctgaaactattgaaaagaaagaaaaagccaacctagaggaacgggccatttgtgagtacaatgaaaacccaaaaggatacatgcttgatgatgcagatagcagttcattagaaatcctagaaaacagtgaaacaacaccaagcaaagacatgaaaaaaacaaagaagatttttctgttcaaaagagtcccctcaataaatcaaaagattgtcaagaataacaatgagccgctcccagagataaaatccataggagaccagatcattttaaaaagtgataataaagatgccgaccagaaccacatgagtcagaatcatcagaatatcccaccaacaaatacagagagaagatcaaaatcctgtacaatactataaatatatatttatgttttcacagtcaccaagtgtattgtaatgtatacttgaaaaatgttataacttatgaagtaaagtttctgatagtagtctttaaaagatataagacttaatatgttttattcagcttctataagtgtgaccagttttgatatttatttatgctaatatttttaacaagtcatttcaaaatatgtgtatctcaaattctccctaaagtgttgtggccttaactgttcagtattgcaataaaaaatatatttttatatgtggaaaattgaaataagatatttcctagtttttactaaacaattttacttctttataattttataaggcaatatttgcaatcttacgacactgtaacagtttttgatgtatttacaatttttacaaaactgaggtaaaattgtttataatgaacatattttaataaactatatctggtcagttcc

SEQ ID NO: 7025 - DNA, 2918 bp, Artificial Sequence
  derived and/or modified sequence
aagctccgcccccgttgcccgtagcggctgtttgttgacttccgggagcgcggttgtagttgatctccggagtttcgccatgcggaacttgggggctttcgcggcccgcgtcggtgcggagtagctgctttagccccgaccaaaccgtcctctacagcctcctggccccggcgcaggctgcccgtactgcccgtggcatgagggagccggaagagctgatgcccgattcgggtgctgtgtttacatttgggaaaagtaaatttgctgaaaataatcccggtaaattctggtttaaaaatgatgtccctgtacatctttcatgtggagatgaacattctgctgttgttaccggaaataataaactttacatgtttggcagtaacaactggggtcagttaggattaggatcaaagtcagccatcagcaagccaacatgtgtcaaagctctaaaacctgaaaaagtgaaattagctgcctgtggaaggaaccacaccctggtgtcaacagaaggaggcaatgtatatgcaactggtggaaataatgaaggacagttggggcttggtgacaccgaagaaagaaacacttttcatgtaattagcttttttacatccgagcataagattaagcagctgtctgctggatctaatacttcagctgccctaactgaggatggaagactttttatgtggggtgacaattccgaagggcaaattggtttaaaaaatgtaagtaatgtctgtgtccctcagcaagtgaccattgggaaacctgtctcctggatctcttgtggatattaccattcagcttttgtaacaacagatggtgagctatatgtgtttggagaacctgagaatgggaagttaggtcttcccaatcagctcctgggcaatcacagaacaccccagctggtgtctgaaattccggagaaggtgatccaagtagcctgtggtggagagcatactgtggttctcacggagaatgctgtgtatacctttgggctgggacaatttggtcagctgggtcttggcacttttctttttgaaacttcagaacccaaagtcattgagaatattagggatcaaacaataagttatatttcttgtggagaaaatcacacagctttgataacagatatcggccttatgtatacttttggagatggtcgccacggaaaattaggacttggactggagaattttaccaatcacttcattcctactttgtgctctaattttttgaggtttatagttaaattggttgcttgtggtggatgtcacatggtagtttttgctgctcctcatcgtggtgtggcaaaagaaattgaattcgatgaaataaatgatacttgcttatctgtggcgacttttctgccgtatagcagtttaacctcaggaaatgtactgcagaggactctatcagcacgtatgcggcgaagagagagggagaggtctccagattctttttcaatgaggagaacactacctccaatagaagggactcttggcctttctgcttgttttctccccaattcagtctttccacgatgttctgagagaaacctccaagagagtgtcttatctgaacaggacctcatgcagccagaggaaccagattatttgctagatgaaatgaccaaagaagcagagatagataattcttcaactgtagaaagccttggagaaactactgatatcttaaacatgacacacatcatgagcctgaattccaatgaaaagtcattaaaattatcaccagttcagaaacaaaagaaacaacaaacaattggggaactgacgcaggatacagctcttactgaaaacgatgatagtgatgaatatgaagaaatgtcagaaatgaaagaagggaaagcatgtaaacaacatgtgtcacaagggattttcatgacgcagccagctacgactatcgaagcattttcagatgaggaagtagagatcccagaggagaaggaaggagcagaggattcaaaaggaaatggaatagaggagcaagaggtagaagcaaatgaggaaaatgtgaaggtgcatggaggaagaaaggagaaaacagagatcctatcagatgaccttacagacaaagcagaggatcatgaattttctaaaactgaggaactaaaactagaagatgtggatgaggaaattaatgctgaaaatgtggaaagcaagaagaaaactgtgggagatgatgaaagtgttcctacaggttatcacagtaaaacagaaggagcagaaagaaccaatgatgatagctcagctgaaactattgaaaagaaagaaaaagccaacctagaggaacgggccatttgtgagtacaatgaaaacccaaaaggatacatgcttgatgatgcagatagcagttcattagaaatcctagaaaacagtgaaacaacaccaagcaaagacatgaaaaaaacaaagaagatttttctgttcaaaagagtcccctcaataaatcaaaagattgtcaagaataacaatgagccgctcccagagataaaatccataggagaccagatcattttaaaaagtgataataaagatgccgaccagaaccacatgagtcagaatcatcagaatatcccaccaacaaatacagagagaagatcaaaatcctgtacaatactataaatatatatttatgttttcacagtcaccaagtgtattgtaatgtatacttgaaaaatgttataacttatgaagtaaagtttctgatagtagtctttaaaagatataagacttaatatgttttattcagcttctataagtgtgaccagttttgatatttatttatgctaatatttttaacaagtcatttcaaaatatgtgtatctcaaattctccctaaagtgttgtggccttaactgttcagtattgcaataaaaaatatatttttatatgtgg

SEQ ID NO: 7026 - DNA, 2262 bp, Artificial Sequence
  derived and/or modified sequence
atgagagagcccgaggagctgatgcccgacagcggcgccgtgttcaccttcggcaagagcaagttcgccgagaacaaccccggcaagttctggttcaagaacgacgtgcccgtgcacctgagctgcggcgacgagcacagcgccgtggtgaccggcaacaacaagctgtacatgttcggcagcaacaactggggccagctgggcctgggcagcaagagcgccatcagcaagcccacctgcgtgaaggccctgaagcccgagaaggtgaagctggccgcctgcggcagaaaccacaccctggtgagcaccgagggcggcaacgtgtacgccaccggcggcaacaacgagggccagctgggcctgggcgacaccgaggagagaaacaccttccacgtgatcagcttcttcaccagcgagcacaagatcaagcagctgagcgccggcagcaacaccagcgccgccctgaccgaggacggcagactgttcatgtggggcgacaacagcgagggccagatcggcctgaagaacgtgagcaacgtgtgcgtgccccagcaggtgaccatcggcaagcccgtgagctggatcagctgcggctactaccacagcgccttcgtgaccaccgacggcgagctgtacgtgttcggcgagcccgagaacggcaagctgggcctgcccaaccagctgctgggcaaccacagaaccccccagctggtgagcgagatccccgagaaggtgatccaggtggcctgcggcggcgagcacaccgtggtgctgaccgagaacgccgtgtacaccttcggcctgggccagttcggccagctgggcctgggcaccttcctgttcgagaccagcgagcccaaggtgatcgagaacatcagagaccagaccatcagctacatcagctgcggcgagaaccacaccgccctgatcaccgacatcggcctgatgtacaccttcggcgacggcagacacggcaagctgggcctgggcctggagaacttcaccaaccacttcatccccaccctgtgcagcaacttcctgagattcatcgtgaagctggagagaagccccgacagcttcagcatgagaagaaccctgccccccatcgagggcaccctgggcctgagcgcctgcttcctgcccaacagcgtgttccccagatgcagcgagagaaacctgcaggagagcgtgctgagcgagcaggacctgatgcagcccgaggagcccgactacctgctggacgagatgaccaaggaggccgagatcgacaacagcagcaccgtggagagcctgggcgagaccaccgacatcctgaacatgacccacatcatgagcctgaacagcaacgagaagagcctgaagctgagccccgtgcagaagcagaagaagcagcagaccatcggcgagctgacccaggacaccgccctgaccgagaacgacgacagcgacgagtacgaggagatgagcgagatgaaggagggcaaggcctgcaagcagcacgtgagccagggcatcttcatgacccagcccgccaccaccatcgaggccttcagcgacgaggaggtggagatccccgaggagaaggagggcgccgaggacagcaagggcaacggcatcgaggagcaggaggtggaggccaacgaggagaacgtgaaggtgcacggcggcagaaaggagaagaccgagatcctgagcgacgacctgaccgacaaggccgaggaccacgagttcagcaagaccgaggagctgaagctggaggacgtggacgaggagatcaacgccgagaacgtggagagcaagaagaagaccgtgggcgacgacgagagcgtgcccaccggctaccacagcaagaccgagggcgccgagagaaccaacgacgacagcagcgccgagaccatcgagaagaaggagaaggccaacctggaggagagagccatctgcgagtacaacgagaaccccaagggctacatgctggacgacgccgacagcagcagcctggagatcctggagaacagcgagaccacccccagcaaggacatgaagaagaccaagaagatcttcctgttcaagagagtgcccagcatcaaccagaagatcgtgaagaacaacaacgagcccctgcccgagatcaagagcatcggcgaccagatcatcctgaagagcgacaacaaggacgccgaccagaaccacatgagccagaaccaccagaacatcccccccaccaacaccgagagaagaagcaagagctgcaccatcctgtag

SEQ ID NO: 7027 - DNA, 2448 bp, Artificial Sequence
  derived and/or modified sequence
atgagagagcccgaggagctgatgcccgacagcggcgccgtgttcaccttcggcaagagcaagttcgccgagaacaaccccggcaagttctggttcaagaacgacgtgcccgtgcacctgagctgcggcgacgagcacagcgccgtggtgaccggcaacaacaagctgtacatgttcggcagcaacaactggggccagctgggcctgggcagcaagagcgccatcagcaagcccacctgcgtgaaggccctgaagcccgagaaggtgaagctggccgcctgcggcagaaaccacaccctggtgagcaccgagggcggcaacgtgtacgccaccggcggcaacaacgagggccagctgggcctgggcgacaccgaggagagaaacaccttccacgtgatcagcttcttcaccagcgagcacaagatcaagcagctgagcgccggcagcaacaccagcgccgccctgaccgaggacggcagactgttcatgtggggcgacaacagcgagggccagatcggcctgaagaacgtgagcaacgtgtgcgtgccccagcaggtgaccatcggcaagcccgtgagctggatcagctgcggctactaccacagcgccttcgtgaccaccgacggcgagctgtacgtgttcggcgagcccgagaacggcaagctgggcctgcccaaccagctgctgggcaaccacagaaccccccagctggtgagcgagatccccgagaaggtgatccaggtggcctgcggcggcgagcacaccgtggtgctgaccgagaacgccgtgtacaccttcggcctgggccagttcggccagctgggcctgggcaccttcctgttcgagaccagcgagcccaaggtgatcgagaacatcagagaccagaccatcagctacatcagctgcggcgagaaccacaccgccctgatcaccgacatcggcctgatgtacaccttcggcgacggcagacacggcaagctgggcctgggcctggagaacttcaccaaccacttcatccccaccctgtgcagcaacttcctgagattcatcgtgaagctggtggcctgcggcggctgccacatggtggtgttcgccgccccccacagaggcgtggccaaggagatcgagttcgacgagatcaacgacacctgcctgagcgtggccaccttcctgccctacagcagcctgaccagcggcaacgtgctgcagagaaccctgagcgccagaatgagaagaagagagagagagagaagccccgacagcttcagcatgagaagaaccctgccccccatcgagggcaccctgggcctgagcgcctgcttcctgcccaacagcgtgttccccagatgcagcgagagaaacctgcaggagagcgtgctgagcgagcaggacctgatgcagcccgaggagcccgactacctgctggacgagatgaccaaggaggccgagatcgacaacagcagcaccgtggagagcctgggcgagaccaccgacatcctgaacatgacccacatcatgagcctgaacagcaacgagaagagcctgaagctgagccccgtgcagaagcagaagaagcagcagaccatcggcgagctgacccaggacaccgccctgaccgagaacgacgacagcgacgagtacgaggagatgagcgagatgaaggagggcaaggcctgcaagcagcacgtgagccagggcatcttcatgacccagcccgccaccaccatcgaggccttcagcgacgaggaggtggagatccccgaggagaaggagggcgccgaggacagcaagggcaacggcatcgaggagcaggaggtggaggccaacgaggagaacgtgaaggtgcacggcggcagaaaggagaagaccgagatcctgagcgacgacctgaccgacaaggccgaggaccacgagttcagcaagaccgaggagctgaagctggaggacgtggacgaggagatcaacgccgagaacgtggagagcaagaagaagaccgtgggcgacgacgagagcgtgcccaccggctaccacagcaagaccgagggcgccgagagaaccaacgacgacagcagcgccgagaccatcgagaagaaggagaaggccaacctggaggagagagccatctgcgagtacaacgagaaccccaagggctacatgctggacgacgccgacagcagcagcctggagatcctggagaacagcgagaccacccccagcaaggacatgaagaagaccaagaagatcttcctgttcaagagagtgcccagcatcaaccagaagatcgtgaagaacaacaacgagcccctgcccgagatcaagagcatcggcgaccagatcatcctgaagagcgacaacaaggacgccgaccagaaccacatgagccagaaccaccagaacatcccccccaccaacaccgagagaagaagcaagagctgcaccatcctgtag

SEQ ID NO: 7028 - protein, 224 aa, Artificial Sequence
  derived and/or modified sequence
MSRKIEGFLLLLLFGYEATLGLSSTEDEGEDPWYQKACKCDCQGGPNALWSAGATSLDCIPECPYHKPLGFESGEVTPDQITCSNPEQYVGWYSSWTANKARLNSQGFGCAWLSKFQDSSQWLQIDLKEIKVISGILTQGRCDIDEWMTKYSVQYRTDERLNWIYYKDQTGNNRVFYGNSDRTSTVQNLLRPPIISRFIRLIPLGWHVRIAIRMELLECVSKCA

SEQ ID NO: 7029 - DNA, 675 bp, Artificial Sequence
  derived and/or modified sequence
atgagccgcaagatcgaaggattcttgctgcttttactgtttggctatgaggccaccctcgggctgtcctccaccgaagatgaaggggaagatccctggtaccagaaggcttgtaagtgtgactgtcagggaggccctaacgctctctggagcgccggagccacgagcctggattgcatccctgaatgcccatatcataaaccactcgggttcgagtccggggaggtgacaccggaccagatcacatgcagtaatcccgagcagtacgtgggttggtactcaagctggacagcgaacaaggcacgcctgaattcccaaggcttcgggtgcgcttggttgtccaagttccaggattcatcacagtggctccagattgacctcaaagaaatcaaggtgattagcggaattctgacccagggaagatgtgacatcgacgagtggatgacaaaatacagcgttcaatacaggacagatgagaggctgaattggatttattacaaagatcagacaggcaataatcgggtattctatggaaatagtgatcgtacctcaacagtgcagaacctgctgcgacccccgatcatttccaggttcatccggttaatccccctgggctggcatgtgagaattgcaattagaatggagttactggaatgcgtgtcaaaatgcgcgtag

SEQ ID NO: 7030 - DNA, 675 bp, Artificial Sequence
  derived and/or modified sequence
atgagcaggaagattgagggcttcctgctgctgctgctgtttggctatgaggccaccctgggcctgagcagcacagaagatgaaggagaggacccctggtaccagaaggcctgcaagtgtgactgccagggcggccccaatgccctgtggagcgctggggccaccagcctggactgcatccctgagtgcccctaccacaagcccctgggctttgaaagtggagaggtgaccccagaccagatcacctgcagcaaccctgagcagtatgtgggctggtacagctcctggacagccaacaaggcccggctgaacagccagggcttcggctgtgcctggctgagcaagttccaggacagcagccagtggctgcagattgacctgaaggagatcaaggtgatcagcggcatcctgacccagggccgctgtgacattgatgagtggatgaccaagtacagcgtgcagtacagaacagatgagcggctgaactggatctactacaaggaccagacaggcaacaacagagtcttctacggcaacagcgacaggaccagcacagtgcagaacctgctgcggccccccatcatcagccgcttcatccgcctcatccccctgggctggcacgtgcgcatcgccatccgcatggagctgctggagtgtgtgtccaaatgtgcctag

SEQ ID NO: 7031 - DNA, 675 bp, Artificial Sequence
  derived and/or modified sequence
atgagccggaagatcgagggcttcctgctgctgctgctgttcggctatgaagcaacccttggtctttcaagcacagaggatgaaggggaagatccatggtaccagaaagcgtgcaaatgtgattgtcaaggcggtcctaatgctctgtggagcgcgggggcgaccagcttggattgcatccctgagtgcccttatcacaaaccgttgggctttgaaagcggtgaagtgacgcccgatcagattacttgttccaatccagaacaatatgtaggttggtattcctcttggactgccaacaaagcacgccttaatagccaggggtttggctgcgcttggctttctaaatttcaggatagtagtcagtggctccagatcgatctcaaagaaattaaagtgattagtggtatattgactcagggaagatgcgatatcgacgagtggatgaccaagtactcagtgcagtaccgaaccgatgagcgtctgaattggatatactataaagaccaaacaggcaacaatcgcgtcttttatggcaatagcgacagaacttctaccgtgcagaacctgctgcgtccgccaattatatcacgctttatcagactaatacccctggggtggcacgtcagaattgccattcgcatggagttgttggaatgtgtcagtaaatgcgcttag

SEQ ID NO: 7032 - DNA, 675 bp, Artificial Sequence
  derived and/or modified sequence
atgtccagaaaaatcgagggtttcttgctactcctgctcttcggctacgaagcgacactgggtcttagctccacagaggacgagggagaggacccctggtaccaaaaagcgtgtaagtgcgactgtcaaggcggtccaaacgccctgtggtctgcaggggcaacttcactggactgcattcccgaatgtccctaccataagcccctgggctttgaaagcggggaggtgacacccgaccagattacctgctccaaccctgaacagtatgtggggtggtacagttcctggaccgccaataaggcccgactcaacagtcaaggatttggttgtgcttggttgtcaaaattccaggactcctctcaatggctccagatagatctgaaggagatcaaggtcattagcggaatcctgactcaagggagatgcgacatagatgaatggatgaccaagtattcagtgcagtaccgaaccgacgaacggctaaactggatctattataaagaccagacggggaataacagagttttctatgggaattctgatagaacttccactgtacaaaacctcctgcgacccccaattatcagcaggttcatcaggttaattccactggggtggcatgtgcgcatcgccattcgcatggagcttctagagtgcgtgtcgaaatgcgcttag

SEQ ID NO: 7033 - DNA, 672 bp, Artificial Sequence
  derived and/or modified sequence
atgtcgcggaaaatagaagggttccttctcctgcttctgtttggttatgaggcaaccctcgggttgtctagtaccgaggacgaaggtgaagatccttggtaccagaaggcttgcaagtgtgactgtcagggtggcccaaacgccctgtggtcagccggtgccacttccctcgattgtattcccgaatgtccataccataaacccctgggatttgaaagcggagaagttaccccagatcaaattacctgttcaaaccccgagcagtacgtgggttggtacagctcgtggactgccaacaaagcacgactgaactcccaaggattcggatgtgcgtggctgtcgaagttccaggattcctcccaatggttgcagatcgatttgaaagagattaaagtgatcagcgggattctgactcaaggtagatgtgatattgatgaatggatgaccaagtactccgtgcaatacagaactgacgaacgacttaactggatctactacaaggaccaaaccggaaataacagagtgttctacgggaactcagatagaactagcaccgtgcaaaacctgcttcgcccgcccatcatctctcgattcatcaggctcatcccactgggatggcatgtccggatagcaatccgcatggagcttctcgagtgtgtgagcaagtgtgcg

SEQ ID NO: 7034 - DNA, 672 bp, Artificial Sequence
  derived and/or modified sequence
atgtctaggaaaatcgagggattcttgttgctgttgctgttcggctatgaggctactttgggattgagttctaccgaggacgagggagaagacccctggtatcagaaggcatgtaagtgcgactgtcaaggaggtcccaatgccctgtggagcgctggcgctacatctctcgattgcatacccgagtgtccctatcacaagcccctgggcttcgaatccggagaggtgacccccgaccagattacttgctcaaaccccgagcaatatgtaggatggtattcttcttggacagccaacaaggctcgtctcaatagccaaggtttcggatgcgcttggctctctaaatttcaggactcctcccagtggctccagatcgatctgaaagagattaaggtgatttctggcatcttgacacagggaagatgcgacatcgacgagtggatgaccaaatatagtgttcaataccgcaccgatgagcgtctcaactggatctattacaaggatcagactggcaacaaccgtgtgttttatggcaatagcgatagaacctccacagtgcagaacctgttgagacctcccattatttcccgcttcatacgtctgatccccctgggttggcacgttcgcattgctatcaggatggagttgctcgaatgcgtctccaaatgcgca

SEQ ID NO: 7035 - DNA, 672 bp, Artificial Sequence
  derived and/or modified sequence
atgtcacggaagattgaggggtttctgttgctcttgttgttcggatacgaggcaacgctcgggctctcctctacggaggatgagggggaggacccctggtaccagaaagcctgtaagtgtgattgccaggggggcccaaacgcactgtggtcagcaggggccactagtctggactgtattccagagtgtccttaccacaagcccctgggctttgagtcgggagaagtcacccctgaccagattacttgctctaaccccgagcaatatgttgggtggtactccagctggaccgccaacaaggctagactgaactctcaggggttcgggtgcgcgtggttatcgaaattccaggattcttcacagtggctccagatcgacctgaaggaaattaaggtgatcagcgggatcttgactcagggacggtgtgacatcgacgaatggatgactaagtactctgttcagtaccgaacagatgagagattgaattggatatattacaaagatcagaccgggaataatagagttttttacggaaactctgaccgcactagcaccgtgcagaatctccttagacccccgatcatttctcgatttatacgactaatccccctgggatggcatgtgcgcattgccattaggatggagctactggaatgcgtgtcaaagtgtgct

SEQ ID NO: 7036 - DNA, 672 bp, Artificial Sequence
  derived and/or modified sequence
atgagtcggaaaattgagggatttctgctcctgcttttgttcggatacgaggccaccctggggctcagctcaactgaagatgagggcgaagacccttggtatcagaaagcatgtaagtgtgattgtcagggcggtcctaacgctctgtggtccgctggtgctacaagcctggattgcatcccagagtgtccctaccacaaacctctcggatttgagagtggggaagttacaccagatcagatcacttgttcaaaccctgagcagtatgtgggttggtactcttcttggacagcgaataaagcaagacttaatagccagggattcggctgcgcatggctcagtaaattccaagactcaagccagtggctccagatcgacctcaaagagattaaggtgataagcgggatcctgactcaaggccggtgtgatatcgatgagtggatgaccaaatattccgtgcaatacagaaccgacgaaaggctgaactggatctattacaaggatcagacaggcaacaatagagtgttttatggaaattcagaccggacgtccaccgtccagaatctcctgaggcctcctatcatcagccggttcattcgactgattcctctgggttggcatgtgagaatcgccatcaggatggaactgcttgagtgcgtctctaaatgcgca

SEQ ID NO: 7037 - DNA, 672 bp, Artificial Sequence
  derived and/or modified sequence
atgtctcggaagatcgaaggattcttgctgctccttctgtttggttacgaggcgactctcgggcttagctccactgaggacgaaggagaggatccgtggtaccagaaggcgtgcaagtgcgactgtcaaggcgggccaaacgcactgtggagcgcaggagccacctcactggactgtattccagaatgcccgtatcataaacctctggggtttgaaagtggcgaagtgaccccggatcaaatcacctgtagcaaccctgagcaatacgtgggttggtactcctcttggaccgcgaacaaagccagactcaattcacagggtttcggttgcgcctggttgagcaagttccaggactcatcccagtggttgcagatcgacttgaaggagataaaagtcatcagtggcatcctgactcaaggccgctgcgatatcgatgagtggatgacgaagtactcggtccagtaccgaacggatgaacggctgaattggatctactacaaagaccagaccggcaacaatagagtgttctacggaaactcagaccgcacctcgactgtccaaaacctgctgcggccgcccatcatttccaggttcatcaggctgataccactcgggtggcacgttcgcatcgctattcgtatggaactcctggagtgcgtgagcaagtgcgcc

SEQ ID NO: 7038 - DNA, 672 bp, Artificial Sequence
  derived and/or modified sequence
atgtcgagaaagattgaaggctttctgcttcttctcctgtttggatacgaagccactctgggactctcctcgaccgaagatgaaggggaggacccatggtatcagaaggcctgcaaatgtgattgtcagggcggccctaacgcactttggtccgcaggagctacttcccttgattgtattccagaatgtccttaccacaagccacttggttttgagagcggagaggtcaccccggaccaaattacttgttcaaacccagaacagtacgtgggttggtactcttcgtggactgcaaacaaggcccggctcaacagccagggattcggatgtgcctggctgtcgaagtttcaagattcgagccaatggctccaaatcgacctcaaagaaatcaaggtgatttctggaattctgactcaaggaaggtgtgatattgatgaatggatgaccaagtactccgtgcaataccggactgacgaaagacttaattggatctactacaaggaccaaaccggtaataaccgggtcttttacggaaattcggataggacctcaaccgtgcagaaccttctgcgcccgcctatcattagccggtttattcgcctgattcccctcggttggcacgtgcggatcgctattcggatggaattgctggaatgcgtttcaaagtgtgca

SEQ ID NO: 7039 - DNA, 672 bp, Artificial Sequence
  derived and/or modified sequence
atgtcaaggaagatagaaggcttcctgctgcttctcctgttcggttacgaagccactctgggcctctcgagcactgaggacgagggcgaggacccgtggtaccagaaagcctgtaagtgcgattgtcagggcggaccaaatgcgctctggtccgccggcgcgacctcactcgattgcatcccggaatgcccctaccataagccgctgggtttcgaatccggagaagtgacccctgaccagattacgtgctccaatccggagcaatacgttggatggtactcgtcatggaccgcgaacaaggccagactgaactcgcagggcttcggatgcgcgtggttgtcgaagtttcaagacagctcacagtggctgcagattgacctcaaggagataaaggtgatttcaggcatcctgacccaaggacggtgtgatatcgatgaatggatgaccaagtactctgtccagtaccgcaccgacgaacgcctgaactggatctactacaaggatcagaccggaaacaaccgggtgttctatggaaactcagatcgcacttcgacggtccagaatctgctccggccaccaatcattagccgctttatcaggctgatcccgctcggttggcacgtccgaatcgccatccgcatggagctgctggagtgtgtgtccaaatgtgca

SEQ ID NO: 7040 - DNA, 672 bp, Artificial Sequence
  derived and/or modified sequence
atgtcaaggaagatcgaaggctttctcctcctgctgctgttcggatatgaagctaccctgggtctttcctctacagaggatgaaggggaggacccatggtaccagaaagcatgtaaatgtgactgtcagggaggccccaacgctctgtggagcgccggagcgacttcactcgactgtatcccagagtgcccttaccataaaccactgggctttgagtcaggcgaggtgacaccagatcaaattacctgcagcaaccctgaacagtatgttggttggtacagcagttggacggcaaacaaggcccgactgaactcacagggcttcgggtgcgcatggctttccaagttccaagattcctcgcaatggctccagattgacctcaaagaaattaaagtgattagtggaattttaactcagggacgctgtgacattgatgaatggatgaccaagtactccgtgcagtacagaactgatgagcgcctgaattggatatactacaaggaccaaacaggaaataacagagtgttctatgggaactccgaccgaactagcacagttcagaatttgttgaggcctccaatcatctcccggttcatccgcctgatccctctagggtggcatgtgcgtatcgccattaggatggaactcctggagtgtgtgtctaagtgcgcc

SEQ ID NO: 7041 - DNA, 672 bp, Artificial Sequence
  derived and/or modified sequence
atgtccagaaagatcgaaggattcctgctgttgctgctcttcgggtacgaagcgactctcggactctcgtccactgaggacgaaggggaggacccttggtaccaaaaagcatgcaagtgtgattgtcaaggagggccgaacgcactctggtcagccggtgcaacctcgctggactgtattcctgaatgcccataccacaagccgctgggctttgagtctggagaggtgacccccgatcagattacttgttcgaacccagaacagtacgtgggctggtactcgtcatggacggccaataaggctcgcctgaattcccaagggttcggatgcgcgtggctgagcaaatttcaggactcgtcgcaatggctccaaattgatcttaaagagatcaaggtcatctcaggaatcctgacccaaggacggtgcgatatcgacgagtggatgaccaagtactcagtgcagtacaggacggacgagcgcctgaactggatatactacaaagaccagactggcaacaatcgggtcttttatggaaattctgatcgcacctcgactgtccagaaccttctgaggccgccgattatctctaggttcatccgcctgatcccgctgggatggcatgtgcggatcgccatcagaatggagctgctcgagtgcgtgagcaagtgcgct

SEQ ID NO: 7042 - DNA, 672 bp, Artificial Sequence
  derived and/or modified sequence
atgagtaggaagattgagggcttcctgttgcttttgctattcggctacgaagccaccctcgggttatccagcacagaagacgaaggcgaggatccctggtatcaaaaggcctgtaagtgtgattgccaaggcggcccaaacgcactttggagtgctggagccacatctctggattgtatccctgagtgtccttaccacaaacccctagggtttgaatcaggagaagtgactccggatcagatcacgtgctctaacccggaacagtacgttggttggtattcctcttggactgccaacaaagcacgactcaactcacaagggttcggatgcgcctggctgtctaagtttcaggattcctcacagtggctgcagatcgacctgaaggaaatcaaggtcattagcggaatactgactcaaggccggtgcgacattgatgagtggatgacgaagtactcagtacaatataggaccgatgagaggctgaattggatctactacaaagaccagacaggcaataaccgggtgttttatggcaacagtgataggacaagtaccgtccagaacctgcttcgaccgcccatcatctcacgcttcatccgcctcatcccgctgggctggcatgttaggattgccataagaatggaactcttggagtgtgtgagtaagtgtgcg

SEQ ID NO: 7043 - DNA, 672 bp, Artificial Sequence
  derived and/or modified sequence
atgtcacgcaagatcgaggggtttctgcttctgctcttgttcgggtacgaagctacactggggttgtctagtacagaagatgagggagaggatccatggtaccagaaggcatgtaaatgtgattgccagggcggtccaaacgctctctggagtgccggcgccacctcactggactgcattcccgagtgcccctatcacaagcctttaggctttgaaagcggcgaggtcaccccagatcagatcacctgctctaaccccgagcagtacgtcgggtggtattcctcttggacagcaaataaagcccgtcttaattctcaaggatttggttgcgcatggttgtccaagttccaggactcatcccagtggctgcagatcgatcttaaagagataaaagtcatctcaggaatcctcacacagggacgttgtgatatcgacgagtggatgaccaaatatagtgtacaatatcgtacagatgagcgcctgaattggatctactataaggaccaaacaggcaataatcgggtgttttacggcaactctgacaggacatctaccgtccagaacctgctgcgaccgcctattatctctaggtttattaggctcatcccactgggctggcacgttcggatcgccataaggatggaactgctggagtgtgtatcaaaatgtgca

SEQ ID NO: 7044 - DNA, 672 bp, Artificial Sequence
  derived and/or modified sequence
atgagcagaaagattgaaggattcttgctgttactgctgttcggttacgaggccaccttaggcttgtccagtacggaagacgagggcgaggacccatggtatcagaaggcctgtaagtgtgattgccaaggaggccccaacgccctgtggtccgctggagccacgagcctggactgtatcccagagtgcccctaccacaagccactcggctttgaatccggagaagtgactcccgatcagataacatgttccaatcccgagcagtatgtcggatggtattctagctggacagccaacaaggctcgattgaacagccaggggttcggttgcgcctggctgagcaaatttcaggactcttcacaatggttacagattgacttgaaagaaatcaaagtgatttctgggatcctgacccaaggccgatgtgatatcgacgagtggatgactaaatattccgtccagtatcgaacggatgaaagactcaactggatctattataaagaccagacgggcaacaacagagtcttctatgggaatagtgaccgaacgagcacagtgcagaacctgcttcggccccctatcatctctaggtttattaggctgatccctctcggatggcatgtaagaattgctataagaatggagctgcttgagtgtgtgagtaagtgcgct

SEQ ID NO: 7045 - DNA, 672 bp, Artificial Sequence
  derived and/or modified sequence
atgtcacgaaaaattgagggattcctcctgcttctcttattcgggtatgaagctacattaggactatcaagtactgaagatgaaggggaagatccctggtatcagaaagcttgtaagtgtgattgtcagggaggacccaacgctctttggtctgccggagccacatctctcgactgtattcccgaatgcccttaccataaaccacttggattcgaatctggggaagtcactcctgatcagatcacatgctccaaccctgaacaatatgtaggatggtattcttcctggactgctaataaagctaggctgaactctcaggggtttggatgcgcctggctctctaaatttcaggatagtagtcagtggctccaaattgatttgaaggaaataaaagtaatatctgggatcctcactcagggacgctgcgacatagatgaatggatgacaaaatactcagtccagtaccgaacagatgaacgcctaaactggatatattacaaagatcagacaggaaataatcgggtgttctatggaaacagtgaccggacttctactgtacagaacctgttaagaccaccaatcatatcgaggtttatcagactcatccctttggggtggcacgtccgaatagctataaggatggaattactcgaatgtgtatctaaatgcgct

SEQ ID NO: 7046 - DNA, 672 bp, Artificial Sequence
  derived and/or modified sequence
atgtctcgtaagatagagggttttttgcttctgctcctcttcggttatgaagctactctggggcttagttccacagaggatgaaggcgaagatccttggtaccagaaagcctgcaagtgcgactgtcaggggggcccaaatgcactgtggtcagctggcgctacatccctggactgtatccccgagtgtccttaccacaagcccctgggcttcgaaagcggtgaggtcacacctgatcagatcacctgcagtaatcccgagcagtatgtgggctggtactcctcctggaccgcaaacaaggctaggctcaacagccagggatttggctgcgcttggctcagcaaattccaggatagctcccagtggctgcagattgatctgaaggagattaaagttatctctggtatcctgacccagggcaggtgtgacattgatgaatggatgaccaagtatagtgtgcagtacaggaccgatgaaaggcttaactggatttactataaggatcagactggcaataaccgtgtgttctacgggaactccgatcgaaccagcactgtgcagaatctattaaggccccctattataagccgcttcatcagattgatccccctgggctggcatgtcagaatagccatccgaatggaattgctagaatgcgtgtctaagtgtgct

SEQ ID NO: 7047 - DNA, 672 bp, Artificial Sequence
  derived and/or modified sequence
atgtcgcgcaagatagagggatttctgctgcttcttctgttcggatatgaagctactctcggactctcctcgaccgaggatgagggggaagatccttggtaccagaaggcatgcaagtgcgattgccaaggaggcccgaacgccttgtggagcgccggtgccacgtcgctcgactgtattcctgaatgtccatatcacaaaccattgggctttgaatcaggagaagtgactccagaccagattacctgctcgaaccctgagcaatacgtcggatggtactcctcctggacggcgaacaaggccaggcttaattcgcagggattcgggtgcgcatggctgtctaagtttcaagactcgtcacagtggctccagatcgacctgaaggagatcaaagtgatctccggcatcctgacccagggacggtgtgacatcgacgagtggatgactaaatactcggtgcaatacaggacggatgagcggctgaactggatctactacaaagaccagactggtaacaatagagtgttctacggtaattccgataggacctctactgtgcaaaacctgctccggccccctataatctcaagatttatcagactcatcccgctgggctggcacgtgcgtattgcgatccgcatggagctgttggaatgtgtttccaagtgcgct

SEQ ID NO: 7048 - DNA, 672 bp, Artificial Sequence
  derived and/or modified sequence
atgtcacgaaagatcgagggctttcttttactgctgttattcgggtatgaggccacactgggcctgagctccaccgaggacgagggtgaggacccatggtatcagaaggcctgcaagtgcgactgtcagggcggtcctaacgcactatggtcggccggcgcaaccagtctcgattgcattcctgaatgcccttaccataagccactggggttcgagtcaggggaggtaactcctgatcagataacctgttccaatccggaacaatacgtcggctggtactcttcctggacagccaataaggccaggctgaatagccagggatttggctgcgcatggttatctaagttccaggactcctctcagtggctccaaatcgatctgaaggaaattaaggtaattagtggtatcttgacccaggggaggtgcgacattgacgagtggatgacgaagtattcggtacagtaccgcactgacgagcgacttaactggatctattacaaggatcagaccggaaataacagggtgttctacgggaattctgaccgaacttctactgttcagaaccttctccgaccgccaatcatttccaggttcattcgactaatccctcttggctggcatgtccggatcgctattagaatggaactgctcgagtgcgtcagcaagtgtgcc

SEQ ID NO: 7049 - DNA, 672 bp, Artificial Sequence
  derived and/or modified sequence
atgtcacgcaagattgaaggtttcctgcttctgttgttatttggctacgaggccactcttggtctgagcagcacagaagatgaaggagaagatccgtggtaccagaaggcttgtaaatgcgattgccagggaggtcctaacgcattgtggtctgcaggcgcgacgtctcttgattgtattccagagtgcccctaccataaaccactcggcttcgaatccggagaagtcacgccggaccagatcacctgcagcaatcctgagcaatacgtcggctggtatagcagttggacggcaaataaagcacgcttaaattcacaaggttttggttgtgcatggctttcaaagtttcaggacagctcccagtggttgcagattgatttgaaagagatcaaggtaattagcggtatacttacgcaaggcagatgtgatatcgatgagtggatgacaaaatatagcgtgcaataccggacggacgaaagattgaactggatctattataaggatcagacagggaataatagagtattctatggaaatagcgacagaacgtctacagtgcaaaatttgcttcgcccgccgataattagccgcttcatacgtcttattcctctaggatggcatgtacgtattgccatacgtatggaacttcttgagtgcgttagcaaatgcgca

SEQ ID NO: 7050 - DNA, 672 bp, Artificial Sequence
  derived and/or modified sequence
atgtcaagaaagatcgagggctttcttcttcttctgctgtttggatatgaagcaaccctgggactgtcatccaccgaagatgaaggggaagatccttggtaccaaaaggcatgtaagtgcgattgtcagggcggaccaaacgctttgtggtcagctggagcgaccagcctggactgtattccggagtgtccctaccataaaccacttggatttgagtcgggagaagtgacccctgatcaaattacgtgctcaaaccctgaacaatacgttggttggtactcgtcctggaccgcaaacaaggcacggctgaactcgcagggattcggttgtgcatggctgtccaaattccaggacagctcgcaatggctgcagattgatcttaaagaaatcaaagtgattagcgggatcctcactcaaggccgctgtgatatcgatgaatggatgacgaagtactcggtccagtacagaactgacgaaaggcttaactggatttactacaaggaccaaactggtaataaccgggtcttttacgggaactcggatcgcacttcgaccgtgcagaacctgcttcgccctcccatcatttcgcggttcatccggctgattcctcttgggtggcacgtgcggatcgcaatcaggatggagctgctcgaatgcgtgtctaaatgcgcg

SEQ ID NO: 7051 - DNA, 672 bp, Artificial Sequence
  derived and/or modified sequence
atgagtagaaagattgaaggattccttttattattgttattcggatatgaagctactcttgggttaagtagtacagaagatgaaggtgaagatccttggtatcaaaaggcatgcaaatgtgattgtcaaggagggcctaatgcattatggtcagctggagcaacttctttagattgtattccagaatgtccatatcataaacctttaggatttgaatcaggagaagtgactcctgatcaaattacatgtagtaatcctgaacagtatgttggttggtattcatcatggactgctaacaaagctagattaaattcacaagggtttggttgtgcttggttgtctaaatttcaagattcaagtcaatggttacaaattgacttaaaagaaattaaagttatttctggaattttaactcaaggaagatgtgatatcgatgaatggatgactaaatattcagttcaatatagaacagacgaaagacttaactggatttattataaagatcaaacaggtaataatcgtgtattttatggaaattctgatagaacatcaacagttcaaaatcttttacgacctccaataatttcaagatttattagattaatacctcttggatggcatgttagaattgcaattagaatggagcttcttgaatgtgtttcgaagtgtgct

SEQ ID NO: 7052 - DNA, 672 bp, Artificial Sequence
  derived and/or modified sequence
atgagcagaaagattgaaggctttttgctcctcctgctgttcgggtacgaagcaactctgggactttcgtcgactgaggacgaaggtgaagatccatggtaccaaaaggcttgtaaatgtgattgtcagggcggacctaatgcactgtggtcggccggggcaacgtcgctggattgtattccggaatgcccttaccataagcctcttggatttgaatccggagaggtgaccccggaccagatcacctgcagcaacccagaacaatacgtgggctggtactcgtcttggactgccaacaaggcaagactcaattcccagggtttcgggtgtgcatggcttagcaaatttcaggactcgagccaatggctgcaaattgatctgaaggagattaaggtgatttccggcattcttactcaagggcgctgtgacattgatgagtggatgactaagtacagcgtgcaataccgaactgacgaaagactgaattggatttactacaaggatcagactggaaataaccgagtgttttacggaaactccgataggaccagcacggtgcaaaatctgttgcgacctcccatcatcagccgtttcatccgccttattccactgggttggcatgttagaatcgcaattcgtatggaactgttggaatgcgtttcaaaatgcgca

SEQ ID NO: 7053 - DNA, 672 bp, Artificial Sequence
  derived and/or modified sequence
atgtcccgtaagatcgaggggttcctcctgttgctgctctttggctacgaagccaccttgggactgtcgtccaccgaagatgaaggggaggatccgtggtaccagaaggcttgtaagtgcgactgccaaggcggacctaatgctctgtggagcgccggagctacctcattggactgcatcccggagtgtccttaccacaagccactggggttcgagtcgggagaggtgactccagatcagattacctgctcaaacccagaacaatacgtgggatggtactcgtcatggactgcgaataaggcccggctcaactcccagggattcggatgcgcttggctgtcgaagttccaggactcctcgcagtggttgcagatcgatcttaaagagatcaaggtcatttcaggaatcctgacccagggaaggtgcgacatcgatgaatggatgacgaaatactccgtgcaataccggaccgacgaaagactgaactggatctactataaagaccagaccggaaataaccgggtgttctacggaaacagcgaccgcactagcaccgttcaaaacttgctcaggccgccaatcatctcaagatttatccgcctgatcccgctcggctggcacgtgcgcatcgccattcggatggaactgctggaatgcgtgtccaaatgcgcg

SEQ ID NO: 7054 - DNA, 672 bp, Artificial Sequence
  derived and/or modified sequence
atgagccgtaaaattgaagggttcctgttattgctgctgttcggttatgaggcaacactggggctgagtagcaccgaagacgagggagaagacccctggtatcagaaggcttgtaaatgtgactgtcagggcggtcctaatgccctgtggagtgcaggcgccacttctttggactgtataccagagtgcccatatcataagccccttgggttcgagtccggcgaagtgacaccagaccagattacgtgttcaaaccccgaacagtatgtgggatggtactcatcctggactgcaaacaaggcacgacttaattctcagggtttcggctgcgcatggctctcaaagtttcaagattcctctcagtggctacagatcgacctgaaagaaatcaaagttattagtggaattttgacccagggaagatgcgacatcgatgaatggatgaccaagtacagcgtgcagtatcggacggacgagagacttaattggatctattataaggatcagaccggaaataatagagtgttttacggcaattctgataggacgagcactgttcagaacctgctgcgtccacccataatctcacgatttatccggctgatacctttaggctggcacgtcaggatcgctattaggatggaactcctggagtgtgtgtcaaagtgcgcc

SEQ ID NO: 7055 - DNA, 672 bp, Artificial Sequence
  derived and/or modified sequence
atgtcaagaaagattgaaggttttcttctccttcttctgttcgggtacgaggctacgcttggactgagctccactgaagatgagggtgaagatccttggtaccaaaaggcatgtaagtgcgactgtcagggaggaccaaacgcactgtggtcggcgggcgccaccagcctggactgcattcctgaatgtccataccataaaccccttgggtttgagtcgggtgaagtcactcctgatcagataacctgttcaaaccctgagcaatacgtgggttggtactcgtcgtggaccgcaaacaaggccagactcaattcccaaggatttggttgcgcatggttgtccaagtttcaagattctagtcaatggctgcagattgacctgaaggagattaaggtgattagcggtatcctcacgcaaggcagatgtgatatcgatgagtggatgactaagtacagcgtacaatacagaaccgatgaaagactgaattggatctactataaggaccagaccggcaataaccgagtgttctatggaaattcggatcggaccagcaccgtgcagaacctgttgcgtccccccataatcagcagattcatccggctcatccctcttggctggcacgtgcggattgccatacgaatggaactgcttgagtgcgtgtcaaaatgtgcc

SEQ ID NO: 7056 - DNA, 672 bp, Artificial Sequence
  derived and/or modified sequence
atgagtagaaaaattgaagggttcctgctgctcctcttgtttgggtacgaggccactcttggtctcagctccacggaggacgagggggaagacccctggtaccagaaggcctgcaagtgcgactgtcagggaggtccgaatgccctgtggtccgccggcgcaacctctctggattgcattcctgagtgcccgtatcataagcccctgggatttgagtccggcgaggtaaccccagaccagattacatgctcaaaccctgagcagtatgtgggttggtacagttcctggaccgccaacaaagcccgcttgaactcgcaggggtttggctgtgcctggctgtccaagtttcaggattcgagccagtggctgcagattgatcttaaagagataaaggtgattagcgggatcctaacacaaggacgctgtgacatcgatgaatggatgacaaaatactccgtgcagtacaggacagacgaacggttaaattggatatattataaagaccagaccggcaataaccgagtgttttatgggaacagcgaccgaacaagcaccgtccagaacctgcttagaccaccgatcatctcaaggtttatccggctcatccccctgggatggcatgtccggatcgccattcggatggagcttctggaatgtgtgtctaagtgtgct

SEQ ID NO: 7057 - DNA, 672 bp, Artificial Sequence
  derived and/or modified sequence
atgagcaggaagattgaaggttttcttctgctcctgctgtttggttacgaggcaaccctcggtctttcgagtaccgaggacgagggcgaagatccgtggtaccagaaagcctgcaagtgcgactgtcaaggcggtccgaacgccctttggtcggcaggcgcgacttcactggattgcatcccagagtgtccttaccacaaaccactgggtttcgaatcgggggaggtgactcctgaccagatcacctgttcgaaccctgaacaatatgtgggatggtacagctcatggacggcaaacaaggccagactgaactcccaaggttttggttgtgcatggctttccaaatttcaagatagctcccaatggctgcagattgatctgaaggaaatcaaggtcatctccggaatactcactcaaggtcggtgtgatattgatgaatggatgaccaaatactcggtccagtaccggaccgatgaaagattgaactggatttactacaaagaccagaccggtaataacagagtgttttatggaaattcggataggacgtcaaccgtgcaaaacctccttagaccgcctatcatttcgaggtttattcgcctgattccccttgggtggcatgtccgtatagcaattaggatggaacttcttgaatgcgtgtcgaaatgtgca

SEQ ID NO: 7058 - DNA, 672 bp, Artificial Sequence
  derived and/or modified sequence
atgtctcgcaaaatagagggctttcttcttctcttgctcttcggctacgaagctactctgggtttgtcttcaacagaggacgaaggcgaggatccctggtatcagaaagcctgtaagtgcgattgtcagggtggacccaacgctctttggtcggccggggcaacgtcgctggactgcatcccagagtgcccttatcacaaacctctgggattcgaaagtggtgaggtaacccctgatcagatcacctgttctaatcctgagcagtacgtgggatggtattcctcatggaccgcaaacaaggccaggctcaactcacagggctttggttgtgcgtggctgtcaaagttccaggactccagccagtggttgcagatcgatctgaaagagattaaagtcatcagcgggattctgacccagggcagatgtgatatcgatgaatggatgaccaaatatagcgtgcagtaccggacagacgaacgtttaaactggatatactataaagaccagacagggaataacagggtcttctatggaaactccgataggacctcaaccgtgcagaatctgcttagacccccaattatatcccgttttatcagactcattccactcggatggcacgtgcgcatagcaataagaatggagttgcttgagtgcgtgagtaaatgcgct

SEQ ID NO: 7059 - DNA, 672 bp, Artificial Sequence
  derived and/or modified sequence
atgtcacgcaagatcgaggggtttctgctgctcctgctgttcggatatgaggctaccctcggtttgagcagcactgaagatgaaggcgaggacccttggtaccagaaggcatgtaagtgtgattgccaaggtggaccgaacgctctctggtccgcgggagcaacttcgctggactgcattcctgagtgcccctatcacaagccacttggattcgaatcgggagaagtgacgccggaccaaattacctgctcgaatccagagcagtacgtaggctggtacagcagttggaccgccaacaaggcccggctgaactcacaaggattcgggtgcgcctggctttcaaagttccaggacagctcgcagtggcttcaaattgacctgaaagaaatcaaagtgatcagcggcatcctgacccagggtcgctgcgatatcgatgaatggatgaccaagtattcagtccaataccgaaccgacgagcggctgaattggatctactataaagaccagacgggcaacaacagggtgttctacggtaactcagaccggacttccactgtccaaaacctgctgcgccctcctattatctcacgcttcatcagactcattccattgggctggcatgtgcgcatcgccatcaggatggagctcctggaatgtgtctcgaagtgcgct

SEQ ID NO: 7060 - DNA, 672 bp, Artificial Sequence
  derived and/or modified sequence
atgtcccggaagattgagggcttcctgctcctcctgctgttcggatacgaagcaacactgggcctgagcagcacagaagacgaaggcgaggacccctggtatcagaaagcctgcaagtgtgattgtcagggaggacccaacgcactgtggagcgccggcgctacctctctcgactgcatcccggagtgtccataccataagccgcttggcttcgagtccggggaggttaccccagaccagattacttgctctaaccccgagcagtatgtggggtggtacagcagttggaccgcaaataaggcacgcctcaattcccagggttttggatgtgcctggctgtccaaattccaggactcctcacagtggcttcagatagatctgaaagagataaaggtgataagcggcatccttacccaaggcaggtgcgatatcgacgagtggatgaccaagtacagtgtgcaatataggaccgatgaacgattgaattggatctattacaaagaccaaacggggaacaaccgggtgttctacggaaactcagatcgcaccagcacagtgcagaatttgctccgccctcctataatttccagatttatccgccttatccctctgggctggcacgtaaggatcgcaattcgcatggagctcctggaatgcgtttcaaagtgcgct

SEQ ID NO: 7061 - DNA, 672 bp, Artificial Sequence
  derived and/or modified sequence
atgagccggaagatcgaaggttttctcctcctgctcctgttcggctacgaagccactctgggactgagcagcacggaggacgaaggtgaggacccctggtaccagaaggcctgcaagtgtgattgtcaaggaggcccgaatgcactctggtcagccggcgccacgtccctggattgtatcccagaatgcccataccacaaacctcttggcttcgaatccggagaagtgaccccggaccagatcacttgttccaatccggagcaatatgtcggctggtactccagctggactgccaacaaagctcggctgaatagccaaggcttcggctgcgcttggctttcaaagtttcaagattcgtcccagtggctgcaaatcgacctcaaggagatcaaggtcatctccggcattctgacccagggaagatgcgatatcgacgagtggatgaccaagtactcggttcagtacaggactgatgagcgcctcaattggatctactacaaggaccaaaccggaaacaatcgggtgttctacggaaattccgacaggacttcaacggtccagaacctcttgcggccacctatcatctcgcgctttatccgcctcatcccactcggatggcacgtgagaattgccattagaatggaattgctcgagtgcgtgtcgaaatgtgcg

SEQ ID NO: 7062 - DNA, 672 bp, Artificial Sequence
  derived and/or modified sequence
atgtcaagaaagattgaaggcttcctccttctcctcctatttggatatgaagcaacattagggctgtcatctactgaggacgagggggaagatccatggtatcaaaaggcttgcaaatgcgattgccagggaggacccaatgctctatggtccgctggtgctacatcactggattgtatacctgaatgtccttatcataaacctctgggttttgagtctggagaagttaccccagaccagattacctgcagcaacccggagcagtatgtcggttggtactcttcttggactgccaataaggcccgacttaattcacaaggattcgggtgcgcatggctttctaaattccaagacagcagccaatggttgcaaatcgatcttaaggaaataaaagttattagtggaatattaactcaaggtagatgtgacattgatgaatggatgaccaaatattccgtccagtacaggaccgatgaacgattgaactggatctactacaaggatcaaaccggtaacaatagagttttttacggtaatagtgatcgcacaagtacggtacaaaatctacttaggcctccgattatttcaaggttcattcgactcatccctcttggatggcatgttaggatcgctatcagaatggagcttttggagtgcgtttctaagtgcgct

SEQ ID NO: 7063 - DNA, 672 bp, Artificial Sequence
  derived and/or modified sequence
atgtcgcgaaaaatagaaggttttctactattattactatttggttatgaagcgacgttaggtctatcgtcgacggaagatgaaggtgaagatccgtggtatcaaaaagcgtgtaaatgtgattgtcaaggtggtccgaatgcgttatggtcggcgggtgcgacgtcgttagattgtataccggaatgtccgtatcataaaccgctaggttttgaatcgggtgaagttacgccggatcaaataacgtgttcgaatccggaacaatatgttggttggtattcgtcgtggacggcgaataaagcgcgtttaaattcgcaaggttttggttgtgcgtggctatcgaaatttcaagattcgtcgcaatggttacaaatagatctaaaagaaataaaagtaatatcgggtatactaacgcaaggtcgatgtgatatagatgaatggatgacgaaatattcggtacaatatcgtacggatgaacgtttaaattggatatattataaagatcaaacgggtaataatcgagtattttatggtaattcggatcgaacgtcgacggtacaaaatctactacgtccgccgataatatcgcgatttatacgattaataccgctaggttggcatgttcgtatagcgatacgaatggaactattagaatgtgtatcgaaatgtgcg

SEQ ID NO: 7064 - DNA, 672 bp, Artificial Sequence
  derived and/or modified sequence
atgtctaggaagatcgagggtttcttgctcctcctcttatttggctatgaggcaactttgggtttgtcatcaactgaggatgaaggggaggatccttggtatcagaaggcctgcaagtgcgactgccagggaggaccaaatgctctgtggtctgccggtgccacttcactggattgcatcccagaatgtccttatcacaaaccattggggtttgagtccggcgaggtcacaccggaccagattacatgctcgaacccagagcagtacgtaggctggtacagcagctggacagcaaacaaagctcgtctcaactctcaaggtttcgggtgcgcttggctgtccaagttccaggacagctctcagtggctacagattgacctcaaagagattaaggtcattagcgggatcttaacccagggacgctgcgatatagatgaatggatgacgaaatatagtgtgcagtaccgcaccgacgagagattgaactggatatactataaggaccagactggtaataaccgggtgttttatggaaactcggatcgtacgtctacagtgcagaacctgctacgcccccctattatatctaggttcatccgactgatcccattgggttggcacgttaggattgcaatccggatggagctgttggagtgcgtcagcaaatgtgct

SEQ ID NO: 7065 - DNA, 672 bp, Artificial Sequence
  derived and/or modified sequence
atgtcacggaaaattgagggattcctgctgcttcttctcttcggatacgaggcgaccctgggattgtcatcgacggaagatgagggagaagatccctggtaccagaaggcgtgtaaatgtgattgtcaaggtggtccgaacgctctttggtcggccggcgcaacctccctggattgcatccctgaatgtccatatcataagccactgggcttcgaaagtggtgaagtcacccctgatcagattacttgttccaatccagagcagtatgtcggttggtacagctcctggaccgcaaacaaggccaggctcaactcccagggatttggatgcgcatggctttccaagttccaggattcgtcgcaatggctgcagattgacctgaaggagattaaggtgatatccgggatactcacccagggtcggtgtgacattgacgagtggatgacgaagtacagcgtgcagtacagaaccgacgaacgcttgaactggatctattacaaagatcaaacgggtaacaatcgcgtcttttacggaaacagcgatagaacctcaaccgtccagaacctgctcagaccgccaattatctcacgttttatcaggttgattcctctgggctggcatgtcaggattgcaataaggatggaacttcttgaatgcgtgtcgaagtgtgca

SEQ ID NO: 7066 - DNA, 672 bp, Artificial Sequence
  derived and/or modified sequence
atgagccgtaagatagagggatttctgctcctgctactgtttggctacgaggctacattgggactctcctcaaccgaggatgagggggaggatccatggtaccagaaagcatgtaagtgcgattgccagggaggtccgaacgccctatggtccgcgggcgcaacatcactcgactgtataccagagtgtccttatcataagccccttgggtttgaaagcggagaggtgacccccgaccagattacctgtagcaaccccgaacagtacgtgggctggtacagctcatggactgctaataaagctcgcctcaattcacaggggttcggttgtgcttggcttagcaagtttcaggattcctcccaatggctgcagatagatcttaaggagataaaggtcattagtggtattctaacccaaggtagatgcgatatcgacgaatggatgacgaaatattcagtccaatatagaaccgacgagcgactgaactggatttattataaggaccagacgggtaacaatagggtattctacggcaactccgacagaactagtaccgtgcagaacctcctcagaccccccattattagtcggttcatccggttgatcccactgggatggcatgtccggatcgccatccgtatggaactgctcgagtgcgtcagcaaatgtgca

SEQ ID NO: 7067 - DNA, 672 bp, Artificial Sequence
  derived and/or modified sequence
atgtcacgcaaaattgagggtttcttgctcctcctgctgttcgggtacgaagcaacccttggactgagctctactgaagatgaaggggaggacccctggtaccagaaggcgtgcaagtgcgactgccagggcggaccaaacgccctttggagcgcaggagctacctccctggactgtatcccagagtgcccgtaccataagccattgggcttcgagtctggcgaggtgaccccggaccaaattacttgttccaatccagaacagtacgttgggtggtattcatcgtggaccgccaataaagcccgcttgaactcgcaaggattcggatgtgcctggctgagcaaatttcaggatagcagccagtggctgcagatcgatctcaaagagattaaggtgatctcagggattcttactcaaggtcgctgcgacattgacgagtggatgaccaagtactccgtgcagtaccggaccgacgaacgcctgaattggatctactacaaggatcagactgggaacaaccgggttttctacggaaactcggatagaacttcaaccgtccaaaacctccttcgccccccaatcatcagccgcttcatccgactgatccctctgggatggcacgtcaggatagctatcaggatggaacttctggaatgtgtgtccaagtgcgca

SEQ ID NO: 7068 - DNA, 672 bp, Artificial Sequence
  derived and/or modified sequence
atgtcgcggaagattgaggggttcttgctccttcttcttttcgggtacgaagcaacccttggtctttcctccactgaggatgaaggagaggatccatggtatcaaaaggcctgtaagtgcgactgccaaggtggtccaaatgcgctttggtcagcaggtgcaactagccttgactgtattcccgaatgtccataccataaacctctgggatttgaaagcggagaagtcaccccagatcagatcacctgtagcaaccctgaacaatacgtgggatggtacagcagctggactgccaacaaggcacgcctgaactcgcaaggttttggctgtgcctggctctcgaagttccaggactcgtctcaatggctgcagatcgacctgaaggaaatcaaggtcatctcgggcattctgacccagggaagatgtgatattgatgaatggatgactaaatactcagtgcaataccgtaccgatgagagattgaattggatatactacaaggaccagactggaaacaatagggtgttctacggcaattccgacagaacttcgactgtgcagaaccttcttcggccacccatcatctcgaggtttattcgactgataccactcggttggcatgtgcgaattgcaattagaatggaactgcttgagtgcgtgtctaagtgtgct

SEQ ID NO: 7069 - DNA, 672 bp, Artificial Sequence
  derived and/or modified sequence
atgagccgcaagattgagggattcctgcttctccttctctttgggtacgaagcaaccctgggactgagctcgacggaggacgaaggcgaagatccttggtaccagaaggcatgtaagtgcgattgtcagggagggcccaacgcactctggtccgcaggggcaactagcctggattgtatcccagaatgcccttaccataagccccttgggtttgaatcaggtgaagtgaccccagatcaaatcacttgttcaaaccctgagcaatacgtcggttggtacagctcctggactgcgaataaggctagactgaactcacagggattcggttgtgcctggctgtccaaattccaggattcgtctcaatggcttcagatagatcttaaggaaatcaaggtgatctccggaattctcactcagggccgttgcgacatcgacgagtggatgactaagtactccgtccagtatcggactgacgaaaggctgaattggatctactataaggatcagaccggcaataacagggtgttctacggtaactccgatcggacctcaacggtgcaaaatctgcttagaccgcccattatctcgaggttcattagactcatcccactgggctggcatgtgcgtattgcaattcgaatggagcttctggaatgtgtgtcgaagtgcgca

SEQ ID NO: 7070 - DNA, 672 bp, Artificial Sequence
  derived and/or modified sequence
atgtcccgaaagatagaaggcttcctcctattgctattatttggctatgaggctacactgggcctctcctccactgaggatgaaggtgaggatccgtggtatcagaaggcatgcaagtgcgattgccaaggaggaccgaatgccctctggagtgccggagctacgtcgttggattgcatacccgagtgcccctaccataagcccctaggtttcgaaagtggcgaggtgacacccgatcagattacatgctccaaccctgaacagtacgtgggctggtattcgagctggaccgccaacaaagcgcgtttaaattcccaagggtttggctgcgcatggctcagcaagtttcaagattccagtcagtggttgcaaattgatctgaaagagataaaggtgatctccggcatcctgacacagggccgttgcgacatagatgaatggatgacgaagtactccgtacagtacaggaccgatgagcgtcttaactggatatactacaaagatcagaccgggaacaaccgcgtgttttacggaaattccgataggacgtcgactgtgcagaacctactccgccctcccattataagccgctttatccggctgattcctttgggctggcacgtgcgaattgctatacgaatggagctgctagaatgtgtcagtaagtgcgct

SEQ ID NO: 7071 - DNA, 672 bp, Artificial Sequence
  derived and/or modified sequence
atgtcaagaaagatcgagggcttcctgttgctgctgctctttggatacgaggccaccctgggactgtcgtcaacggaggatgaaggggaggatccatggtaccagaaggcgtgtaaatgcgactgtcaaggtggacctaacgccctttggtccgcaggggcaacttcacttgattgcatcccagagtgcccctaccataagccgctgggatttgagtctggcgaagtgacgccggaccaaattacctgcagtaacccagagcaatacgtcggctggtactcctcgtggaccgccaacaaagctcgtctcaattcgcagggattcgggtgcgcttggctctcgaagttccaggactcgtcgcagtggctgcaaatagatctgaaggaaatcaaggtgatttctggtatcctgactcagggacggtgcgatatcgacgaatggatgactaaatacagcgtgcagtacaggactgacgaacggcttaattggatttactataaggaccagaccggcaacaaccgcgtgttctacgggaatagcgaccggacttccaccgtccaaaacctcttgcgaccgcccataatctcacgtttcatccggttgattcctctgggctggcacgtgaggatcgcgattcgcatggaacttctggaatgtgtctccaagtgcgcc

SEQ ID NO: 7072 - DNA, 672 bp, Artificial Sequence
  derived and/or modified sequence
atgtccaggaaaattgaaggttttctgcttctgttgctttttggttacgaagctaccctcggcctttcgtcaaccgaggatgagggagaagatccgtggtaccaaaaggcctgcaagtgtgattgtcagggaggcccgaacgctctctggagcgcgggtgcaacttcccttgattgtattccagagtgtccttaccataagccactgggttttgaatcaggggaagtgactcccgatcaaatcacttgttcgaaccctgaacaatatgtgggctggtactcctcgtggaccgcaaataaggcacgcctcaactcgcagggttttggctgtgcgtggctgtccaaatttcaagactcttcccaatggctgcaaattgatctgaaggagattaaggtgatctcaggaattttgactcagggtcggtgtgatattgatgagtggatgaccaaatactcggtgcagtataggacggatgaacgtttgaactggatctactataaggaccaaactgggaataaccgcgtcttttacggaaacagcgatcgtacttcgaccgtgcagaaccttcttcgcccacccattatcagccggtttatccggctgattccactcggttggcatgtccgaatagccattaggatggaactgctggaatgcgtctcgaaatgtgca

SEQ ID NO: 7073 - DNA, 672 bp, Artificial Sequence
  derived and/or modified sequence
atgtccagaaagatcgaggggttccttcttctgctgcttttcggctacgaggccaccctcggtttatccagtacagaagatgaaggggaagacccttggtatcaaaaagcatgtaagtgcgattgccaagggggacctaatgctctgtggtctgctggagcaacgtctctggactgtattccggagtgcccataccacaagcctttgggtttcgaaagcggagaggtcactccagaccagataacttgtagcaatcccgaacaatatgtaggttggtacagctcttggaccgccaataaagcccgcctgaactcccaaggatttgggtgtgcatggctgtccaaattccaggattcttcccagtggttacagatcgatcttaaagaaatcaaagtaatttcaggcatcctcacccaaggccgttgcgatatcgatgagtggatgaccaagtactctgtgcagtaccgcaccgacgaacgcctaaattggatctactataaggaccagaccggcaataatcgcgttttttatgggaattctgacaggacctccacagtccagaaccttcttaggccccctatcatatctcgtttcatacgcttaatacccctcggctggcatgtcaggattgctatccggatggagctgctcgagtgcgtgtcgaagtgtgca

SEQ ID NO: 7074 - DNA, 672 bp, Artificial Sequence
  derived and/or modified sequence
atgtctcgcaagatcgaggggttccttctgctgttgctcttcggctatgaggctacactcggacttagttctacggaagatgagggtgaggatccctggtatcaaaaggcttgtaagtgtgactgccaaggcggtcctaacgctttgtggtcggctggtgctacaagccttgactgtatccctgaatgcccctaccacaagcccttgggttttgaaagcggcgaggtaacgccagatcagatcacgtgctccaaccctgagcaatacgtggggtggtactcatcctggacggcaaataaagctcgactcaattcacagggattcggttgtgcatggttaagtaagtttcaggactcctcccagtggctgcagattgatttgaaggagatcaaagtgatcagcggaatcttaacacaaggacgatgcgatattgacgaatggatgaccaagtatagtgttcagtatcggaccgatgaacggcttaactggatctattataaggatcagaccggcaataacagagtgttctacgggaatagtgataggacaagcaccgtccaaaatctgttgcggcccccgattatcagtaggtttatcaggctgataccactaggatggcacgttcgaattgccatccgaatggagcttttggaatgcgtcagtaaatgcgcc

SEQ ID NO: 7075 - DNA, 672 bp, Artificial Sequence
  derived and/or modified sequence
atgtcgaggaaaatcgagggatttttactgctgttgctctttggctacgaggccacgctcgggctctcctctacagaggatgaaggtgaggatccctggtatcagaaggcgtgtaagtgtgattgtcagggcggcccaaacgctctctggtccgcaggcgccacttctctcgactgcatacctgagtgtccatatcacaaacccctgggctttgagagtggcgaggtgacccctgaccaaatcacctgcagcaaccccgagcagtacgttggctggtactcctcctggaccgctaataaagcccgcctcaactcacaggggttcgggtgtgcttggctctccaagttccaggattcgtcccaatggctgcaaatcgaccttaaggagatcaaggtaatctctgggatacttacccagggccgatgtgatatcgacgagtggatgactaagtactccgtgcaatataggacagacgagcgattgaattggatctattacaaggatcagaccggtaacaaccgagtattctacggaaatagtgatcgcacgtccactgtgcaaaacttgctcaggcctcccattatctcccgctttatacgtttaatacctctagggtggcacgtgcggattgccattcgaatggagctgttggaatgcgtgagtaagtgtgcg

SEQ ID NO: 7076 - DNA, 672 bp, Artificial Sequence
  derived and/or modified sequence
atgtcacgcaagattgaaggatttctactactcttgctcttcggatacgaggcgacgctgggcttgtcatctaccgaagatgagggagaggatccttggtatcagaaggcgtgtaaatgcgattgccagggaggcccaaatgccctgtggtccgcgggagccacctctttagattgcatcccggagtgcccatatcacaagccattggggttcgagagcggggaggtaacccccgatcagatcacatgctccaacccagagcagtacgttgggtggtacagctcttggaccgccaataaagcccgcctgaactcacagggtttcggctgcgcgtggctgagtaaattccaggacagtagccagtggctccaaattgacctgaaggaaattaaggtcatctctggaatcttaacccagggaagatgcgacatcgacgaatggatgactaaatattccgtgcagtacaggaccgatgagaggctgaattggatttactacaaggatcagaccggcaacaacagggtgttctacggtaactctgatagaactagcacagtgcagaacctgttgcggcccccaataatttcgagatttatcaggctcatacccctcgggtggcatgtgcgtatcgcaattagaatggagctcctggagtgtgtttctaagtgcgca

SEQ ID NO: 7077 - DNA, 672 bp, Artificial Sequence
  derived and/or modified sequence
atgtcccggaagatcgaaggatttcttcttctcctgctcttcggctacgaagctactctgggattgtcctccaccgaggatgagggggaagatccctggtaccagaaagcgtgtaagtgtgactgccagggagggccgaacgcactgtggagcgccggagcaacgtcgttggactgtatcccggagtgcccgtaccataaacctctcggctttgagagcggagaggtgactccggatcaaatcacctgttcgaacccggaacaatacgtcggatggtactcaagctggactgcaaataaggcgcgcctgaactcccaaggtttcggctgtgcctggttgtcaaagttccaagattcgtcccagtggctgcagatcgatctcaaggagatcaaagtcatctcaggaatcctcactcagggacggtgcgacatagacgaatggatgactaaatactcagtccagtatagaacggacgagcggctcaactggatctactacaaggaccagaccggaaacaatcgggtcttttacgggaatagcgatcggacttcaactgtccagaacctgctccggcctcctatcatttcccgcttcatccgcctcatcccactcggatggcacgtgcgcattgctatccgcatggaactgctggaatgcgtcagcaagtgtgcg

SEQ ID NO: 7078 - DNA, 672 bp, Artificial Sequence
  derived and/or modified sequence
atgtctcggaagatcgagggattcctgctgctgctgctgttcggttacgaagctacactgggactttcatcaacggaggacgaaggagaagacccctggtatcagaaggcctgtaagtgcgattgtcagggaggtccaaatgccctctggagtgccggggctactagcctggactgtattcctgagtgcccgtatcataagccgctgggcttcgagagcggtgaggtgacaccggaccagataacctgtagcaatcccgaacagtatgtgggatggtatagttcctggaccgcgaataaagcgaggctgaatagccagggcttcggttgcgcatggttgtccaaattccaggactcatcacagtggctgcagatagatctgaaagagatcaaagtaattagcggcatcctcacccaaggtcgttgtgatatcgatgagtggatgacaaagtatagcgtgcaatatcgaaccgacgagaggctcaactggatctactacaaggaccagacgggcaacaaccgggtcttctatgggaacagtgaccggacgtcaacagtccaaaacctgctcagaccgccaataatatctaggtttattaggctgatccccctcggatggcacgtgagaatcgcgatcaggatggaacttctggagtgtgtctctaagtgcgcc

SEQ ID NO: 7079 - DNA, 672 bp, Artificial Sequence
  derived and/or modified sequence
atgtctcgtaagattgagggcttccttcttctgctcctttttggctatgaagctacactcggactgagttccacggaggatgaaggagaggatccctggtatcagaaggcatgtaagtgtgactgccagggcgggcccaatgcactgtggtccgcaggagctacctcactagactgcattccagagtgtccttaccacaaacccttgggttttgagtctggcgaagtaacccccgaccagatcacatgttcgaatccggagcagtatgtcggttggtactcttcctggaccgccaacaaggcacggctgaatagtcagggcttcggttgtgcttggctctccaaatttcaggactcatcacaatggctacaaattgatctcaaggaaatcaaggttataagcggaattctcacccagggtagatgcgacattgacgagtggatgacaaagtattccgtgcaatatcggacagacgagcgcttgaattggatctattacaaggatcagaccgggaataaccgggtcttctatggcaatagcgatcgaaccagcacagtacagaaccttctccggccccctattatcagcagattcattagactgatccccctgggctggcacgtgcgtattgcaatccggatggaactgctagaatgcgtctcgaaatgcgca

SEQ ID NO: 7080 - DNA, 672 bp, Artificial Sequence
  derived and/or modified sequence
atgtcaaggaaaatagaggggtttctcctcctgctcctgttcggatacgaagcaacccttggactttcctccaccgaggacgagggagaggatccatggtaccagaaggcatgtaagtgtgattgccaaggcgggcctaacgcgctttggagcgccggagcgacctcgctcgactgtattcctgaatgtccataccataagccccttggatttgagtcaggggaagtgacccctgatcagattacctgtagcaaccctgaacaatacgtgggttggtacagctcttggactgcaaacaaagcccggctgaactcacaggggtttggatgtgcctggctctcgaaattccaagattcaagccaatggctgcaaattgatcttaaggagattaaggtgatctccggtatccttacccaagggcgttgtgacattgatgaatggatgaccaagtactccgtccaatatcgcacggatgaacggctcaattggatctactacaaggatcaaaccggaaacaacagagtgttctacggcaattcggatcgcacctcgactgtgcaaaatcttcttcggccccccataatctcgaggtttattcgcctgattcctctgggatggcacgtgcggattgcgatcaggatggagctgctcgaatgtgtgagcaagtgtgcc

SEQ ID NO: 7081 - DNA, 672 bp, Artificial Sequence
  derived and/or modified sequence
atgtccaggaagattgaggggttcctcttactgctgttgttcggctacgaggccacactgggactttcctctactgaggatgagggggaagacccctggtatcagaaagcctgtaagtgtgattgtcagggtggccctaacgccttatggtccgccggggccacatccttggactgcatccccgagtgcccctaccacaagccgctgggatttgagagtggagaagtcacgcctgatcagattacatgctctaatccagagcagtacgtaggctggtactctagctggacggcaaacaaggctcggctgaactcccagggtttcggttgcgcttggttgtctaagttccaggattcttcccagtggctgcagattgatttgaaagagatcaaagtaatttccggcatcctcactcaaggccggtgcgacatcgatgaatggatgaccaagtatagtgtacaataccgtaccgacgaaaggctgaattggatttattacaaagaccagactggcaataacagagttttctatggcaacagcgataggacaagtacggttcaaaaccttctgaggccacccattatatcaagattcatcagattgataccgctagggtggcacgtccgtattgcaatcagaatggagctcctcgaatgcgtcagcaagtgtgcg

SEQ ID NO: 7082 - DNA, 672 bp, Artificial Sequence
  derived and/or modified sequence
atgagccgcaaaattgagggcttcttgttgctgctgctatttggctacgaggctactctgggtctgtcgtcgaccgaggatgagggagaggatccctggtatcagaaggcctgcaagtgtgactgccagggtggccctaacgccctatggtcggcgggcgccacctcactggactgcatccccgagtgtccttaccacaagcccctagggttcgagtctggcgaggtaaccccggaccaaatcacctgctctaaccccgagcagtacgtgggttggtacagctcgtggacggccaacaaggcccgtcttaattcccaggggttcggctgcgcgtggctgtccaaattccaagattcctcgcaatggctgcagattgatctgaaggagattaaggtcatttctggcatcttgacccagggccgctgtgatattgatgaatggatgaccaagtactccgtccaataccggactgatgaacgcctgaactggatttactacaaggatcagactggtaataaccgtgtgttttacggcaactcagaccgtacctctaccgtccagaatctcctccgcccccccatcatatcccggttcattcgccttatccctctcggttggcacgtacggatcgctatccggatggagctcctcgaatgcgtaagcaaatgtgca

SEQ ID NO: 7083 - DNA, 672 bp, Artificial Sequence
  derived and/or modified sequence
atgtccagaaagattgaaggcttcctgctccttctgttgttcggttacgaggcgactctcggcctgagctcgaccgaggacgaaggagaggatccgtggtaccaaaaggcatgcaagtgcgattgccagggcggtccgaatgccctctggtcggccggggcgacttcgctcgattgcatccctgaatgcccgtatcacaagcccttgggatttgagagcggcgaggtgacccccgatcaaatcacttgcagcaatccggaacagtacgtgggctggtactcttcatggactgcaaacaaagctcggctgaatagccagggattcgggtgcgcctggctgtccaagttccaggactcgtcacagtggctgcaaatcgacctgaaggagattaaggtgatctccggaatcctgactcagggacgctgcgacattgatgagtggatgactaagtactcagtccagtaccgcacggacgaaagactgaactggatctactacaaggaccagaccgggaacaatagagtcttttacggtaactcagaccgcacgagcaccgtccagaacctgctgcgcccaccaatcatctcccgattcataagactcatcccactcgggtggcacgtgcggatcgcaatccgcatggagctgctggagtgcgtgtcgaagtgcgca

SEQ ID NO: 7084 - DNA, 672 bp, Artificial Sequence
  derived and/or modified sequence
atgagtcggaaaatcgagggctttctgctgcttcttctgttcggctacgaagctacacttggcctgagctctacagaagatgagggcgaggatccatggtaccagaaggcatgcaaatgcgattgccaaggtggaccaaacgcactgtggtcagcgggagcaacttcccttgactgcattcccgaatgtccataccataaaccacttggattcgagtcaggagaagtgactcccgaccagatcacatgtagtaatccagaacaatacgtgggctggtattcttcatggaccgccaataaagcaagactcaatagccaaggatttggatgcgcttggttatctaagttccaagactcatctcaatggctgcagatcgatctcaaagaaatcaaagtgatatcaggcatcctgacccaaggaaggtgcgatatcgacgaatggatgacaaagtacagcgtgcagtaccggaccgatgagagactcaattggatctattacaaggaccagaccgggaataatcgagttttctacggcaacagcgataggacaagcacagtgcagaacctcctccgccctccaatcatttccaggttcataagactcattcccttgggctggcatgtcagaatcgcaatacgaatggagctcctggaatgtgtctccaaatgtgct

SEQ ID NO: 7085 - DNA, 672 bp, Artificial Sequence
  derived and/or modified sequence
atgagccgcaagattgagggattcctcttgttgctgctgtttggttacgaggccactctggggctgtcgtcaactgaagatgagggtgaggacccgtggtaccaaaaggcgtgcaagtgcgattgccagggaggcccaaacgccctctggtccgcgggtgccacctcgctggactgtatacctgaatgtccttatcataaaccactgggcttcgaaagcggagaggtcaccccagaccaaatcacctgttcgaaccctgaacagtatgtcgggtggtacagttcgtggactgcgaacaaggcaaggctgaactcacagggatttggctgcgcttggctgtcgaaattccaagattcatcgcagtggttgcaaatagacttgaaagaaatcaaggtgatctccggaatcctcacgcaggggagatgcgatatcgacgaatggatgactaagtactcagtgcagtaccggactgacgaacgcctgaattggatctactacaaagaccagacgggaaacaatcgagtgttctacggtaattccgaccggactagcaccgttcaaaatcttctgcgcccaccgatcattagcagattcatccgtttgatcccgctgggatggcacgtgagaatcgccattcggatggaacttcttgagtgcgtgtccaagtgcgct

SEQ ID NO: 7086 - DNA, 672 bp, Artificial Sequence
  derived and/or modified sequence
atgtcaagaaaaatcgagggatttctgctcctgttgctgttcggctacgaggctactctcggcctctcttccactgaggatgaaggggaggatccctggtaccagaaggcttgcaaatgtgactgccagggcgggccgaatgcactgtggagcgcaggcgctacatcccttgactgcatcccagagtgcccatatcataagcccttgggttttgaaagcggagaggtcactcccgaccagatcacctgtagtaacccggagcaatacgtcgggtggtactcatcttggacagcaaataaagcaaggcttaacagccaaggcttcggctgcgcatggttgagcaagtttcaggattccagccagtggctgcaaatcgatcttaaagaaataaaagtgatctccgggattctgacgcagggtagatgcgacatagacgaatggatgaccaaatattccgtccaataccggacagatgagcggctgaactggatctattacaaagaccaaacaggaaataatcgagtattctatgggaactctgatcgcacctcaacagtccagaacctgcttcgccctcctatcatctcacgctttatcagattgatcccccttgggtggcacgtgcgcattgcaattagaatggagcttctggaatgtgtctcaaagtgtgca

SEQ ID NO: 7087 - DNA, 672 bp, Artificial Sequence
  derived and/or modified sequence
atgtcccgcaagatcgaagggtttctgctattgctcctcttcggatatgaggcaacgttaggccttagctccacagaagacgaaggggaagatccctggtaccaaaaggcttgtaaatgcgactgtcagggtgggcctaacgccctctggagtgccggggccacgagcctggactgtatacctgagtgcccctatcacaaaccactgggcttcgagagcggggaggtcacccctgatcagatcacctgtagcaatcctgaacagtacgtggggtggtactccagttggactgctaacaaggctaggctcaactcacagggattcgggtgcgcatggctgtctaagtttcaggattcttcgcagtggttgcagattgatcttaaagagattaaagtcataagtggcatattgacccagggtagatgcgacatagatgaatggatgactaagtacagcgtgcaataccggactgacgagcgcctcaactggatttactataaggatcagacaggaaataatcgagtgttctatggcaattctgaccgtacgagtacagtgcaaaatctgctgaggcctccgattatctctcggtttatcagactgattccgctgggctggcacgtccggattgccattcggatggagctactggagtgtgtgtcaaaatgtgct

SEQ ID NO: 7088 - DNA, 672 bp, Artificial Sequence
  derived and/or modified sequence
atgagccgcaagatcgagggttttctcctactcctcctgtttgggtatgaagcaacactgggcctctcaagcacagaagatgagggagaagacccctggtaccagaaagcgtgcaagtgcgactgtcagggcgggccaaacgcgctgtggagcgctggcgctactagcctcgactgtatcccagagtgtccctaccacaaacctctcggctttgagtcgggcgaggtaaccccagaccagattacatgctcgaatcccgagcagtacgtgggctggtactctagctggaccgcaaacaaggccagattgaactcccagggctttggatgcgcgtggctgtcaaagtttcaggattcctcacaatggctgcaaatagacctgaaggagattaaagtcatttccgggatcctgacacaggggcgatgcgatatcgacgaatggatgacgaagtactccgttcaatatagaaccgatgagcgcctgaattggatttactacaaagatcagaccggcaataaccgcgtattctatggtaatagcgaccgtacctccaccgttcagaatctgctccggccacctattatttcccgattcatcaggctgatccctctgggatggcacgttaggatcgctatcaggatggaactgttagagtgcgtgagcaagtgtgcc

SEQ ID NO: 7089 - DNA, 672 bp, Artificial Sequence
  derived and/or modified sequence
atgtcgcggaagattgaagggtttttgctgcttctgctctttggctatgaagcgacactggggttgagctctacagaggatgaaggcgaggatccatggtaccagaaggcctgcaaatgtgattgccaggggggacctaatgcactctggagtgctggagccacaagcctggattgtattcccgagtgtccctatcataagccactgggatttgaatcaggggaggtgactcctgatcaaatcacgtgcagcaatccagaacaatacgttggctggtacagctcttggaccgccaacaaagcaagactgaactcacaaggattcggttgcgcttggctctctaagtttcaggactcaagccagtggctgcaaatcgatctcaaagagatcaaggtgatatcgggtatcctaacccaggggaggtgcgacatcgacgaatggatgaccaagtactcggtgcagtatagaaccgatgagagacttaattggatctactacaaggatcagaccggcaacaatcgggttttctatggtaatagtgaccgcactagcacggtgcagaatttgttgcgtccgcctattatctcccgcttcatccgactcatcccgctgggatggcatgtccggattgcaatcaggatggagctactggagtgtgtgtcaaaatgtgct

SEQ ID NO: 7090 - DNA, 672 bp, Artificial Sequence
  derived and/or modified sequence
atgtcgcggaagattgaaggatttctcttgcttctgctctttggttatgaagccacgctcggcctgtcctccaccgaagacgagggtgaggatccatggtatcagaaggcttgtaaatgcgactgtcagggtggtcccaacgctctatggtccgcaggcgctacgtccctggactgcattcctgagtgcccatatcacaaaccactgggattcgagagcggcgaagttacacccgatcaaatcacatgctctaatccggagcagtacgtagggtggtattcttcctggactgctaacaaagccaggctgaacagccaaggattcggttgtgcatggttaagcaaatttcaggattctagtcagtggctgcagatcgatttgaaggagattaaggtgatttccggcatcctgacgcaggggaggtgcgatatcgatgaatggatgactaaatattctgtccaatatcgcacggatgagagacttaattggatctattacaaagaccagaccgggaataaccgcgtattttatggcaattctgaccgcaccagcacagtgcaaaatcttctccgaccacccattatcagtaggttcatcaggctgatcccccttggatggcacgtgagaatcgccatccgtatggagttgctggagtgtgtgagcaagtgcgcg

SEQ ID NO: 7091 - DNA, 672 bp, Artificial Sequence
  derived and/or modified sequence
atgtcaaggaaaatcgaagggttcctcttattgctcttgttcgggtatgaagctacactcggactgtccagtactgaagacgaaggagaagatccctggtaccagaaagcctgcaaatgcgactgccagggaggacccaacgcactctggtcagccggggccacaagtctcgattgtatacctgaatgcccctatcataaacctttagggttcgaatctggggaagtgactcccgatcagataacttgctcaaatcctgaacagtacgtcggatggtatagttcttggacagcaaataaagcaagactaaattcacaggggttcgggtgcgcatggctgtctaagtttcaggattccagtcagtggctccagatcgatctcaaagaaataaaagtcatatctggaatactcacacagggacggtgtgatatcgatgaatggatgacaaaatattctgtgcagtataggacagatgaaaggctgaactggatatattacaaagatcagactggaaataaccgggtattttatggaaactctgataggacgagtacggtccagaacctcctacgacctcccatcatatcaagatttattagactgatacccctcgggtggcacgtgaggatagctatcaggatggaattattagaatgcgtgtcaaaatgcgct

SEQ ID NO: 7092 - DNA, 672 bp, Artificial Sequence
  derived and/or modified sequence
atgagccgcaagattgaaggatttctgttgcttctcctgttcggatatgaagcgaccttgggcttgagctccactgaagatgagggcgaggacccttggtaccagaaggcctgcaagtgtgactgccagggaggtccgaatgcgttgtggtctgccggcgcaacctccctcgattgcattccggagtgtccatatcataaacccctgggcttcgaaagcggcgaggtgaccccggaccagatcacttgttccaatcctgaacagtacgtgggctggtacagctcgtggactgccaacaaggcgagattgaattcgcagggattcggatgtgcttggctctccaagttccaggacagctcacaatggctccaaatcgacctcaaggaaatcaaggtgatctcagggattctgacccaggggcgctgcgatatcgatgagtggatgaccaaatactccgtgcagtacagaacggacgagagactcaactggatctactacaaagaccaaaccggaaataaccgcgtgttttatggtaacagcgaccggacctccactgtccaaaatctgctgcgcccaccgatcatctcgagattcattagactgatccctttgggctggcacgtgcggatcgccatccgcatggagctgctcgaatgcgtgtcaaaatgcgcg

SEQ ID NO: 7093 - DNA, 672 bp, Artificial Sequence
  derived and/or modified sequence
atgtcccgaaagatagagggatttcttctgctcctgctgttcggctatgaagccacgttgggtctgagtagcaccgaggacgaaggcgaggacccctggtatcagaaggcatgtaagtgcgactgtcaaggcggaccaaacgcactgtggagtgctggggctactagcctagactgcattcccgaatgcccttatcacaagcctctgggtttcgagagtggagaggtgacccctgaccagattacctgttcaaatccggagcagtacgtggggtggtacagcagctggacagcaaacaaggcgcgattaaattcccagggctttggatgcgcctggctgagtaagttccaagactcttcacaatggttgcagattgatctaaaggagattaaggtaatatcaggaatcctgactcagggcagatgtgatatagatgagtggatgaccaagtactctgtccagtatcgcacggacgagagacttaattggatctattataaggatcagactgggaataatcgggtgttttatggaaacagtgatcgcacatctacggtgcaaaacctcctgcgcccgcccatcataagccgctttatccggctgatcccactgggttggcatgtacgcattgccatccggatggagttgctcgaatgtgtgtctaaatgtgca

SEQ ID NO: 7094 - DNA, 672 bp, Artificial Sequence
  derived and/or modified sequence
atgagcaggaaaattgagggctttttgctccttcttctttttggatacgaggctacccttggactgtcgtctactgaggatgaaggagaggacccctggtatcaaaaagcgtgcaagtgcgactgccaaggaggaccgaatgctctatggagcgctggagccacatctctagattgcattccagaatgcccataccacaaaccacttggctttgaatcgggagaggtcacaccagaccagattacttgttctaatccagaacagtatgttggatggtattctagttggaccgctaacaaggcacgtctgaactcgcaaggattcggatgtgcgtggttgtccaagtttcaggattcgagccaatggctacaaatcgacttaaaagaaatcaaagttatcagtggaattcttacgcaagggaggtgcgatattgacgagtggatgactaagtattcggtacagtaccgaacagacgaaagactcaattggatttactacaaggatcaaactggaaacaatcgtgttttctacggaaattcagaccgtacaagtactgttcaaaatcttcttcgtccacctatcatttccagattcatccgactcattccacttggatggcatgttcgaatcgctataaggatggagcttttggaatgtgtttcaaagtgcgct

SEQ ID NO: 7095 - DNA, 672 bp, Artificial Sequence
  derived and/or modified sequence
atgtccaggaagatagaaggcttcctgctgctgcttctgttcggctatgaagccacattgggactctcaagcaccgaggacgaaggtgaggatccctggtaccagaaagcttgtaaatgtgactgccagggcggcccaaacgccctgtggtcagcaggggcaacctcgcttgattgcatccctgaatgcccttaccacaaaccactagggttcgagtctggtgaagtgaccccagaccagattacctgttctaacccagagcagtatgtggggtggtattccagttggactgccaataaagcccggctgaatagccaggggtttggatgcgcttggttaagcaaattccaagactcaagccagtggctgcaaattgacttaaaggaaattaaggtcatatccggaatcttgacgcaaggcaggtgtgatatcgatgaatggatgacaaaatactctgtgcaatacaggacagatgaacgcttaaactggatctactacaaagatcagaccgggaacaatcgcgtgttctacgggaacagcgatcggacatccaccgttcagaacctcttgaggcctcctatcattagcagatttatcagactgatcccccttgggtggcatgttagaatagccatccgaatggagctgctcgagtgtgtttcgaagtgtgct

SEQ ID NO: 7096 - DNA, 672 bp, Artificial Sequence
  derived and/or modified sequence
atgagtaggaagatagaaggttttctcctcctgttgctgtttggttacgaagctaccctgggactgtcaagcactgaagacgagggtgaggatccatggtaccagaaggcttgtaagtgtgactgtcaaggaggacctaacgccctttggagcgcgggagcgacttctttggattgcatacccgagtgcccataccataaacctctcggtttcgagagcggagaagtgactccagatcagatcacttgctcaaatcccgagcagtacgtcggttggtactcctcttggactgctaacaaggccaggctgaattcacagggcttcggttgcgcctggctgtctaagtttcaggattcttcacaatggctgcagatcgacctgaaggagatcaaagtcatatctggcattctgacccagggaaggtgcgatatcgatgagtggatgacaaaatactccgtgcagtataggacagacgagcgcctcaattggatttactacaaggaccagacaggcaataaccgcgtgttttacggcaatagtgacaggacctctaccgtgcaaaatctgctgcgcccccctatcatctccaggttcatcaggctcatcccactgggatggcacgtgcgcatagctatcaggatggaactgttggagtgtgtcagcaagtgtgcc

SEQ ID NO: 7097 - DNA, 672 bp, Artificial Sequence
  derived and/or modified sequence
atgtcgaggaagatcgagggattcctccttctcctgctgttcggatatgaagcgacgctgggcctgtcgtccactgaggacgaaggcgaggacccctggtaccaaaaggcatgcaagtgcgattgtcagggaggaccgaacgctctgtggtcagccggggccacttccctggactgcattccagaatgcccgtaccacaagccgctcggatttgagtcgggcgaggtgaccccggaccagatcacgtgctccaacccggaacagtacgtcggatggtactcctcatggaccgccaataaggcgcggctcaactcgcaaggcttcgggtgcgcctggttgtcaaagtttcaggactctagccagtggctccaaatcgacttgaaggagattaaagtgattagcggaatccttacccagggcagatgcgatatcgacgaatggatgactaaatactcggtccagtatagaaccgatgaacggctgaattggatctactacaaagatcagacgggaaacaatcgcgtgttctatggcaattcggacaggacctccaccgtccaaaacctgctgaggccaccaatcatctcccggtttatccggctgattccgctcggctggcatgtgaggatcgcaatcagaatggagctgctcgaatgcgtgtccaagtgtgct

SEQ ID NO: 7098 - DNA, 672 bp, Artificial Sequence
  derived and/or modified sequence
atgtccaggaagattgaaggcttcctgctcctcctgctcttcggatatgaggcgacgctgggcctgtcgtcgaccgaggacgaaggcgaggacccttggtaccaaaaggcttgtaaatgcgactgccagggaggtcccaacgcattgtggagcgctggagccacttccctggattgtattccggaatgtccgtatcacaagccactggggtttgaatccggggaagtgactcctgaccagattacttgctccaatccggaacaatatgtgggatggtactcatcatggaccgctaacaaggccagacttaactcgcaaggttttggatgcgcctggctctcgaaattccaggactccagccagtggctccagattgaccttaaggaaatcaaggtgatttccggaatcctgacccagggccgctgcgacatcgatgagtggatgactaaatactctgtccaataccgcaccgacgagagattgaactggatctactacaaagatcaaactggcaataacagggttttctacggtaattcggacagaacctcaactgtccagaaccttctgcgcccgccgatcatcagccggttcatccggctgattccattggggtggcatgttcgaatcgcgatccggatggaactgctggaatgcgtctctaagtgtgcc

SEQ ID NO: 7099 - DNA, 672 bp, Artificial Sequence
  derived and/or modified sequence
atgtctcggaagattgagggattcctgcttcttctcctctttgggtacgaagcaactctcgggctttcatcgacggaagatgaaggcgaggatccttggtaccaaaaagcatgtaagtgcgactgccaaggtggtcctaatgcgctgtggagcgccggtgcgacttcgctggattgtattcccgagtgtccctaccataagcccctgggatttgaatcaggcgaagtgacccctgaccagataacgtgttcaaacccagaacaatacgtcggatggtactcatcatggaccgccaacaaagcaagattgaacagccagggttttggctgcgcctggctgtctaagttccaggattcctcccaatggttgcaaatcgatctgaaagagataaaggtcatttccgggattctcactcaaggacgctgcgacatcgatgaatggatgaccaagtacagcgtgcaataccggacggacgagcggctgaactggatctattacaaggatcagaccggaaacaacagagtgttttacggaaatagcgaccggacgtcaaccgtgcagaatttgctgaggccacctattatcagcagattcatccgccttatcccacttggatggcacgttagaattgcaattagaatggagctcctggaatgtgtgagcaaatgtgca

SEQ ID NO: 7100 - DNA, 672 bp, Artificial Sequence
  derived and/or modified sequence
atgagccgcaagatcgagggctttctgctgttactgctgttcggctacgaggcaaccctcggactgagctccacagaggacgagggcgaagatccatggtaccaaaaggcttgcaagtgcgattgccagggaggcccaaacgccctctggtcagcaggcgcaacctcactcgactgcatccccgaatgtccctatcataaacctctggggtttgaaagcggagaggtcacaccagatcagatcacttgctctaatcccgaacagtatgtcggctggtacagctcttggaccgccaacaaggccagactaaacagtcagggatttgggtgtgcatggctttcaaaattccaggacagcagccaatggctccaaattgatctgaaagagatcaaggtcatcagtggaattctgacacagggaagatgtgatatcgatgagtggatgaccaaatacagcgtgcaatacagaaccgacgagagacttaactggatctattataaggatcaaacaggtaacaacagggttttttatgggaactctgaccgcactagcacagtgcaaaacctgcttcgcccgccaatcattagccgcttcatcaggctgatcccactcggatggcatgtgcgcatcgctatacgcatggaactcctcgaatgtgtgagcaaatgtgcc

SEQ ID NO: 7101 - DNA, 672 bp, Artificial Sequence
  derived and/or modified sequence
atgtctaggaagattgagggctttctgctattactcctctttggatatgaagcaaccctgggcctctcgagtaccgaagacgaaggggaggatccatggtaccagaaggcctgtaagtgcgactgtcagggcggtcctaatgctctctggagcgcgggggccacttcactcgactgcattccggagtgcccctatcacaagcctctggggtttgagtccggggaagtgaccccagatcaaattacctgttctaacccggagcagtatgtcggctggtactccagctggacagctaataaagctaggctgaactcccaggggtttggatgcgcatggctgtccaagttccaggactcttcgcaatggcttcagatagacttaaaagaaattaaggttatctctgggattctcacccagggccggtgtgatatagatgagtggatgacgaagtattctgtgcagtacaggaccgatgaaaggcttaactggatctattataaagatcaaaccggaaacaatagagtcttttacgggaactccgatcggacttccacagtgcagaaccttctgcggcccccgatcatttcgcgttttattcgtctaattccgctcgggtggcacgtcaggattgccatcagaatggaactgctagaatgtgtttcaaaatgcgca

SEQ ID NO: 7102 - DNA, 672 bp, Artificial Sequence
  derived and/or modified sequence
atgagccgtaagattgaagggttcctgctgctgctactgtttggttatgaggcaactctaggattgtcgagcaccgaggacgagggagaggacccctggtaccagaaagcctgcaagtgcgactgccaaggtggtccaaatgcgctgtggagcgctggagctaccagtctcgactgcattccggagtgtccttatcacaagccattaggcttcgagtccggcgaggtcacgccggaccagatcacttgtagcaaccctgaacaatatgtggggtggtactcaagctggaccgccaacaaggctcgcttgaactcacaaggtttcggctgtgcctggttgagcaaattccaggattcaagccagtggttgcaaatcgatctgaaggagattaaggtgattagcggtatcctgacccagggcagatgtgacatagatgagtggatgacaaaatacagcgtccaatacagaaccgatgaacgcctgaattggatctattataaagaccagactggcaataatcgtgttttctacggcaatagcgatcgcacgtccaccgtacagaacctgttgagaccaccaatcatttctcgttttatccggctgatccctttgggctggcacgtgcgcattgcgattcgcatggaactgctagagtgcgtgagcaaatgcgct

SEQ ID NO: 7103 - DNA, 672 bp, Artificial Sequence
  derived and/or modified sequence
atgtcgcggaaaatagaagggttccttctgttgctcctctttggatacgaagcaaccctgggcctgtcctcgaccgaggacgaaggagaagatccttggtaccagaaggcatgtaagtgtgactgccagggaggcccaaacgccttgtggtcggcaggagcaacttccttggactgtatcccagaatgcccttaccataagcctcttggatttgaatccggggaggtgacgcccgatcaaattacttgtagcaatccagagcaatacgtgggttggtactcctcgtggacggccaacaaggcaagactgaactcgcaaggatttggttgtgcatggttgagcaagtttcaagattcgtcccagtggcttcaaatagacctcaaagagatcaaggtcatctcggggattcttactcagggacggtgtgatattgacgaatggatgactaagtacagcgtgcaataccggaccgatgaaagactgaactggatttactataaggatcagactggtaacaaccgagtgttctacgggaatagcgatcgcacttcgaccgtccaaaatcttcttcgccctcccattatcagcaggttcatccggctgataccgctgggttggcatgtgcgtatcgccattcgcatggagcttctcgagtgtgtcagcaaatgtgcc

SEQ ID NO: 7104 - DNA, 672 bp, Artificial Sequence
  derived and/or modified sequence
atgagccggaaaattgagggcttcctcttattactactattcggctacgaagccacccttgggctttccagcaccgaagatgaaggggaggatccatggtatcagaaggcgtgcaaatgcgattgtcagggtggcccaaatgctctgtggagcgcgggagccacttccctagattgtattccggagtgtccgtaccacaaacccctgggcttcgaaagcggtgaggtgaccccagatcagattacttgtagcaaccctgagcaatatgtcggctggtactccagttggacagccaacaaagctaggcttaacagtcaggggttcggctgcgcctggttatctaagttccaggactcttcccagtggctgcagattgacctgaaagaaatcaaggtcatatcgggcatcttgacacagggaagatgtgacatcgatgagtggatgacaaagtattcagtgcagtaccgcacagacgagcgactgaactggatctactacaaggaccagacggggaacaacagagtgttttacgggaactctgatcgaacgtctacagtgcaaaatttgctccgtccccccatcatctcccggttcatccgacttattccattaggctggcatgtgcggatagcgattcgaatggagctgctggagtgcgtgtctaaatgtgca

SEQ ID NO: 7105 - DNA, 672 bp, Artificial Sequence
  derived and/or modified sequence
atgtcgagaaagattgagggctttctgctgcttctccttttcggatacgaggccactcttggccttagctccacggaggatgaaggggaggacccttggtaccaaaaggcgtgtaagtgtgattgtcaggggggacctaacgccctctggtctgcaggtgcgacctcccttgactgtattccagagtgtccataccacaagcctctgggatttgagagcggtgaagtgactccagatcaaattacttgttccaaccctgaacagtatgtgggttggtactcatcctggaccgcaaataaggcgaggctcaacagccagggatttgggtgtgcatggctgagcaagttccaagactcctcacagtggctccagattgatctgaaggagatcaaagtcatctcaggtattctgactcagggaaggtgcgatattgacgaatggatgactaagtactcggtgcaataccggactgacgaacgcctgaactggatttactacaaggaccagacgggaaacaatcgtgtattctacggaaactccgatcggacctccactgtgcagaatcttcttcgtccccccattatctcacggttcatcagactgattccactgggttggcatgtgcgcattgccatcaggatggagctgctcgaatgtgtctccaaatgcgca

SEQ ID NO: 7106 - DNA, 672 bp, Artificial Sequence
  derived and/or modified sequence
atgagccgaaagattgagggtttcctgcttctcctcctttttggttatgaagcaaccctgggactgtcaagcactgaggatgaaggagaagatccttggtaccaaaaggcatgtaaatgtgattgtcaagggggcccgaatgcactttggtccgcaggagctacctcacttgactgcattcctgagtgtccttaccacaagcctcttggattcgaatctggagaggtgacccctgatcagattacttgtagcaatcctgaacagtacgtggggtggtactcctcgtggaccgccaacaaagcacggctgaatagccaaggatttggttgtgcttggctgtcgaaatttcaggactcctcgcaatggcttcaaatagacctgaaggaaatcaaggtcatctcgggaatcctcacccagggacgttgtgatattgatgagtggatgactaagtactcagtgcagtacagaactgatgagcggcttaactggatatactacaaagaccaaactggcaacaatcgggtgttctacggtaattccgaccggacctcaactgtccaaaacctgcttcgcccaccgattatctcaaggtttattcggctcattccactgggatggcacgtcagaattgccattcgcatggaacttctggaatgcgtgtcgaagtgtgct

SEQ ID NO: 7107 - DNA, 672 bp, Artificial Sequence
  derived and/or modified sequence
atgagccgtaagatcgaaggctttctcctgttgcttcttttcggatacgaggctacgctggggctttcatccacggaagatgagggtgaggacccatggtaccaaaaagcatgtaagtgtgactgtcagggaggacccaatgcactttggtccgccggagcgacctcgcttgactgcattccagaatgcccttaccacaaaccactgggatttgaatctggtgaagtgacccccgatcaaataacttgctccaaccccgaacaatacgttgggtggtatagcagctggactgctaataaggctcggctgaactcgcaaggtttcggatgcgcttggctctcaaagtttcaagatagctcccaatggctgcagatcgaccttaaagaaatcaaggtcatttcgggtatcctcacccagggcagatgtgacattgacgaatggatgaccaagtactccgttcagtatcgcactgatgaacggctgaattggatttactacaaggaccagaccggtaacaacagagtgttttacggaaacagcgatcgtactagcaccgtgcaaaaccttcttcgccctcctatcatttcacgcttcattagacttataccactcggttggcacgtcagaatcgcaattcgcatggaacttctcgaatgcgtgtccaagtgtgca

SEQ ID NO: 7108 - DNA, 672 bp, Artificial Sequence
  derived and/or modified sequence
atgtcccgtaagatcgaagggttcctgctgttgttgctgttcgggtacgaggcgacacttgggctctcatccaccgaagatgaaggcgaagacccctggtaccagaaggcctgcaaatgtgactgtcagggcggccccaatgccctctggagcgccggcgccacctccctggactgcatccccgagtgcccctaccacaagccgctgggctttgagagtggcgaggtaacgccggaccagattacctgctcaaatccggaacagtacgtcggatggtactcctcctggactgccaataaagcacgtctcaatagtcaaggattcgggtgtgcatggttaagcaagttccaagactctagtcagtggctgcaaatagatctcaaggaaataaaagtgatttcgggaatcctaacccaggggcgatgcgacattgacgaatggatgaccaaatatagcgtgcagtaccgcacggatgaacggctgaactggatttactacaaagatcagaccggcaacaatcgcgtgttttatggaaatagtgacagaacaagtaccgttcagaatttgttgcggccaccaataatttcacgctttataagattgatccccctcgggtggcatgtgcggatcgcgatccgcatggagcttctagaatgtgtgagtaagtgtgca

SEQ ID NO: 7109 - DNA, 672 bp, Artificial Sequence
  derived and/or modified sequence
atgtccaggaaaatcgaggggtttcttctcttactcttgtttggatacgaggcaactctgggactctcgagcaccgaggatgagggcgaggatccgtggtaccagaaagcttgtaagtgtgattgtcagggaggacccaacgccctctggagcgcgggtgccacctctctagattgtatcccagaatgtccctatcacaagcctttggggtttgaatctggggaggtgacgccagaccagatcacctgcagtaatccagagcagtacgtgggctggtactcatcgtggactgcgaataaagcccgcctgaatagccagggctttggctgcgcctggctgtccaagtttcaggactctagccagtggctccaaatcgatcttaaggaaatcaaggtgatcagtggcattctgacacaaggacggtgcgatatagacgagtggatgaccaaatatagcgtgcagtacaggaccgatgagcgccttaactggatttactacaaggatcaaacggggaataaccgtgtcttctatggcaacagtgacagaacttccaccgtgcagaacctgttgagacctcctatcattagccggttcattaggcttataccccttgggtggcacgttaggatagccattcgcatggaactactggaatgcgtcagcaagtgcgct

SEQ ID NO: 7110 - DNA, 672 bp, Artificial Sequence
  derived and/or modified sequence
atgtccaggaaaattgaggggtttctgctgctccttttattcggttatgaggcaaccctcggactttcatcgacagaggacgaaggcgaggatccctggtaccagaaagcttgtaaatgtgactgccaggggggcccaaatgccctatggtctgcgggagctaccagtctcgactgcatcccggaatgcccttatcacaagcccctaggctttgaaagcggagaggttacaccggatcagatcacatgctctaacccggagcaatacgtcgggtggtactcctcatggaccgcaaataaggcccggctgaacagtcagggatttgggtgtgcatggctcagcaagttccaagacagctcccaatggctgcagattgatttgaaggagataaaggttatttcaggcattctgacccagggccgatgtgatatagacgaatggatgaccaaatatagtgtgcagtatcgcactgacgaaaggttaaactggatttactataaagatcaaacaggcaacaaccgcgttttctacggcaatagcgacaggacctcaactgtacagaacctgctccgcccaccgatcattagccgctttattagattaatcccattgggctggcacgtgcggatcgcaattcggatggagctactcgagtgcgtttccaagtgcgct

SEQ ID NO: 7111 - DNA, 672 bp, Artificial Sequence
  derived and/or modified sequence
atgagccggaagatcgagggctttctcctgctgctcctatttgggtatgaagctactctgggattaagtagcacagaagatgagggcgaggatccatggtatcagaaagcctgcaagtgcgattgtcagggggggcccaatgcattatggtcagcaggggctaccagtcttgactgtatacctgagtgtccttaccacaagcctcttggatttgagtctggcgaagtcacccctgaccaaattacatgtagcaatccggagcagtatgtggggtggtattcctcctggaccgcaaataaggccaggctaaattcacaaggctttggctgcgcctggttaagcaagttccaggacagctcacaatggctgcaaattgacctcaaagaaatcaaggtgatttctggcatcctgacgcaggggaggtgtgatatcgacgaatggatgaccaagtacagtgtgcagtatcgcaccgacgaaagactgaactggatttactacaaagaccaaactgggaataaccgcgttttttatggaaactcagacaggacatccacagttcagaacctgctcaggccccctattatcagtcgcttcattcgattaattcctcttggatggcacgtgcgaatcgcaatcaggatggaactgcttgagtgtgtgtcgaagtgtgca

SEQ ID NO: 7112 - DNA, 672 bp, Artificial Sequence
  derived and/or modified sequence
atgtccagaaagatcgaaggatttctgctcctcctgctcttcggatacgaggcgaccctcggtctttcgagtaccgaagatgagggagaagatccatggtaccaaaaggcgtgcaaatgtgactgccaaggcggtccaaatgccctgtggtcggcgggggccacttccctcgactgcattccggagtgcccttaccacaaaccgctgggattcgaatcaggagaggtgactcctgaccagatcacctgctccaacccggaacaatatgtgggatggtactcctcatggactgccaacaaggctcggctgaattcacagggatttggatgcgcctggctgtccaagttccaggattcatcccagtggctgcagatcgacttgaaggagatcaaagtgatctccggcatcctgacccagggaaggtgcgatatcgatgaatggatgaccaagtactcggtgcagtaccggactgacgaacgccttaactggatctactacaaggatcagacggggaataaccgcgtgttctacggaaattcagaccggactagcaccgtgcaaaatctgctccgtcccccaattatctcacgcttcattcgccttatcccgttgggttggcacgtgagaatcgcaatccgcatggaactcctcgagtgtgtgtcaaagtgcgct

SEQ ID NO: 7113 - DNA, 672 bp, Artificial Sequence
  derived and/or modified sequence
atgtcgagaaaaattgagggattcctgctgctgttgttgttcggctacgaagcaaccctgggcctctcatcgactgaggacgagggagaggatccttggtaccagaaggcttgcaagtgcgactgccagggagggccaaacgccctttggtcggctggcgccacgtcacttgactgcatcccggaatgcccgtaccacaagccgctgggatttgaaagcggtgaagtgactccggatcaaatcacctgttcgaatccagagcagtacgttggttggtatagcagctggaccgccaataaggcgcggcttaattcccagggcttcggctgtgcctggctctctaagttccaggactcctcccaatggctgcagatcgacctgaaggaaatcaaagtcatatcaggaatcctgactcagggacgctgcgacatcgacgagtggatgactaaatactcggtgcaataccggaccgatgaacgtctgaactggatttactacaaggatcagactggaaacaaccgggtcttttacgggaacagcgatagaacctccaccgtgcaaaacctgctgcgcccccctatcatctcacgcttcatccgcctcatcccactcggatggcatgtgcgaatcgcaattaggatggaactcctcgaatgcgtgtccaagtgtgcg

SEQ ID NO: 7114 - DNA, 672 bp, Artificial Sequence
  derived and/or modified sequence
atgtctcggaagatcgaggggtttcttctcctcttacttttcgggtacgaagctacgctgggccttagcagtacagaggacgaaggggaagacccctggtaccaaaaagcctgcaaatgtgactgccaaggcggtcccaatgctctttggagcgcgggggctacatcactggactgcattcctgaatgcccttatcataagccccttggtttcgaaagtggcgaagtcaccccagatcaaattacatgctcaaatcccgagcagtacgtgggttggtatagtagctggacagccaacaaagcccggctgaatagccaggggttcggttgtgcatggctatccaagtttcaggactccagtcagtggttgcagatcgatttaaaggagattaaggtcatttcgggtatcctaactcagggtaggtgtgacatagacgagtggatgacgaaatatagtgtgcagtatagaactgacgaacgtctcaactggatatattacaaggaccaaaccgggaataaccgagtgttttatggcaactccgaccgtacatctacggtccagaatctcctgcggccaccaatcatctctcgatttattcggttgatccctctgggttggcacgttcgcattgcaatccggatggaactgctggagtgtgtgagtaagtgcgcg

SEQ ID NO: 7115 - DNA, 672 bp, Artificial Sequence
  derived and/or modified sequence
atgtcgcgcaagatcgagggtttcctcctgctcctgctgttcggatacgaggccacgctgggtctgtcctcgaccgaagatgaaggcgaagatccatggtaccaaaaggcctgcaagtgcgattgccagggaggcccaaatgccctgtggagcgccggagccacctcactggattgcatcccggaatgtccttaccacaagccccttggatttgagtccggtgaagtgactccggatcaaatcacgtgctcgaacccagaacagtatgtcggctggtactcgtcatggactgccaacaaggcccgcctgaattcgcagggcttcggctgtgcttggctgagcaaattccaggactcatcgcaatggctccagatcgaccttaaggagattaaagtcatttccggaatcctgacccagggaagatgcgacatcgatgagtggatgactaagtactctgtgcaatatcggaccgacgagcgcctgaactggatctactataaggatcaaaccggcaacaatagagtgttttacggaaactcagaccgcacttctaccgtccagaacctgctgcggccgccgatcatcagcaggtttattcgtctgatcccacttggatggcacgtccgcatcgcgattcggatggaattgctcgaatgcgtctcaaaatgcgcc

SEQ ID NO: 7116 - DNA, 672 bp, Artificial Sequence
  derived and/or modified sequence
atgtcgagaaagatcgagggattcctcctgcttcttctgtttggttacgaagccactcttggactcagctctactgaggatgaaggtgaagatccatggtaccaaaaggcatgtaagtgtgattgtcaaggaggcccaaacgcactttggtcagcaggtgcgacttcattggattgtattccagaatgcccttaccacaagccgctcggattcgagtccggagaggtgaccccagaccaaattacctgctccaatcctgaacagtacgtggggtggtactcgtcttggactgctaacaaggccagacttaactcacaaggttttgggtgcgcctggctgtcgaaatttcaggatagctcgcagtggctgcagattgatcttaaggagattaaggttatttcgggtatcctgactcaaggcagatgtgacattgatgaatggatgaccaagtactcggtgcagtaccgcacggatgaacggctcaactggatttactacaaggatcaaaccggcaacaaccgagtgttctatggaaactccgacagaacctcgacggtgcagaatctgcttaggcctcctataatctcgcggttcatccgactcattcccctcggatggcatgtccgcattgcgattagaatggaacttctggaatgtgtgtcgaagtgcgca

SEQ ID NO: 7117 - DNA, 672 bp, Artificial Sequence
  derived and/or modified sequence
atgtctaggaagatagagggtttccttctgctgctgttgtttggctacgaagccacactgggactcagcagcacagaggatgaaggagaagacccgtggtaccagaaagcgtgcaagtgtgactgccagggcgggccaaacgctctgtggtcagcgggagccacatcactggattgtattcccgaatgtccctaccacaagcctctaggcttcgagagtggagaggttaccccagaccagattacttgttctaatccagagcagtacgtcggttggtactcgtcctggacagctaataaggctcgcctcaattcccagggctttgggtgcgcgtggttgtctaagtttcaggactcatcccagtggctgcagatcgacctcaaggagataaaggttattagtggcattctgacccagggacggtgtgatattgacgagtggatgacgaaatactccgtgcagtatcggacagacgaaaggttgaactggatctactacaaagatcagacaggcaataatcgggttttctacggcaactccgacagaacatctacggtgcagaacctgttgcgcccacctattattagccgcttcatcaggctgattcccctgggctggcatgtgcgcatcgccatcagaatggagctcttggagtgtgtgtcaaagtgtgca

SEQ ID NO: 7118 - DNA, 672 bp, Artificial Sequence
  derived and/or modified sequence
atgtcccgcaaaatcgaaggctttttgctgctgctgctcttcggatacgaggcaaccctgggccttagctcaactgaagatgaaggtgaagatccttggtatcagaaagcctgcaagtgcgattgccaaggcgggccgaacgcactctggtcggccggagccacctccctggactgcatccccgagtgcccttaccacaagccgctgggattcgaatcgggcgaagtgaccccggaccagatcacctgttcgaatccggagcaatacgtgggatggtactcgagctggaccgctaacaaagcccgtcttaattcccagggttttggctgcgcatggctgtcaaagttccaggattcatcccaatggctccagatcgacctgaaggaaatcaaggtgatctcaggaatcctgacccagggcaggtgtgacatcgacgaatggatgactaagtactctgtgcagtacagaactgacgagcgcttgaactggatatactacaaagaccagactggcaacaatagagtgttctacggaaactccgacaggacctcaaccgtgcagaatttgctgcgcccgccaatcatctccagattcattcggctcatccctctggggtggcatgtgagaatcgcaatcagaatggagttgctcgagtgcgtttcgaagtgcgca

SEQ ID NO: 7119 - DNA, 2810 bp, Artificial Sequence
  derived and/or modified sequence
cagttcagtaaggtagagctttggccgaggacgaggggaagatgtcacgcaagatagaaggctttttgttattacttctctttggctatgaagccacattgggattatcgtctaccgaggatgaaggcgaggacccctggtaccaaaaagcatgcaagtgcgattgccaaggaggacccaatgctctgtggtctgcaggtgccacctccttggactgtataccagaatgcccatatcacaagcctctgggtttcgagtcaggggaggtcacaccggaccagatcacctgctctaacccggagcagtatgtgggctggtattcttcgtggactgcaaacaaggcccggctcaacagtcaaggctttgggtgtgcctggctctccaagttccaggacagtagccagtggttacagatagatctgaaggagatcaaagtgatttcagggatcctcacccaggggcgctgtgacatcgatgagtggatgaccaagtacagcgtgcagtacaggaccgatgagcgcctgaactggatttactacaaggaccagactggaaacaaccgggtcttctatggcaactcggaccgcacctccacggttcagaacctgctgcggccccccatcatctcccgcttcatccgcctcatcccgctgggctggcacgtccgcattgccatccggatggagctgctggagtgcgtcagcaagtgtgcctgatgcctgcctcagctcggcgcctgccagggggtgactggcacagagcgggccgtaggggaccccctcacacaccaccgagatggacagggctatatttcgcaaagcaattgtaactgcagtgctgggtagataatttttttttttttaagatatagctttctgatttcaatgaaataaaaatgaacttattccccactcagggccagagaaagtcagaacaaagaaaatgtccccgaaacgaattttcttacaaaagcctaagtagcaggggtaattttctgctcattttttgtctcagtgatactgtgaaaggtgcagtctcaggggaacacaaagcagccctgataatttgaaaattcatttgctttaccacattcaagacagaaacatacagtttcctaaagcctggctttgaatgcagaagggagcagctcctcctagttaagtttccactaaatcatcgccaaagaggacttcagagccctggggaggcagctgagggtctcaagggtgactgggtggcagggatgagtgcggtgggtgagaatcccggtgccctgagaggctatacgtgacaaatgaccaaaagcccaaggtaggggagtttcctctgctcacagttcttaccttcaaggcggatctgggcttccaccctcatgaacacagggattggggagggaccagagcgcccaatacacacagctccattatgcaatccattccagcaaattccccgtgtctgtggtcaccatttaggtgatcatacaggacaggctgcacatctcagtatatgtagggaccccaaatgaccacaacacagtacaattgccctttacctagggctaccatttcctagcaaaccaaacatagttcgagaacagctggcccaggagctaccactggctactcagaggaggctcattagctggctacatgcttcgcaggaagtgggaaggactcacatcataaaaaggaccatgtagctttttccctgaaagcttctcaccctccaccctctgccttgcaatacgcaaactgcgcctgctcctgaaaagctctctgggaaggaatgggcctggctttccgttcctggaggcggcgccttagattgggaggcctcattggccacttagagcgcagcctgagtttccaggccccttcctgggagaggctgttaacacgggggaggggcaggagagggatatggagagcaggtggtggaatcagaggacgaggctgctctaaagactgttctggccccagacacagggtagtctttgctagcagctcatttccgagttacttttcattttcaaatgccaaggcaagtgactagactcgcgctaatacagtgctggacaacacattcaccttttctgtgaacaggcagccttctaaaagccccaaacatccttcttgatgctttgggggctcaattattttatatccaacccagcatctttctagtccctatgctgtatgcttgaacttcggaaaatgcttttccccgcccaatcttctctcaaatataaacacatcacacagggtgttgggggtggggggggggggtggggggacttatccctggccttaggacacaggacaaatctattttggatagaaatgcctgaacagagacccttatttggaaaggtgaattaactttggtcacgacatggactgtcagacaaaatggcagtatcctaagagttaaggcacatcaaacacaggagtcgagagagtgcagttcagggaaaaaggagaggaggaaacagtgaggcagggagaaaggctttccaaataagagttcatgttggaaacttttgtcacggctttattgagattaagttcacatacaatttgtatccatttaaagtgtacaatttgatgacttttggtatattcagagttgtgcaaccattatcactagatcaattttagaaagtttatcaccccaaagagaaatcctgcacccatcagccaacactccccaacccatcggccaccccaagccctctgcaaccacgaatcgactgtctctgtagattggccttctggacgttctacataaatgaaatcatatagtatgtggta

SEQ ID NO: 7120 - DNA, 675 bp, Artificial Sequence
  derived and/or modified sequence
atgagcagaaagatcgagggcttcctgctgctgctgctgttcggctacgaggccaccctgggcctgagcagcaccgaggacgagggcgaggacccctggtaccagaaggcctgcaagtgcgactgccagggcggccccaacgccctgtggagcgccggcgccaccagcctggactgcatccccgagtgcccctaccacaagcccctgggcttcgagagcggcgaggtgacccccgaccagatcacctgcagcaaccccgagcagtacgtgggctggtacagcagctggaccgccaacaaggccagactgaacagccagggcttcggctgcgcctggctgagcaagttccaggacagcagccagtggctgcagatcgacctgaaggagatcaaggtgatcagcggcatcctgacccagggcagatgcgacatcgacgagtggatgaccaagtacagcgtgcagtacagaaccgacgagagactgaactggatctactacaaggaccagaccggcaacaacagagtgttctacggcaacagcgacagaaccagcaccgtgcagaacctgctgagaccccccatcatcagcagattcatcagactgatccccctgggctggcacgtgagaatcgccatcagaatggagctgctggagtgcgtgagcaagtgcgcctag

SEQ ID NO: 7121 - protein, 892 aa, Artificial Sequence
  derived and/or modified sequence
MSERAADDVRGEPRRAAAAAGGAAAAAARQQQQQQQQQQPPPPQPQRQQHPPPPPRRTRPEDGGPGAASTSAAAMATVGERRPLPSPEVMLGQSWNLWVEASKLPGKDGTELDESFKEFGKNREVMGLCREDMPIFGFCPAHDDFYLVVCNDCNQVVKPQAFQSHYERRHSSSSKPPLAVPPTSVFSFFPSLSKSKGGSASGSNRSSSGGVLSASSSSSKLLKSPKEKLQLRGNTRPMHPIQQSRVPHGRIMTPSVKVEKIHPKMDGTLLKSAVGPTCPATVSSLVKPGLNCPSIPKPTLPSPGQILNGKGLPAPPTLEKKPEDNSNNRKFLNKRLSEREFDPDIHCGVIDLDTKKPCTRSLTCKTHSLTQRRAVQGRRKRFDVLLAEHKNKTREKELIRHPDSQQPPQPLRDPHPAPPRTSQEPHQNPHGVIPSESKPFVASKPKPHTPSLPRPPGCPAQQGGSAPIDPPPVHESPHPPLPATEPASRLSSEEGEGDDKEESVEKLDCHYSGHHPQPASFCTFGSRQIGRGYYVFDSRWNRLRCALNLMVEKHLNAQLWKKIPPVPSTTSPISTRIPHRTNSVPTSQCGVSYLAAATVSTSPVLLSSTCISPNSKSVPAHGTTLNAQPAASGAMDPVCSMQSRQVSSSSSSPSTPSGLSSVPSSPMSRKPQKLKSSKSLRPKESSGNSTNCQNASSSTSGGSGKKRKNSSPLLVHSSSSSSSSSSSSHSMESFRKNCVAHSGPPYPSTVTSSHSIGLNCVTNKANAVNVRHDQSGRGPPTGSPAESIKRMSVMVNSSDSTLSLGPFIHQSNELPVNSHGSFSHSHTPLDKLIGKKRKCSPSSSSINNSSSKPTKVAKVPAVNNVHMKHTGTIPGAQGLMNSSLLHQPKARP

SEQ ID NO: 7122 - DNA, 423 bp, Artificial Sequence
  derived and/or modified sequence
atggactgcaagagccccaagagagccaacatctgcccccacctgcccggcggcggcctgttcagcaccccccccagccaggccgcctggagaaccctgctgaccgccctgtgcttccccggccccacctgcaccggccccatgagagagggccccagagccgtgtacaacccccccagagcccacagaaacagcagcgacaactgcgtgatgaagcacctgctgtgcgccggcgacaagaacggcaccagaagacacgccctgcccagccccctggagggcagcttccagcccggcagacagatcccccccccccagacccccagcaccgacccccagaccctgcccctgagcttcagaagcctgctgagatgccaccagctgtgcgccgccagcctgccccccagcctgaagctgccctag

SEQ ID NO: 7123 - DNA, 2679 bp, Artificial Sequence
  derived and/or modified sequence
atgagcgaacgcgccgctgatgacgtcagaggagaaccccgacgggcagcggctgctgcgggaggcgccgcggccgccgctgcccggcaacagcaacagcagcagcagcaacaacagccaccccccccacagccacagcggcagcagcatccaccaccaccaccccgcagaactcgccccgaggatggaggacccggcgctgcctcaacctctgctgctgctatggcaacggtcggggagcgccgaccattgccatcccctgaggttatgctgggacagtcttggaatctctgggtggaggcatcgaagctgcccgggaaggatggcaccgagttggatgagagcttcaaagagttcggcaagaaccgcgaggttatgggcctgtgcagggaggatatgcctatcttcgggttttgtcctgcacacgatgacttctacctggtcgtgtgcaacgactgcaaccaggtggtgaaaccgcaggcgttccagagtcactatgaacgaaggcatagcagcagctccaagccgcctctagccgtccctcctaccagcgtgttctctttctttccatccctatccaagtcaaaaggcgggagtgccagtggtagtaatcgatcctcatccgggggtgtccttagtgcctcatcatcctccagcaagttgcttaaaagtccgaaagaaaagctccaattgcgcgggaatacacgccctatgcaccctatacagcagtctcgagtgccccatggaagaatcatgacgcccagcgtgaaagtcgaaaaaattcaccctaagatggacggaacactcctgaaaagcgccgtgggacccacctgtcccgccactgtgagctccttggtgaagcctggtttaaactgtccttcaatcccgaagccaaccctgccgtccccgggacagattctcaacggcaaaggcttgcccgccccacccaccctcgagaagaagcctgaggataatagtaacaacaggaaattcttaaacaaacgcctttctgagcgggagttcgatcccgatatccactgcggggttatcgatctagataccaaaaagccttgtactcgctctctaacttgtaagactcattccctgacccagcggcgggctgtccaggggagacggaagcgctttgatgtgctcttagccgagcacaagaacaaaactcgagagaaagagctgatccgccaccccgatagccagcagcctccccagcccctcagggacccccaccctgcaccccctaggactagtcaggaacctcaccagaacccacacggtgtcatcccttcagagagtaagcctttcgtggccagcaaacctaagccacataccccaagcctccccagaccgccaggctgccccgcccagcaggggggatcagccccgatcgaccctcccccagtgcacgagtcaccacacccgcctttgccagctaccgagcccgcatccagactgagcagcgaagagggcgaaggagatgacaaagaagagtccgtggagaaacttgactgtcattacagcggacaccacccccaaccagccagcttctgcacattcggctctcggcagatcggccgcggttattacgtcttcgatagtcgctggaacaggttgcgatgtgccctgaacctgatggtggagaagcatttaaatgctcagctgtggaagaagatcccccccgttccatcaactaccagccccatctccactaggatcccgcaccggacgaattccgtccccacctcccaatgcggggtttcctatctagcagccgctacagtgagcactagtcccgtgctccttagttcaacatgtatatccccgaacagcaagtctgttcccgctcatggtaccactctgaacgcacagcccgccgcctccggcgcaatggacccagtctgctcaatgcagagtcgacaagtctcatccagctcaagcagcccgtccacaccatcgggactgtcttccgtgcctagctctccaatgagccggaaaccacagaagctgaaatccagcaaatcccttcgacccaaggagtcttcaggcaacagcacaaactgtcagaacgcgtcctcatccacgagcggtggatcagggaagaagagaaaaaacagcagcccattgctagtgcactcctcgtcctcctcctcgtcctcttcatccagcagccactccatggaatcattccgcaagaactgtgttgcccactctgggccaccttacccgtctacagttacatcctcccacagcatcggtttaaattgcgtcacaaataaggccaacgccgtgaacgttcggcatgatcagtccggtagagggccccccaccgggagccccgccgagtctataaagcgtatgtctgtcatggtgaacagttcagactccactctgtctctgggacctttcatccaccagtcaaacgagctccccgtgaattcacacggctcgttctcccacagccacacgcctctggataagctgatcggcaaaaagcgcaagtgctctccgagttcaagtagcatcaacaattcctcttcaaagcccacgaaggtcgccaaggtccccgccgtcaataatgtccacatgaaacatacagggacaataccaggcgcacagggcctgatgaactcctctttgctgcaccaacccaaagctcggccctag

SEQ ID NO: 7124 - DNA, 2679 bp, Artificial Sequence
  derived and/or modified sequence
atgtcagagcgtgccgctgacgacgtccgcggggagccacgtagggccgctgcagctgcggggggagccgcagcagccgccgcgcggcaacagcaacagcagcaacagcaacagcaaccgccgcctccccaaccacaaaggcagcagcatcccccgccacccccgcgaagaactcgaccggaggatggggggccaggcgctgcatctactagcgcagcagctatggccacggtgggggagagaagaccacttcctagccctgaggttatgttggggcaatcatggaacctgtgggtggaagccagcaaattgccaggaaaagacgggacagaattggacgaaagttttaaagagtttggcaagaatcgggaggtgatgggtctttgcagagaggacatgccaatctttggattttgtccggctcatgatgacttttacttggttgtgtgtaatgactgtaaccaggttgtcaagccacaggcgtttcagtctcactatgaacggcggcatagctctagctctaagccccctttggcagtgcctccaacaagcgtgtttagctttttccctagtttgagtaaaagcaagggcgggagtgcttctggatccaatcgctcatcttctgggggtgtgctttctgccagctcttcatcctccaagcttctgaagtccccaaaggagaaattgcaattacgcggaaatacacgcccgatgcatcccattcagcaatccagagttccccatggcaggattatgacaccctccgtgaaggtggagaagattcaccctaagatggacggaacacttcttaagtccgccgtaggacctacatgtcccgcaaccgtgagcagcctggtgaaacccggactaaattgcccaagtatacctaagccaacactcccctcaccaggacagatcctaaacggaaagggccttcctgcgccaccaaccctcgagaagaagcctgaagataatagcaataatcgcaagtttctgaataaacgcctcagcgaacgcgagttcgacccagacatccactgcggcgtcattgatctggacacaaaaaagccctgtacacgatctctgacttgtaaaacgcactccctcacacaaaggagagccgtgcaaggacggagaaagaggtttgacgtccttttggcagaacacaaaaacaagaccagagaaaaagaactgatcagacaccccgactcacagcaaccacctcaacctctaagagatcctcatcctgctcccccaaggacctctcaggagccgcatcagaacccccatggggttattccttccgaatccaaacctttcgtggcatccaaacctaaacctcatacaccatcgctcccacgcccccccgggtgccctgcacagcagggcggtagtgcacccattgacccaccccccgtccacgagtcaccccacccgcccctccctgcaacagagcccgcctctaggctttctagtgaagaaggggagggtgacgataaagaggagtccgtggagaaactcgattgccactatagcggccatcacccacagcccgcctccttttgcacattcggcagccggcagataggtcggggctactacgtcttcgactcccgttggaatagacttcgttgcgccctgaacttgatggtcgaaaagcatttgaacgcacaactctggaaaaaaataccgcccgtaccaagtacgacctcccccattagcacacgcattccacatagaacaaacagcgtgccaacctcccagtgcggagtcagttatctggccgccgcaactgtgagcacaagtcctgtcttgttgagctccacttgcattagcccgaattcaaagtcagtccccgcacacggaacaaccctgaacgcccaaccagcagccagtggagcaatggacccagtgtgtagcatgcagtcacggcaagtctcatcctctagctcgtcacccagcacgccaagtggactcagtagcgtaccctcttctccgatgtctagaaagccccagaagttgaaaagcagcaagtcgctccgtccaaaagagagctccggcaattccacaaactgccagaatgcctcctcctcaacttcaggcgggagcggaaaaaaaaggaaaaactcctccccactgctggtgcactctagctcaagtagttcctcctcctcatcatcctctcattcaatggaaagcttccgcaagaattgcgtggcgcactctgggccaccatacccatctacagtgaccagcagtcactcaattggcttaaactgcgttaccaataaagccaacgccgttaatgtgcgccacgaccagagtggacgcggaccccccacaggaagccctgctgagtccatcaaacgaatgtcagtgatggttaactcatccgactcaactctgtcactaggcccctttattcaccagtcgaacgagctgcccgtaaacagccacgggtccttctcccacagtcacactcccctcgacaagctgattggaaaaaagcgcaagtgcagcccgtcatcgagctccattaacaatagctcttctaagccaacaaaggtagccaaagtgcctgccgttaataatgtccatatgaaacatacaggaaccataccgggagcccagggccttatgaactccagtctgctgcatcaacccaaagcaaggccatag

SEQ ID NO: 7125 - DNA, 393 bp, Artificial Sequence
  derived and/or modified sequence
atgtccgagcgggcagcagatgatgtgagaggcgaaccccggcgggcggcggctgccgcaggcggtgccgccgctgcggctgcccggcagcagcagcagcagcagcaacagcagcaaccaccccccccacaacctcaacgacaacagcacccgccccctccccctcggaggactaggccggaagatggtggtcccggagcggcatccacctccgctgccgcaatggcgaccgtaggtgagcgtcgcccccttccttcccctgaggtgatgttaggtcagtcgtggaacctgtgggtggaagcaagcaagctgccgggcaaggatggtgataggataggtcggaagtttcaaggcgtgtggaatcgggaagtcatgggcctgtgccgtgagtag

SEQ ID NO: 7126 - DNA, 2679 bp, Artificial Sequence
  derived and/or modified sequence
atgtctgaaagagctgctgatgatgtgcggggggagccccggcgggctgctgctgctgctgggggcgctgctgctgctgctgcccggcagcagcagcagcagcagcagcagcagcagcccccaccaccccagccccagaggcagcagcaccccccacctccacccaggaggaccaggccagaagatggcggccctggagctgccagcaccagcgctgctgccatggccaccgtgggggagcggcggcccctgcccagccctgaggtgatgctgggccagagctggaacctgtgggtggaggccagcaagctgcccgggaaggatggaacagagctggatgagagcttcaaggagtttgggaagaaccgggaggtgatgggcctgtgccgggaggacatgcccatcttcggcttctgcccagcccatgatgacttctacctggtggtgtgcaatgactgcaaccaggtggtgaagccccaggccttccagagccactatgaaagaagacacagcagcagcagcaagccacccctggccgtgccccccaccagcgtcttctccttcttccccagcctgagcaagagcaagggcggcagcgccagcggcagcaacagaagcagcagcggcggcgtgctgagcgccagcagcagcagcagcaagctgctgaagagccccaaggagaagctgcagctgcggggcaacacccggcccatgcaccccatccagcagagccgggtgccccacggccgcatcatgaccccatctgtgaaggtggagaagatccaccccaagatggatggcaccctgctgaagtctgctgtgggccccacctgcccagccaccgtgagcagcctggtgaagccaggcctgaactgccccagcatccccaagcccaccctgcccagccctggccagatcctgaatggcaagggcctgcctgccccacccaccctggagaagaagccagaggacaacagcaacaacaggaagttcctgaacaagaggctgtctgagcgggagtttgatcctgacatccactgtggggtcatcgacctggacaccaagaagccctgcaccaggagcctgacctgcaagacccacagcctgacccagaggagagctgtgcagggccgcaggaagagatttgatgtgctgctggccgagcacaagaacaagacccgggagaaggagctgatccgccacccagacagccagcagcccccccagcccctgcgggacccccacccagccccacccaggaccagccaggagccccaccagaacccccacggcgtcatccccagcgagagcaagccctttgtggccagcaagcccaagccccacacccccagcctgcccaggcctcctggctgcccagcccagcagggcggcagcgcccccatcgaccccccacctgtgcatgagagcccccacccccccctgcctgccacagagcccgccagccggctgagcagcgaggagggggagggagatgacaaggaggagagcgtggagaagctggactgccactacagcggccaccacccccagcctgccagcttctgcaccttcggcagccggcagatcggccggggctactacgtgtttgacagccgctggaaccggctgcgctgtgccctgaacctgatggtggagaagcacctgaatgcccagctgtggaagaagatcccccctgtgcccagcaccaccagccccatcagcacccgcatcccccacaggaccaacagcgtgcccaccagccagtgtggggtgtcctacctggccgccgccaccgtgtccaccagccctgtgctgctgagcagcacctgcatcagccccaacagcaagtctgtgcctgcccacggcaccaccctgaatgcccagcctgctgccagcggggccatggaccctgtgtgcagcatgcagagccggcaggtgagcagcagcagcagcagccccagcaccccatctggcctgagctctgtgcccagcagccccatgagcaggaagccccagaagctgaagagcagcaagagcctgcggcccaaggagagcagcggcaacagcaccaactgccagaatgccagcagcagcaccagcggcggcagcggcaagaagaggaagaacagcagccccctgctggtgcacagcagcagcagcagcagcagcagcagcagcagcagccacagcatggagagcttcaggaagaactgtgtggcccacagcggccccccctaccccagcacagtgaccagcagccacagcatcggcctgaactgtgtgaccaacaaggccaatgctgtgaatgtgagacatgaccagagcggccggggccccccaacaggcagccctgctgagagcatcaagaggatgtctgtgatggtgaacagcagtgacagcaccctgagcctgggccccttcatccaccagagcaatgagctgcctgtgaacagccacggcagcttcagccacagccacacccccctggacaagctgattggcaagaagaggaagtgcagccccagcagcagcagcatcaacaacagcagcagcaagcccaccaaggtggccaaggtgcctgctgtgaacaacgtgcacatgaagcacacaggcaccatccctggggcccagggcctgatgaacagcagcctgctgcaccagcccaaggcccggccctag

SEQ ID NO: 7127 - DNA, 393 bp, Artificial Sequence
  derived and/or modified sequence
atgtctgaaagagctgctgatgatgtgcggggggagccccggcgggctgctgctgctgctgggggcgctgctgctgctgctgcccggcagcagcagcagcagcagcagcagcagcagcccccaccaccccagccccagaggcagcagcaccccccacctccacccaggaggaccaggccagaagatggcggccctggagctgccagcaccagcgctgctgccatggccaccgtgggggagcggcggcccctgcccagccctgaggtgatgctgggccagagctggaacctgtgggtggaggccagcaagctgcccgggaaggatggagaccgcatcggcaggaagttccagggcgtgtggaaccgggaggtgatgggcctgtgccgggagtag

SEQ ID NO: 7128 - DNA, 2679 bp, Artificial Sequence
  derived and/or modified sequence
atgagcgagcgggccgccgacgacgtgcggggcgagccccggcgggctgctgcggccgccggcggagccgccgccgcggcagcgagacaacagcagcagcagcagcagcagcaacagcctccccccccacagccccagcgccagcagcatccccccccccctccccgacgaactcgtcccgaggatggcggcccaggcgctgcctctacaagcgccgctgcaatggcaaccgtaggggagaggcgccctttgccatcccctgaggtgatgcttggccagtcttggaacttatgggtggaggcaagcaagcttccaggcaaggacggcactgagctggacgaatcgtttaaagaatttgggaagaaccgcgaggtaatggggctctgtagggaggatatgcccattttcggcttctgccctgcacacgacgatttctatttagtggtctgtaacgattgtaatcaggtggtcaagcctcaggcatttcaaagtcattatgaaagaagacattcatcctcatctaagcctccactagccgttccccccacctcagtcttctcattctttccttccctgagtaaaagcaaggggggctccgcatccggttcaaacagaagctctagcgggggcgtcttgtccgcttcaagctctagttccaagctgctgaagtcaccaaaggagaagctgcagctccgtggcaatacaagacccatgcatccaatacagcagtctcgggttccccacggccggattatgacaccaagcgtgaaagttgagaagattcacccaaagatggacggcactctgctcaagtctgctgtcggacctacttgtcccgcaaccgtgtcctcactcgtgaaacctggtctgaattgcccttcaatccctaagcctactctcccctcccctggtcagattttaaatggcaagggtctgcctgctccgccaactttagaaaagaagccggaggataactccaataacaggaagtttctgaataaaaggctgtctgaacgcgagtttgatcctgatatccactgcggagtgatcgacctggatacaaagaagccgtgtaccagaagcctaacctgcaaaacacattctctgacccagagacgcgcggtgcaggggaggcgaaagcggtttgatgtattattagctgagcacaagaacaagactagggaaaaagaacttattcggcacccagacagtcagcagcccccacagccacttagggaccctcaccccgcacctccccggacctcacaggaaccgcaccagaaccctcatggggtgatcccgtcggagtcaaagccttttgtcgcctctaagcctaagcctcacactccctcactcccacggccgcccggctgccccgcccaacagggggggtcagccccaatagatcccccaccagtgcatgagtcaccacatccacccctccctgccacagagcctgcaagccgcctgtcaagcgaagagggggagggggacgacaaagaggaatccgtggagaagctcgactgccactattccgggcatcatcctcagcctgcatctttttgtacatttggaagtcgccagataggaaggggatattacgtgtttgactccaggtggaataggctcagatgcgctttgaacctgatggttgaaaaacacctcaatgctcagctttggaagaagatccctcctgtgccctccaccacatcccctatttctacgcggatcccccacaggaccaacagcgtgcctactagccagtgcggagtctcctacctggctgcggccaccgtgagtacttcccccgttctcctttcatctacctgtatatccccaaacagtaagagcgtacctgcccatggaacaaccctcaacgcgcagcccgcagcaagtggagctatggatcctgtgtgtagcatgcagtccagacaagtaagctcaagttccagctccccttcaactcctagcggcctgtcatccgttccttcttctcccatgagcaggaagcctcagaagctcaagtcttctaaatccctccgccccaaggaatcaagcggtaactctaccaattgccagaatgcatctagcagcacatctggcgggagtggcaagaaacggaaaaactcatcaccactattggtgcattcctcaagctctagttcctcaagttcatctagcagccacagcatggaatcgtttagaaaaaactgcgtcgcccattccggacctccttaccctagcactgtgacctcatcacactccattgggctcaactgcgtgactaacaaggctaatgcagtgaacgtacgacacgaccaaagtggaagaggcccacctaccggatcaccagcagaatccattaagcggatgtccgtaatggtaaacagttccgattctaccttgtctctcggaccgttcattcatcaatccaatgaactgccagtgaactctcacgggagtttttcccactcccacacccccctcgataaactaattgggaaaaagaggaaatgcagccccagctcaagtagcatcaacaacagctcaagtaaaccaaccaaggttgcgaaagtccctgctgtcaataatgttcacatgaagcacaccggtacgattccaggggctcaggggcttatgaacagttctctactccaccagccaaaggcccgaccctag

SEQ ID NO: 7129 - DNA, 2679 bp, Artificial Sequence
  derived and/or modified sequence
atgagcgagcgggccgccgacgacgtgcggggcgagccccggcgggcagcggcggcggccggcggggccgccgctgctgccgcaagacagcagcaacagcagcagcagcagcagcagccccctcctccccaaccccaaaggcagcagcatccccctccgcccccacggcggaccaggcccgaagacgggggacccggggccgcaagtaccagcgcggccgccatggcgactgttggcgaaagacgccctttaccgagtcccgaggtcatgctggggcagtcttggaatctctgggtggaagctagcaaactccccgggaaggacggaactgagctcgacgagtcctttaaagaatttggtaagaatcgggaggtcatgggtctatgtcgcgaggatatgccaatcttcggtttctgcccagctcacgatgacttttatttagtggtgtgcaacgattgcaaccaagtggtcaaaccccaagccttccagagccactacgagaggcgccatagcagtagcagcaaaccccccctcgctgttcctccgacttcggtgttcagcttcttccctagtctttcaaagagtaagggtgggagcgctagcggttcaaatcgctcttcgagtggtggggttctcagcgcttcctcgtccagcagcaagctgctcaaatcaccaaaggaaaagctgcaactccgtggaaacaccaggccgatgcacccaatccagcagagtcgtgttcctcatggaagaattatgactccgtctgtgaaggtggagaagatacaccctaaaatggatggcacgctgttaaagagcgccgtcggcccaacctgtcccgccaccgtgagctctttggtgaagccaggcctcaactgcccttctattcccaagcctactttaccttcacctggccagattctgaatgggaagggcttaccagccccgcccacactggagaaaaaaccggaagataatagtaacaatagaaagttcttgaacaaaagactgtcggagcgcgagtttgacccggatattcattgtggggtgattgacctcgacaccaagaagccatgcaccaggtcattgacctgtaagacccatagcttgacacagaggcgggcagtacaaggacgcagaaaacgcttcgatgttctgcttgctgaacacaagaacaagactcgggaaaaagaactgatccgtcatcctgatagccagcagcctccacagccccttcgagatccacacccggcacctcctcgcacatcgcaagagccccatcagaacccacatggagtcataccgtcagagagcaagcccttcgtggcaagcaagcctaagccccacaccccatctctgcctaggccgcccgggtgcccagcccaacaggggggaagcgcgcccatcgatcctcctccagtccatgaatcaccacacccaccactgcccgcaacggaaccagcatctcgtctgtcttcggaggaaggcgagggcgacgacaaggaggagtctgtggagaagctggactgccattacagcggtcaccatccccagccagccagcttctgtacctttgggtctcgacagatcggaaggggttattatgtcttcgactctcgatggaacagattgcgctgtgcactgaatctcatggtggaaaagcatcttaatgctcagctctggaaaaaaatcccccctgttccatctacaacctcccctatatccaccaggatcccacataggactaattccgtgcctacctcccaatgtggtgtttcttacctggccgccgctaccgtgtcaaccagtcctgtgctgttgtcttctacatgcatatctcccaacagtaagtcagtgcctgcccacggcaccacgttgaacgcacaacctgcggcctccggcgcaatggaccccgtctgctcaatgcagagcagacaggtgtcctcatcgagcagtagcccttcgacgccgagcggcttaagtagcgtcccatctagccctatgtctcggaagccgcagaagctgaaatctagtaagagtctgaggccaaaggagagcagcgggaactcaaccaattgtcaaaacgcctcgtcgagcacctccgggggtagcggcaaaaagcgtaagaacagctctccgctgttggtgcatagttcaagctcctcatcctcctcctcctcctcctcccactctatggaatcctttcgcaaaaattgtgtagcacatagtggacctccttatccatccacggttacatcatcacacagcatcgggctcaactgcgtgaccaataaggctaatgccgttaacgtcaggcacgatcaaagcgggcgcgggccacccacgggctctccggctgaatctattaagcgcatgtccgtcatggtaaatagcagcgattctaccctgagcctgggtccttttatccaccaatctaatgagctgcctgtgaattctcatggcagctttagccacagtcacacacctcttgataaattgattgggaagaagcgcaagtgcagcccatcatcgtcttcaataaataatagcagcagtaaaccaacgaaggttgctaaggtgccagccgtaaacaatgtgcacatgaagcataccgggacaatccccggagcacaaggattaatgaattcctctcttctccatcagccaaaggctaggccatag

SEQ ID NO: 7130 - DNA, 393 bp, Artificial Sequence
  derived and/or modified sequence
atgagcgagcgggccgccgacgacgtgcggggcgagccccggcgggccgcggctgcagcgggaggagccgccgcggcagcagcacgccagcagcagcaacagcagcagcagcagcaaccacccccgccgcagcctcaacgccagcagcatccgccacctcctcctcgccgtacccgtccagaagacggagggcccggggcagcctctacatccgccgcggctatggccaccgtcggagagcgcaggccgctcccgtcgcccgaggttatgctggggcaatcctggaacttgtgggttgaggcctctaagctgccagggaaggatggagacagaattggacgcaaattccagggagtgtggaatcgagaagtgatgggcctgtgtcgggagtag

SEQ ID NO: 7131 - DNA, 2679 bp, Artificial Sequence
  derived and/or modified sequence
atgagcgagagggccgctgacgacgtgcggggtgagcccagacgagctgcagccgctgccggaggagctgctgctgccgcagcccgtcagcaacaacagcagcagcagcagcagcagccaccccctcctcagccgcagcgccagcagcatccgccacctccccctagaaggactcgcccagaggatggcggacccggagcggcatcaacatccgcggcagccatggccaccgtgggtgagcgaagaccacttccgtcacccgaagtgatgctcggccagtcctggaacctttgggtagaagcatcgaagttgcccggtaaggatggcactgaactagatgagagcttcaaggagtttggcaagaaccgcgaggtgatgggcctgtgtagagaagacatgcccattttcggcttttgccctgctcatgatgacttttacctggtggtatgcaacgattgcaaccaagtggttaagccgcaggcttttcagtctcactacgagcggaggcacagcagcagctcaaagcctcctctggctgtgccacctacctctgtgttttcattcttccctagtctctccaaaagtaagggaggcagtgcgagcggtagtaataggagcagcagcggcggagtactgtccgccagttcgagtagctcgaagctgcttaagagccctaaggagaagctccagttaaggggtaacacaagacccatgcatcccatccagcaatcgagagtcccccatggaaggatcatgacaccaagcgtgaaagtggagaaaattcacccaaaaatggatgggactttactgaagtcagcagtggggccaacctgtcctgccactgtcagtagcctggtgaaaccaggtttgaactgcccttcaataccgaaacccactctgccaagcccaggtcaaatcctcaacggaaaggggctgccggcaccacccaccctggagaaaaagcctgaagacaactctaataacagaaagtttttgaataaaaggctgagcgaaagagaattcgacccagatatccattgtggagtgatagatctggatacaaaaaaaccctgcacccgctccctgacttgcaagactcatagcctgacacaaaggagagccgtgcagggcaggcgaaagagattcgacgtcctgctggccgagcacaaaaacaaaactcgcgaaaaagagttaattcgacatccagacagccagcagcctccgcagcccctgagggacccacaccctgccccacccaggacctctcaggagccacaccaaaacccgcacggggtgataccctccgagtcaaaaccttttgtggcctccaagccgaaaccccataccccatccttgcctagaccgcctggctgtcccgctcagcaagggggaagcgcccctatagaccccccaccagttcacgagagccctcatcctcctttacccgcaaccgaacctgcatcaaggctgagctccgaagagggagagggagacgacaaagaggaatcggtggagaagctggattgccactatagcggtcatcaccctcaacccgcttcattttgcacttttggcagccgtcaaataggcaggggctactatgttttcgattcaagatggaatcgcctgaggtgtgcactgaatctgatggtggaaaagcatctgaacgctcagctgtggaagaaaatcccgcctgtcccatctaccacctcaccgatttctactaggatacctcacaggaccaacagtgtaccaacctcccagtgtggggtgtcttacctggccgctgccacggtgagtaccagccctgtgctgctgagttccacatgcattagccccaacagcaaatctgttcctgcgcacggaacaactttgaatgcccagcctgcggcttccggggctatggaccctgtctgtagcatgcagtcccggcaggtcagctcatcttcctccagtccttcgacaccgtctggtctgagcagcgttccctcttccccaatgtcacgtaaaccacagaaactaaaaagtagcaagagcttgcggccaaaggagtcttctggcaatagtaccaactgccagaatgcctcgtcctccaccagcggcggaagtggtaaaaagcgaaaaaattcatcccccctgttggtgcactcgtcaagctctagttcttcctcctcctcctcatctcactcaatggagtcctttcgtaagaactgcgtggcccactctggtcccccttacccctccaccgtcacttcctcccattcgattggattgaactgtgtcacaaacaaggccaatgctgttaacgttcggcacgatcagagtggcagaggacctcctacaggatccccagccgagtctatcaaaaggatgtcagtgatggtgaactcttccgattcaacactctcccttggccctttcatccaccagtcgaatgagctaccagttaacagccatgggagcttcagtcacagccatactccgctggacaaactgatcgggaaaaaacggaagtgctcaccctcgtccagctcaatcaataactcctcgagcaaacctaccaaggttgcgaaggtgcctgccgtgaacaacgtgcacatgaaacacaccggtacaattcctggggcacagggcttgatgaactcttctctgcttcaccagcctaaggctcgtccctag

SEQ ID NO: 7132 - DNA, 2679 bp, Artificial Sequence
  derived and/or modified sequence
atgtcagagagagctgctgatgatgtgaggggcgagccccgacgcgctgctgccgctgccggaggagctgctgctgcagccgcacgccagcaacagcaacagcagcaacagcaacaacccccacctccgcagccccagagacagcaacatccgccacctccaccaagacgaaccagacctgaggacgggggtcccggagcggcttctacatccgcagctgcaatggcaaccgtgggggaaaggcgaccgctcccgagtcccgaagtgatgctggggcagagttggaatttgtgggtcgaggccagcaagctccctgggaaagacggcaccgaattggacgaaagctttaaggagttcggaaagaaccgtgaggtcatgggcctctgcagagaagacatgcctatcttcggattctgtcccgctcatgacgatttctacctggttgtttgcaatgactgtaatcaagtggtgaagcctcaggcgttccagagccactatgaaagacgacactcttcttcttccaaacccccacttgcggtacctccaaccagtgtgttttctttctttccatcactaagcaagtccaagggcggaagcgctagtggctcaaaccggagctcctcaggcggtgtgttaagtgcctcatccagtagcagcaagctgctcaagtcccctaaggaaaagctacaattgcgagggaataccaggcccatgcatcccattcaacagtcccgcgtcccacacggccgtataatgactcctagcgtcaaggtggaaaagatccatcctaagatggacggcacccttctcaaaagtgccgttgggccaacctgccctgctactgttagcagtttagtgaagccaggactaaattgtcccagtatacctaaaccaactctaccaagtccagggcagatcttgaacggcaagggccttccggcaccccctacactggaaaaaaagccagaggacaacagcaataataggaaatttctcaacaagaggctgtctgaaagagagtttgacccagatattcactgtggtgtaattgacctcgatacgaagaagccttgtacccgatctttgacctgcaaaacgcactccctgacccagcggagggctgtccagggccgacgaaagaggttcgacgtactgctcgccgagcataagaataaaacccgcgagaaggagttaatcagacaccctgattctcagcaacctccgcagccacttagagatccacacccagctccgcctaggacatcccaagaaccccaccagaaccctcacggtgttattcctagtgagtccaagccctttgtggctagcaagcctaaaccacatacgccctcgctgcccagacccccagggtgtccagcacagcagggaggctcggcgccaatcgatccccctccagtgcatgaaagccctcacccccctctcccagctaccgaacctgcgtcgagattgtcttccgaggagggcgaaggcgacgacaaggaagaatctgtggagaaacttgattgccactatagtggtcaccaccctcagcccgcttcgttctgtaccttcggttctagacagatcggcagaggatattacgtatttgatagcaggtggaatagactccgttgcgcactaaatctgatggtggaaaaacaccttaatgctcagctgtggaagaaaatccctccagtccctagtacaaccagtcccatcagtactaggatacctcatcgcacaaactcagtccccacatctcaatgcggagtcagttacctggccgcagccaccgtgtcgacaagccctgtgctcctctcaagcacatgtattagtccaaattctaagtctgtgccagcgcacggtacaactctaaacgcccagccagctgcatctggggcaatggatcctgtgtgcagtatgcagtcgcggcaggtgtccagctccagcagctctccctcgacaccctccgggttgagcagcgtaccctcatctccgatgtctcgtaagccccagaaactcaaaagctcaaagtcactgagacctaaggaatcttcagggaattcaactaactgtcagaatgcttcttctagcaccagtggaggctccggcaaaaaaaggaagaatagcagcccactactggttcactcttcgagctcaagctcttcatcgtctagttcgagccatagcatggaaagcttccggaaaaactgtgtagcacacagcgggcctccttacccgagcacagtaacatctagccatagcattggtttgaactgcgtgacgaacaaggctaatgcggtcaatgtgaggcatgaccagtcaggtagaggaccgcctaccgggagccccgctgagagcatcaaacggatgagtgtcatggtgaattcctctgatagcacactctccctgggcccttttatccaccaatcgaacgaacttcctgtgaatagccacggatcttttagccactcccatacacctttggacaaattaattggcaagaaaaggaaatgttccccatcttcatccagcatcaataatagctccagcaaacctaccaaggtagccaaggtaccggcagtcaacaacgtgcacatgaaacatactggcaccattccaggcgctcagggactgatgaattcttcccttcttcatcaaccaaaggcgaggccatag

SEQ ID NO: 7133 - DNA, 393 bp, Artificial Sequence
  derived and/or modified sequence
atgtcagaacgcgcagctgatgacgtgcgaggagaaccaagacgtgcagcagccgcagcaggcggagccgcagccgcagctgcacggcagcaacagcagcagcaacaacaacagcaaccacccccaccccagccacaacgccagcagcaccccccacctccacccagacgcaccagaccggaggacggaggtcctggggctgcctcgactagcgccgcagctatggccacagttggggagcgtcgaccactcccgagtccggaggtcatgctgggacaaagctggaacctatgggtagaggcttccaaactgccagggaaagatggagaccggatcggcagaaaattccaaggcgtctggaaccgagaggtcatgggactgtgccgggagtag

SEQ ID NO: 7134 - DNA, 7224 bp, Artificial Sequence
  derived and/or modified sequence
aaagggtgaaagagaaacttggcgacctcccggaggagttcgcgaagcgaccaggagcgtgttgccatcgtcctcacccggcacccaattccaccacagagtcgggatttcgtcggtgatcgtgatggggtgcttttatttttctctttgattttcaaaaaatgtctatgtgactgtccctatcttaaggggaagttgaaagtgggggcgggggtgctcaatgagaaacgttgccttgtgtgtagttgtttggagcacactgcaaattatattggcatctctttccaaaagtcactttgattcaacttcgatagctttctcgtaaatggcacgtttaggtggtgagaggtggatgaggaaacaggcaccagtgcagctgatttgacctccagtgggatagatacgattagcaccaggatcgtgtctcattttgaacccagatctgaacagaattaagacgaacgagctttcacaattgcagcagatgaagatccattggtaaattgatcaggatttttggcctaccctccaaagaaaaggagcggaaagaatgtcggagcgggccgcggatgacgtcaggggggagccgcgccgcgcggcggcggcggcgggcggagcagcggccgcggccgcccggcagcagcagcagcagcagcagcagcagcagccgccgcctccgcagccccagcggcagcagcacccgccaccgccgccacggcgcacacggccggaggacggcgggcccggcgccgcctccacctcggccgccgcaatggcgacggtcggggagcgcaggcctctgcccagtcctgaagtgatgctgggacagtcgtggaatctgtgggttgaggcttccaaacttcctgggaaggacgggacagaattggacgaaagtttcaaggagtttgggaaaaaccgcgaagtcatggggctctgtcgggaagacatgccaatatttggtttctgtccagcccatgatgatttctacttggtggtgtgtaacgactgtaatcaggttgtcaaaccgcaggcatttcaatcacattatgaaagaagacatagctcatccagcaagccgcctttggccgttcctcccacttcagtattttccttcttcccttctctgtccaaaagcaaaggaggcagtgcaagtggaagcaaccgttcttccagtggaggtgttcttagcgcatcctcatcaagttccaagttgttgaaatcacccaaagagaaactgcagctcagggggaacaccaggccaatgcatcccattcagcaaagtagagttccccatggtagaatcatgacaccctctgtgaaagtggaaaagattcatccgaaaatggatggcacactactgaaatctgcggtggggccaacctgtcctgctactgtgagttccttagtcaagcctggccttaactgcccctcaataccaaagccaaccttgccttcacctggacagattctgaatggcaaagggcttcctgcaccgcccactctggaaaagaaacctgaagacaattccaataataggaaatttttaaataagagattatcagaaagagagtttgatcctgacatccactgtggggttattgatctcgacaccaagaagccctgcacccggtctttgacatgcaagacacattccttaacccagcgcagggctgtccagggtagaagaaaacgatttgatgtgttattagccgagcacaaaaacaaaaccagggaaaaggaattgattcgccatccggactctcagcaaccaccgcagcctctcagggacccgcatcccgcccctcctagaacgtcacaggagccgcaccaaaaccctcacggagtgattccttccgaatcaaagccttttgtagctagtaaacctaaacctcacacccccagtcttccaaggcctccaggctgccctgctcagcaaggtgggagtgcccccattgaccctcctccagtccatgaatctccacaccctcccctgcctgccactgagccagcttctcggttatccagtgaggagggcgaaggcgatgacaaagaagagtctgttgaaaaactggactgtcattattcaggtcatcatcctcagccagcatctttttgcacatttgggagccggcagataggaagaggctattacgtgtttgactccaggtggaatcgacttcgctgcgccctcaacctcatggtggagaagcatctgaatgcacagctatggaagaaaatcccaccagtgcccagtaccacctcacccatctccacacgtattcctcaccggacaaactctgtgccgacatcacaatgtggagtcagctatctggcagcagccaccgtctctacatccccagtcctgctctcatctacctgcatctccccaaatagcaaatcggtaccagctcatggaaccacactaaatgcacagcctgctgcttcaggggcgatggatcctgtgtgcagtatgcaatccagacaagtgtcctcttcatcctcatccccttccacgccctctggcctttcctcggttccttcctcccccatgtccaggaaacctcagaaattgaaatccagcaaatctttgaggcccaaggagtcttctggtaacagcactaactgtcaaaatgccagtagcagtaccagtggcggctcaggaaagaaacgcaaaaacagttccccactgttggttcactcttcctcctcctcttcctcctcctcctcttcttctcattccatggagtcttttaggaaaaactgtgtggctcactctgggcctccctacccctcaacggtaacatcttcccatagcatcggcctcaactgtgtgacgaataaagcaaatgcggtgaacgtccggcatgaccagtcagggaggggcccccccaccgggagccctgctgaatccatcaagaggatgagtgtgatggtgaacagcagtgattctactctttctcttgggccattcattcaccagtccaatgaactgcctgtcaactcccacggcagtttttcccactcacacactcctctagacaaactcataggaaagaaaagaaagtgctcacccagctcgagcagcatcaacaacagcagcagcaaacccacaaaggttgccaaagtgccagccgtgaacaatgtccacatgaaacacacaggcaccatcccaggggcacaaggactgatgaacagttccctccttcatcagccaaaggcacgtccctgacagctgaaaatagcacggggaggaataatgcggacacttttgaggacaagttacacctccactcagcactctggactccacgatgcctttgagtctgttttcccaacctcctgtgggcctcaagggtagaaacctgccgggctgttgttttaacgaggatttccctgaagctatgtctctagcagtgagtactcataaaggacactggatcaagttcagccaccgaattgcttttatcagtgttaaagtggtctgaactgcttgctaccaatctgtgagaagtttttgtttttgttttgttttttaacttgcagtatatcacagagccactcttcaagtagattggctgggcaaaagaatgttttggcaagagcgttactgtagacctttctccctccttccttttactaccatttttttttaacactgtcatctgtaggtcactctccagcagttaggcaccttaactggagaccagaaaccttccagagaacacagggctgcatcccgagcaaccctctgaagaagggaattaggctttagattttgatagcaatgttccaggaatgaaatatagatgttagcccaagacaccatgacaaaatagcccagccttttgagagtaatttgggaaaagaagctgtcagaagtttctaacttacaaactggtttgaaatttttgatgcccagacagcaagtataaatcattttggaggcttacttttcatgatacaaaagcaattctgtgtgatttttttttttaagaagaaagaaaatgcaagctagttttgagaaaggaaggccaaattgggtcgggggagggtgggagtgaggaagttaaaatcactatagggagaaaaaacttttttcaagatttccaaagagatgaaattttcttaatccttttaagttttcatagtaaacagtatggcagattgggttggttgtcctacctggtctatttttaaaagtcaccttttaaagtgacattattagatacacttaaatgtttccaaggcactctctacattacccttgtttttctctttggatactgtcctgggactaagtgtagatttctgcttcaagcacttctggcattgtgtgtttttgtatgcactccccttcatgccacttcagatgtttatttggatgtggttggggacgagagcagacaccaaggaaagggagttggagagaatgtaagtcctgacctgaaggtcttttgtgatgcatgtataggattgccctgacacacaccctcctttcttgggattataccagccatcttcctgagagttttggagccctctaggatattttttctagtaccccaccccccacccctaaagaaagaccttaatatgttaaaacagcattgcttggagaaggtgtcattgaattccgggacgagccggagcctttaaatgggtgcttccaccactacaggctcctgacacgagtaacaggcactgttgcttagaagaacacacgaagttgccgaacacagggtaaaatttccaaggcgctgatcgttgccctggccagggcctgatgagagccagtcagtacattctttttttcctacagttcttgggtttcaaacttcagtttcagggaatttcaagtcaacaacaggtagaatgaataaacttggttaccagcctaataatgtgaattgctacagaattattcttattatgtaagaaaacaaaaactttatgcagatactttagctataaattgatgtaaaatactgatttttttaaaggaaggagagaacagtatcttgttcaattattatgcaatcaatcagtaaatgtttttaaaatgatactacaggagagcttagtaaggagagggcatggatgggccagtttggcatagttgggagaaatcagtctggtttccatcccagtcggggaagagagaggtgagagggaatcagaacgtacctagttgattccttggtgacaagtgcaatggggtatgggtagaatttattttcagagccaagaggacttgatggttataaataaagttgcctttagcaatggaatttacagatcgatcatgttgttccgaaagatgtgaataggatccacaataacaagttgattcagactaatgtagatatttagattagcaagtattgaacatttgatttcttagactgaggttttaaatgaatttcattatttctcccggtaatacacagagcatcgggattaggaaattagccattttggattctgtctgccacaaacagacctattctaaacagtgctattaaattttagactgttgttcaaatattttattttctcctaaactactttttatggtgatgaataattaagaccatttaaaacacgggagtacaagtatttttttgaattaaattaacttgcaaaaaccaaatttgcagtggttgggttgtttctagacagactttggtatcaatttaaaaccaagataatttttatattctttccaatagaatttcatgacaactcctgcagttttcttaacctacaaaaaaaaaaaaaaagtgctgcaatgatgaacaaagaattatacaaaacctacttttgtatctttattttggaatttcttgttctattataaatatggaagtatccctatttcagaagacatattttgttaaaaatgaattgtacatatttaaatatgtatttttgcacaggtctttttttctgatatcctgttttggtacaattgagatcatctagtatttatttattaattaataaaagtaaatacctttttataatttgaagtggttcactgccaagccaatagttctagaacctgcctcctttacagttttaagggatgcctctgttctgtgaaaagtctttgtcccttttagtgtctcgggagtggattcatacagatgaagtgggcattgcttcttcctggttgcctggtttcccgatagactacatgtaactaagtgacacactgcttttcttttgttagtattttatgtgtgggagtatgtgactgcgtgtgtgtgtgcctgtgcgtgtgtgtgtatactcagcacatgtatgttactatgtgatgtggtttaaaactaatggaaaaaactgaaagtgcctgaaactagttttaagcttagacagaatctctttaaaaagacttgaatgttcagttgaacttttggagtttgctttttccacctaaatattgtttctaaaattttaggggcggagttgaaaaccaccaatgctggtaattttataaggtattttaaaattaagacctcttggttcatagtaattcaattggtgatggattgcctggtggcaccaagggttacagatctttttgtcagccagcaacttacacgatgtgtccgttttgttattcactcatgaaatacaatttaaaatatttaaaatattttgtattccaaaaatataatacaaagaagtacctctgagaacattgaaaaaaatgtataatttgaaaaatgtaacttataagggcagctgtcttcctgcaagagttctgttgccaaggaatttcttaatgtcgctcattctgtccagggggtttggggcgattgggctttgaaaaaatattcttaaaagtttgtttagcagaaaataatcacttttacattttgtgcaaaacattttacattttcagataatttaaatgagcactacatactgtcagtgtgaatgtagggccttgaaagcattttgcttttttttttttttttttttttttgagcttggttataaaagcaatctcctgtgttaaaaacgtgtgaatagtttgataatttgtacacataatcaagagcatctcagctggactttgtgttggctgctgtatagaacatgaacaaatgtcaagggatagaaaattactttggatatttaaaagagaagaaatatatagtctatttgttttgtaacaagtttctgtaaataaaataatttatactatttataagaaaa

SEQ ID NO: 7135 - DNA, 3683 bp, Artificial Sequence
  derived and/or modified sequence
ctgccctggggccggccggccggctcctccataggtggctgcatttccgacttcgccctggctccagtccgggggcttgacgtgcaaacttcgccggagcgagctgagagggagggaccggcaagtgggaggaggcggcgggaggcgtctccgcttaagggagccggccgggtgccgccgctcggacggacgcgcggacggaaggaaggagcggggcagccgggccgggcccggggatgcaagcggccgaagggagcggaaagaatgtcggagcgggccgcggatgacgtcaggggggagccgcgccgcgcggcggcggcggcgggcggagcagcggccgcggccgcccggcagcagcagcagcagcagcagcagcagcagccgccgcctccgcagccccagcggcagcagcacccgccaccgccgccacggcgcacacggccggaggacggcgggcccggcgccgcctccacctcggccgccgcaatggcgacggtcggggagcgcaggcctctgcccagtcctgaagtgatgctgggacagtcgtggaatctgtgggttgaggcttccaaacttcctgggaaggacgggacagaattggacgaaagtttcaaggagtttgggaaaaaccgcgaagtcatggggctctgtcgggaagacatgccaatatttggtttctgtccagcccatgatgatttctacttggtggtgtgtaacgactgtaatcaggttgtcaaaccgcaggcatttcaatcacattatgaaagaagacatagctcatccagcaagccgcctttggccgttcctcccacttcagtattttccttcttcccttctctgtccaaaagcaaaggaggcagtgcaagtggaagcaaccgttcttccagtggaggtgttcttagcgcatcctcatcaagttccaagttgttgaaatcacccaaagagaaactgcagctcagggggaacaccaggccaatgcatcccattcagcaaagtagagttccccatggtagaatcatgacaccctctgtgaaagtggaaaagattcatccgaaaatggatggcacactactgaaatctgcggtggggccaacctgtcctgctactgtgagttccttagtcaagcctggccttaactgcccctcaataccaaagccaaccttgccttcacctggacagattctgaatggcaaagggcttcctgcaccgcccactctggaaaagaaacctgaagacaattccaataataggaaatttttaaataagagattatcagaaagagagtttgatcctgacatccactgtggggttattgatctcgacaccaagaagccctgcacccggtctttgacatgcaagacacattccttaacccagcgcagggctgtccagggtagaagaaaacgatttgatgtgttattagccgagcacaaaaacaaaaccagggaaaaggaattgattcgccatccggactctcagcaaccaccgcagcctctcagggacccgcatcccgcccctcctagaacgtcacaggagccgcaccaaaaccctcacggagtgattccttccgaatcaaagccttttgtagctagtaaacctaaacctcacacccccagtcttccaaggcctccaggctgccctgctcagcaaggtgggagtgcccccattgaccctcctccagtccatgaatctccacaccctcccctgcctgccactgagccagcttctcggttatccagtgaggagggcgaaggcgatgacaaagaagagtctgttgaaaaactggactgtcattattcaggtcatcatcctcagccagcatctttttgcacatttgggagccggcagataggaagaggctattacgtgtttgactccaggtggaatcgacttcgctgcgccctcaacctcatggtggagaagcatctgaatgcacagctatggaagaaaatcccaccagtgcccagtaccacctcacccatctccacacgtattcctcaccggacaaactctgtgccgacatcacaatgtggagtcagctatctggcagcagccaccgtctctacatccccagtcctgctctcatctacctgcatctccccaaatagcaaatcggtaccagctcatggaaccacactaaatgcacagcctgctgcttcaggggcgatggatcctgtgtgcagtatgcaatccagacaagtgtcctcttcatcctcatccccttccacgccctctggcctttcctcggttccttcctcccccatgtccaggaaacctcagaaattgaaatccagcaaatctttgaggcccaaggagtcttctggtaacagcactaactgtcaaaatgccagtagcagtaccagtggcggctcaggaaagaaacgcaaaaacagttccccactgttggttcactcttcctcctcctcttcctcctcctcctcttcttctcattccatggagtcttttaggaaaaactgtgtggctcactctgggcctccctacccctcaacggtaacatcttcccatagcatcggcctcaactgtgtgacgaataaagcaaatgcggtgaacgtccggcatgaccagtcagggaggggcccccccaccgggagccctgctgaatccatcaagaggatgagtgtgatggtgaacagcagtgattctactctttctcttgggccattcattcaccagtccaatgaactgcctgtcaactcccacggcagtttttcccactcacacactcctctagacaaactcataggaaagaaaagaaagtgctcacccagctcgagcagcatcaacaacagcagcagcaaacccacaaaggttgccaaagtgccagccgtgaacaatgtccacatgaaacacacaggcaccatcccaggggcacaaggactgatgaacagttccctccttcatcagccaaaggcacgtccctgacagctgaaaatagcacggggaggaataatgcggacacttttgaggacaagttacacctccactcagcactctggactccacgatgcctttgagtctgttttcccaacctcctgtgggcctcaagggtagaaacctgccgggctgttgttttaacgaggatttccctgaagctatgtctctagcagtgagtactcataaaggacactggatcaagttcagccaccgaattgcttttatcagtgttaaagtggtctgaactgcttgctaccaatctgtgagaagtttttgtttttgttttgttttttaacttgcagtatatcacagagccactcttcaagtagattggctgggcaaaagaatgttttggcaagagcgttactgtagacctttctccctccttccttttactaccatttttttttaacactgtcatctgtaggtcactctccagcagttaggcaccttaactggagaccagaaaccttccagagaacacagggctgcatcccgagcaaccctctgaagaagggaattaggctttagattttgatagcaatgttccaggaatgaaatatagatgttagcccaagacaccatgacaaaatagcccagccttttgagagtaatttgggaaaagaagctgtcagaagtttctaacttacaaactggtttgaaatttttgatgcccagacagcaagtataaatcattttggaggcttacttttcatgatacaaaagca

SEQ ID NO: 7136 - DNA, 2679 bp, Artificial Sequence
  derived and/or modified sequence
atgagcgagagagccgccgacgacgtgagaggcgagcccagaagagccgccgccgccgccggcggcgccgccgccgccgccgccagacagcagcagcagcagcagcagcagcagcagcccccccccccccagccccagagacagcagcaccccccccccccccccagaagaaccagacccgaggacggcggccccggcgccgccagcaccagcgccgccgccatggccaccgtgggcgagagaagacccctgcccagccccgaggtgatgctgggccagagctggaacctgtgggtggaggccagcaagctgcccggcaaggacggcaccgagctggacgagagcttcaaggagttcggcaagaacagagaggtgatgggcctgtgcagagaggacatgcccatcttcggcttctgccccgcccacgacgacttctacctggtggtgtgcaacgactgcaaccaggtggtgaagccccaggccttccagagccactacgagagaagacacagcagcagcagcaagccccccctggccgtgccccccaccagcgtgttcagcttcttccccagcctgagcaagagcaagggcggcagcgccagcggcagcaacagaagcagcagcggcggcgtgctgagcgccagcagcagcagcagcaagctgctgaagagccccaaggagaagctgcagctgagaggcaacaccagacccatgcaccccatccagcagagcagagtgccccacggcagaatcatgacccccagcgtgaaggtggagaagatccaccccaagatggacggcaccctgctgaagagcgccgtgggccccacctgccccgccaccgtgagcagcctggtgaagcccggcctgaactgccccagcatccccaagcccaccctgcccagccccggccagatcctgaacggcaagggcctgcccgccccccccaccctggagaagaagcccgaggacaacagcaacaacagaaagttcctgaacaagagactgagcgagagagagttcgaccccgacatccactgcggcgtgatcgacctggacaccaagaagccctgcaccagaagcctgacctgcaagacccacagcctgacccagagaagagccgtgcagggcagaagaaagagattcgacgtgctgctggccgagcacaagaacaagaccagagagaaggagctgatcagacaccccgacagccagcagcccccccagcccctgagagacccccaccccgccccccccagaaccagccaggagccccaccagaacccccacggcgtgatccccagcgagagcaagcccttcgtggccagcaagcccaagccccacacccccagcctgcccagaccccccggctgccccgcccagcagggcggcagcgcccccatcgaccccccccccgtgcacgagagcccccacccccccctgcccgccaccgagcccgccagcagactgagcagcgaggagggcgagggcgacgacaaggaggagagcgtggagaagctggactgccactacagcggccaccacccccagcccgccagcttctgcaccttcggcagcagacagatcggcagaggctactacgtgttcgacagcagatggaacagactgagatgcgccctgaacctgatggtggagaagcacctgaacgcccagctgtggaagaagatcccccccgtgcccagcaccaccagccccatcagcaccagaatcccccacagaaccaacagcgtgcccaccagccagtgcggcgtgagctacctggccgccgccaccgtgagcaccagccccgtgctgctgagcagcacctgcatcagccccaacagcaagagcgtgcccgcccacggcaccaccctgaacgcccagcccgccgccagcggcgccatggaccccgtgtgcagcatgcagagcagacaggtgagcagcagcagcagcagccccagcacccccagcggcctgagcagcgtgcccagcagccccatgagcagaaagccccagaagctgaagagcagcaagagcctgagacccaaggagagcagcggcaacagcaccaactgccagaacgccagcagcagcaccagcggcggcagcggcaagaagagaaagaacagcagccccctgctggtgcacagcagcagcagcagcagcagcagcagcagcagcagccacagcatggagagcttcagaaagaactgcgtggcccacagcggccccccctaccccagcaccgtgaccagcagccacagcatcggcctgaactgcgtgaccaacaaggccaacgccgtgaacgtgagacacgaccagagcggcagaggcccccccaccggcagccccgccgagagcatcaagagaatgagcgtgatggtgaacagcagcgacagcaccctgagcctgggccccttcatccaccagagcaacgagctgcccgtgaacagccacggcagcttcagccacagccacacccccctggacaagctgatcggcaagaagagaaagtgcagccccagcagcagcagcatcaacaacagcagcagcaagcccaccaaggtggccaaggtgcccgccgtgaacaacgtgcacatgaagcacaccggcaccatccccggcgcccagggcctgatgaacagcagcctgctgcaccagcccaaggccagaccctag

SEQ ID NO: 7137 - DNA, 393 bp, Artificial Sequence
  derived and/or modified sequence
atgagcgagagagccgccgacgacgtgagaggcgagcccagaagagccgccgccgccgccggcggcgccgccgccgccgccgccagacagcagcagcagcagcagcagcagcagcagcccccccccccccagccccagagacagcagcaccccccccccccccccagaagaaccagacccgaggacggcggccccggcgccgccagcaccagcgccgccgccatggccaccgtgggcgagagaagacccctgcccagccccgaggtgatgctgggccagagctggaacctgtgggtggaggccagcaagctgcccggcaaggacggcgacagaatcggcagaaagttccagggcgtgtggaacagagaggtgatgggcctgtgcagagagtag

SEQ ID NO: 7138 - protein, 1836 aa, Artificial Sequence
  derived and/or modified sequence
MARPSLCTLVPLGPECLRPFTRESLAAIEQRAVEEEARLQRNKQMEIEEPERKPRSDLEAGKNLPMIYGDPPPEVIGIPLEDLDPYYSNKKTFIVLNKGKAIFRFSATPALYLLSPFSVVRRGAIKVLIHALFSMFIMITILTNCVFMTMSDPPPWSKNVEYTFTGIYTFESLIKILARGFCVDDFTFLRDPWNWLDFSVIMMAYLTEFVDLGNISALRTFRVLRALKTITVIPGLKTIVGALIQSVKKLSDVMILTVFCLSVFALVGLQLFMGNLRQKCVRWPPPFNDTNTTWYSNDTWYGNDTWYGNEMWYGNDSWYANDTWNSHASWATNDTFDWDAYISDEGNFYFLEGSNDALLCGNSSDAGHCPEGYECIKTGRNPNYGYTSYDTFSWAFLALFRLMTQDYWENLFQLTLRAAGKTYMIFFVVIIFLGSFYLINLILAVVAMAYAEQNEATLAEDKEKEEEFQQMLEKFKKHQEELEKAKAAQALEGGEADGDPAHGKDCNGSLDTSQGEKGAPRQSSSGDSGISDAMEELEEAHQKCPPWWYKCAHKVLIWNCCAPWLKFKNIIHLIVMDPFVDLGITICIVLNTLFMAMEHYPMTEHFDNVLTVGNLVFTGIFTAEMVLKLIAMDPYEYFQQGWNIFDSIIVTLSLVELGLANVQGLSVLRSFRLLRVFKLAKSWPTLNMLIKIIGNSVGALGNLTLVLAIIVFIFAVVGMQLFGKSYKECVCKIALDCNLPRWHMHDFFHSFLIVFRILCGEWIETMWDCMEVAGQAMCLTVFLMVMVIGNLVVLNLFLALLLSSFSADSLAASDEDGEMNNLQIAIGRIKLGIGFAKAFLLGLLHGKILSPKDIMLSLGEADGAGEAGEAGETAPEDEKKEPPEEDLKKDNHILNHMGLADGPPSSLELDHLNFINNPYLTIQVPIASEESDLEMPTEEETDTFSEPEDSKKPPQPLYDGNSSVCSTADYKPPEEDPEEQAEENPEGEQPEECFTEACVQRWPCLYVDISQGRGKKWWTLRRACFKIVEHNWFETFIVFMILLSSGALAFEDIYIEQRRVIRTILEYADKVFTYIFIMEMLLKWVAYGFKVYFTNAWCWLDFLIVDVSIISLVANWLGYSELGPIKSLRTLRALRPLRALSRFEGMRVVVNALLGAIPSIMNVLLVCLIFWLIFSIMGVNLFAGKFYYCINTTTSERFDISEVNNKSECESLMHTGQVRWLNVKVNYDNVGLGYLSLLQVATFKGWMDIMYAAVDSREKEEQPQYEVNLYMYLYFVIFIIFGSFFTLNLFIGVIIDNFNQQKKKLGGKDIFMTEEQKKYYNAMKKLGSKKPQKPIPRPQNKIQGMVYDLVTKQAFDITIMILICLNMVTMMVETDNQSQLKVDILYNINMIFIIIFTGECVLKMLALRQYYFTVGWNIFDFVVVILSIVGLALSDLIQKYFVSPTLFRVIRLARIGRVLRLIRGAKGIRTLLFALMMSLPALFNIGLLLFLVMFIYSIFGMSNFAYVKKESGIDDMFNFETFGNSIICLFEITTSAGWDGLLNPILNSGPPDCDPNLENPGTSVKGDCGNPSIGICFFCSYIIISFLIVVNMYIAIILENFNVATEESSEPLGEDDFEMFYETWEKFDPDATQFIAYSRLSDFVDTLQEPLRIAKPNKIKLITLDLPMVPGDKIHCLDILFALTKEVLGDSGEMDALKQTMEEKFMAANPSKVSYEPITTTLKRKHEEVCAIKIQRAYRRHLLQRSMKQASYMYRHSHDGSGDDAPEKEGLLANTMSKMYGHENGNSSSPSPEEKGEAGDAGPTMGLMPISPSDTAWPPAPPPGQTVRPGVKESLV

SEQ ID NO: 7139 - DNA, 5511 bp, Artificial Sequence
  derived and/or modified sequence
atggccagaccatctctgtgtaccctcgtgcctctgggtcccgagtgtcttcggccatttacacgggaatctctggctgccattgaacagagagccgttgaagaggaagctagactacagcggaataagcaaatggagattgaagagccggagaggaaaccccgtagcgacttggaggcgggaaagaatctaccgatgatttacggcgacccacccccggaagttatcgggatcccactggaagacctggacccatattatagcaacaagaagaccttcattgtgctaaataagggcaaggccattttccggttcagcgctacacccgccctgtacctcttatctcctttttctgtggtgcgccgaggagcaatcaaggttcttatccatgccctctttagcatgttcataatgattaccattctgactaactgcgtgtttatgactatgtcagatccgccgccatggagcaaaaatgtcgaatatacctttactggcatttatactttcgagagcctgattaagatccttgcccggggattttgcgtggatgactttacgttcctacgagatccctggaattggctggatttctccgtaatcatgatggcatacctgacagagttcgtcgatctcggaaatatctcagccctgcggaccttccgtgttctgcgggccctgaaaacaattacggtgatccccggactgaagactattgtaggcgccttgattcagtcagtgaaaaagctgtctgacgtgatgatcttgactgtgttctgccttagcgtgtttgccttggtgggattacagttgttcatggggaatctgagacaaaaatgcgtgagatggccacccccctttaacgacactaataccacttggtatagcaacgatacttggtacgggaacgatacctggtatggaaacgagatgtggtacgggaatgactcttggtatgctaacgacacatggaatagccacgcctcctgggctaccaacgatacattcgattgggatgcctacatcagcgatgaggggaatttctacttcctcgaggggtccaatgatgcactgctgtgtggtaacagcagcgatgccggacactgtcctgaaggctacgagtgcatcaagaccggtagaaaccccaattatggatatacctcatatgacacattttcctgggcgttcctcgccctgttccggcttatgacccaggactattgggaaaacttgttccagctcactctgagagcggccggcaagacttacatgatctttttcgtggtcataattttccttgggagtttttacctcattaatttgatcttagcggtcgtggctatggcctatgccgaacaaaacgaagccacactcgcagaagataaggagaaagaagaggaatttcagcagatgctggagaaattcaagaagcatcaggaagaactggaaaaggcgaaggccgcgcaagccctggaaggaggagaagctgacggggaccccgcccacggcaaagattgtaacggatcccttgacactagccagggcgagaaaggcgccccccgccagtcttcaagcggggactcagggattagtgatgcgatggaagagctagaggaagcccaccagaagtgccccccatggtggtataagtgcgcacacaaagttctgatatggaactgctgtgccccatggttgaaatttaagaatatcattcatctgatcgttatggacccattcgtcgacctgggtattaccatctgtatagtgctgaataccctttttatggccatggagcactacccaatgacagagcactttgataatgttttgaccgttggaaacctggtcttcaccggtatattcaccgccgagatggtgcttaagttgatcgctatggacccctacgagtacttccaacaaggctggaacatcttcgactcaattattgtgaccctgtctctggtggagctggggctcgctaacgttcagggacttagtgttcttagatcttttcgcctcctaagagtatttaaactagccaaatcttggccgacacttaacatgctgattaagatcataggtaacagcgtcggcgcccttggcaatctcactctagtgctagccatcatagtgtttatttttgctgtcgtgggcatgcaactgttcggaaagagttataaagaatgtgtgtgcaaaatcgctttggactgtaacctgccgagatggcatatgcacgacttttttcattcgttcctgattgtgttcaggattctgtgtggcgaatggattgaaactatgtgggattgcatggaggtcgcgggccaggcaatgtgtctgacagtgtttttgatggtcatggtcatcggcaacctggtggtccttaatctatttttggccctgcttttatcttcatttagtgccgactcactggcggcatctgacgaggatggcgagatgaataatctccaaatcgctataggtagaatcaagcttggaatagggttcgcaaaagctttcctcctaggcctcttacatgggaagattttgtcaccaaaagatattatgttgagtttaggtgaggccgacggcgcgggtgaagcgggggaggccggggagacggcccctgaggacgagaagaaggagccaccagaggaagaccttaaaaaagataatcacatcctcaatcatatgggtctggccgatggaccgccttcctcccttgaattggaccacctgaactttatcaacaacccctacctgactattcaggtgcccatcgcaagcgaggagtcagacctggaaatgccaactgaggaagaaactgacacattctctgagcccgaggatagcaaaaaacctccgcaacctctttatgacggaaactcctctgtgtgctctaccgccgactacaaacccccagaggaagaccccgaggagcaggcagaagaaaaccctgagggcgaacagcccgaagagtgtttcacagaagcctgcgtgcaacggtggccttgcctttatgtcgatattagtcagggaaggggtaagaagtggtggaccctgcgacgggcatgcttcaaaattgtcgaacataactggttcgaaacgttcatcgtcttcatgatcctgctgagctctggcgccctcgcgttcgaggacatttacatcgaacagcgccgcgtcatccgaacaatcctggaatatgccgataaagtctttacctacatcttcatcatggagatgctgttgaagtgggttgcttacggcttcaaggtgtacttcactaatgcttggtgctggttggattttctgattgtcgacgtgagcatcatatccctggttgcgaactggttgggatactcagagctgggtccaattaagtctctcaggacgctccgggcccttaggccgctgcgcgctctttcccgcttcgagggtatgcgagttgttgtcaatgcactgctcggggccatacccagcatcatgaatgtgctacttgtttgtctgatcttttggctaatcttttcaattatgggggttaacttattcgcagggaagttctactactgtatcaataccacaacctctgaacgctttgacataagtgaggtgaacaataaatccgaatgtgagtcccttatgcataccggtcaggttcggtggctgaacgtgaaggtgaactacgataatgtgggactgggatatctgtccctgttgcaggtagccacttttaagggttggatggacataatgtatgcggcagtagactcgcgcgaaaaggaggaacaaccccagtatgaagtgaatctgtatatgtacctgtactttgtcattttcattattttcggatctttcttcacgctgaatctcttcatcggggttataattgataacttcaaccagcaaaaaaaaaaactcggaggcaaggacatattcatgaccgaagagcagaagaaatattacaacgcaatgaagaagctgggcagcaaaaaaccacaaaaacccattcctaggccgcagaacaagattcagggtatggtttacgaccttgtcaccaagcaggcctttgacataactataatgattctgatctgcctgaatatggtaacgatgatggtggagacggataatcagagccagcttaaggtggatattctatataatattaacatgatcttcattatcatctttaccggggagtgcgtcctcaagatgctcgctctgagacagtattacttcacggtcggctggaatatttttgattttgtggtggtgatcctgtccatcgtgggactcgcgctatcagatctgatccagaaatactttgtaagtcctaccttgtttcgcgtgattcgccttgcccgcatcggcagagtgcttaggttaataagaggggctaagggcatccgcaccctcctatttgcgctgatgatgagccttccggcattgttcaatatcgggctgctgctctttttagttatgtttatatatagtatattcgggatgtccaactttgcttatgttaaaaaggaaagcggcatcgacgatatgttcaatttcgaaacgtttggcaattctatcatctgtctcttcgaaataaccacctcagcaggctgggatgggttgctaaatcctatattgaattcagggccgcctgactgtgatcctaatctggaaaacccggggaccagtgtaaagggcgactgcggaaacccttctataggcatttgttttttttgctcatacattattatctcgtttcttattgtggtgaacatgtatatcgccatcatcttggaaaatttcaatgttgctaccgaagaatcttcggagcctctgggcgaggacgacttcgaaatgttttatgagacctgggagaagttcgaccccgatgccacccagtttattgcctattcccggctctcagactttgtggacactttacaagagccccttcgtattgccaagcctaacaagattaagctgattactctggatcttccgatggtgccaggggacaagattcattgtctcgacattctcttcgccttgacgaaggaagttttgggagactcaggagagatggacgccctgaaacaaacaatggaagaaaagtttatggctgccaatccctcaaaggtttcatacgagcctattaccaccacactcaaacgcaagcacgaggaggtgtgcgctattaagatccagagagcataccgcaggcacctcttacagaggagtatgaagcaggcttcttacatgtatagacatagccacgatgggtcaggggatgatgccccggagaaggagggccttttagctaatacaatgtctaaaatgtatggccacgaaaacggtaactccagctccccctcccctgaagaaaagggcgaggccggtgacgccggcccaacaatgggccttatgcccatatccccctctgacacagcatggcctccggctccccctccagggcaaaccgtgaggcctggcgtgaaggagtctctagtctag

SEQ ID NO: 7140 - DNA, 5511 bp, Artificial Sequence
  derived and/or modified sequence
atggcccggcccagcctgtgcaccctggtgcccctgggcccagaatgtctgcggcccttcacccgggagagcctggccgccatcgagcagagagctgtggaggaggaggcccggctgcagaggaacaagcagatggagattgaggagcctgagaggaagcccaggagtgacctggaggccggcaagaacctgcccatgatctacggggaccccccacctgaggtgattggcatccccctggaggacctggacccctactacagcaacaagaagaccttcatcgtgctgaacaagggcaaggccatcttccgcttcagcgccaccccagccctgtacctgctgagccccttctctgtggtgagaagaggagccatcaaggtgctgatccacgccctcttctccatgttcatcatgatcaccatcctgaccaactgtgtgttcatgaccatgtctgaccccccaccctggagcaagaatgtggagtacaccttcaccggcatctacacctttgagagcctcatcaagatcctggcccggggcttctgtgtggatgacttcaccttcctgcgggacccctggaactggctggacttcagcgtcatcatgatggcctacctgacagaatttgtggacctgggcaacatcagcgccctgcggaccttccgggtgctgcgggccctgaagaccatcaccgtcatccctggcctgaagaccatcgtgggcgccctgatccagagcgtgaagaagctgagtgatgtgatgatcctgactgtgttctgcctgtctgtgtttgccctggtgggcctgcagctgttcatgggcaacctgcggcagaagtgtgtgcgctggcccccacccttcaatgacaccaacaccacctggtacagcaatgacacctggtatggaaatgacacctggtatggaaatgagatgtggtatggaaatgacagctggtacgccaatgacacctggaacagccacgcctcctgggccaccaatgacacctttgactgggatgcctacatcagtgatgagggcaacttctacttcctggagggcagcaatgatgccctgctgtgtggcaacagcagtgatgctggccactgcccagagggctatgagtgcatcaagacaggcaggaaccccaactacggctacaccagctatgacaccttctcctgggccttcctggccctcttccggctgatgacccaggactactgggagaacctcttccagctgaccctgcgggctgctgggaagacctacatgatcttctttgtggtgatcatcttcctgggcagcttctacctgatcaacctgatcctggccgtggtggccatggcctatgcagagcagaatgaggccaccctggccgaggacaaggagaaggaggaggagttccagcagatgctggagaagttcaagaagcaccaggaggagctggagaaggccaaggccgcccaggccctggagggcggggaggctgatggagaccctgcccacggcaaggactgcaatggcagcctggacaccagccagggcgagaagggggccccccggcagagcagcagcggggacagcggcatcagtgatgccatggaggagctggaggaggcccaccagaagtgccccccctggtggtacaagtgtgcccacaaggtgctgatctggaactgctgtgccccctggctgaagttcaagaacatcatccacctgattgtgatggacccctttgtggacctgggcatcaccatctgcatcgtgctgaacaccctcttcatggccatggagcactaccccatgacagagcactttgacaacgtgctgactgtgggcaacctggtgttcaccggcatcttcaccgctgagatggtgctgaagctgattgccatggacccctatgagtacttccagcagggctggaacatctttgacagcatcatcgtgaccctgagcctggtggagctgggcctggccaacgtgcagggcctgtctgtgctgcggagcttccggctgctgcgggtcttcaagctggccaagtcctggcccaccctgaacatgctgatcaagatcatcggcaacagcgtgggcgccctgggcaacctgaccctggtgctggccatcatcgtgttcatctttgctgtggtgggcatgcagctgtttgggaagagctacaaggaatgtgtgtgcaagatcgccctggactgcaacctgccccgctggcacatgcatgacttcttccacagcttcctgattgtgttccgcatcctgtgtggggagtggattgagaccatgtgggactgcatggaggtggccggccaggccatgtgcctgaccgtcttcctgatggtgatggtgattggcaacctggtggtgctgaacctcttcctggccctgctgctgagcagcttctctgctgacagcctggccgccagtgatgaagatggagagatgaacaacctgcagatcgccatcggccgcatcaagctgggcattggatttgccaaggccttcctgctgggcctgctgcacggcaagatcctgagccccaaggacatcatgctgagcctgggggaggctgatggagctggggaggccggggaggccggggagacagccccagaagatgagaagaaggagcccccagaggaggacctgaagaaggacaaccacatcctgaaccacatgggcctggctgatggcccccccagcagcctggagctggaccacctgaacttcatcaacaacccctacctgaccatccaggtgcccatcgccagcgaggagagtgacctggagatgcccacagaggaggagacagacaccttcagcgagcctgaggacagcaagaagccaccccagcccctgtatgatggcaacagctctgtgtgcagcacagctgactacaagcccccagaagaagatcctgaggagcaggccgaggagaaccctgagggggagcagcctgaggagtgcttcacagaggcctgtgtgcagcgctggccctgcctgtatgtggacatcagccagggccggggcaagaagtggtggaccctgcggcgggcctgcttcaagatcgtggagcacaactggtttgagaccttcatcgtgttcatgatcctgctgagcagcggggccctggcctttgaggacatctacatcgagcagaggagggtcatccgcaccatcctggagtatgctgacaaggtgttcacctacatcttcatcatggagatgctgctgaagtgggtggcctacggcttcaaggtgtacttcaccaatgcctggtgctggctggacttcctgattgtggatgtgtccatcatcagcctggtggccaactggctgggctacagcgagctgggccccatcaagagcctgcggaccctgcgggccctgcggcccctgcgggccctgagcagatttgagggcatgagggtggtggtgaatgccctgctgggcgccatccccagcatcatgaatgtgctgctggtgtgcctgatcttctggctgatcttcagcatcatgggcgtgaacctgtttgctgggaagttctactactgcatcaacaccaccaccagcgagagatttgacatcagcgaggtgaacaacaagtcagaatgtgagagcctgatgcacacaggccaggtgcgctggctgaatgtgaaggtgaactatgacaacgtgggcctgggctacctgagcctgctgcaggtggccaccttcaagggctggatggacatcatgtatgctgctgtggacagccgggagaaggaggagcagccccagtatgaggtgaacctgtacatgtacctgtactttgtgatcttcatcatcttcggcagcttcttcaccctgaacctcttcatcggggtcatcatcgacaacttcaaccagcagaagaagaagctgggcggcaaggacatcttcatgacagaggagcagaagaagtactacaatgccatgaagaagctgggcagcaagaagccccagaagcccatcccccggccccagaacaagatccagggcatggtgtatgacctggtgaccaagcaggcctttgacatcaccatcatgatcctgatctgcctgaacatggtgaccatgatggtggagacagacaaccagagccagctgaaggtggacatcctgtacaacatcaacatgatcttcatcatcatcttcaccggagaatgtgtgctgaagatgctggccctgcggcagtactacttcaccgtgggctggaacatctttgattttgtggtggtgatcctgagcatcgtgggcctggccctgagtgacctgatccagaagtactttgtgagccccaccctcttccgggtcatccggctggccagaattggccgggtgctgcggctcatccggggggccaagggcatccgcaccctgctgtttgccctgatgatgagcctgcctgccctcttcaacatcggcctgctgctcttcctggtgatgttcatctacagcatcttcggcatgagcaactttgcctacgtgaagaaggagagcggcattgatgacatgttcaactttgagaccttcggcaacagcatcatctgcctgtttgagatcaccaccagcgctggctgggatggcctgctgaaccccatcctgaacagcggccccccagactgtgaccccaacctggagaaccctggcacctctgtgaagggggactgtggcaaccccagcatcggcatctgcttcttctgcagctacatcatcatctccttcctgattgtggtgaacatgtacatcgccatcatcctggagaacttcaacgtggccacagaggagagcagcgagcccctgggggaggatgactttgagatgttttatgagacctgggagaagtttgatcctgatgccacccagttcatcgcctacagccggctgagtgactttgtggacaccctgcaggagcccctgagaattgccaagcccaacaagatcaagctgatcaccctggacctgcccatggtgcctggggacaagatccactgcctggacatcctgtttgccctgaccaaggaggtgctgggggacagcggggagatggatgccctgaagcagaccatggaggagaagttcatggccgccaaccccagcaaggtgtcctatgagcccatcaccaccaccctgaagaggaagcatgaggaggtgtgtgccatcaagatccagagggcctacagaagacacctgctgcagaggtccatgaagcaggccagctacatgtaccgccacagccatgatggcagcggagatgatgcccctgagaaggagggcctgctggccaacaccatgagcaagatgtatggccatgaaaatggaaacagcagcagccccagccctgaggagaagggggaggccggagatgctggccccaccatgggcctgatgcccatcagccccagcgacacagcctggcccccagcccctcctcctggccagacagtgcggcctggggtgaaggagagcctggtgtag

SEQ ID NO: 7141 - DNA, 5511 bp, Artificial Sequence
  derived and/or modified sequence
atggcccggcccagcctgtgcaccctggtgcccctgggccccgagtgcctgcggccattcacaagggagtctttggctgccatcgaacagcgagctgtggaggaagaagcacggctccagcggaataagcagatggaaatcgaagaaccagaaaggaagcccagaagtgatttggaagcaggcaagaatttaccaatgatctacggggatccccccccggaggtcatcggcattcccctggaggatctggatccctattattccaataagaaaacatttatcgtactcaacaaaggtaaagccatctttcgcttctcggcaacccctgccctctacctgctctccccctttagcgtggtcaggaggggagccatcaaggtgcttattcacgctctgttcagcatgtttattatgattactatcttaacaaattgtgttttcatgacgatgtcggatcccccaccttggtccaaaaacgtggagtacacgtttaccggtatctatacattcgagagcctcattaaaatcctggcaagagggttctgtgtggatgatttcactttcctgagggatccatggaattggctagatttttccgtgattatgatggcatacctcacagaatttgtggatctcggcaacatctcggcgctcagaacattcagggtcctgcgggcactgaaaaccattaccgtaattccaggattgaaaacaattgtgggagctttgatacaatccgtgaagaaactgtctgatgtgatgatcctgaccgtcttctgtttgtctgtttttgcactggtaggattacagctattcatggggaatctcagacagaaatgtgtcagatggccacctccatttaatgatacaaacactacctggtacagtaacgacacctggtacggaaacgacacatggtacggaaacgaaatgtggtatgggaacgattcatggtacgccaacgacacttggaattcccacgcgtcttgggccacaaacgacacatttgactgggacgcttacatctccgatgagggcaatttctactttctggagggatctaatgatgcccttctgtgcggaaattcttctgacgctgggcactgcccggaggggtatgaatgcattaagactggacggaaccctaactacggatataccagctacgacacgtttagctgggctttcctggcactgttcagactgatgacgcaggattactgggagaatctcttccagctgaccctcagggccgctggaaaaacgtacatgatcttttttgtcgtaatcatttttttaggatctttctaccttataaatctgatcctggctgtcgtcgctatggcttatgcagagcagaatgaggccacacttgctgaagataaagagaaagaagaggaatttcaacaaatgttggagaaatttaagaaacaccaggaagagctagagaaagccaaagccgcacaagcactcgagggtggcgaagctgatggcgatccggctcatggcaaagactgtaacgggtcactagacacctcccaaggagaaaaaggcgctccacgtcagtcgtcatcaggagactcaggcatttcagacgcgatggaggaattggaggaggcccatcaaaaatgtccaccatggtggtacaagtgcgcccacaaggtcctgatctggaactgctgcgctccttggttaaaattcaagaacattatacatctcattgtgatggacccattcgtggacctaggtataaccatatgcatcgtcctcaatacactgttcatggctatggagcactatcccatgaccgagcatttcgataatgtcttaactgtcgggaaccttgtgttcactgggatctttacagccgaaatggttctcaagctgatagcaatggacccctacgagtatttccagcaagggtggaatatcttcgatagcataatcgttaccctgtccctggtggagcttggtttggctaacgtgcaaggactgtctgttctgcgcagctttcggctcctcagagttttcaagctggccaagtcatggcctacactcaacatgctgattaagatcattggcaacagtgttggggcccttgggaatcttactctagtcctggcaataattgtatttattttcgccgtggtggggatgcagctttttggcaagtcctataaagaatgcgtgtgtaagatcgcgctggactgcaacttgcctaggtggcatatgcacgacttcttccattctttccttattgtgttcagaattctgtgtggcgagtggatcgaaaccatgtgggactgcatggaggtggcagggcaggccatgtgcttgacggtgttcctgatggtcatggttatagggaatctggtcgtactgaatctcttcctggccctcctcctgagctctttcagcgcagattcgctggcggccagcgatgaagacggggagatgaacaatttgcagatcgccatcgggagaataaaactgggaataggctttgcaaaagcattccttctgggcctgctgcatggcaaaatcctgtcccctaaggatatcatgttgtcactcggcgaggctgacggcgccggtgaggcgggggaggctggcgagacagcccctgaggacgagaagaaggaaccccctgaggaagacctgaagaaggacaaccatatcttaaaccatatggggctggcagacggcccaccttctagcctggagcttgatcacctgaatttcattaataatccttacttaaccatccaagttcctatcgcgtcagaggagtctgacttagaaatgccaactgaggaggagactgacactttctctgagccggaggactccaagaaacctccacagcctctttacgacggaaattccagcgtttgtagtactgctgactataaaccccccgaagaggatccagaggaacaagcggaagaaaacccagagggggaacagcctgaggaatgtttcacagaggcctgcgtgcagaggtggccctgcttgtacgtcgatatttcccaaggtcggggaaagaagtggtggactctgcgacgggcctgttttaaaatcgttgagcataactggtttgaaaccttcatagtgtttatgatattactgtcctccggagccctcgcctttgaggacatctatattgaacagcgtcgggtaattaggaccatcttggagtatgccgacaaggtgtttacctatattttcatcatggagatgttattgaagtgggtcgcgtacgggttcaaggtgtatttcacaaacgcatggtgctggctagactttttaatcgtggatgtgagtattatctctctcgtagctaactggctcggctacagcgaattgggccccataaaatccctgaggacactccgtgcactgcgacccctgagagctctgtcccggttcgaaggaatgagagtagtagtgaatgctctgctgggggccatccccagcatcatgaacgtgctgctcgtctgcctgatcttttggctcatcttctctatcatgggcgttaaccttttcgcagggaagttctattactgcataaatactaccacgtcagagagatttgacatctcggaggtcaacaataagtccgagtgcgagtctctgatgcacaccgggcaggtaagatggttgaacgtgaaggtgaattacgacaacgtcggactgggctatttaagtctcttgcaggttgcaactttcaaggggtggatggacatcatgtatgctgcagtcgattctagggaaaaggaagagcagcctcagtacgaagtgaacctttacatgtacctgtatttcgtgatattcataatttttgggtccttttttacgctaaacttatttatcggcgtcattatagacaattttaaccagcagaagaagaaattaggcggcaaggacatcttcatgaccgaagagcagaaaaagtattataatgcgatgaagaagctcggatccaagaagccccagaaacccattcctagaccgcaaaataagatccagggtatggtctacgatctggtgactaagcaagcatttgatatcacgatcatgatccttatctgtcttaacatggtgaccatgatggtagaaaccgataaccagtctcagttgaaggtggacattttgtataacattaacatgatcttcattattatatttacaggagaatgcgtgttgaaaatgctagcgctgcgccagtactatttcaccgtggggtggaacatttttgactttgtggtggtcattttgtctatcgtgggcctagctctatcagaccttatacaaaaatattttgtctcacccaccctctttagagtgattcgcttagctcggatcggtcgcgtgctgaggctgattagaggagctaaggggatacgaaccctgctgttcgccctcatgatgagtttgccagcactgttcaacatcggacttctgctgttcctggtgatgtttatttactctatcttcggcatgagcaactttgcctatgtgaaaaaggagtccggcatcgacgacatgttcaattttgagactttcggtaacagcattatctgtctgtttgagattaccacctccgctggatgggacgggctgttgaaccccatcctgaactccggacctccggattgcgatccgaatttggagaatcccggcacctcagtgaagggcgactgcggaaatccatctataggcatatgttttttttgtagctacatcatcatatcgtttctaatagtcgttaacatgtatatcgccattatcctcgagaactttaatgttgctacggaggagtcttccgaacctttaggtgaagacgatttcgagatgttttacgagacttgggagaaatttgaccctgatgcaacccagttcatagcatattcaagactttctgattttgtcgatacccttcaggagcccctccgtatagcaaaacctaacaagatcaaactgatcaccctcgatctgccaatggttcctggagacaagatccattgcctcgatatcctattcgcccttactaaggaggtgctgggcgattcaggcgagatggatgcactgaaacagaccatggaggaaaaatttatggcggccaaccctagcaaggtgtcctacgagcccattacgaccacgttaaagaggaagcatgaggaagtttgcgccatcaaaatccagcgggcctaccggcggcatttgcttcaaaggtctatgaaacaggctagctacatgtatcgacactctcatgacggcagcggggacgacgcccctgaaaaagaaggactattagcgaacacgatgtcaaaaatgtatggtcatgaaaacggaaactctagcagcccatctcctgaggagaagggggaggccggtgacgcgggtcctacaatgggcttaatgcccataagcccatcagatacagcatggccacctgcacccccccctggccaaaccgtaagacctggagtgaaggaatctttagtctag

SEQ ID NO: 7142 - DNA, 5510 bp, Artificial Sequence
  derived and/or modified sequence
atggcccgtcctagtctctgcaccctcgtgcccttaggtcccgagtgcctccggccatttactcgggaatctcttgcagcaatcgagcagagggcagtggaagaggaggcacggctccagcgcaacaagcaaatggagattgaggagccggagagaaaacccagaagcgacctcgaggctggtaaaaatctgcccatgatctacggggatccacctcctgaggttatcggcattccccttgaggacctagatccatactacagcaataagaagacatttatcgtcttgaacaagggcaaagccatcttcaggttcagtgctactcctgccctgtatcttttaagcccctttagcgtcgtgcgtaggggggcaataaaggttcttatccacgctctttttagcatgttcatcatgattacaatactcacaaattgcgtgttcatgaccatgtctgatccccctccatggagcaagaatgtagaatacaccttcactggaatttacacatttgaatcgctgataaaaatactagccagaggattctgtgtggatgatttcacctttcttcgggacccttggaattggctcgactttagtgtgataatgatggcttatctgacagagttcgttgacttgggtaacattagcgccctaagaaccttccgggtgctgcgcgctctaaagactattactgtcatccccggattgaaaaccatcgtcggagccctgattcagtctgtgaagaaactgagcgacgtcatgattttaacagttttttgcctttcagtcttcgccctcgttgggcttcagttgtttatggggaatctgagacagaagtgtgtccggtggcctcccccattcaacgatactaacacgacttggtactcgaatgacacatggtatgggaatgatacttggtacggaaatgaaatgtggtatggaaatgactcgtggtatgctaatgacacctggaatagccatgcatcttgggccacaaacgatacttttgactgggacgcctacattagtgatgaagggaacttttatttccttgaagggtctaatgatgctctactgtgtgggaattcttctgatgctgggcactgtcctgaagggtatgagtgcatcaagacaggcaggaatccaaattacgggtacacatcctacgacacattttcatgggccttcttggcactgttccgtctcatgacccaagactactgggaaaatctgttccagctgacccttcgggcagccggtaagacctatatgattttcttcgtggtcatcatcttcctgggatccttctacctcattaacctgattctggccgttgtggccatggcgtacgctgaacaaaatgaggcaactctggccgaagataaggagaaggaagaggagttccagcagatgcttgaaaagttcaagaagcaccaggaagagctggagaaggccaaggccgctcaggctcttgagggaggggaagcagacggcgatcctgcccatggcaaggactgtaatggatctctcgatacctcccagggagaaaaaggagcgcctaggcagagtagtagcggggactcaggaatttcagacgccatggaggagctagaggaagcccatcagaagtgccctccttggtggtacaaatgcgctcacaaagtcctaatctggaattgctgcgctccgtggcttaagttcaagaatatcatacatctgatagtgatggacccctttgtggacttaggcattactatctgtattgttcttaatacactcttcatggcaatggaacattatccaatgaccgaacattttgacaatgtgcttacagtcggcaatctcgttttcaccggaatcttcaccgccgagatggtgctcaagctgatcgcaatggatccctatgagtacttccagcagggttggaacatcttcgattctattattgtcacgcttagtctggttgaactgggactcgccaacgtgcaggggctgagtgtgctaaggtcctttaggctcctgcgcgtgtttaaactggctaagagctggcccaccctgaatatgctcataaagataataggcaactccgttggcgctctggggaatctcacgctggtgcttgctatcatagtgtttatatttgccgtggtgggaatgcagcttttcggcaaatcatacaaggaatgcgtgtgcaaaattgcattagattgtaatcttccacgttggcacatgcacgattttttccattcgttcctgatcgtgtttaggattctgtgcggagaatggatagagaccatgtgggactgcatggaggtagcgggacaggcaatgtgcctgacggtgtttctgatggttatggtaatcggaaatctggtcgtactgaacctgtttctagcacttttactgtcatccttttctgccgactccctcgcagccagcgacgaggacggtgagatgaataacttacagattgcgattggtcgaattaaattgggcatcgggttcgctaaagccttcctattgggtctgctgcatggcaaaatactgtctcccaaagacataatgctcagtttgggggaggccgacggtgcaggtgaagccggtgaagccggagagacagctcctgaagacgagaagaaggaacctccagaggaggatctgaagaaggacaatcacattcttaaccacatggggctagccgatggacctccttcaagcctagaactggatcatctgaactttattaacaacccttatcttactatccaggtgcccatcgcctctgaagagagcgacctagagatgcccactgaggaagaaacagataccttttcagagcccgaagatagtaagaagcctccacagccgttatatgacggtaattcatcagtatgcagcactgccgattacaaacctcccgaagaagaccccgaggagcaagccgaggagaaccctgagggcgagcagccagaagaatgctttactgaggcatgtgtgcaacggtggccttgcctttacgttgatattagccagggcagaggtaagaaatggtggaccttaagacgggcttgctttaagatcgtggagcataattggttcgagacctttatcgtctttatgattcttctgtcatcaggagcgctggcctttgaggacatctatatcgagcagcgaagagttattagaacaatcctggaatatgccgacaaggtcttcacttatatcttcattatggagatgctgttgaaatgggtcgcatatgggttcaaggtatacttcactaacgcctggtgctggctggactttctgatagtggatgtttctatcatttcactggtggccaactggttggggtattcagaactgggtcctataaagtctttaagaacgctgagggcgctgcggccactgcgcgctctcagccggttcgaggggatgcgggtggttgtgaatgccctcctgggcgcaattccctccataatgaatgtgcttctggtctgcttaatcttttggctgatcttttccattatgggcgttaatctgttcgctggtaagttctactattgtataaacacaacaacctccgaaagattcgacatctccgaagtgaataacaagagcgaatgcgaatcactgatgcataccggccaagttcgttggctaaatgtcaaagttaactacgataatgtgggactgggatatctatccttactacaggtggctacctttaaagggtggatggatattatgtatgccgctgtcgactctagagagaaagaggagcagcctcagtacgaggtgaacctgtacatgtatttatatttcgtgatttttattatctttggctccttcttcacgcttaatttattcattggtgtgattatcgacaatttcaatcagcagaaaaagaagctgggcggaaaagacatatttatgaccgaagaacagaaaaaatattacaatgctatgaagaaactcggcagcaagaaaccccagaagcccatcccaagacctcagaataaaattcaggggatggtatatgaccttgtgacaaaacaggctttcgacatcaccataatgatcctgatctgtctgaacatggtaactatgatggtagaaaccgataaccagtcccagctaaaagttgacatactgtataatatcaatatgatctttattattatctttactggagagtgcgtgctgaagatgcttgccttgaggcagtactacttcacagtaggctggaacatttttgatttcgtcgtagtgatactgtctatcgtgggtctggcgcttagcgatctcattcagaagtactttgtgagccccaccctgttccgcgtgattcgcctagcgagaattggaagagttctaagactaatacggggagctaaagggatccgaacattgctgttcgccctcatgatgagtctgccagctctctttaacattggacttctgctgtttctggtcatgtttatatattctattttcggaatgtccaacttcgcctatgtgaaaaaggagagtgggatcgatgatatgttcaattttgagacattcggtaactcaattatttgcctgtttgaaatcacaacctccgccggttgggatggactgctgaatcctatactgaactctgggccacccgactgcgatccaaacctcgaaaatcccggaactagtgtgaaaggggactgtggaaacccttccataggcatttgttttttctgtagttacataattattagctttctcatagtcgttaacatgtatatcgcaatcatcctggaaaatttcaatgtggcaacggaagagtcttccgaaccactgggtgaagacgactttgagatgttttacgaaacatgggaaaagttcgatcctgacgctacgcagttcattgcatattcccggctgagtgactttgtagacactttgcaggagccacttagaattgcaaaacccaacaagatcaaactcatcactcttgatcttccaatggttccaggcgacaaaatccactgtttggacatacttttcgcccttacaaaagaggtcctgggagactccggggagatggacgccctaaaacagaccatggaggaaaagtttatggccgctaacccatcgaaggtgtcatatgagcccataacgactacgctgaaaaggaagcacgaggaggtttgtgccatcaagatacagcgtgcatatcgaaggcacctcctgcagcgctctatgaaacaggcctcctatatgtaccggcatagtcacgatgggagtggggacgatgccccagaaaaagaaggcctgttggccaacactatgagcaaaatgtacgggcacgaaaacgggaacagttcaagtccatcccctgaggaaaagggtgaggccggagacgcgggtcctaccatgggattaatgccgatatctccaagtgatacagcctggccacctgctccccctcctggccagaccgtgagacctggcgtgaaagagtccctggtgta

SEQ ID NO: 7143 - DNA, 7805 bp, Artificial Sequence
  derived and/or modified sequence
ccagcaccccggggctgcgcactgcagctccccaggccacccaccacccttctggtctctgagcccaggatgcgaggatggccagaccatctctgtgcaccctggtgcctctgggccctgagtgcttgcgccccttcacccgggagtcactggcagccatagaacagcgggcggtggaggaggaggcccggctgcagcggaataagcagatggagattgaggagcccgaacggaagccacgaagtgacttggaggctggcaagaacctacccatgatctacggagaccccccgccggaggtcatcggcatccccctggaggacctggatccctactacagcaataagaagaccttcatcgtactcaacaagggcaaggccatcttccgcttctccgccacacctgctctctacctgctgagccccttcagcgtagtcaggcgcggggccatcaaggtgctcatccatgcgctgttcagcatgttcatcatgatcaccatcttgaccaactgcgtattcatgaccatgagtgacccgcctccctggtccaagaatgtggagtacaccttcacagggatctacacctttgagtccctcatcaagatactggcccgaggcttctgtgtcgacgacttcacattcctccgggacccctggaactggctggacttcagtgtcatcatgatggcgtacctgacagagtttgtggacttgggcaacatctcagccctgaggaccttccgggtgctgcgggccctcaaaaccatcacggtcatcccagggctgaagacgatcgtgggggccctgatccagtcggtgaaaaagctgtcggatgtgatgatcctcactgtcttctgcctgagcgtctttgcgctggtaggactgcagctcttcatgggaaacctgaggcagaagtgtgtgcgctggcccccgccgttcaacgacaccaacaccacgtggtacagcaatgacacgtggtacggcaatgacacatggtatggcaatgagatgtggtacggcaatgactcatggtatgccaacgacacgtggaacagccatgcaagctgggccaccaacgatacctttgattgggacgcctacatcagtgatgaagggaacttctacttcctggagggctccaacgatgccctgctctgtgggaacagcagtgatgctgggcactgccctgagggttatgagtgcatcaagaccgggcggaaccccaactatggctacaccagctatgacaccttcagctgggccttcttggctctcttccgcctcatgacacaggactattgggagaacctcttccagctgacccttcgagcagctggcaagacctacatgatcttcttcgtggtcatcatcttcctgggctctttctacctcatcaatctgatcctggccgtggtggccatggcatatgccgagcagaatgaggccaccctggccgaggataaggagaaagaggaggagtttcagcagatgcttgagaagttcaaaaagcaccaggaggagctggagaaggccaaggccgcccaagctctggaaggtggggaggcagatggggacccagcccatggcaaagactgcaatggcagcctggacacatcgcaaggggagaagggagccccgaggcagagcagcagcggagacagcggcatctccgacgccatggaagaactggaagaggcccaccaaaagtgcccaccatggtggtacaagtgcgcccacaaagtgctcatatggaactgctgcgccccgtggctgaagttcaagaacatcatccacctgatcgtcatggacccgttcgtggacctgggcatcaccatctgcatcgtgctcaacaccctcttcatggccatggaacattaccccatgacggagcactttgacaacgtgctcactgtgggcaacctggtcttcacaggcatcttcacagcagagatggttctgaagctgattgccatggacccctacgagtatttccagcagggttggaatatcttcgacagcatcatcgtcaccctcagcctggtagagctaggcctggccaacgtacagggactgtctgtgctacgctccttccgtctgctgcgggtcttcaagctggccaagtcgtggccaacgctgaacatgctcatcaagatcattggcaattcagtgggggcgctgggtaacctgacgctggtgctggctatcatcgtgttcatcttcgccgtggtgggcatgcagctgtttggcaagagctacaaggagtgcgtgtgcaagattgccttggactgcaacctgccgcgctggcacatgcatgatttcttccactccttcctcatcgtcttccgcatcctgtgcggggagtggatcgagaccatgtgggactgcatggaggtggccggccaagccatgtgcctcaccgtcttcctcatggtcatggtcatcggcaatcttgtggtcctgaacctgttcctggctctgctgctgagctccttcagcgccgacagtctggcagcctcggatgaggatggcgagatgaacaacctgcagattgccatcgggcgcatcaagttgggcatcggctttgccaaggccttcctcctggggctgctgcatggcaagatcctgagccccaaggacatcatgctcagcctcggggaggctgacggggccggggaggctggagaggcgggggagactgcccccgaggatgagaagaaggagccgcccgaggaggacctgaagaaggacaatcacatcctgaaccacatgggcctggctgacggccccccatccagcctcgagctggaccaccttaacttcatcaacaacccctacctgaccatacaggtgcccatcgcctccgaggagtccgacctggagatgcccaccgaggaggaaaccgacactttctcagagcctgaggatagcaagaagccgccgcagcctctctatgatgggaactcgtccgtctgcagcacagctgactacaagccccccgaggaggaccctgaggagcaggcagaggagaaccccgagggggagcagcctgaggagtgcttcactgaggcctgcgtgcagcgctggccctgcctctacgtggacatctcccagggccgtgggaagaagtggtggactctgcgcagggcctgcttcaagattgtcgagcacaactggttcgagaccttcattgtcttcatgatcctgctcagcagtggggctctggccttcgaggacatctacattgagcagcggcgagtcattcgcaccatcctagaatatgccgacaaggtcttcacctacatcttcatcatggagatgctgctcaaatgggtggcctacggctttaaggtgtacttcaccaacgcctggtgctggctcgacttcctcatcgtggatgtctccatcatcagcttggtggccaactggctgggctactcggagctgggacccatcaaatccctgcggacactgcgggccctgcgtcccctgagggcactgtcccgattcgagggcatgagggtggtggtgaacgccctcctaggcgccatcccctccatcatgaatgtgctgcttgtctgcctcatcttctggctgatcttcagcatcatgggtgtcaacctgtttgccggcaagttctactactgcatcaacaccaccacctctgagaggttcgacatctccgaggtcaacaacaagtctgagtgcgagagcctcatgcacacaggccaggtccgctggctcaatgtcaaggtcaactacgacaacgtgggtctgggctacctctccctcctgcaggtggccaccttcaagggttggatggacatcatgtatgcagccgtggactcccgggagaaggaggagcagccgcagtacgaggtgaacctctacatgtacctctactttgtcatcttcatcatctttggctccttcttcaccctcaacctcttcattggcgtcatcattgacaacttcaaccagcagaagaagaagttaggggggaaagacatctttatgacggaggaacagaagaaatactataacgccatgaagaagcttggctccaagaagcctcagaagccaattccccggccccagaacaagatccagggcatggtgtatgacctcgtgacgaagcaggccttcgacatcaccatcatgatcctcatctgcctcaacatggtcaccatgatggtggagacagacaaccagagccagctcaaggtggacatcctgtacaacatcaacatgatcttcatcatcatcttcacaggggagtgcgtgctcaagatgctcgccctgcgccagtactacttcaccgttggctggaacatctttgacttcgtggtcgtcatcctgtccattgtgggccttgccctctctgacctgatccagaagtacttcgtgtcacccacgctgttccgtgtgatccgcctggcgcggattgggcgtgtcctgcggctgatccgcggggccaagggcatccggacgctgctgttcgccctcatgatgtcgctgcctgccctcttcaacatcggcctcctcctcttcctggtcatgttcatctactccatcttcggcatgtccaactttgcctacgtcaagaaggagtcgggcatcgatgatatgttcaacttcgagaccttcggcaacagcatcatctgcctgttcgagatcaccacgtcggccggctgggacgggctcctcaaccccatcctcaacagcgggcccccagactgtgaccccaacctggagaacccgggcaccagtgtcaagggtgactgcggcaacccctccatcggcatctgcttcttctgcagctatatcatcatctccttcctcatcgtggtcaacatgtacatcgccatcatcctggagaacttcaatgtggccacagaggagagcagcgagccccttggtgaagatgactttgagatgttctacgagacatgggagaagttcgaccccgacgccacccagttcatcgcctacagccgcctctcagacttcgtggacaccctgcaggaaccgctgaggattgccaagcccaacaagatcaagctcatcacactggacttgcccatggtgccaggggacaagatccactgcctggacatcctctttgccctgaccaaagaggtcctgggtgactctggggaaatggacgccctcaagcagaccatggaggagaagttcatggcagccaacccctccaaggtgtcctacgagcccatcaccaccaccctcaagaggaagcacgaggaggtgtgcgccatcaagatccagagggcctaccgccggcacctgctacagcgctccatgaagcaggcatcctacatgtaccgccacagccacgacggcagcggggatgacgcccctgagaaggaggggctgcttgccaacaccatgagcaagatgtatggccacgagaatgggaacagcagctcgccaagcccggaggagaagggcgaggcaggggacgccggacccactatggggctgatgcccatcagcccctcagacactgcctggcctcccgcccctcccccagggcagactgtgcgcccaggtgtcaaggagtctcttgtctagcaggcagcatcggggtggcccactgagtctcggcatagtccccagagctcccccgtggtgcctgcacacagagtgagggaggagggctttgaatctgggactgtgcctggctccctgatgggggacaggatttggccacactggggctgacacccaggcccgagcgcctgcgttcccagaccatgggaaatgggaattgcgctcaggggctccatgctgggtctgaggcccctgcctccaagatttaacctgcaagttgctctgacctcctctgggccctgtcgcccctccttttggcctgggggaggtcagaacattcgaatctctgcccctcacttgaggaggagctggcctgcggtggagggatcagttgccccccatcaccagagtcttaagggtcactggcctctccccaggaagtggctcagacccctcagccccagcccagacaaagatgtcttaacctcagggagtgcagacacctaaccccagggcactgccagcccaccccctttgactctggggtgcagcttcacccaccaggccagctcaggaattccctggaaaagggaaatgtgactggttcagaaatagctcctcaaagcctcaaaacctgattggccactggatcctgctgctttgggctgggatggtgactcctgaaacctcttcctaggccacgtccaggtccgtagctcccctggctggctcctaggggaagagcagaaggaaggatgccacttgggaatgaattgtccttttctaggaagcacgggggagtgagacaggctgggtcctgccagctggatcgctgcacatggcctgagcatccagacctgagcgggagtcagggacctgctgctcagtaagaagattctcgccccttccctctctccctgcctcactcctccgtgagcaccaccagggctccaggagcctcatccagcctcagagatctcccttctcatctccccacgcccgtctctttctcacctttcccacctctctccccaaagtgatcctaagaatgtacagttgagctcaggttagatatttcgaccctggggcgtgcagcagggaaggcccaactggttcaggctcaaccttccaacttcctgtggcctgaagaagcacttctgctgcatcgctgttctgggcatggcagggccaggcctctgctggctcaggaggaggggtgagagacctgctcaggcgtcgctggatttattcacttgtgtgtgtacctgtggctgtgtgtctgcttgtatgcttttataggcctgtgtgtatagctgtgtgtgtgttcaagtgcgtgactgtatgtgtgtgtgtgaaccactgtgtactggagcctgcattatgcacgtgtctgggtatctttgtatatatgtgtatatatgtgtgccctggactgtttcaaggtccatggagtacggctggtgtgtcatactgtgcaggcctgtccctgggagtgttcccgtgcctgggagagtggacctgtgctgtgagtgtgtggatgcgtgtgaacgcatgtggtaaggtgtgtactcagggcattctgttggcctaagtgcctcttctttttcttcttgtttctcatgaaaagtttgattaaaattcaggaagcagcaaaaccttcaaaacaagacatgtatgtgtgcttgagtgtgtgaacacgtgtgtgtgtgtgcacatctacatgccatgcctatgggccagagttgtctttattgtccaccatgctctctcacctgctcccagtcctgcctgaacagccctctctctcactcccctctcctccccttcctgtttctcgttgtcacacccatggcctcagccctgctccctgcctcctgcctatgtctcctctatggaaggaggcctccactccttccatctcttccttcagaagtttcgtctaatgggggcagtctccccttcctggcacattgcccctctgccttgccctcctgggccctgggctggcacagcccctggagcctcagaaatctgtttgattggatattctcctcggactgtgtgcaggttgcagaggaagagtagatgagccgggtccggcctctccctgcctgtggcccctcccctgcagacggatgcccattcctgcctggtccagtggggaacaggtcccacgccaggccagcaggcgggctcctttgtacagttcttacaataaaccctccttggtgcctctgg

SEQ ID NO: 7144 - DNA, 5511 bp, Artificial Sequence
  derived and/or modified sequence
atggccagacccagcctgtgcaccctggtgcccctgggccccgagtgcctgagacccttcaccagagagagcctggccgccatcgagcagagagccgtggaggaggaggccagactgcagagaaacaagcagatggagatcgaggagcccgagagaaagcccagaagcgacctggaggccggcaagaacctgcccatgatctacggcgaccccccccccgaggtgatcggcatccccctggaggacctggacccctactacagcaacaagaagaccttcatcgtgctgaacaagggcaaggccatcttcagattcagcgccacccccgccctgtacctgctgagccccttcagcgtggtgagaagaggcgccatcaaggtgctgatccacgccctgttcagcatgttcatcatgatcaccatcctgaccaactgcgtgttcatgaccatgagcgacccccccccctggagcaagaacgtggagtacaccttcaccggcatctacaccttcgagagcctgatcaagatcctggccagaggcttctgcgtggacgacttcaccttcctgagagacccctggaactggctggacttcagcgtgatcatgatggcctacctgaccgagttcgtggacctgggcaacatcagcgccctgagaaccttcagagtgctgagagccctgaagaccatcaccgtgatccccggcctgaagaccatcgtgggcgccctgatccagagcgtgaagaagctgagcgacgtgatgatcctgaccgtgttctgcctgagcgtgttcgccctggtgggcctgcagctgttcatgggcaacctgagacagaagtgcgtgagatggcccccccccttcaacgacaccaacaccacctggtacagcaacgacacctggtacggcaacgacacctggtacggcaacgagatgtggtacggcaacgacagctggtacgccaacgacacctggaacagccacgccagctgggccaccaacgacaccttcgactgggacgcctacatcagcgacgagggcaacttctacttcctggagggcagcaacgacgccctgctgtgcggcaacagcagcgacgccggccactgccccgagggctacgagtgcatcaagaccggcagaaaccccaactacggctacaccagctacgacaccttcagctgggccttcctggccctgttcagactgatgacccaggactactgggagaacctgttccagctgaccctgagagccgccggcaagacctacatgatcttcttcgtggtgatcatcttcctgggcagcttctacctgatcaacctgatcctggccgtggtggccatggcctacgccgagcagaacgaggccaccctggccgaggacaaggagaaggaggaggagttccagcagatgctggagaagttcaagaagcaccaggaggagctggagaaggccaaggccgcccaggccctggagggcggcgaggccgacggcgaccccgcccacggcaaggactgcaacggcagcctggacaccagccagggcgagaagggcgcccccagacagagcagcagcggcgacagcggcatcagcgacgccatggaggagctggaggaggcccaccagaagtgccccccctggtggtacaagtgcgcccacaaggtgctgatctggaactgctgcgccccctggctgaagttcaagaacatcatccacctgatcgtgatggaccccttcgtggacctgggcatcaccatctgcatcgtgctgaacaccctgttcatggccatggagcactaccccatgaccgagcacttcgacaacgtgctgaccgtgggcaacctggtgttcaccggcatcttcaccgccgagatggtgctgaagctgatcgccatggacccctacgagtacttccagcagggctggaacatcttcgacagcatcatcgtgaccctgagcctggtggagctgggcctggccaacgtgcagggcctgagcgtgctgagaagcttcagactgctgagagtgttcaagctggccaagagctggcccaccctgaacatgctgatcaagatcatcggcaacagcgtgggcgccctgggcaacctgaccctggtgctggccatcatcgtgttcatcttcgccgtggtgggcatgcagctgttcggcaagagctacaaggagtgcgtgtgcaagatcgccctggactgcaacctgcccagatggcacatgcacgacttcttccacagcttcctgatcgtgttcagaatcctgtgcggcgagtggatcgagaccatgtgggactgcatggaggtggccggccaggccatgtgcctgaccgtgttcctgatggtgatggtgatcggcaacctggtggtgctgaacctgttcctggccctgctgctgagcagcttcagcgccgacagcctggccgccagcgacgaggacggcgagatgaacaacctgcagatcgccatcggcagaatcaagctgggcatcggcttcgccaaggccttcctgctgggcctgctgcacggcaagatcctgagccccaaggacatcatgctgagcctgggcgaggccgacggcgccggcgaggccggcgaggccggcgagaccgcccccgaggacgagaagaaggagccccccgaggaggacctgaagaaggacaaccacatcctgaaccacatgggcctggccgacggcccccccagcagcctggagctggaccacctgaacttcatcaacaacccctacctgaccatccaggtgcccatcgccagcgaggagagcgacctggagatgcccaccgaggaggagaccgacaccttcagcgagcccgaggacagcaagaagcccccccagcccctgtacgacggcaacagcagcgtgtgcagcaccgccgactacaagccccccgaggaggaccccgaggagcaggccgaggagaaccccgagggcgagcagcccgaggagtgcttcaccgaggcctgcgtgcagagatggccctgcctgtacgtggacatcagccagggcagaggcaagaagtggtggaccctgagaagagcctgcttcaagatcgtggagcacaactggttcgagaccttcatcgtgttcatgatcctgctgagcagcggcgccctggccttcgaggacatctacatcgagcagagaagagtgatcagaaccatcctggagtacgccgacaaggtgttcacctacatcttcatcatggagatgctgctgaagtgggtggcctacggcttcaaggtgtacttcaccaacgcctggtgctggctggacttcctgatcgtggacgtgagcatcatcagcctggtggccaactggctgggctacagcgagctgggccccatcaagagcctgagaaccctgagagccctgagacccctgagagccctgagcagattcgagggcatgagagtggtggtgaacgccctgctgggcgccatccccagcatcatgaacgtgctgctggtgtgcctgatcttctggctgatcttcagcatcatgggcgtgaacctgttcgccggcaagttctactactgcatcaacaccaccaccagcgagagattcgacatcagcgaggtgaacaacaagagcgagtgcgagagcctgatgcacaccggccaggtgagatggctgaacgtgaaggtgaactacgacaacgtgggcctgggctacctgagcctgctgcaggtggccaccttcaagggctggatggacatcatgtacgccgccgtggacagcagagagaaggaggagcagccccagtacgaggtgaacctgtacatgtacctgtacttcgtgatcttcatcatcttcggcagcttcttcaccctgaacctgttcatcggcgtgatcatcgacaacttcaaccagcagaagaagaagctgggcggcaaggacatcttcatgaccgaggagcagaagaagtactacaacgccatgaagaagctgggcagcaagaagccccagaagcccatccccagaccccagaacaagatccagggcatggtgtacgacctggtgaccaagcaggccttcgacatcaccatcatgatcctgatctgcctgaacatggtgaccatgatggtggagaccgacaaccagagccagctgaaggtggacatcctgtacaacatcaacatgatcttcatcatcatcttcaccggcgagtgcgtgctgaagatgctggccctgagacagtactacttcaccgtgggctggaacatcttcgacttcgtggtggtgatcctgagcatcgtgggcctggccctgagcgacctgatccagaagtacttcgtgagccccaccctgttcagagtgatcagactggccagaatcggcagagtgctgagactgatcagaggcgccaagggcatcagaaccctgctgttcgccctgatgatgagcctgcccgccctgttcaacatcggcctgctgctgttcctggtgatgttcatctacagcatcttcggcatgagcaacttcgcctacgtgaagaaggagagcggcatcgacgacatgttcaacttcgagaccttcggcaacagcatcatctgcctgttcgagatcaccaccagcgccggctgggacggcctgctgaaccccatcctgaacagcggcccccccgactgcgaccccaacctggagaaccccggcaccagcgtgaagggcgactgcggcaaccccagcatcggcatctgcttcttctgcagctacatcatcatcagcttcctgatcgtggtgaacatgtacatcgccatcatcctggagaacttcaacgtggccaccgaggagagcagcgagcccctgggcgaggacgacttcgagatgttctacgagacctgggagaagttcgaccccgacgccacccagttcatcgcctacagcagactgagcgacttcgtggacaccctgcaggagcccctgagaatcgccaagcccaacaagatcaagctgatcaccctggacctgcccatggtgcccggcgacaagatccactgcctggacatcctgttcgccctgaccaaggaggtgctgggcgacagcggcgagatggacgccctgaagcagaccatggaggagaagttcatggccgccaaccccagcaaggtgagctacgagcccatcaccaccaccctgaagagaaagcacgaggaggtgtgcgccatcaagatccagagagcctacagaagacacctgctgcagagaagcatgaagcaggccagctacatgtacagacacagccacgacggcagcggcgacgacgcccccgagaaggagggcctgctggccaacaccatgagcaagatgtacggccacgagaacggcaacagcagcagccccagccccgaggagaagggcgaggccggcgacgccggccccaccatgggcctgatgcccatcagccccagcgacaccgcctggccccccgcccccccccccggccagaccgtgagacccggcgtgaaggagagcctggtgtag

SEQ ID NO: 7145 - protein, 2015 aa, Artificial Sequence [sequence omitted]

SEQ ID NO: 7146 - DNA, 8501 bp, Artificial Sequence
  derived and/or modified sequence
agacggcggcggcgcccgtaggatgcagggatcgctcccccggggccgctgagcctgcgcccagtgccccgagccccgcgccgagccgagtccgcgccaagcagcagccgcccaccccggggcccggccgggggaccagcagcttccccacaggcaacgtgaggagagcctgtgcccagaagcaggatgagaagatggcaaacttcctattacctcggggcaccagcagcttccgcaggttcacacgggagtccctggcagccatcgagaagcgcatggcagagaagcaagcccgcggctcaaccaccttgcaggagagccgagaggggctgcccgaggaggaggctccccggccccagctggacctgcaggcctccaaaaagctgccagatctctatggcaatccaccccaagagctcatcggagagcccctggaggacctggaccccttctatagcacccaaaagactttcatcgtactgaataaaggcaagaccatcttccggttcagtgccaccaacgccttgtatgtcctcagtcccttccaccccatccggagagcggctgtgaagattctggttcactcgctcttcaacatgctcatcatgtgcaccatcctcaccaactgcgtgttcatggcccagcacgaccctccaccctggaccaagtatgtcgagtacaccttcaccgccatttacacctttgagtctctggtcaagattctggctcgaggcttctgcctgcacgcgttcactttccttcgggacccatggaactggctggactttagtgtgattatcatggcatacacaactgaatttgtggacctgggcaatgtctcagccttacgcaccttccgagtcctccgggccctgaaaactatatcagtcatttcagggctgaagaccatcgtgggggccctgatccagtctgtgaagaagctggctgatgtgatggtcctcacagtcttctgcctcagcgtctttgccctcatcggcctgcagctcttcatgggcaacctaaggcacaagtgcgtgcgcaacttcacagcgctcaacggcaccaacggctccgtggaggccgacggcttggtctgggaatccctggacctttacctcagtgatccagaaaattacctgctcaagaacggcacctctgatgtgttactgtgtgggaacagctctgacgctgggacatgtccggagggctaccggtgcctaaaggcaggcgagaaccccgaccacggctacaccagcttcgattcctttgcctgggcctttcttgcactcttccgcctgatgacgcaggactgctgggagcgcctctatcagcagaccctcaggtccgcagggaagatctacatgatcttcttcatgcttgtcatcttcctggggtccttctacctggtgaacctgatcctggccgtggtcgcaatggcctatgaggagcaaaaccaagccaccatcgctgagaccgaggagaaggaaaagcgcttccaggaggccatggaaatgctcaagaaagaacacgaggccctcaccatcaggggtgtggataccgtgtcccgtagctccttggagatgtcccctttggccccagtaaacagccatgagagaagaagcaagaggagaaaacggatgtcttcaggaactgaggagtgtggggaggacaggctccccaagtctgactcagaagatggtcccagagcaatgaatcatctcagcctcacccgtggcctcagcaggacttctatgaagccacgttccagccgcgggagcattttcacctttcgcaggcgagacctgggttctgaagcagattttgcagatgatgaaaacagcacagcgggggagagcgagagccaccacacatcactgctggtgccctggcccctgcgccggaccagtgcccagggacagcccagtcccggaacctcggctcctggccacgccctccatggcaaaaagaacagcactgtggactgcaatggggtggtctcattactgggggcaggcgacccagaggccacatccccaggaagccacctcctccgccctgtgatgctagagcacccgccagacacgaccacgccatcggaggagccaggcgggccccagatgctgacctcccaggctccgtgtgtagatggcttcgaggagccaggagcacggcagcgggccctcagcgcagtcagcgtcctcaccagcgcactggaagagttagaggagtctcgccacaagtgtccaccatgctggaaccgtctcgcccagcgctacctgatctgggagtgctgcccgctgtggatgtccatcaagcagggagtgaagttggtggtcatggacccgtttactgacctcaccatcactatgtgcatcgtactcaacacactcttcatggcgctggagcactacaacatgacaagtgaattcgaggagatgctgcaggtcggaaacctggtcttcacagggattttcacagcagagatgaccttcaagatcattgccctcgacccctactactacttccaacagggctggaacatcttcgacagcatcatcgtcatccttagcctcatggagctgggcctgtcccgcatgagcaacttgtcggtgctgcgctccttccgcctgctgcgggtcttcaagctggccaaatcatggcccaccctgaacacactcatcaagatcatcgggaactcagtgggggcactggggaacctgacactggtgctagccatcatcgtgttcatctttgctgtggtgggcatgcagctctttggcaagaactactcggagctgagggacagcgactcaggcctgctgcctcgctggcacatgatggacttctttcatgccttcctcatcatcttccgcatcctctgtggagagtggatcgagaccatgtgggactgcatggaggtgtcggggcagtcattatgcctgctggtcttcttgcttgttatggtcattggcaaccttgtggtcctgaatctcttcctggccttgctgctcagctccttcagtgcagacaacctcacagcccctgatgaggacagagagatgaacaacctccagctggccctggcccgcatccagaggggcctgcgctttgtcaagcggaccacctgggatttctgctgtggtctcctgcggcagcggcctcagaagcccgcagcccttgccgcccagggccagctgcccagctgcattgccaccccctactccccgccacccccagagacggagaaggtgcctcccacccgcaaggaaacacggtttgaggaaggcgagcaaccaggccagggcacccccggggatccagagcccgtgtgtgtgcccatcgctgtggccgagtcagacacagatgaccaagaagaagatgaggagaacagcctgggcacggaggaggagtccagcaagcaggaatcccagcctgtgtccggtggcccagaggcccctccggattccaggacctggagccaggtgtcagcgactgcctcctctgaggccgaggccagtgcatctcaggccgactggcggcagcagtggaaagcggaaccccaggccccagggtgcggtgagaccccagaggacagttgctccgagggcagcacagcagacatgaccaacaccgctgagctcctggagcagatccctgacctcggccaggatgtcaaggacccagaggactgcttcactgaaggctgtgtccggcgctgtccctgctgtgcggtggacaccacacaggccccagggaaggtctggtggcggttgcgcaagacctgctaccacatcgtggagcacagctggttcgagacattcatcatcttcatgatcctactcagcagtggagcgctggccttcgaggacatctacctagaggagcggaagaccatcaaggttctgcttgagtatgccgacaagatgttcacatatgtcttcgtgctggagatgctgctcaagtgggtggcctacggcttcaagaagtacttcaccaatgcctggtgctggctcgacttcctcatcgtagacgtctctctggtcagcctggtggccaacaccctgggctttgccgagatgggccccatcaagtcactgcggacgctgcgtgcactccgtcctctgagagctctgtcacgatttgagggcatgagggtggtggtcaatgccctggtgggcgccatcccgtccatcatgaacgtcctcctcgtctgcctcatcttctggctcatcttcagcatcatgggcgtgaacctctttgcggggaagtttgggaggtgcatcaaccagacagagggagacttgcctttgaactacaccatcgtgaacaacaagagccagtgtgagtccttgaacttgaccggagaattgtactggaccaaggtgaaagtcaactttgacaacgtgggggccgggtacctggcccttctgcaggtggcaacatttaaaggctggatggacattatgtatgcagctgtggactccagggggtatgaagagcagcctcagtgggaatacaacctctacatgtacatctattttgtcattttcatcatctttgggtctttcttcaccctgaacctctttattggtgtcatcattgacaacttcaaccaacagaagaaaaagttagggggccaggacatcttcatgacagaggagcagaagaagtactacaatgccatgaagaagctgggctccaagaagccccagaagcccatcccacggcccctgaacaagtaccagggcttcatattcgacattgtgaccaagcaggcctttgacgtcaccatcatgtttctgatctgcttgaatatggtgaccatgatggtggagacagatgaccaaagtcctgagaaaatcaacatcttggccaagatcaacctgctctttgtggccatcttcacaggcgagtgtattgtcaagctggctgccctgcgccactactacttcaccaacagctggaatatcttcgacttcgtggttgtcatcctctccatcgtgggcactgtgctctcggacatcatccagaagtacttcttctccccgacgctcttccgagtcatccgcctggcccgaataggccgcatcctcagactgatccgaggggccaaggggatccgcacgctgctctttgccctcatgatgtccctgcctgccctcttcaacatcgggctgctgctcttcctcgtcatgttcatctactccatctttggcatggccaacttcgcttatgtcaagtgggaggctggcatcgacgacatgttcaacttccagaccttcgccaacagcatgctgtgcctcttccagatcaccacgtcggccggctgggatggcctcctcagccccatcctcaacactgggccgccctactgcgaccccactctgcccaacagcaatggctctcggggggactgcgggagcccagccgtgggcatcctcttcttcaccacctacatcatcatctccttcctcatcgtggtcaacatgtacattgccatcatcctggagaacttcagcgtggccacggaggagagcaccgagcccctgagtgaggacgacttcgatatgttctatgagatctgggagaaatttgacccagaggccactcagtttattgagtattcggtcctgtctgactttgccgatgccctgtctgagccactccgtatcgccaagcccaaccagataagcctcatcaacatggacctgcccatggtgagtggggaccgcatccattgcatggacattctctttgccttcaccaaaagggtcctgggggagtctggggagatggacgccctgaagatccagatggaggagaagttcatggcagccaacccatccaagatctcctacgagcccatcaccaccacactccggcgcaagcacgaagaggtgtcggccatggttatccagagagccttccgcaggcacctgctgcaacgctctttgaagcatgcctccttcctcttccgtcagcaggcgggcagcggcctctccgaagaggatgcccctgagcgagagggcctcatcgcctacgtgatgagtgagaacttctcccgaccccttggcccaccctccagctcctccatctcctccacttccttcccaccctcctatgacagtgtcactagagccaccagcgataacctccaggtgcgggggtctgactacagccacagtgaagatctcgccgacttccccccttctccggacagggaccgtgagtccatcgtgtgagcctcggcctggctggccaggacacactgaaaagcagcctttttcaccatggcaaacctaaatgcagtcagtcacaaaccagcctggggccttcctggctttgggagtaagaaatgggcctcagccccgcggatcaaccaggcagagttctgtggcgccgcgtggacagccggagcagttggcctgtgcttggaggcctcagatagacctgtgacctggtctggtcaggcaatgccctgcggctctggaaagcaacttcatcccagctgctgaggcgaaatataaaactgagactgtatatgttgtgaatgggctttcataaatttattatatttgatatttttttacttgagcaaagaactaaggatttttccatggacatgggcagcaattcacgctgtctcttcttaaccctgaacaagagtgtctatggagcagccggaagtctgttctcaaagcagaagtggaatccagtgtggctcccacaggtcttcactgcccaggggtcgaatggggtccccctcccacttgacctgagatgctgggagggctgaacccccactcacacaagcacacacacacagtcctcacacacggaggccagacacaggccgtgggacccaggctcccagcctaagggagacaggcctttccctgccggccccccaaggatggggttcttgtccacggggctcactctggccccctattgtctccaaggtcccattttccccctgtgttttcacgcaggtcatattgtcagtcctacaaaaataaaaggcttccagaggagagtggcctgggtcccagggctggccctaggcactgatagttgccttttcttcccctcctgtaagagtattaacaaaaccaaaggacacaagggtgcaagccccattcacggcctggcatgcagcttgtccttgctcctggaacctggcaggccctgcccagccagccatcggaagagagggctgagccatgggggtttggggctaagaagttcaccagccctgagccatggcggcccctcagcctgcctgaagagaggaaactggcgatctcccagggctctctggaccatacgcggaggagttttctgtgtggtctccagctcctctccagacacagagacatgggagtggggagcggagcttggccctgcgccctgtgcagggaaagggatggtcaggcccagttctcgtgcccttagaggggaatgaaccatggcacctttgagagagggggcactgtggtcaggcccagcctctctggctcagcccgggatcctgatggcacccacacagaggacctctttggggcaagatccaggtggtcccataggtcttgtgaaaaggctttttcagggaaaaatattttactagtccaatcacccccaggacctcttcagctgctgacaatcctatttagcatatgcaaatcttttaacatagagaactgtcaccctgaggtaacagggtcaactggcgaagcctgagcaggcaggggcttggctgccccattccagctctcccatggagcccctccaccgggcgcatgcctcccaggccacctcagtctcacctgccggctctgggctggctgctcctaacctacctcgccgagctgtcggagggctggacatttgtggcagtgctgaagggggcattgccggcgagtaaagtattatgtttcttcttgtcaccccagttcccttggtggcaaccccagacccaacccatgcccctgacagatctagttctcttctcctgtgttccctttgagtccagtgtgggacacggtttaactgtcccagcgacatttctccaagtggaaatcctatttttgtagatctccatgctttgctctcaaggcttggagaggtatgtgcccctcctgggtgctcaccgcctgctacacaggcaggaatgcggttgggaggcaggtcgggctgccagcccagctggccggaaggagactgtggtttttgtgtgtgtggacagcccgggagctttgagacaggtgcctggggctggctgcagacggtgtggttgggggtgggaggtgagctagacccaacccttagcttttagcctggctgtcacctttttaatttccagaactgcacaatgaccagcaggagggaaggacagacatcaagtgccagatgttgtctgaactaatcgagcacttctcaccaaacttcatgtataaataaaatacatatttttaaaacaaaccaataaatggcttacatga

SEQ ID NO: 7147 - DNA, 6048 bp, Artificial Sequence
  derived and/or modified sequence
atggcaaattttctgctcccccgaggcacttcctcatttcgccgattcactagggaatcactcgcggcaatcgagaagcggatggccgaaaagcaggccagggggtccacaactctgcaggagagcagggagggactcccggaagaggaggcaccaagacctcagctcgatctgcaagcgagtaagaaattgccagacctgtacggcaatcccccacaggagttgatcggtgagcccttggaagacctcgatccgttctatagcacacagaagactttcattgtattgaataagggaaaaactattttccggttctcagccactaacgcgttatatgtcttgagcccatttcatccgattcgcagagccgccgtcaaaatactggtgcatagcttattcaacatgctgatcatgtgcaccatcctgacaaactgcgtgttcatggctcagcatgaccccccaccttggaccaagtatgtcgaatacacctttacagccatttatacattcgagagcctggtgaaaatcctcgcacgcggattctgtctgcatgctttcacgttcctgagagatccctggaactggctggactttagtgtgatcatcatggcttacacgacggaattcgtagacctgggaaacgtttccgccctgcggacattcagggttctgcgtgcactcaaaaccataagcgtaataagcggcctgaaaaccatagtgggcgccttaattcagagcgtaaagaaactggccgatgtgatggtgctgacggtgttttgtttgagtgtcttcgccctgatcggcctgcagctgttcatgggcaatctaagacacaaatgtgtacgtaattttactgccctgaacgggactaatggctcagtggaggcagacgggcttgtgtgggagtccttagatctgtatctctccgacccggaaaattatctgctgaagaacgggactagtgatgtgctgctgtgtggtaacagctccgacgccggcacgtgccctgagggatatcggtgtctgaaggccggcgagaatcctgatcatggctacacatctttcgattctttcgcctgggccttcttggcactgttcaggcttatgacccaagactgctgggagaggctgtaccagcagactctgagaagcgccggcaaaatctacatgatcttttttatgctcgtcatctttttaggatctttctacttggtcaaccttattctcgctgtggtggcaatggcttatgaggagcaaaatcaggccactatcgcagagacagaggagaaagaaaagcgatttcaggaggccatggaaatgctgaagaaagagcacgaggccctgaccatccgaggagtggataccgtgagcaggtcttccctggagatgagcccactggcaccagtaaactcccatgagaggagaagcaagcgtcgaaagagaatgagctctggcaccgaggagtgcggtgaagacaggcttcccaagtcagacagcgaggacggtccacgggctatgaaccaccttagtttgacccggggcttgagtaggacatcaatgaagcccagatccagtcgaggtagcattttcacttttaggcgaagggatctgggatcagaggctgatttcgctgacgatgaaaattccactgcaggcgagtctgagtcacatcacactagtcttctcgtaccctggcctctgaggcggacaagtgcacaaggccaaccctcccccggaacgtctgctccaggccatgccctgcacggcaaaaagaattcgaccgtggactgcaacggggtggtgagcctccttggagctggcgaccctgaggccacctcaccaggaagccatctgctcagacctgtgatgctcgaacacccacctgatacaactacccccagtgaagagcctgggggcccccaaatgttgacatctcaagctccctgcgtcgatggctttgaagaacctggcgcgcggcagagagcactaagcgctgtgagcgtcctgacgtctgctctggaagagctggaggaatctaggcacaaatgtcccccctgctggaatcgactggcccagagatatcttatttgggagtgctgccccctgtggatgtctataaagcaaggcgttaagttagtggtaatggatccgtttactgacctgacaatcacaatgtgtatagtgctaaacaccctattcatggccctggagcactataatatgacctccgagttcgaagagatgttgcaagtgggcaatctggtgtttactggtattttcaccgctgagatgacgttcaagattattgcacttgatccctattattacttccagcagggctggaacatctttgatagcattatcgtgatactgagtctgatggagctggggctgagcagaatgtctaatctgagcgtcctgcgatcctttcgccttttgcgcgtgttcaaattggccaaatcttggccaactctgaatacactcatcaagattataggcaatagcgtgggcgcactgggaaacttgacactggttttagctatcattgttttcatcttcgctgtggtgggtatgcagctcttcggtaagaactacagcgagcttagagatagtgatagcggtctcctgcctcgctggcacatgatggacttttttcacgcatttttaatcatatttcgcatcctgtgtggagagtggatcgagactatgtgggactgcatggaggtgagtgggcagtccctgtgcttgctagtgtttttgctggtcatggtgatcggcaatctcgtggtgcttaacctgttcctcgcacttttactgtccagtttttccgccgacaatctgactgcaccagatgaggatcgcgagatgaataacttgcaattagctcttgccaggatacagagaggccttagattcgtgaagaggacaacgtgggatttttgctgcggattattacgtcaaagaccccagaaacccgccgccctggccgctcagggtcagcttcctagctgcatcgcaacgccgtattctcccccgccccctgaaacggaaaaggtcccgcctaccagaaaagaaacccggtttgaagagggcgagcagccagggcagggtacacccggcgatcctgagcccgtctgcgtgcccatcgcagtagccgaatcagacaccgacgaccaggaggaagacgaagaaaatagtttgggtaccgaagaagaatctagtaagcaggaatcccaacctgttagcggaggccctgaggccccccccgattctcgcacatggagtcaggtctcagccaccgcaagttctgaggccgaggcttctgcctcccaggctgattggcggcagcagtggaaagctgaaccacaagcgcccggatgcggtgaaactccagaggactcctgttccgagggctccacggcggatatgaccaacacggccgagctgcttgagcagattccagatcttggccaggatgtcaaggatcctgaggattgcttcaccgaggggtgtgtgaggcgctgcccttgttgtgctgtggatacaactcaggcgccagggaaggtgtggtggcgactgcgcaagacatgttaccatatcgtcgagcactcctggtttgaaacgttcattatctttatgattttactctcttctggggccctggccttcgaagacatttacttggaggagcgtaagacaattaaggtcctgttggagtatgccgataagatgtttacatatgtcttcgtgctggagatgctgctgaagtgggtggcctacggtttcaaaaagtatttcactaatgcgtggtgctggcttgactttctaatagtcgacgtctcattggtaagccttgtggcgaacacactgggatttgccgagatgggccccatcaaatcccttaggacactgcgtgcccttcggcctctaagggcattatctcgtttcgaagggatgcgcgtagtggtaaatgcgcttgtgggcgcgatccccagcatcatgaatgtattgttggtctgcctgatcttctggctcattttttctatcatgggagtcaatttgttcgccggcaagttcggaaggtgtatcaaccagaccgagggggacttgcctctcaattatacgatagttaataataaaagccagtgtgagagcctgaatctaacaggtgaactgtactggaccaaagtgaaggtgaactttgacaacgtaggcgctggatacctggcccttctccaagtcgcaaccttcaagggctggatggatatcatgtacgctgcagttgacagtagggggtacgaggagcagcctcagtgggaatacaatctctacatgtacatttattttgtgattttcataattttcggatctttcttcacgcttaacctcttcattggagtgattatagataactttaatcagcaaaaaaagaaactgggggggcaggacatcttcatgactgaagagcagaagaagtactataatgcaatgaaaaagttaggttctaaaaagccgcagaagcctatccctagaccactgaataaataccagggcttcatcttcgatattgtgacaaaacaggccttcgatgtgactataatgttcttgatctgccttaacatggtgactatgatggtggagactgatgatcaatcccccgagaagatcaatattctggccaaaatcaaccttttgttcgtcgcaatttttactggtgaatgcatagtaaaacttgccgccctgcgacactactattttacaaattcatggaatatattcgacttcgtagtggtgatactcagcatcgtggggactgttttatcagatatcatccaaaagtacttcttctcgcctacactattccgtgtcataaggctagctcgaatcggaagaatactgcgactcatcaggggggctaaaggcatccgcacgctcctgttcgcgctaatgatgagcctgcctgccctgttcaatattggcttattattatttttagtcatgttcatttattctatcttcgggatggccaatttcgcctacgtgaagtgggaggccggaatagacgatatgttcaattttcagacattcgctaatagtatgctgtgcctgtttcagatcacaacgagcgccggatgggacggtctcctctcccccatcttgaatacaggaccaccctattgtgaccccacacttccaaacagcaatggatctaggggagactgcggatcgcctgcggtggggatcttatttttcactacgtacatcatcatctccttcctcattgtggtcaatatgtatatcgcgatcatcctggaaaattttagcgtggccacagaggagtcaaccgagcctctcagcgaagacgattttgatatgttttacgagatatgggagaagttcgatcccgaggcgacccagttcattgaatattcagttctgtccgacttcgccgatgccctttccgaaccactgcgcattgctaaaccaaatcaaatttctttgattaacatggatctgccaatggtgagtggtgatcgaatccactgtatggatatcctgtttgcattcacaaaacgggtgctgggagaaagcggcgagatggatgcgttaaagattcagatggaggagaaattcatggctgctaacccttccaagattagctatgagcctatcactactaccctgcggagaaaacatgaggaagtctccgcgatggtgatccagcgggccttcagacgacacttactccagagatcactgaagcatgcaagcttcctgtttaggcaacaagccggatccgggctatccgaggaggatgcccccgagcgggaagggctgatcgcttacgtgatgtccgaaaatttctcacgaccattgggacccccaagcagctcttccatttcttcaacaagttttccaccaagttacgactctgtcaccagagcaacgagtgacaacctgcaggtgaggggcagcgactactcgcattccgaggatctggctgatttcccaccatctccagaccgtgacagagaatccattgtgtag

SEQ ID NO: 7148 - DNA, 6048 bp, Artificial Sequence
  derived and/or modified sequence
atggctaatttcctcctgccccggggaacctcctccttcagaaggtttactcgggagtccctagccgcaatcgagaaacgcatggccgagaaacaggctcgtgggagtactacgctccaggagtctcgagagggactgccagaggaggaagcccctcgtcctcagttagacctccaggcgtctaaaaagctgccagatttgtatggcaaccccccccaggagttaattggagaaccactcgaggacctggatcccttctattcaactcagaagacttttattgttctgaacaaggggaaaactatctttagatttagcgctactaatgctttgtatgtactatccccttttcacccaatacgccgcgccgcagtgaagattctggtgcattcactgttcaacatgttgataatgtgcacaatcctgacaaattgcgtcttcatggctcagcatgatccgccgccttggaccaagtatgtggagtacaccttcacggcaatttatacgtttgagtccctggttaaaatattagcacgtggattttgccttcatgccttcaccttcctacgagacccctggaattggctcgacttctcagtaatcatcatggcatacacaaccgagtttgttgacctgggtaacgtcagtgccctcaggacatttcgggtgctgagggcacttaaaacaataagtgtgatctccggtcttaagacaatcgtaggagccctgatccagagcgttaaaaagttagccgatgttatggtgcttacagttttctgtctgagcgtgtttgccctgatcggactccagcttttcatgggaaatctcaggcataagtgtgtgaggaactttactgccctgaacggaacaaacggctcagtggaggccgacggcctggtgtgggagtccctggatttgtatctgtccgatcctgaaaactatctcctgaaaaatggaacctcagatgttcttctatgcgggaactcatccgacgcaggtacttgtcctgaaggataccggtgcctaaaggccggggagaatcccgatcacggttatacatcatttgatagctttgcatgggcctttctggcattgttccgcttgatgactcaggattgttgggaaaggctctatcaacagaccctgagaagcgccggtaagatctacatgatcttcttcatgttggtgatattcctaggcagcttttacctggtaaacttaattctcgctgtcgttgccatggcctacgaggaacagaaccaggccacgattgctgagactgaggaaaaagaaaagcggtttcaggaggcgatggagatgcttaagaaagagcatgaggcactgaccatccgaggtgtggataccgtgtcgagatcctcactggaaatgtcaccactggccccagtaaacagccacgagcggcggtcaaagcgtaggaaacggatgagctccgggacagaggaatgcggggaggaccgactccccaaaagtgattccgaggacggtcccagggccatgaaccacctgtcattgacaagaggactctcaaggactagcatgaagccgaggagttcacgggggtctatcttcacatttagacgcagggatctgggttcagaagctgactttgcagacgatgagaattcgaccgccggagagagtgaatcgcatcatacatctctgctcgtcccttggcctctgcgaaggacttctgcacaggggcagccctcgccaggcacgagcgcgcccggtcatgcactgcatggaaagaagaacagcactgtcgactgcaatggcgtggtaagtctgctgggagccggagatccagaggctacaagccctggttctcacctcctgcgtcctgtgatgttggagcatccaccagacaccactactccatcggaagagcctggcggcccgcagatgctcactagccaggctccctgtgtggacggattcgaggagcctggcgcaaggcaacgtgctttgagtgctgtgagcgtgctcaccagcgcccttgaggaacttgaagaatccaggcataagtgcccaccatgctggaatagactggctcaaagatacctgatctgggaatgttgcccgttgtggatgtccataaaacagggcgtgaaacttgtggtgatggatcccttcaccgatttgaccatcaccatgtgcatcgtgttgaataccctgttcatggcgctagagcactacaatatgacatccgagttcgaggagatgctgcaggttggcaatttagtatttaccggcatctttaccgccgaaatgaccttcaagataatagccctggatccctactactattttcagcaggggtggaatattttcgactccatcatcgtgatcttatctttaatggagctcggcttgtctagaatgtctaaccttagcgtgctgaggtcttttcgcctgttgcgggtgttcaagcttgctaagtcttggcctaccctgaacaccttgatcaaaattattggaaattccgtgggggcactcgggaatctgaccctggtgttagcaataatcgtatttatcttcgcagtggtgggcatgcagttatttgggaaaaactactccgagctgagggattcagattctggactgctgccacggtggcacatgatggactttttccatgctttcttgattatcttccgcatactgtgtggggaatggattgagacaatgtgggactgcatggaggttagcggccaaagtctgtgtttactggtcttcctgcttgtcatggtaattggtaatctggtagtgttgaatctgttcttggcactactgctgtcatcatttagcgccgataatttaaccgcccctgatgaggatcgggagatgaacaatttacagctggctctggccaggatacagagagggcttcgatttgttaagcgtaccacatgggatttttgttgtggtctcctgcggcaacgcccccagaaaccagccgccctggccgcgcagggacagctaccatcttgtatcgcgacaccttacagcccgcccccacccgagacagagaaggtgccccccactcgcaaggaaactcgcttcgaggaaggagagcagcctgggcagggaaccccaggcgacccagaacctgtgtgcgttcccatagctgtagctgaaagtgacaccgacgatcaagaggaggatgaggagaactctctcggcaccgaagaggaatcatctaagcaggagagtcagcccgtgtcgggcggaccagaggcacccccggattcccgtacctggtcccaggtctccgcaacagcatcttctgaggcagaagcgagcgccagccaggccgattggaggcagcaatggaaggccgagccacaggcccccggctgtggagaaacgccagaggacagttgttccgaagggtctacagccgacatgacaaacacagccgagcttctagagcagatccccgacctcggtcaggacgtcaaagatcccgaagattgcttcaccgagggttgcgttaggcgctgcccttgctgcgccgtggacacaactcaggctcctggtaaagtgtggtggcgactgagaaagacctgttatcacattgttgagcattcatggtttgaaacattcatcatattcatgatcctgctcagctctggcgctctggcctttgaggacatctacctggaagaacgaaaaacgatcaaggtgctcctggagtatgctgacaagatgtttacttacgtttttgtgctcgaaatgctcctgaaatgggtcgcctatggttttaagaaatactttactaatgcctggtgttggctcgactttctgatcgtggacgtcagcctggtcagcctggtagctaatactctaggcttcgctgagatgggacctattaagtccctgcgaaccctgcgtgcactccggcccctccgcgcgcttagtagattcgaaggaatgcgagtggtggtcaacgcccttgtgggggccattccatcaatcatgaacgttttgttggtgtgcctgatattctggctgattttcagcataatgggcgtgaacctttttgccggtaagttcggcagatgtattaaccagacagaaggtgacctcccactgaactataccattgtcaataataagtcccagtgcgagtcactgaacctcactggcgagttgtattggactaaggtgaaagtcaactttgacaacgttggggccggatatctggctctgctgcaggtcgccacgtttaaaggttggatggatattatgtatgccgccgttgacagtagggggtacgaggaacaaccacagtgggagtataatctttatatgtacatttatttcgtcatttttatcatcttcggatcattcttcaccctgaatctttttatcggcgtgataattgataattttaaccagcagaagaagaagctgggcggacaggacatcttcatgactgaggagcagaaaaagtattacaacgccatgaaaaagcttggctcaaagaaacctcagaagccgattccaaggccgttaaataagtatcaaggctttatctttgacatcgtcaccaagcaggcttttgatgttaccattatgtttctcatatgtctcaacatggtgactatgatggtagaaaccgacgaccagtcgccagagaaaattaacatcttggcgaaaatcaacctgctgttcgttgctatcttcactggtgagtgcatcgtgaagctagctgccctccgacattattactttaccaactcatggaatatctttgatttcgtcgtagtgattttaagtatagtggggacggtcctgagcgatattatccagaagtacttcttcagcccaaccctctttcgagtgatccggcttgcgcgcatcggccggatactgagactgattcgcggcgcgaagggcattagaaccttgctgttcgctctgatgatgagcctgcccgctctgttcaatataggcctactgctcttccttgtgatgttcatttactccatttttggtatggccaactttgcctatgtcaagtgggaggccggaatcgatgatatgttcaacttccagactttcgccaactcaatgctctgtctttttcagatcacgaccagtgccggctgggacggtctcttgagtccaatccttaacactggccccccttactgcgaccctacactgcctaattcgaacgggagccgcggggactgcggctccccggctgtcggcattctctttttcacaacatatatcattatcagtttcctgatagttgttaatatgtacatcgccatcattctggaaaactttagcgtggctacagaggaatcgactgaaccactgtcagaggatgattttgacatgttctatgagatctgggaaaagttcgatccggaggccacccagtttattgaatatagcgtgctcagcgacttcgcggatgctctgagcgaaccccttaggattgcaaagcccaatcagatcagtctcataaacatggaccttccgatggtgtccggggatcggatccactgtatggacattctgttcgcgtttaccaagagggtcctgggagaatccggcgagatggatgccctgaagatacagatggaggaaaaattcatggccgctaatccgagcaaaattagctacgaacccatcactaccacacttcgccggaagcacgaggaagtgtccgcaatggttatccagagggcttttagaaggcacctgctacagcgcagcctcaaacatgcatcattcctcttcagacaacaggccggtagcggtctgagtgaggaggacgcaccagaaagagaggggttaatcgcctatgtaatgtcagagaactttagcaggccactggggccaccatcctctagcagtattagttcaacatccttccccccttcctacgactccgtaaccagagccaccagcgacaaccttcaggtacgtgggtccgactactctcacagtgaggatctggcagatttcccaccttcccctgaccgggaccgcgaatctatcgtgtag

SEQ ID NO: 7149 - DNA, 6048 bp, Artificial Sequence
  derived and/or modified sequence
atggccaacttcctgctgccccggggcaccagcagcttccgccgcttcacccgggagagcctggccgccatcgagaagaggatggccgagaagcaggcccggggcagcaccaccctgcaggagagccgggagggcctgcctgaggaggaggccccccggccccagctggacctgcaggccagcaagaagctgcctgacctgtatggcaaccccccccaggagctgattggagagcccctggaggacctggaccccttctacagcacccagaagaccttcatcgtgctgaacaagggcaagaccatcttccgcttcagcgccaccaatgccctgtatgtgctgagccccttccaccccatcagaagagctgctgtgaagatcctggtgcacagcctcttcaacatgctgatcatgtgcaccatcctgaccaactgtgtgttcatggcccagcacgaccccccaccctggaccaagtatgtggagtacaccttcaccgccatctacacctttgagagcctggtgaagatcctggcccggggcttctgcctgcacgccttcaccttcctgcgggacccctggaactggctggacttcagcgtcatcatcatggcctacaccacagaatttgtggacctgggcaatgtgtctgccctgcggaccttccgggtgctgcgggccctgaagaccatcagcgtcatcagcggcctgaagaccatcgtgggcgccctgatccagagcgtgaagaagctggctgatgtgatggtgctgactgtgttctgcctgtctgtgtttgccctgattggcctgcagctgttcatgggcaacctgcggcacaagtgtgtgaggaacttcaccgccctgaatggcaccaatggatctgtggaggctgatggcctggtgtgggagagcctggacctgtacctgagtgaccctgagaactacctgctgaagaatggcaccagtgatgtgctgctgtgtggcaacagcagtgatgctggcacctgcccagagggctaccgctgcctgaaggccggggagaacccagaccacggctacaccagctttgacagctttgcctgggccttcctggccctcttccggctgatgacccaggactgctgggagcggctgtaccagcagaccctgcggtctgctgggaagatctacatgatcttcttcatgctggtgatcttcctgggcagcttctacctggtgaacctgatcctggccgtggtggccatggcctatgaggagcagaaccaggccaccatcgccgagacagaggagaaggagaagcgcttccaggaggccatggagatgctgaagaaggagcacgaggccctgaccatccggggcgtggacacagtgagccgcagcagcctggagatgagccccctggcccctgtgaacagccatgagcggcgcagcaagaggaggaagaggatgagcagcggcacagaggagtgtggagaagatcggctgcccaagagtgacagtgaagatggcccccgggccatgaaccacctgagcctgacccggggcctgagcaggacctccatgaagcccaggagcagccggggcagcatcttcaccttcagaagaagagacctgggcagcgaggccgactttgctgatgatgagaacagcacagctggggagagcgagagccaccacaccagcctgctggtgccctggcccctgcggaggaccagcgcccagggccagcccagccctggcaccagcgcccctggccacgccctgcacggcaagaagaacagcacagtggactgcaatggagtggtgtccctgctgggcgctggggaccctgaggccaccagccctggcagccacctgctgcggcctgtgatgctggagcaccccccagacaccaccacccccagcgaggagcccggcggcccccagatgctgaccagccaggccccctgtgtggatggctttgaggagcccggggcccggcagagggccctgtctgctgtgtctgtgctgaccagcgccctggaggagctggaggagagccgccacaagtgccccccctgctggaaccggctggcccagcgctacctgatctgggagtgctgccccctgtggatgagcatcaagcagggcgtgaagctggtggtgatggaccccttcacagacctgaccatcaccatgtgcatcgtgctgaacaccctcttcatggccctggagcactacaacatgaccagcgagtttgaggagatgctgcaggtgggcaacctggtgttcaccggcatcttcaccgctgagatgaccttcaagatcatcgccctggacccctactactacttccagcagggctggaacatctttgacagcatcatcgtcatcctgagcctgatggagctgggcctgagcaggatgagcaacctgtctgtgctgcgctccttccggctgctgcgggtcttcaagctggccaagtcctggcccaccctgaacaccctcatcaagatcatcggcaacagcgtgggcgccctgggcaacctgaccctggtgctggccatcatcgtgttcatctttgctgtggtgggcatgcagctgtttgggaagaactacagcgagctgcgggacagcgacagcggcctgctgccccgctggcacatgatggacttcttccacgccttcctgatcatcttccgcatcctgtgtggggagtggattgagaccatgtgggactgcatggaggtgtctggccagagcctgtgcctgctggtgttcctgctggtgatggtgattggcaacctggtggtgctgaacctcttcctggccctgctgctgagcagcttctctgctgacaacctgacagccccagatgaggaccgggagatgaacaacctgcagctggccctggcccgcatccagaggggcctgcgctttgtgaagaggaccacctgggacttctgctgcggcctgctgcggcagaggccccagaagccagctgccctggccgcccagggccagctgcccagctgcatcgccaccccctacagccccccacctcctgagacagagaaggtgccccccaccaggaaggagaccaggtttgaggagggggagcagcccggccagggcacccctggggaccctgagcctgtgtgtgtgcccatcgctgtggccgagagtgacacagatgaccaggaggaggatgaggagaacagcctgggcacagaggaggagagcagcaagcaggagagccagcctgtgtctgggggccctgaggcccccccagacagcaggacctggagccaggtgtctgccacagccagcagcgaggccgaggccagcgccagccaggccgactggaggcagcagtggaaggccgagccccaggcccctggctgtggggagaccccagaggacagctgcagcgagggcagcacagctgacatgaccaacacagctgagctgctggagcagatcccagacctgggccaggatgtgaaggaccctgaggactgcttcacagagggctgtgtgcggcgctgcccctgctgtgctgtggacaccacccaggcccctgggaaggtgtggtggaggctgaggaagacctgctaccacatcgtggagcacagctggtttgagaccttcatcatcttcatgatcctgctgagcagcggggccctggcctttgaggacatctacctggaggagaggaagaccatcaaggtgctgctggagtatgctgacaagatgttcacctacgtgtttgtgctggagatgctgctgaagtgggtggcctacggcttcaagaagtacttcaccaatgcctggtgctggctggacttcctgattgtggatgtgtccctggtgtccctggtggccaacaccctgggctttgctgagatgggccccatcaagagcctgcggaccctgcgggccctgcggcccctgcgggccctgagcagatttgagggcatgagggtggtggtgaatgccctggtgggcgccatccccagcatcatgaatgtgctgctggtgtgcctgatcttctggctgatcttcagcatcatgggcgtgaacctgtttgctgggaagtttggccgctgcatcaaccagacagaaggagacctgcccctgaactacaccatcgtgaacaacaagagccagtgtgagagcctgaacctgactggagagctgtactggaccaaggtgaaggtgaactttgacaacgtgggcgccggctacctggccctgctgcaggtggccaccttcaagggctggatggacatcatgtatgctgctgtggacagccggggctatgaggagcagccccagtgggagtacaacctgtacatgtacatctactttgtgatcttcatcatcttcggcagcttcttcaccctgaacctcttcatcggggtcatcatcgacaacttcaaccagcagaagaagaagctgggcggccaggacatcttcatgacagaggagcagaagaagtactacaatgccatgaagaagctgggcagcaagaagccccagaagcccatcccccggcccctgaacaagtaccagggcttcatctttgatattgtgaccaagcaggcctttgatgtgaccatcatgttcctgatctgcctgaacatggtgaccatgatggtggagacagatgaccagagccctgagaagatcaacatcctggccaagatcaacctgctgtttgtggccatcttcaccggagaatgtattgtgaagctggccgccctgcggcactactacttcaccaacagctggaacatctttgattttgtggtggtgatcctgagcatcgtgggcaccgtgctgagtgacatcatccagaagtacttcttcagccccaccctcttccgggtcatccggctggccagaattggccgcatcctgcggctcatccggggggccaagggcatccgcaccctgctgtttgccctgatgatgagcctgcctgccctcttcaacatcggcctgctgctcttcctggtgatgttcatctacagcatcttcggcatggccaactttgcctacgtgaagtgggaggccggcattgatgacatgttcaacttccagacctttgccaacagcatgctgtgcctcttccagatcaccaccagcgctggctgggatggcctgctgagccccatcctgaacacaggccccccctactgtgaccccaccctgcccaacagcaatggcagcagaggagactgtggcagccctgctgtgggcatcctcttcttcaccacctacatcatcatctccttcctgattgtggtgaacatgtacatcgccatcatcctggagaacttctctgtggccacagaggagagcacagagcccctgtctgaagatgactttgacatgttttatgagatctgggagaagtttgatcctgaggccacccagttcatcgagtacagcgtgctgagtgactttgctgatgccctgtctgagcccctgcgcatcgccaagcccaaccagatcagcctcatcaacatggacctgcccatggtgtctggggaccgcatccactgcatggacatcctgtttgccttcaccaagagggtgctgggggagagcggggagatggatgccctgaagatccagatggaggagaagttcatggccgccaaccccagcaagatctcctatgagcccatcaccaccaccctgcggaggaagcatgaggaggtgtctgccatggtgatccagagggccttccgccgccacctgctgcagaggagcctgaagcacgccagcttcctgttccggcagcaggccggcagcggcctgtctgaggaggatgcccctgagcgggagggcctgattgcctacgtgatgtctgagaacttcagccggcccctgggcccccccagcagcagcagcatcagcagcaccagcttccccccatcctatgacagcgtgacccgggccaccagtgacaacctgcaggtgcggggcagtgactacagccacagcgaggacctggccgacttcccccccagcccagaccgggaccgggagagcatcgtgtag

SEQ ID NO: 7150 - DNA, 6048 bp, Artificial Sequence
  derived and/or modified sequence
atggccaacttcctgctgccccggggcaccagcagcttccggcggttcacacgtgaatcgctggccgccattgaaaaaagaatggccgagaaacaggctcgcggaagcaccaccctacaagagagtcgcgaagggcttccggaagaggaggcacctaggccacaattggacctgcaggcctctaagaagctccccgacctctacgggaatccccctcaagagcttatcggcgaacctttggaagacctggaccccttctatagcactcagaaaacatttattgtcctgaataagggcaagaccatcttcaggttcagtgctactaatgccctgtacgttctgagtccttttcaccccatccgccgagccgcagtcaagatcctggtgcactctttgtttaatatgctgattatgtgtactatcctcacaaattgtgtgttcatggcacagcatgatcctcctccctggactaaatacgtggagtatacctttacagctatctacactttcgagtcactggtaaaaatcctcgcacggggcttttgcctgcatgccttcacatttctgcgagacccttggaactggttggacttctcggtgattattatggcctacaccaccgagttcgttgatttaggcaacgtttctgctcttcgcacattcagagtcttgcgggccttaaagacaatcagcgttatttcaggattgaaaactattgtgggagcactgattcagtctgtgaagaagctggccgatgtcatggtgctcaccgtgttctgtctgtctgtgtttgctctcatcggtttacagctcttcatgggtaacctgcgacataaatgcgtccgaaattttaccgctctgaatggaaccaacggcagcgtggaggcagacggactcgtttgggaatccctggatctgtatctaagcgatccggaaaactacctcctcaagaatggaacatctgatgtactcctttgtggcaacagttctgacgccggcacttgccctgaagggtaccggtgtctgaaggcaggcgagaacccagaccacggctacacctcgttcgattcatttgcctgggcctttctggccctgttcaggctgatgacccaagattgctgggaacggctctatcaacagactctacgctccgccgggaaaatttacatgatctttttcatgttggtgattttcttgggatctttctatctagtaaacctaatccttgctgtggtggctatggcctacgaggagcagaatcaggcaactattgctgaaacagaggaaaaggaaaaacggttccaagaggcaatggaaatgttgaaaaaggagcacgaagcactgactatccggggagttgacacagtgagtcgcagcagcctggaaatgagtcctctcgcccccgttaattcccatgagaggcggtccaagagacggaagcggatgtcatcgggcacggaggagtgcggagaagatcggttacccaaatccgatagtgaggatgggcctcgtgcaatgaatcatctgagtctgactcggggattgtccaggacatccatgaagcccagatcatctcgtggaagcatctttacattcagacggagggatctcggttccgaggccgacttcgctgacgacgagaactccaccgctggagaaagcgaaagccaccatacctccctcctcgtgccttggcctctgcggaggacatcagcacagggacagcctagtccgggtaccagtgctcccggccacgccttacacggcaagaagaattctacagtggactgcaatggcgtcgtctcactgctgggtgctggcgatcccgaagccacttctccggggagtcatttactgcgccccgtgatgcttgaacatccccctgatacaactacaccttctgaggaacctggagggccccagatgctcacatctcaggctccatgcgtcgacggctttgaggagcccggggccagacagcgggcattatccgcggtgtctgtgctaacctcagctctggaagaactcgaggaatctaggcacaagtgtcccccatgttggaatagacttgcccaacggtacttaatctgggagtgctgcccactgtggatgtcgattaaacagggggtgaagcttgtggttatggacccttttaccgacttgacgatcacaatgtgtattgtcctgaacaccttgtttatggcattagaacactacaatatgaccagtgagtttgaagagatgttgcaggtaggcaacctcgtgtttactggaatcttcaccgccgagatgacctttaaaataatcgccctggacccatattattacttccaacagggctggaatatttttgattcaatcatcgttattctttccctcatggaactagggctgagtaggatgtcaaaccttagcgtgctgagatcgttcagactgttaagggtttttaagctcgcaaaaagctggcccacattaaatactctaatcaaaattataggaaactcagttggcgcacttggcaacctaaccctggtgctcgcaattattgtattcatatttgcagttgtgggcatgcagctgtttggcaaaaattacagtgaactgcgggattcagactccggccttttgccacgctggcatatgatggacttcttccatgcctttctgatcatctttcggatactgtgtggcgagtggattgagactatgtgggactgcatggaggtttcaggtcagtcactctgtctcctggtttttttgctggtcatggtgataggaaatctggtcgtgttgaacttatttctcgcactccttttaagttctttcagcgccgacaacctcacagcccctgacgaagatcgcgaaatgaacaacctccaattggctctggcacgcattcaacgagggttacgatttgtcaagcgcacaacatgggacttctgctgtgggctcttgcgtcagagaccccagaaacctgccgctttagctgcccagggccagcttccgagctgcattgccacaccttacagccccccccctcccgagacagagaaggtgcctcccacccgaaaagagactcggttcgaagagggagaacaaccgggccagggaacacctggggaccccgaaccagtgtgtgttcccattgccgtggctgaaagcgacacggatgaccaagaagaagacgaggaaaatagcctcgggacagaggaagaaagcagcaagcaggaaagtcagccagtgtctggtgggccagaagctccccccgactcgcgaacatggtcgcaggtgtccgctaccgcatcttcggaggccgaagcaagtgcttctcaggctgactggcggcagcagtggaaggcggaaccacaagctcccgggtgtggagaaactcccgaagatagttgcagtgagggttctacggccgacatgacaaatacagctgagttgctggaacagattccagatctcggacaggatgtaaaagatccagaggattgcttcaccgaagggtgcgttagaaggtgtccatgctgtgcagttgataccactcaggcgcccggcaaagtgtggtggagactccggaagacctgttatcacatcgtggaacacagttggtttgagacatttatcatattcatgatcctgttgagttccggagcactggcttttgaggacatttacctggaagaacggaagactatcaaagtcctgctggaatacgcagataaaatgttcacctacgtgttcgtcctggagatgcttcttaagtgggtggcgtacggctttaaaaagtactttactaatgcttggtgctggctggacttcctaattgtcgatgtctctctagtgtcacttgtcgccaacacgctagggttcgctgagatgggaccaatcaagagccttcgcaccctgcgtgctctcagacctttgagggctctgagtcgctttgaaggaatgagagttgtagtgaacgctctggtcggcgccattccctccattatgaacgtcctcctggtgtgcctcatcttttggctgatcttcagcatcatgggtgtgaatttgttcgctggaaagtttggcaggtgcatcaatcaaactgaaggagatctgcccttaaattatactatcgtgaacaataaaagccagtgcgaaagccttaacctcacaggagaactgtattggacgaaagtgaaggtaaattttgacaatgtgggagccgggtatctcgctttactgcaggtcgcaacttttaaaggttggatggacatcatgtatgcggctgtagactcacgcggatacgaagagcaaccacaatgggaatataacctctacatgtacatttatttcgtcatttttatcattttcgggtcgttcttcacactgaatttattcatcggggttattatcgacaacttcaaccagcagaaaaaaaaactgggtggtcaggacatctttatgactgaggaacagaagaagtactataacgcgatgaaaaagctgggctctaagaagcctcagaaacccattccccgtcccctaaacaaataccagggcttcatttttgatatcgttaccaagcaggccttcgatgtcactatcatgtttcttatttgcctgaacatggtcacaatgatggtggaaacagacgatcagtctccagaaaaaatcaacatccttgccaagataaaccttctcttcgtggccatcttcacgggagagtgtatcgttaagctcgccgccctccggcactactatttcacgaactcctggaatatctttgactttgtggtcgtgatccttagtatcgtgggaactgtcctctcggacatcatccaaaaatacttctttagccccacactgtttcgagttattaggcttgccaggataggaaggattcttaggttgattcggggggctaaaggaattcggaccctcctatttgccctgatgatgtccctaccagcactgtttaacatcgggctcctgttatttttagtaatgtttatctattcaatcttcgggatggccaatttcgcctacgtgaaatgggaagccggcatcgacgacatgttcaattttcagaccttcgctaacagtatgctctgcctctttcagataaccacttctgccggatgggatggcctactgtctcccatcctgaacactggccctccatattgcgatcccactctccctaattctaatggtagcaggggggactgtggcagcccagcagtgggcatcttgttttttactacatatatcattatctcatttctcatagtagtgaatatgtatattgcaataatcttggaaaacttcagcgtagcaactgaagagagtacagaacccctgagcgaggacgactttgacatgttctacgaaatatgggaaaagtttgatccagaggctacacagttcattgagtactccgtgctctcggatttcgcagatgcactcagcgaacctctccgcattgcaaagccaaaccagatatcgctgatcaacatggatctgccaatggtgagcggcgaccggatacactgcatggacattctgttcgcttttaccaagcgggtgctgggcgagtcaggggagatggacgccctaaagattcagatggaagagaaattcatggccgcgaatccatcaaagatttcttatgagccaattactaccaccctgcggcggaagcacgaagaggtctcagccatggtgattcagcgggcattcaggagacacctgttacaacggagcctgaaacacgcttcttttcttttcaggcagcaggctggttcgggactttccgaggaggatgccccagagagggaaggacttattgcttacgtgatgtcagaaaactttagccgaccgctggggcctccgagcagctcaagcatcagcagtacctccttcccgccatcatacgacagtgttactcgtgccacatccgataacctgcaggtccgcggtagtgattactcccattccgaagatctggcggactttccccctagccccgatagggacagagagagtatagtttag

SEQ ID NO: 7151 - DNA, 6048 bp, Artificial Sequence
  derived and/or modified sequence
atggccaacttcctgctgccccggggcaccagcagcttccggcggtttacccgggagtcgctcgcggccatagaaaaaaggatggctgagaagcaggcacgcgggagcacaacattgcaggaatcacgggaaggattgcctgaagaggaagccccccgccctcaattggacctgcaagcttctaaaaaactccctgatctctatggtaaccctccccaagaacttattggcgaacctctggaggatcttgatcctttttattctacccaaaaaacttttattgtgctgaacaagggtaagaccatctttaggtttagcgcaacgaatgccttatacgtcttaagcccgtttcatccaatccgcagggctgcagtcaaaatcctggtacacagtcttttcaatatgttgattatgtgcacaattttaaccaactgtgtttttatggcgcaacacgacccccctccgtggacaaaatatgtagaatatacatttactgccatttacacgttcgaatccttggtcaaaattctcgcacggggtttctgtctgcacgcttttacgtttctcagggatccttggaactggctggacttctccgtaatcattatggcctataccacggagtttgttgacctagggaatgtgtcggctcttagaacattccgcgtgctacgtgctcttaaaaccatcagtgtcatctctggcctgaagacaatcgtgggagctctgattcagagcgtgaaaaaactcgcagacgtgatggttctgacagtgttctgtctgtctgtgtttgcactgattggactgcagctattcatgggcaatctgcgccacaaatgcgtgagaaactttacggccctcaatggaacgaatggttctgtagaggctgacggtcttgtctgggagtctctggacctgtacctgtccgatcctgaaaattatttgctgaaaaatggaacaagcgatgtactcctatgtgggaacagttcagacgccggcacgtgcccagagggttatcggtgtctgaaagctggggaaaatccagaccatgggtacacaagctttgacagcttcgcctgggcctttctcgccctcttcaggctgatgacccaagattgttgggagcggctctaccagcagacattacggtctgcaggcaaaatttatatgattttctttatgctagtgatttttcttggcagcttttacttggtcaatctaatcctggccgtcgtcgccatggcctatgaggagcagaaccaggccacgattgccgagactgaggaaaaggagaaacgcttccaagaagccatggagatgttgaagaaggagcatgaggctttgacaatacgcggcgttgataccgtgtcaagatcctccctggagatgtctccgctggccccggtgaactcccacgaacggcgttcaaagcgtaggaaacggatgagttcaggcacggaggagtgtggagaggatcggctccctaaatcagattctgaggatggaccgcgagcaatgaaccatttgagtctaacgaggggcctcagtagaacaagtatgaaacctagatcaagtcggggatccatattcacatttcgcagacgagatctggggtcagaggccgacttcgcagatgatgagaacagcaccgcgggcgagagcgaaagccatcacacgagcctgctcgttccgtggcctctgcgaagaacaagcgcccaagggcagccttcacctggtacaagcgcccccggacacgcgcttcatgggaaaaaaaattcgacagtggattgtaacggcgttgtgtctcttttaggcgccggtgatcccgaggccacatcgcccgggagccacctgctccggcctgtcatgttggaacacccgccagatactacaacgccttccgaggaacctgggggaccacagatgctgacatctcaggcgccttgcgtggacgggttcgaagagcccggggcacggcagcgagctctctctgccgtgagcgttctgacttctgcgctggaagagttagaggagtcaagacataagtgtcccccatgctggaatagattagcgcagcggtatctgatatgggagtgctgcccgctctggatgagtattaaacagggcgtcaaactcgtggtcatggaccctttcaccgacctgacaatcacaatgtgtatcgtcctcaacacactgtttatggcactggaacactataacatgacctcagagtttgaggagatgttacaggtggggaacctcgtctttacaggcatatttactgccgaaatgacctttaagattatcgccctcgacccatactattactttcaacaaggatggaatatcttcgacagcattatcgtaatcctgtctctgatggaactgggactaagcaggatgtccaatctctccgtcttgcggagctttcgtttactgagggtgttcaagcttgctaaaagttggcccactctgaataccctgattaagatcatcgggaatagcgtgggcgctcttggtaatttgaccctggtgttggctatcatcgtgttcatttttgccgtggtcggtatgcagctgtttggaaagaactactcagaattgagagacagtgattccggcctcctgcctcgatggcacatgatggatttttttcacgcctttctcatcatcttcaggatactgtgcggggaatggatcgagaccatgtgggactgcatggaagtcagtggacagtcactctgtctgctcgtttttctgctggtaatggtcattggtaacctggtcgtattgaacctgttccttgccctcctactcagttcattctcagcagataatctgactgcccccgacgaagatcgcgagatgaacaacttacagcttgctcttgctcgaatccagcggggtttgaggttcgtgaaaagaaccacatgggacttctgttgcggcctgctgcgacaacgtccacagaaaccagccgcgttagctgcccagggccaactcccctcttgcatagcaacaccttacagcccgcccccaccagagaccgaaaaggtgcctccaaccaggaaggaaacaagatttgaagaaggagagcagcccggacagggtacacccggcgatcccgagccagtttgtgtcccaatagcagtcgctgaaagcgataccgacgaccaggaggaagacgaggagaacagcctcggcactgaggaagagtcaagtaaacaggagagccagccggtgtctggcgggccagaggcaccacctgatagtcgaacctggtctcaagtatctgcgactgcctcctccgaagcagaggctagtgctagtcaggcagattggagacagcaatggaaggcagagcctcaggctcccggctgcggtgaaactcctgaagattcttgttctgaggggagcactgcagacatgaccaataccgcagagctactcgagcagattccggatctggggcaggatgtgaaggatcccgaggactgcttcactgaaggttgtgtgagacgatgtccatgttgtgccgtcgatacaactcaggcacctggtaaagtgtggtggcgcctgcgtaaaacatgttaccacatagtggagcattcctggttcgagacgtttatcatattcatgatcctcctatctagcggcgcacttgccttcgaggatatctatctggaggaacgtaagacgattaaggtgctactggagtacgcagataaaatgtttacatacgtctttgtgcttgagatgttgctgaaatgggtggcttacggttttaaaaagtacttcacgaacgcctggtgctggttggactttttgatcgtggatgtctcgctcgtcagcctggtggccaacacactgggatttgcagaaatgggacccattaagtccttacgtacccttcgagcactgaggccgctcagagccctgtctagatttgagggcatgcgggtggtggtcaacgccctggttggggccatccccagtatcatgaacgtgctcctggtttgcctgattttctggttgatattctctattatgggggtcaacttattcgcaggaaagttcgggcggtgtatcaatcagacggagggagatctcccattgaactataccatcgtgaacaataagtcccagtgcgagtctttgaaccttacaggcgaactatattggaccaaggtgaaagtgaacttcgacaatgtcggagccggctatctagccttgcttcaggttgccaccttcaaaggatggatggatatcatgtacgccgccgttgactctcgggggtacgaggaacaaccacagtgggaatataatctctacatgtacatctacttcgtcatctttattatatttgggagcttttttactttgaatctgtttattggagtaattatcgacaactttaaccagcaaaaaaaaaaattgggaggtcaggacattttcatgactgaggagcagaagaagtactacaatgccatgaagaagctggggagcaaaaagcctcagaaacccatcccaagaccgctgaacaaataccaagggttcatttttgatattgtaactaaacaggcttttgatgttaccataatgtttcttatttgcctgaacatggttacaatgatggtggagacggacgatcagagccccgaaaaaattaacatactggccaagataaacctgctgttcgtagcaatcttcacaggcgagtgtatcgtcaagcttgcagctctacgtcactactacttcacaaatagctggaacatattcgacttcgtcgtggtgattctttctatcgttgggaccgtgctgtcagatatcatccaaaaatactttttttcccctactctgtttcgtgttattaggctcgcacggatcggccgcattctgcggcttatccgcggcgcgaaaggtatcaggactctgctttttgctctcatgatgtcacttcctgcgctttttaacattgggttactcctttttcttgttatgttcatctattccatcttcggcatggcaaactttgcctatgtcaagtgggaagccggcatcgacgatatgtttaatttccagacctttgccaacagcatgctttgcctgtttcagatcacaaccagtgcgggctgggacgggctcctgagccctatcctcaataccgggccaccatactgtgaccctaccctgcctaattcaaatggatctcggggtgactgcgggagtccagctgttgggatcctgttttttacaacatatatcattatttcattcttgatagtcgtaaatatgtacatcgccataatccttgagaacttcagcgtggcaacagaggagtcaaccgagcccctatcagaggacgatttcgacatgttctacgagatctgggagaagtttgacccagaggcaacacagttcattgagtacagtgtgttatcagacttcgccgatgctctcagcgaacctctgcggatagctaagcccaaccagatctctctgattaacatggacctgcctatggtgtctggcgaccgtatccactgcatggacatcttgttcgcttttaccaagcgtgtactgggagaatcgggcgagatggacgccctgaagatccagatggaggaaaaattcatggctgcaaatccctctaaaatatcttatgagcccattacaaccacgctgcgcagaaaacatgaggaagttagcgcaatggttattcagcgcgcctttcgcagacacctgctgcaacggtccctgaagcatgcctcatttctgtttaggcaacaggcgggctcgggactgtcagaagaggacgcccctgaacgcgagggactgattgcatatgtaatgtctgaaaatttttctaggccgctaggaccaccaagctcctccagtatctccagcacatcttttccaccatcctatgatagcgtgacgagagcaacctctgacaatctgcaggtgagaggttctgactattcccactctgaggatctggcggacttcccaccgagccctgatcgagatcgggaatccatcgtatag

SEQ ID NO: 7152 - DNA, 6047 bp, Artificial Sequence
  derived and/or modified sequence
atggctaactttctgctgcccagaggcacctctagttttcgccgattcactagagaaagtctcgccgctatagaaaagaggatggccgagaaacaggctagaggcagtactactctgcaggaatcaagagaaggcctgccggaggaagaggcccctaggccccagttagacctgcaagcaagcaagaagcttcccgatctgtacggaaaccctccccaggagctcattggcgaaccactagaagatttggatccgttttatagcacccagaagacattcatagtcttgaataaaggaaagacgatcttcaggtttagtgccactaatgcgttatatgtcctgtccccttttcaccccatccggcgtgctgctgtaaaaatactcgtgcactcgttgttcaacatgttgattatgtgtaccatcctcactaactgcgtgtttatggcccagcatgatccacctccttggactaaatatgtcgagtacacgttcaccgccatttacacatttgaaagcttggttaaaatcttagctcgcggattttgtttacacgctttcacctttcttcgggacccctggaactggttggatttcagcgtgatcatcatggcttataccaccgagtttgtagatcttggcaacgtgagcgcgctcagaacatttcgtgtgctgcgcgcactgaagactatctccgtgatatccggcttgaagactatcgttggtgccttgattcaatccgtcaagaaactggctgatgtcatggttctgaccgtgttttgtctaagcgtgtttgccctgataggtttgcagctgttcatggggaatttgcgccacaagtgcgtgcggaacttcactgccctaaatggcaccaacgggtctgtagaagcggatgggctcgtatgggaatcacttgacctctacctgtctgacccagagaactatttgctgaagaatggcacatccgacgtacttctttgcggcaattcctctgatgcaggtacctgcccagagggttataggtgcctgaaggcaggagaaaacccagaccatggctacaccagcttcgacagcttcgcttgggcctttctggcgctatttagactaatgactcaagactgctgggagagactttaccaacaaacactgcggtcagctggtaaaatttacatgatttttttcatgctggtaatttttctggggtctttctatctcgttaatttgatcctggctgtagtggcaatggcctacgaagagcagaaccaggctacgattgccgagactgaggaaaaggaaaaaagattccaggaggcgatggagatgctgaagaaagagcatgaggctctgaccattagaggcgttgatacagtctcacggtctagtctagaaatgtcgcctctggccccagtgaacagccatgagcgacgctcgaaacggcgtaagagaatgtccagcgggaccgaagaatgcggcgaagacaggctgcccaaatctgactcagaagacggccctcgggcaatgaatcacctcagcctcacgaggggactgtcccggacctcaatgaagcctaggtccagccgcggatccatcttcacgtttaggcgccgtgacctcggatcagaggctgatttcgcagatgacgaaaacagcaccgccggagaaagcgaatcccaccacacctcactcctcgtgccatggccgcttcgcagaacaagtgcacagggacaaccttccccgggaacaagcgccccaggccatgctcttcatggcaagaagaattcaaccgtcgattgtaacggcgtggtcagtctgctaggggctggcgaccctgaagcaacttctccgggatctcatctcctgagacccgtcatgttggaacatcctcccgacaccactactccctccgaggaacccggaggaccccaaatgttgacaagtcaggctccctgcgtggatggttttgaggaaccaggagcgagacagcgggctttgtcagcagtttccgtgctgacgagcgccctggaggaactcgaggagagtcgccacaagtgcccgccttgctggaatagactggcccagaggtacctgatctgggagtgttgtccgttatggatgagcatcaagcagggggttaagctagtcgtaatggatcccttcacagatctgacaatcactatgtgcattgtattaaatactctctttatggcgctggaacattataacatgaccagcgaattcgaagagatgcttcaggtggggaatctcgtgttcactggtattttcaccgcagaaatgacctttaagattatcgcccttgacccatattattactttcagcagggatggaacatattcgactccataatagtcatcctctcactgatggaactgggcctgtctcggatgtcgaatctgtccgtcctgagatctttccgcctgctgcgtgtgtttaagttagctaaatcctggccaacacttaataccctgattaagattataggaaacagcgttggagccctggggaatcttaccctggtgttggctattattgtttttatctttgctgttgtgggcatgcagctgtttgggaaaaattactctgaactgcgggactccgattcggggctgctcccgagatggcatatgatggattttttccacgccttccttatcattttccgcattctctgtggagaatggattgaaacaatgtgggactgcatggaggtcagtggccaatcgctgtgcctgcttgtcttcctgctggttatggtgatcgggaatctcgtagtactgaatcttttcctggccctgctgctgagctccttttccgcggataatctgaccgcccctgatgaggatcgggagatgaataaccttcagcttgctctggcccgaatccagcgaggcctccgcttcgtgaaacgaacaacgtgggatttctgttgcggacttttaagacagcgccctcaaaagccagcagccctggctgctcaagggcagttgccttcatgtatcgccactccctactccccaccaccacccgagactgaaaaggtcccccctacaaggaaagagacgcgtttcgaagaaggggagcagcctggccaggggactcctggcgacccagagccagtgtgtgtgcccatagccgtggccgagagcgacaccgacgatcaggaggaggacgaggagaattccctgggaactgaggaggaatcatctaaacaggagtcgcagcctgtcagcgggggtcctgaagcccctccagattccagaacctggtcccaagttagcgccactgctagctctgaggccgaggcctccgccagtcaggcggactggaggcaacagtggaaggccgaaccccaggctcctgggtgcggagagaccccagaggattcttgctccgaggggtccacggccgatatgaccaataccgccgaattgctggagcagatcccagatcttggccaggatgtcaaagaccccgaggattgcttcaccgagggatgcgtgcggaggtgcccctgctgcgccgtagacaccacacaagctcctggaaaggtgtggtggagactgaggaagacatgctaccacatcgtcgaacactcatggtttgaaacatttataatttttatgattctgctgagctccggggctctggcatttgaggacatctacctggaggaacgcaaaaccattaaagtactcttagaatacgccgacaaaatgttcacttacgtttttgtcctcgaaatgttactgaaatgggtcgcatacggcttcaaaaaatacttcacgaacgcctggtgctggctcgattttctcattgtggacgtaagcctggtgagcctcgtcgccaacacattgggtttcgccgagatgggacctattaagtcccttaggactctccgagctctgcgcccattgcgcgcactgagtaggttcgagggaatgcgcgtagtggtcaacgcactggttggcgctatcccctccatcatgaatgtccttctggtgtgcttgatcttctggctgatattctctatcatgggggtgaatctgttcgctggtaaattcggaagatgcatcaaccaaaccgagggcgacctgcctctgaattacaccatcgtaaacaacaaatcgcagtgtgaaagtctcaacctgaccggagagctatactggacaaaggtgaaagtgaatttcgacaacgtgggtgccggatatctggcactgcttcaggtggctacatttaagggatggatggacataatgtacgccgctgttgacagtagggggtacgaggaacagccacagtgggaatataatttgtacatgtacatctacttcgtgatatttatcatcttcgggagcttcttcaccctgaatcttttcattggtgtgatcattgacaactttaaccagcaaaagaagaagcttggtggtcaggacatcttcatgacggaggagcaaaaaaagtactataacgccatgaagaaactgggctccaagaaaccccagaaaccaataccgagaccactcaataagtaccaggggtttattttcgacattgtgaccaaacaggcctttgacgtgactattatgttcttgatatgtctgaatatggtaacaatgatggtagagacagatgaccaatcacccgagaaaataaacattctcgcaaagatcaacttgctcttcgtggcaatcttcacaggagagtgtattgtgaagctggccgctctccgccactactatttcaccaattcctggaatatatttgacttcgttgtagtgatcctctctatcgtcggcaccgtcctgtccgatataatacagaagtacttcttttcaccaaccctcttccgggtgattcggctagcgagaattggacggatccttcgcctgatccggggagccaaaggcatcagaactttgcttttcgcactgatgatgagtctgcctgccctgttcaatattgggctgctcttgtttcttgtaatgttcatatactcaatttttggaatggcaaacttcgcttacgtaaagtgggaagctgggatagacgacatgtttaatttccaaactttcgctaattcgatgctctgtcttttccagatcacaacgtctgctggttgggacggcctcctgtcgcccattttgaacacgggcccaccttactgcgaccctacactgccaaactctaatggctcgagaggagattgtggctcccctgcagtgggtatcctgttttttactacctacatcattatctcttttttgatagtagtgaatatgtacatcgctataatattggagaacttttcagttgctacagaagaatcaactgagcccctttccgaagatgatttcgacatgttttacgagatatgggagaaattcgaccctgaggccacgcaattcattgaatatagcgtcctgtccgatttcgctgacgcccttagtgagcccctccgaatagctaaaccaaaccagataagcctgatcaatatggatcttcccatggtctcaggagatcgcattcactgcatggacatcctcttcgcgttcactaagagggtgttgggcgagagcggagagatggacgctctcaagattcagatggaggagaagttcatggctgccaatccttccaaaattagttacgaacccatcaccacaacccttcgtcgcaagcacgaggaggtgagcgccatggttattcagcgtgcctttaggcggcatctgctgcaaaggagcttaaagcacgctagttttctctttcgacaacaggctggctccggtctctcagaggaagacgcacctgagcgagaagggctgattgcttatgtcatgtcagagaacttttctcgaccgctgggaccgccatcaagctcctccatctcttctactagtttcccacctagctatgacagcgtgactagggctacttccgacaaccttcaagtgagggggagcgattactcccattctgaagatctggcagattttcccccaagcccagaccgtgaccgcgagagtatcgtata

SEQ ID NO: 7153 - DNA, 6047 bp, Artificial Sequence
  derived and/or modified sequence
atggccaacttcttgctccctaggggtactagttccttccggaggttcacaagagagtcacttgccgctattgagaaaagaatggcggagaagcaggccagaggctctaccactctgcaagagagccgggaaggattacccgaggaagaagccccaaggccccaactggacctgcaggcctccaagaagctgcctgacctatatgggaatcctcctcaggagctcattggagagcccctcgaagatctggacccattttactctacgcagaaaacttttatcgttttgaacaaggggaaaacaatttttcgattttcagctactaatgcactttacgtactcagccctttccaccccatccggagagccgcagtgaagattctggtacactcactatttaacatgctcatcatgtgcaccatcctgacaaattgcgtatttatggctcagcatgatccgcctccttggactaaatatgtcgaatatacgtttacagctatatatacctttgagagcttggtgaaaatactggccaggggcttttgcctccatgcgtttacatttctgagggacccatggaactggctggactttagcgtcattatcatggcctatacaacagaattcgtggatctagggaatgtcagcgcacttcggacattccgcgtgctacgtgcattgaagactattagtgtgattagtggcctgaaaacaatcgtcggcgctttgatccagtctgtcaaaaaactggctgacgtgatggtgctcaccgtgttttgtctgagcgtgttcgccctgattggtttgcagttattcatgggaaatctaagacacaaatgcgttcgcaactttacagccctcaatggaacaaacgggagcgtggaggccgatggtttggtctgggagtcccttgatctctatctgagtgaccctgagaactacctgctgaagaacggcacttcagatgttctgctgtgtggtaactccagcgacgccggaacatgcccagagggatataggtgtttaaaagctggggaaaacccagatcatgggtacacctcatttgacagtttcgcgtgggccttcctggcccttttcagacttatgacccaggattgttgggagaggctataccagcagaccttaaggtccgctggaaagatttatatgatattcttcatgctggtcatcttcctcggcagtttttatctagtcaacctcattctagccgttgttgctatggcctacgaagagcagaatcaggccaccattgcagagactgaggaaaaggagaaaagattccaggaagccatggagatgttgaagaaagagcacgaggcactcacaatcaggggagttgatacagtgtcccgctctagcctggaaatgtccccacttgcccctgtcaactcacacgagcgcaggtcaaaacgacggaaacgtatgtctagtggcaccgaggagtgcggggaggacaggctgcctaaatcggatagcgaggatggtcccagggctatgaatcacctgagcttgacaagaggcctctcacggacctcaatgaaacccaggtcttcgaggggatcaatattcacattccgaaggagggatctgggctctgaggccgattttgccgatgacgagaattcgacagctggagagtctgaatcacatcacacatccctcctggttccatggccattacgacgaactagcgcacagggccaaccatctccaggaacatcagctcccggacatgctttacatgggaaaaagaactcaacagtcgactgtaatggcgtggtttccctgttgggggctggcgatccagaggccacttcccccggatcgcacctcctaaggcctgtcatgctggagcatcctcctgacaccaccacaccctctgaggagcctgggggtccccagatgctgactagccaggcgccatgtgtggatggtttcgaggagccaggtgctcgccagagggcactgagtgccgtaagcgtcctgacctctgctctggaggagctggaagagtctaggcacaagtgcccaccatgttggaaccggttggcccagcgttacctgatatgggagtgttgtccgttgtggatgagcatcaaacagggagtgaagttggttgtgatggatccatttacagacctgaccatcaccatgtgtattgtgctaaacactctatttatggccctggaacactacaacatgacatccgagttcgaagaaatgttacaggtcggcaatcttgtgttcaccgggatttttacagctgaaatgacgtttaaaataatcgcgctcgacccttattattattttcagcaggggtggaatattttcgactctattatagttatactgagtctaatggaactcgggctcagtcggatgtctaatctgagcgtactgcgatcttttcggctgctgagagtatttaaactggctaagtcctggccgactctgaacacactgatcaaaatcattggaaattcggtgggtgccctaggaaacctgactttggtgctcgctattatcgtgttcatatttgccgtagtaggcatgcagctctttgggaagaactattccgaactccgcgatagcgacagcggcctactaccaaggtggcatatgatggattttttccatgccttcctgataatcttcaggattctgtgcggcgagtggattgaaacaatgtgggattgcatggaagtgagcggccagagcctctgtctccttgttttcctgttggtgatggtcataggcaacttggttgtgctaaacctgtttctcgcgctgctcctctcatcattttcggccgataatttgaccgcacctgatgaggatagggagatgaacaatcttcaactcgcgctggctcgtatacaacgcggactaaggttcgtgaagcgcactacttgggacttttgctgtggtcttctccggcagcgaccccagaagccagccgctcttgctgcacaggggcagcttccctcgtgcattgcaactccttacagcccccctccgccagagaccgagaaggttcccccaacccggaaggaaactaggttcgaggagggtgagcagcccggtcaagggacacccggagaccctgagcccgtctgcgtgcccatcgcggttgctgaatccgacacagacgatcaggaggaagacgaggaaaattccctcggcacggaagaggagtcctcaaaacaggaatcacagcctgtgtcaggcggtcctgaggctccccctgactctcgcacctggagccaggtgagtgccactgccagttccgaagccgaggcctctgcctcacaagccgattggaggcagcagtggaaggcagaaccccaggcgcctggctgcggagagaccccagaggatagttgcagtgaggggtcgaccgccgacatgaccaatacggctgagctgctcgaacagatcccagatctcggtcaggatgttaaggacccagaagattgttttaccgagggctgtgttcggaggtgtccatgttgtgctgtcgacactacacaggcgccaggtaaggtatggtggcgcctaagaaaaacatgttaccatatcgtggagcactcatggtttgagacgtttatcatttttatgatcctgctgagttccggagctttggctttcgaggacatctacttggaagaacgcaagacaatcaaagtgctgcttgagtatgccgacaagatgttcacctatgtatttgtactggagatgctgctgaagtgggtggcctacgggttcaaaaaatattttacaaacgcatggtgttggctcgatttcttgatagtggatgtgtcactggtgagtctggtggctaacaccctgggctttgccgagatgggtcctattaagagcctgaggaccctgagggccctcagacctcttcgtgcgcttagtaggttcgagggcatgcgggtggtggttaacgctttggttggggcaatacccagtattatgaacgtgcttctggtctgtctgattttttggctgattttcagcattatgggggtgaacctgtttgctggcaagtttggaagatgcatcaaccaaaccgagggagatctgcctctcaactatactattgtgaacaataagtcgcagtgtgaatctctgaaccttacgggagagctatattggacaaaggtcaaggtaaactttgacaatgtcggcgctgggtacttggccttgttgcaggtggccaccttcaagggatggatggacatcatgtacgccgcagtggacagccgtggttatgaggaacagccccagtgggagtacaatttgtacatgtacatttactttgtgatattcattatctttggatccttctttaccctgaacctgttcatcggtgtgattattgataatttcaatcagcaaaagaagaaactggggggacaggacattttcatgactgaggagcagaagaagtactataatgctatgaaaaagctgggatctaagaaaccccagaagcctattccacggcctctcaataagtaccaagggttcatcttcgatatagtcaccaagcaggcctttgacgttacgatcatgtttttaatctgtctcaatatggttacaatgatggttgagacagacgaccagtctcctgaaaagataaatatactcgccaagattaacctcctcttcgtggccattttcaccggagagtgcattgttaagctggcagcactccgccactactacttcactaatagttggaacatttttgacttcgtagtggtgattctgtctatcgtcggcacagtactatccgacattattcagaaatacttcttctctcccaccctgtttcgcgtcatcagattggcccgaatcggcagaatcttacgactgattaggggagccaagggaatccgaacattgttgtttgctttgatgatgtcactgccagctctttttaacatcgggttattactgtttcttgtgatgttcatatattccattttcggcatggctaattttgcatacgtgaaatgggaagctggtatcgatgacatgttcaacttccaaacatttgcaaattccatgctctgcctatttcaaataacaactagcgctgggtgggacggtctcttgtctcctattctgaacactggcccaccctactgcgaccctactctacccaactccaatggaagcagaggagactgtggctcccctgcagtgggcattctcttctttacgacatacatcattattagctttcttatcgtggtgaacatgtatatcgctataatcctggaaaacttctccgtggcgacggaggaatcaaccgagcctttatctgaggacgatttcgatatgttttatgagatctgggaaaagtttgatcccgaggctacgcaattcatcgagtattcagtgctctccgattttgctgacgccctctctgaacctttgcggatagctaaacccaaccaaatctcactgataaacatggacctaccaatggtttctggcgatcgaatccattgtatggatatcctctttgccttcactaaaagggtgcttggagaatctggtgaaatggatgctcttaagatacagatggaagagaaatttatggctgctaacccgtccaagatctcttatgagcctatcacaactacgttaaggaggaaacacgaagaggttagtgcgatggtcattcagcgggcattcagaaggcatttgctccagcgctccctaaagcacgcgagctttctctttaggcagcaggctggaagcggcctgtctgaagaagacgccccagaacgggagggccttatcgcatatgtgatgtcagagaactttagtcgccctctcggccctccttcctcatcctccatatcttctacaagcttccctcccagctacgacagcgtgaccagagcaactagcgacaatctccaggttagaggaagcgactacagtcattctgaagatctcgcggattttccgccttctcccgatcgagatagggaatcgatcgtata

SEQ ID NO: 7154 - DNA, 8362 bp, Artificial Sequence
  derived and/or modified sequence
cagcttccccacaggcaacgtgaggagagcctgtgcccagaagcaggatgagaagatggcaaacttcctattacctcggggcaccagcagcttccgcaggttcacacgggagtccctggcagccatcgagaagcgcatggcagagaagcaagcccgcggctcaaccaccttgcaggagagccgagaggggctgcccgaggaggaggctccccggccccagctggacctgcaggcctccaaaaagctgccagatctctatggcaatccaccccaagagctcatcggagagcccctggaggacctggaccccttctatagcacccaaaagactttcatcgtactgaataaaggcaagaccatcttccggttcagtgccaccaacgccttgtatgtcctcagtcccttccaccccatccggagagcggctgtgaagattctggttcactcgctcttcaacatgctcatcatgtgcaccatcctcaccaactgcgtgttcatggcccagcacgaccctccaccctggaccaagtatgtcgagtacaccttcaccgccatttacacctttgagtctctggtcaagattctggctcgaggcttctgcctgcacgcgttcactttccttcgggacccatggaactggctggactttagtgtgattatcatggcatacacaactgaatttgtggacctgggcaatgtctcagccttacgcaccttccgagtcctccgggccctgaaaactatatcagtcatttcagggctgaagaccatcgtgggggccctgatccagtctgtgaagaagctggctgatgtgatggtcctcacagtcttctgcctcagcgtctttgccctcatcggcctgcagctcttcatgggcaacctaaggcacaagtgcgtgcgcaacttcacagcgctcaacggcaccaacggctccgtggaggccgacggcttggtctgggaatccctggacctttacctcagtgatccagaaaattacctgctcaagaacggcacctctgatgtgttactgtgtgggaacagctctgacgctgggacatgtccggagggctaccggtgcctaaaggcaggcgagaaccccgaccacggctacaccagcttcgattcctttgcctgggcctttcttgcactcttccgcctgatgacgcaggactgctgggagcgcctctatcagcagaccctcaggtccgcagggaagatctacatgatcttcttcatgcttgtcatcttcctggggtccttctacctggtgaacctgatcctggccgtggtcgcaatggcctatgaggagcaaaaccaagccaccatcgctgagaccgaggagaaggaaaagcgcttccaggaggccatggaaatgctcaagaaagaacacgaggccctcaccatcaggggtgtggataccgtgtcccgtagctccttggagatgtcccctttggccccagtaaacagccatgagagaagaagcaagaggagaaaacggatgtcttcaggaactgaggagtgtggggaggacaggctccccaagtctgactcagaagatggtcccagagcaatgaatcatctcagcctcacccgtggcctcagcaggacttctatgaagccacgttccagccgcgggagcattttcacctttcgcaggcgagacctgggttctgaagcagattttgcagatgatgaaaacagcacagcgggggagagcgagagccaccacacatcactgctggtgccctggcccctgcgccggaccagtgcccagggacagcccagtcccggaacctcggctcctggccacgccctccatggcaaaaagaacagcactgtggactgcaatggggtggtctcattactgggggcaggcgacccagaggccacatccccaggaagccacctcctccgccctgtgatgctagagcacccgccagacacgaccacgccatcggaggagccaggcgggccccagatgctgacctcccaggctccgtgtgtagatggcttcgaggagccaggagcacggcagcgggccctcagcgcagtcagcgtcctcaccagcgcactggaagagttagaggagtctcgccacaagtgtccaccatgctggaaccgtctcgcccagcgctacctgatctgggagtgctgcccgctgtggatgtccatcaagcagggagtgaagttggtggtcatggacccgtttactgacctcaccatcactatgtgcatcgtactcaacacactcttcatggcgctggagcactacaacatgacaagtgaattcgaggagatgctgcaggtcggaaacctggtcttcacagggattttcacagcagagatgaccttcaagatcattgccctcgacccctactactacttccaacagggctggaacatcttcgacagcatcatcgtcatccttagcctcatggagctgggcctgtcccgcatgagcaacttgtcggtgctgcgctccttccgcctgctgcgggtcttcaagctggccaaatcatggcccaccctgaacacactcatcaagatcatcgggaactcagtgggggcactggggaacctgacactggtgctagccatcatcgtgttcatctttgctgtggtgggcatgcagctctttggcaagaactactcggagctgagggacagcgactcaggcctgctgcctcgctggcacatgatggacttctttcatgccttcctcatcatcttccgcatcctctgtggagagtggatcgagaccatgtgggactgcatggaggtgtcggggcagtcattatgcctgctggtcttcttgcttgttatggtcattggcaaccttgtggtcctgaatctcttcctggccttgctgctcagctccttcagtgcagacaacctcacagcccctgatgaggacagagagatgaacaacctccagctggccctggcccgcatccagaggggcctgcgctttgtcaagcggaccacctgggatttctgctgtggtctcctgcggcagcggcctcagaagcccgcagcccttgccgcccagggccagctgcccagctgcattgccaccccctactccccgccacccccagagacggagaaggtgcctcccacccgcaaggaaacacggtttgaggaaggcgagcaaccaggccagggcacccccggggatccagagcccgtgtgtgtgcccatcgctgtggccgagtcagacacagatgaccaagaagaagatgaggagaacagcctgggcacggaggaggagtccagcaagcaggaatcccagcctgtgtccggtggcccagaggcccctccggattccaggacctggagccaggtgtcagcgactgcctcctctgaggccgaggccagtgcatctcaggccgactggcggcagcagtggaaagcggaaccccaggccccagggtgcggtgagaccccagaggacagttgctccgagggcagcacagcagacatgaccaacaccgctgagctcctggagcagatccctgacctcggccaggatgtcaaggacccagaggactgcttcactgaaggctgtgtccggcgctgtccctgctgtgcggtggacaccacacaggccccagggaaggtctggtggcggttgcgcaagacctgctaccacatcgtggagcacagctggttcgagacattcatcatcttcatgatcctactcagcagtggagcgctggccttcgaggacatctacctagaggagcggaagaccatcaaggttctgcttgagtatgccgacaagatgttcacatatgtcttcgtgctggagatgctgctcaagtgggtggcctacggcttcaagaagtacttcaccaatgcctggtgctggctcgacttcctcatcgtagacgtctctctggtcagcctggtggccaacaccctgggctttgccgagatgggccccatcaagtcactgcggacgctgcgtgcactccgtcctctgagagctctgtcacgatttgagggcatgagggtggtggtcaatgccctggtgggcgccatcccgtccatcatgaacgtcctcctcgtctgcctcatcttctggctcatcttcagcatcatgggcgtgaacctctttgcggggaagtttgggaggtgcatcaaccagacagagggagacttgcctttgaactacaccatcgtgaacaacaagagccagtgtgagtccttgaacttgaccggagaattgtactggaccaaggtgaaagtcaactttgacaacgtgggggccgggtacctggcccttctgcaggtggcaacatttaaaggctggatggacattatgtatgcagctgtggactccagggggtatgaagagcagcctcagtgggaatacaacctctacatgtacatctattttgtcattttcatcatctttgggtctttcttcaccctgaacctctttattggtgtcatcattgacaacttcaaccaacagaagaaaaagttagggggccaggacatcttcatgacagaggagcagaagaagtactacaatgccatgaagaagctgggctccaagaagccccagaagcccatcccacggcccctgaacaagtaccagggcttcatattcgacattgtgaccaagcaggcctttgacgtcaccatcatgtttctgatctgcttgaatatggtgaccatgatggtggagacagatgaccaaagtcctgagaaaatcaacatcttggccaagatcaacctgctctttgtggccatcttcacaggcgagtgtattgtcaagctggctgccctgcgccactactacttcaccaacagctggaatatcttcgacttcgtggttgtcatcctctccatcgtgggcactgtgctctcggacatcatccagaagtacttcttctccccgacgctcttccgagtcatccgcctggcccgaataggccgcatcctcagactgatccgaggggccaaggggatccgcacgctgctctttgccctcatgatgtccctgcctgccctcttcaacatcgggctgctgctcttcctcgtcatgttcatctactccatctttggcatggccaacttcgcttatgtcaagtgggaggctggcatcgacgacatgttcaacttccagaccttcgccaacagcatgctgtgcctcttccagatcaccacgtcggccggctgggatggcctcctcagccccatcctcaacactgggccgccctactgcgaccccactctgcccaacagcaatggctctcggggggactgcgggagcccagccgtgggcatcctcttcttcaccacctacatcatcatctccttcctcatcgtggtcaacatgtacattgccatcatcctggagaacttcagcgtggccacggaggagagcaccgagcccctgagtgaggacgacttcgatatgttctatgagatctgggagaaatttgacccagaggccactcagtttattgagtattcggtcctgtctgactttgccgatgccctgtctgagccactccgtatcgccaagcccaaccagataagcctcatcaacatggacctgcccatggtgagtggggaccgcatccattgcatggacattctctttgccttcaccaaaagggtcctgggggagtctggggagatggacgccctgaagatccagatggaggagaagttcatggcagccaacccatccaagatctcctacgagcccatcaccaccacactccggcgcaagcacgaagaggtgtcggccatggttatccagagagccttccgcaggcacctgctgcaacgctctttgaagcatgcctccttcctcttccgtcagcaggcgggcagcggcctctccgaagaggatgcccctgagcgagagggcctcatcgcctacgtgatgagtgagaacttctcccgaccccttggcccaccctccagctcctccatctcctccacttccttcccaccctcctatgacagtgtcactagagccaccagcgataacctccaggtgcgggggtctgactacagccacagtgaagatctcgccgacttccccccttctccggacagggaccgtgagtccatcgtgtgagcctcggcctggctggccaggacacactgaaaagcagcctttttcaccatggcaaacctaaatgcagtcagtcacaaaccagcctggggccttcctggctttgggagtaagaaatgggcctcagccccgcggatcaaccaggcagagttctgtggcgccgcgtggacagccggagcagttggcctgtgcttggaggcctcagatagacctgtgacctggtctggtcaggcaatgccctgcggctctggaaagcaacttcatcccagctgctgaggcgaaatataaaactgagactgtatatgttgtgaatgggctttcataaatttattatatttgatatttttttacttgagcaaagaactaaggatttttccatggacatgggcagcaattcacgctgtctcttcttaaccctgaacaagagtgtctatggagcagccggaagtctgttctcaaagcagaagtggaatccagtgtggctcccacaggtcttcactgcccaggggtcgaatggggtccccctcccacttgacctgagatgctgggagggctgaacccccactcacacaagcacacacacacagtcctcacacacggaggccagacacaggccgtgggacccaggctcccagcctaagggagacaggcctttccctgccggccccccaaggatggggttcttgtccacggggctcactctggccccctattgtctccaaggtcccattttccccctgtgttttcacgcaggtcatattgtcagtcctacaaaaataaaaggcttccagaggagagtggcctgggtcccagggctggccctaggcactgatagttgccttttcttcccctcctgtaagagtattaacaaaaccaaaggacacaagggtgcaagccccattcacggcctggcatgcagcttgtccttgctcctggaacctggcaggccctgcccagccagccatcggaagagagggctgagccatgggggtttggggctaagaagttcaccagccctgagccatggcggcccctcagcctgcctgaagagaggaaactggcgatctcccagggctctctggaccatacgcggaggagttttctgtgtggtctccagctcctctccagacacagagacatgggagtggggagcggagcttggccctgcgccctgtgcagggaaagggatggtcaggcccagttctcgtgcccttagaggggaatgaaccatggcacctttgagagagggggcactgtggtcaggcccagcctctctggctcagcccgggatcctgatggcacccacacagaggacctctttggggcaagatccaggtggtcccataggtcttgtgaaaaggctttttcagggaaaaatattttactagtccaatcacccccaggacctcttcagctgctgacaatcctatttagcatatgcaaatcttttaacatagagaactgtcaccctgaggtaacagggtcaactggcgaagcctgagcaggcaggggcttggctgccccattccagctctcccatggagcccctccaccgggcgcatgcctcccaggccacctcagtctcacctgccggctctgggctggctgctcctaacctacctcgccgagctgtcggagggctggacatttgtggcagtgctgaagggggcattgccggcgagtaaagtattatgtttcttcttgtcaccccagttcccttggtggcaaccccagacccaacccatgcccctgacagatctagttctcttctcctgtgttccctttgagtccagtgtgggacacggtttaactgtcccagcgacatttctccaagtggaaatcctatttttgtagatctccatgctttgctctcaaggcttggagaggtatgtgcccctcctgggtgctcaccgcctgctacacaggcaggaatgcggttgggaggcaggtcgggctgccagcccagctggccggaaggagactgtggtttttgtgtgtgtggacagcccgggagctttgagacaggtgcctggggctggctgcagacggtgtggttgggggtgggaggtgagctagacccaacccttagcttttagcctggctgtcacctttttaatttccagaactgcacaatgaccagcaggagggaaggacagacatcaagtgccagatgttgtctgaactaatcgagcacttctcaccaaacttcatgtataaataaaatacatatttttaaaacaaaccaataaatggcttacatga

SEQ ID NO: 7155 - DNA, 6048 bp, Artificial Sequence
  derived and/or modified sequence
atggccaacttcctgctgcccagaggcaccagcagcttcagaagattcaccagagagagcctggccgccatcgagaagagaatggccgagaagcaggccagaggcagcaccaccctgcaggagagcagagagggcctgcccgaggaggaggcccccagaccccagctggacctgcaggccagcaagaagctgcccgacctgtacggcaaccccccccaggagctgatcggcgagcccctggaggacctggaccccttctacagcacccagaagaccttcatcgtgctgaacaagggcaagaccatcttcagattcagcgccaccaacgccctgtacgtgctgagccccttccaccccatcagaagagccgccgtgaagatcctggtgcacagcctgttcaacatgctgatcatgtgcaccatcctgaccaactgcgtgttcatggcccagcacgacccccccccctggaccaagtacgtggagtacaccttcaccgccatctacaccttcgagagcctggtgaagatcctggccagaggcttctgcctgcacgccttcaccttcctgagagacccctggaactggctggacttcagcgtgatcatcatggcctacaccaccgagttcgtggacctgggcaacgtgagcgccctgagaaccttcagagtgctgagagccctgaagaccatcagcgtgatcagcggcctgaagaccatcgtgggcgccctgatccagagcgtgaagaagctggccgacgtgatggtgctgaccgtgttctgcctgagcgtgttcgccctgatcggcctgcagctgttcatgggcaacctgagacacaagtgcgtgagaaacttcaccgccctgaacggcaccaacggcagcgtggaggccgacggcctggtgtgggagagcctggacctgtacctgagcgaccccgagaactacctgctgaagaacggcaccagcgacgtgctgctgtgcggcaacagcagcgacgccggcacctgccccgagggctacagatgcctgaaggccggcgagaaccccgaccacggctacaccagcttcgacagcttcgcctgggccttcctggccctgttcagactgatgacccaggactgctgggagagactgtaccagcagaccctgagaagcgccggcaagatctacatgatcttcttcatgctggtgatcttcctgggcagcttctacctggtgaacctgatcctggccgtggtggccatggcctacgaggagcagaaccaggccaccatcgccgagaccgaggagaaggagaagagattccaggaggccatggagatgctgaagaaggagcacgaggccctgaccatcagaggcgtggacaccgtgagcagaagcagcctggagatgagccccctggcccccgtgaacagccacgagagaagaagcaagagaagaaagagaatgagcagcggcaccgaggagtgcggcgaggacagactgcccaagagcgacagcgaggacggccccagagccatgaaccacctgagcctgaccagaggcctgagcagaaccagcatgaagcccagaagcagcagaggcagcatcttcaccttcagaagaagagacctgggcagcgaggccgacttcgccgacgacgagaacagcaccgccggcgagagcgagagccaccacaccagcctgctggtgccctggcccctgagaagaaccagcgcccagggccagcccagccccggcaccagcgcccccggccacgccctgcacggcaagaagaacagcaccgtggactgcaacggcgtggtgagcctgctgggcgccggcgaccccgaggccaccagccccggcagccacctgctgagacccgtgatgctggagcacccccccgacaccaccacccccagcgaggagcccggcggcccccagatgctgaccagccaggccccctgcgtggacggcttcgaggagcccggcgccagacagagagccctgagcgccgtgagcgtgctgaccagcgccctggaggagctggaggagagcagacacaagtgccccccctgctggaacagactggcccagagatacctgatctgggagtgctgccccctgtggatgagcatcaagcagggcgtgaagctggtggtgatggaccccttcaccgacctgaccatcaccatgtgcatcgtgctgaacaccctgttcatggccctggagcactacaacatgaccagcgagttcgaggagatgctgcaggtgggcaacctggtgttcaccggcatcttcaccgccgagatgaccttcaagatcatcgccctggacccctactactacttccagcagggctggaacatcttcgacagcatcatcgtgatcctgagcctgatggagctgggcctgagcagaatgagcaacctgagcgtgctgagaagcttcagactgctgagagtgttcaagctggccaagagctggcccaccctgaacaccctgatcaagatcatcggcaacagcgtgggcgccctgggcaacctgaccctggtgctggccatcatcgtgttcatcttcgccgtggtgggcatgcagctgttcggcaagaactacagcgagctgagagacagcgacagcggcctgctgcccagatggcacatgatggacttcttccacgccttcctgatcatcttcagaatcctgtgcggcgagtggatcgagaccatgtgggactgcatggaggtgagcggccagagcctgtgcctgctggtgttcctgctggtgatggtgatcggcaacctggtggtgctgaacctgttcctggccctgctgctgagcagcttcagcgccgacaacctgaccgcccccgacgaggacagagagatgaacaacctgcagctggccctggccagaatccagagaggcctgagattcgtgaagagaaccacctgggacttctgctgcggcctgctgagacagagaccccagaagcccgccgccctggccgcccagggccagctgcccagctgcatcgccaccccctacagcccccccccccccgagaccgagaaggtgccccccaccagaaaggagaccagattcgaggagggcgagcagcccggccagggcacccccggcgaccccgagcccgtgtgcgtgcccatcgccgtggccgagagcgacaccgacgaccaggaggaggacgaggagaacagcctgggcaccgaggaggagagcagcaagcaggagagccagcccgtgagcggcggccccgaggccccccccgacagcagaacctggagccaggtgagcgccaccgccagcagcgaggccgaggccagcgccagccaggccgactggagacagcagtggaaggccgagccccaggcccccggctgcggcgagacccccgaggacagctgcagcgagggcagcaccgccgacatgaccaacaccgccgagctgctggagcagatccccgacctgggccaggacgtgaaggaccccgaggactgcttcaccgagggctgcgtgagaagatgcccctgctgcgccgtggacaccacccaggcccccggcaaggtgtggtggagactgagaaagacctgctaccacatcgtggagcacagctggttcgagaccttcatcatcttcatgatcctgctgagcagcggcgccctggccttcgaggacatctacctggaggagagaaagaccatcaaggtgctgctggagtacgccgacaagatgttcacctacgtgttcgtgctggagatgctgctgaagtgggtggcctacggcttcaagaagtacttcaccaacgcctggtgctggctggacttcctgatcgtggacgtgagcctggtgagcctggtggccaacaccctgggcttcgccgagatgggccccatcaagagcctgagaaccctgagagccctgagacccctgagagccctgagcagattcgagggcatgagagtggtggtgaacgccctggtgggcgccatccccagcatcatgaacgtgctgctggtgtgcctgatcttctggctgatcttcagcatcatgggcgtgaacctgttcgccggcaagttcggcagatgcatcaaccagaccgagggcgacctgcccctgaactacaccatcgtgaacaacaagagccagtgcgagagcctgaacctgaccggcgagctgtactggaccaaggtgaaggtgaacttcgacaacgtgggcgccggctacctggccctgctgcaggtggccaccttcaagggctggatggacatcatgtacgccgccgtggacagcagaggctacgaggagcagccccagtgggagtacaacctgtacatgtacatctacttcgtgatcttcatcatcttcggcagcttcttcaccctgaacctgttcatcggcgtgatcatcgacaacttcaaccagcagaagaagaagctgggcggccaggacatcttcatgaccgaggagcagaagaagtactacaacgccatgaagaagctgggcagcaagaagccccagaagcccatccccagacccctgaacaagtaccagggcttcatcttcgacatcgtgaccaagcaggccttcgacgtgaccatcatgttcctgatctgcctgaacatggtgaccatgatggtggagaccgacgaccagagccccgagaagatcaacatcctggccaagatcaacctgctgttcgtggccatcttcaccggcgagtgcatcgtgaagctggccgccctgagacactactacttcaccaacagctggaacatcttcgacttcgtggtggtgatcctgagcatcgtgggcaccgtgctgagcgacatcatccagaagtacttcttcagccccaccctgttcagagtgatcagactggccagaatcggcagaatcctgagactgatcagaggcgccaagggcatcagaaccctgctgttcgccctgatgatgagcctgcccgccctgttcaacatcggcctgctgctgttcctggtgatgttcatctacagcatcttcggcatggccaacttcgcctacgtgaagtgggaggccggcatcgacgacatgttcaacttccagaccttcgccaacagcatgctgtgcctgttccagatcaccaccagcgccggctgggacggcctgctgagccccatcctgaacaccggccccccctactgcgaccccaccctgcccaacagcaacggcagcagaggcgactgcggcagccccgccgtgggcatcctgttcttcaccacctacatcatcatcagcttcctgatcgtggtgaacatgtacatcgccatcatcctggagaacttcagcgtggccaccgaggagagcaccgagcccctgagcgaggacgacttcgacatgttctacgagatctgggagaagttcgaccccgaggccacccagttcatcgagtacagcgtgctgagcgacttcgccgacgccctgagcgagcccctgagaatcgccaagcccaaccagatcagcctgatcaacatggacctgcccatggtgagcggcgacagaatccactgcatggacatcctgttcgccttcaccaagagagtgctgggcgagagcggcgagatggacgccctgaagatccagatggaggagaagttcatggccgccaaccccagcaagatcagctacgagcccatcaccaccaccctgagaagaaagcacgaggaggtgagcgccatggtgatccagagagccttcagaagacacctgctgcagagaagcctgaagcacgccagcttcctgttcagacagcaggccggcagcggcctgagcgaggaggacgcccccgagagagagggcctgatcgcctacgtgatgagcgagaacttcagcagacccctgggcccccccagcagcagcagcatcagcagcaccagcttcccccccagctacgacagcgtgaccagagccaccagcgacaacctgcaggtgagaggcagcgactacagccacagcgaggacctggccgacttcccccccagccccgacagagacagagagagcatcgtgtag

SEQ ID NO: 7156 - protein, 640 aa, Artificial Sequence
  derived and/or modified sequence
MHVKKYLLKGLHRLQKGPGYTYKELLVWYCDNTNTHGPKRIICEGPKKKAMWFLLTLLFAALVCWQWGIFIRTYLSWEVSVSLSVGFKTMDFPAVTICNASPFKYSKIKHLLKDLDELMEAVLERILAPELSHANATRNLNFSIWNHTPLVLIDERNPHHPMVLDLFGDNHNGLTSSSASEKICNAHGCKMAMRLCSLNRTQCTFRNFTSATQALTEWYILQATNIFAQVPQQELVEMSYPGEQMILACLFGAEPCNYRNFTSIFYPHYGNCYIFNWGMTEKALPSANPGTEFGLKLILDIGQEDYVPFLASTAGVRLMLHEQRSYPFIRDEGIYAMSGTETSIGVLVDKLQRMGEPYSPCTVNGSEVPVQNFYSDYNTTYSIQACLRSCFQDHMIRNCNCGHYLYPLPRGEKYCNNRDFPDWAHCYSDLQMSVAQRETCIGMCKESCNDTQYKMTISMADWPSEASEDWIFHVLSQERDQSTNITLSRKGIVKLNIYFQEFNYRTIEESAANNIVWLLSNLGGQFGFWMGGSVLCLIEFGEIIIDFVWITIIKLVALAKSLRQRRAQASYAGPPPTVAELVEAHTNFGFQPDTAPRSPNTGPYPSEQALPIPGTPPPNYDSLRLQPLDVIESDSEGDAI

SEQ ID NO: 7157 - protein, 430 aa, Artificial Sequence
  derived and/or modified sequence
MSLNNSSNVFLDSVPSNTNRFQVSVINENHESSAAADDNTDPPHYEETSFGDEAQKRLRISFRPGNQECYDNFLQSGETAKTDASFHAYDSHTNTYYLQTFGHNTMDAVPKIEYYRNTGSISGPKVNRPSLLEIHEQLAKNVAVTPSSADRVANGDGIPGDEQAENKEDDQAGVVKFGWVKGVLVRCMLNIWGVMLFIRLSWIVGEAGIGLGVLIILLSTMVTSITGLSTSAIATNGFVRGGGAYYLISRSLGPEFGGSIGLIFAFANAVAVAMYVVGFAETVVDLLKESDSMMVDPTNDIRIIGSITVVILLGISVAGMEWEAKAQVILLVILLIAIANFFIGTVIPSNNEKKSRGFFNYQASIFAENFGPRFTKGEGFFSVFAIFFPAATGILAGANISGDLEALRKQGASPLPQGAQSRRRRQTSLI

SEQ ID NO: 7158 - protein, 1099 aa, Artificial Sequence
  derived and/or modified sequence
MSLNNSSNVFLDSVPSNTNRFQVSVINENHESSAAADDNTDPPHYEETSFGDEAQKRLRISFRPGNQECYDNFLQSGETAKTDASFHAYDSHTNTYYLQTFGHNTMDAVPKIEYYRNTGSISGPKVNRPSLLEIHEQLAKNVAVTPSSADRVANGDGIPGDEQAENKEDDQAGVVKFGWVKGVLVRCMLNIWGVMLFIRLSWIVGEAGIGLGVLIILLSTMVTSITGLSTSAIATNGFVRGGGAYYLISRSLGPEFGGSIGLIFAFANAVAVAMYVVGFAETVVDLLKESDSMMVDPTNDIRIIGSITVVILLGISVAGMEWEAKAQVILLVILLIAIANFFIGTVIPSNNEKKSRGFFNYQASIFAENFGPRFTKGEGFFSVFAIFFPAATGILAGANISGDLEDPQDAIPRGTMLAIFITTVAYLGVAICVGACVVRDATGNMNDTIISGMNCNGSAACGLGYDFSRCRHEPCQYGLMNNFQVMSMVSGFGPLITAGIFSATLSSALASLVSAPKVFQALCKDNIYKALQFFAKGYGKNNEPLRGYILTFLIAMAFILIAELNTIAPIISNFFLASYALINFSCFHASYAKSPGWRPAYGIYNMWVSLFGAVLCCAVMFVINWWAAVITYVIEFFLYVYVTCKKPDVNWGSSTQALSYVSALDNALELTTVEDHVKNFRPQCIVLTGGPMTRPALLDITHAFTKNSGLCICCEVFVGPRKLCVKEMNSGMAKKQAWLIKNKIKAFYAAVAADCFRDGVRSLLQASGLGRMKPNTLVIGYKKNWRKAPLTEIENYVGIIHDAFDFEIGVVIVRISQGFDISQVLQVQEELERLEQERLALEATIKDNECEEESGGIRGLFKKAGKLNITKTTPKKDGSINTSQSMHVGEFNQKLVEASTQFKKKQEKGTIDVWWLFDDGGLTLLIPYILTLRKKWKDCKLRIYVGGKINRIEEEKIVMASLLSKFRIKFADIHIIGDINIRPNKESWKVFEEMIEPYRLHESCKDLTTAEKLKRETPWKITDAELEAVKEKSYRQVRLNELLQEHSRAANLIVLSLPVARKGSISDLLYMAWLEILTKNLPPVLLVRGNHKNVLTFYS

SEQ ID NO: 7159 - protein, 593 aa, Artificial Sequence
  derived and/or modified sequence
MLNIWGVMLFIRLSWIVGEAGIGLGVLIILLSTMVTSITGLSTSAIATNGFVRGGGAYYLISRSLGPEFGGSIGLIFAFANAVAVAMYVVGFAETVVDLLKESDSMMVDPTNDIRIIGSITVVILLGISVAGMEWEAKAQVILLVILLIAIANFFIGTVIPSNNEKKSRGFFNYQASIFAENFGPRFTKGEGFFSVFAIFFPAATGILAGANISGDLEDPQDAIPRGTMLAIFITTVAYLGVAICVGACVVRDATGNMNDTIISGMNCNGSAACGLGYDFSRCRHEPCQYGLMNNFQVMSMVSGFGPLITAGIFSATLSSALASLVSAPKVFQALCKDNIYKALQFFAKGYGKNNEPLRGYILTFLIAMAFILIAELNTIAPIISNFFLASYALINFSCFHASYAKSPGWRPAYGIYNMWVSLFGAVLCCAVMFVINWWAAVITYVIEFFLYVYVTCKKPDVNWGSSTQALSYVSALDNALELTTVEDHVKNFRPQCIVLTGGPMTRPALLDITHAFTKNSGLCICCEVFVGPRKLCVKEMNSGMAKTGLAYKEQNQGFLCCSGGRLFQGWCPKSSSGLRLRKNETKHSGDWI

SEQ ID NO: 7160 - protein, 648 aa, Artificial Sequence
  derived and/or modified sequence
MLNIWGVMLFIRLSWIVGEAGIGLGVLIILLSTMVTSITGLSTSAIATNGFVRGGGAYYLISRSLGPEFGGSIGLIFAFANAVAVAMYVVGFAETVVDLLKESDSMMVDPTNDIRIIGSITVVILLGISVAGMEWEAKAQVILLVILLIAIANFFIGTVIPSNNEKKSRGFFNYQASIFAENFGPRFTKGEGFFSVFAIFFPAATGILAGANISGDLEDPQDAIPRGTMLAIFITTVAYLGVAICVGACVVRDATGNMNDTIISGMNCNGSAACGLGYDFSRCRHEPCQYGLMNNFQVMSMVSGFGPLITAGIFSATLSSALASLVSAPKVFQALCKDNIYKALQFFAKGYGKNNEPLRGYILTFLIAMAFILIAELNTIAPIISNFFLASYALINFSCFHASYAKSPGWRPAYGIYNMWVSLFGAVLCCAVMFVINWWAAVITYVIEFFLYVYVTCKKPDVNWGSSTQALSYVSALDNALELTTVEDHVKNFRPQCIVLTGGPMTRPALLDITHAFTKNSGLCICCEVFVGPRKLCVKEMNSGMAKKQAWLIKNKIKAFYAAVAADCFRDGVRSLLQASGLGRMKPNTLVIGYKKNWRKAPLTEIENYVGIIHDAFDFEIGVVIVRISQGFDISQVLQVQEELERLE

SEQ ID NO: 7161 - DNA, 1293 bp, Artificial Sequence
  derived and/or modified sequence
atgagcctaaacaacagctctaacgtgttcctggactcggtaccatcaaataccaacagattccaggtttcagtcatcaacgaaaatcacgagtcatccgccgcagcagacgataatacagacccaccgcactatgaggaaactagtttcggagatgaggcccaaaagcgcctccgcatctcatttcgtcccgggaatcaggaatgttacgacaactttctccaatctggcgaaacagccaaaaccgatgcgagctttcacgcctacgacagccatacaaatacatactatctgcagacttttgggcacaacacaatggatgccgttcctaagatagaatactatcggaacacgggctcgatcagcggaccgaaggtgaaccgcccgtcgctgttggaaatccatgagcagctcgccaagaatgtagctgtcacgccgagctccgccgaccgcgtggccaacggcgacggcatccccggggacgagcaggccgagaataaggaggatgatcaagctggcgtggtgaagttcggatgggtcaagggagtcctggtgcggtgtatgttgaatatctggggggtcatgctctttatcaggttatcctggattgtgggtgaagctggcatcgggttgggtgttttgatcatactgctctccactatggtgacgtcaatcaccgggctgtccacaagcgccatcgcaactaacggcttcgtgcgcggcggtggggcgtattacctgattagtagatccctgggacccgagtttgggggcagcattggcttgatcttcgcatttgccaatgctgtcgctgttgcaatgtacgttgtcggattcgccgagactgtcgttgaccttctgaaggagtccgactccatgatggtagacccaacgaacgacattcggataatcggctctattaccgtggtcattctccttggcatctccgtggcggggatggagtgggaagctaaggcccaggtgatattgctcgttatccttctcatcgctattgccaacttcttcatcggcactgtgattccatccaacaacgaaaaaaaaagtcgcggtttctttaattaccaagcttccatctttgcggagaacttcgggcctcgcttcaccaaaggcgaaggatttttttccgtctttgcaatattcttcccagccgctactggaattctcgctggcgctaatatttctggggatcttgaggccttgcggaaacagggcgctagcccccttccacagggcgctcagtcccgtcggagaaggcagaccagccttatttag

SEQ ID NO: 7162 - DNA, 3300 bp, Artificial Sequence
  derived and/or modified sequence
atgtcgttaaacaattccagcaacgtatttcttgacagtgtacctagcaataccaacagatttcaggtgagtgtaattaacgaaaaccacgaaagctccgctgcagctgacgacaacactgacccaccccactatgaggaaacctcatttggagacgaagcgcaaaagcgacttcggatctctttcaggccggggaatcaagagtgttacgacaatttcctacaaagcggcgaaactgctaagaccgacgccagctttcatgcctatgactcacacactaacacctactacttgcagacctttgggcacaacactatggacgccgtgccgaagatcgagtactaccgcaacacaggctcaatcagtggccctaaagtaaaccggccctcccttctggaaatacatgaacagctggctaagaacgtcgccgtgacacctagctccgcggacagggtcgccaatggagacggcattcccggcgacgaacaagccgaaaataaagaagacgatcaggccggggtggtgaaattcgggtgggtcaagggtgttctggtgaggtgcatgcttaatatatggggagtgatgcttttcatccggctctcttggatcgtaggcgaagctggcatagggctgggagttcttatcatcttgctatccacaatggtcacaagcattactggcctgagtacatccgcaattgcgacaaatggctttgtgcgaggtgggggcgcttactatctaatcagtagatcactaggcccggaattcggcggctcaattgggctcatcttcgccttcgcaaacgctgttgccgtggctatgtacgttgtcgggttcgccgaaacagtcgtagacctgcttaaagagtccgattccatgatggtggacccaactaacgatatcaggatcatcggatccattacagtagtgatcctgctggggattagtgttgccggaatggagtgggaagccaaagcccaggtgatcctgcttgttatccttctgatcgccattgctaacttcttcatcggcactgtgatacccagtaacaacgagaaaaaatcaagggggtttttcaattaccaggcctccatctttgcggagaattttgggccaagatttacgaaaggcgagggctttttctctgtctttgctattttttttccagccgccaccgggatactggccggagccaacatctcaggcgatctcgaagatccccaagatgccattcccagaggcactatgttggccatctttattacgaccgtggcgtatttgggcgtggccatttgcgttggagcttgcgtcgtccgggatgcaacagggaatatgaatgatacaataatatctggaatgaattgcaatggttctgctgcttgtggtctggggtacgacttcagccggtgccgccacgaaccatgccagtatgggctcatgaataacttccaggtaatgtccatggtgtcaggatttgggccactgattactgccggcatttttagtgctactctgtcctccgcattagcgagcctggtcagcgccccaaaggtcttccaagccctgtgcaaggataacatttacaaggcgctgcagttctttgccaagggctatggtaagaacaatgagccgctgcggggatatatccttacattcctgattgcaatggccttcattctgattgccgagctgaatactattgcccctatcatctcgaacttctttctggcctcctacgcccttattaattttagctgtttccatgcaagctatgcaaaaagcccaggctggaggcctgcctacggaatctataacatgtgggtgtccctgtttggggccgtactgtgctgtgcagtgatgttcgtcatcaactggtgggctgcagtgattacttacgtcattgaattcttcctgtatgtttatgtcacctgcaagaaaccggacgtcaactggggctcgagcactcaagccctctcttacgtttccgccctcgataatgccctggaactaaccactgtggaagatcacgttaaaaatttccgtccacaatgcatcgttcttaccgggggccccatgacacggccagctttattagacatcacgcacgcgtttactaagaatagcggtctctgtatctgctgtgaggttttcgtgggtcctcggaaactttgtgtaaaggagatgaattcgggcatggccaagaagcaggcctggctcatcaagaacaagattaaagcgttctatgctgcagtggccgctgactgcttcagagatggcgttcgctccttactgcaggcgtctggactcggtagaatgaaacccaacacacttgtgattggctacaaaaaaaactggagaaaagcaccactgacggagatagagaactatgtaggcattatccatgatgcctttgacttcgaaatcggggtggtaattgtccggatcagccaggggtttgacattagtcaggttttgcaagttcaagaagagttagaaagactcgagcaagagcgcctggcactggaagcaaccatcaaggataatgagtgcgaggaagagtctggcgggatccgaggactatttaaaaaagctggaaagctgaacattaccaagacgacaccaaaaaaggacggtagtataaacacctcccagtcgatgcatgtaggggagttcaaccagaaactggtcgaggcctccacgcagttcaagaaaaaacaggaaaaagggacaattgacgtctggtggctattcgatgacgggggtttgaccctgctgattccatatatcctgacccttcgtaaaaaatggaaagactgtaaactgcgaatatacgtcggcggaaagatcaatcgcattgaggaggaaaagatcgtcatggcatcattgctcagtaagtttcgcattaagttcgctgatatacatatcatcggtgacataaacatcaggccgaataaggagagctggaaagttttcgaagagatgatcgagccctaccggctccacgagtcctgcaaagaccttaccacagcagagaagctcaagcgcgaaaccccttggaagattactgacgctgagctggaagctgtaaaagagaagagctacaggcaagtaagattgaacgagctgcttcaggagcactccagagctgccaacctcatcgtgttaagcttgccagtcgctcggaaaggctcaatttccgatttgctgtatatggcctggttggagattttaaccaagaacctccccccagtgctcttggtgagagggaaccataagaacgttctgacattctactcctag

SEQ ID NO: 7163 - DNA, 1782 bp, Artificial Sequence
  derived and/or modified sequence
atgctgaatatctggggagttatgctgtttataaggttaagttggatcgtaggagaggcgggaattggcttgggagtcttgattatcctgctgtcgactatggtgaccagtattaccggtctttctaccagcgccatcgcgaccaatggatttgtccgtggaggcggagcgtattatttgatcagcaggtccctcggcccagaatttggtgggtcaatcggcctgatctttgctttcgccaatgccgttgccgtggctatgtatgtagtgggcttcgccgaaacagtcgttgatctgctcaaggagtccgattccatgatggtggacccgactaacgatatacgaatcatcggatccatcaccgtcgtcattctcttaggaatcagcgtggcaggtatggagtgggaagctaaggcccaagtgatcctactggtaattctgctcattgcaattgccaattttttcatcggtacagtgattcctagcaataatgagaagaagtctcggggattctttaattaccaagcctccatttttgcggaaaattttgggcctagattcaccaagggcgaaggattcttctcagtctttgcaattttttttccagctgcaacagggatccttgccggggctaacatctcgggagatctggaagatccccaggacgccatacctaggggtactatgttggccatctttattaccaccgtcgcttacttgggagtcgctatttgtgttggcgcctgcgtggtgcgtgatgccactggaaatatgaacgataccataatcagtggtatgaattgcaacggcagtgcggcctgcggacttgggtacgatttttcaagatgcaggcacgaaccctgccagtatgggctgatgaataactttcaagttatgtccatggtaagtgggttcggcccacttattacagctggaatcttttctgcaaccttgtcttctgcattggcgagtcttgtgtctgccccgaaggtcttccaggctttgtgcaaggataacatctacaaggccctccagtttttcgcaaagggttatgggaaaaataatgagccactgcgtggatatatcctcacatttctgatcgccatggcctttattcttattgccgaactaaataccatcgcaccaatcatcagtaactttttcctggcctcttacgcgctgattaatttctcttgctttcatgccagctacgctaagagcccgggctggcgacccgcttatggtatctacaatatgtgggtcagcctgttcggagcagtgctgtgctgtgctgtgatgtttgttatcaactggtgggccgcagtaatcacttatgtgattgagtttttcttatatgtgtatgttacttgtaaaaagccggatgtcaactggggctctagcactcaagccctcagctatgtctccgcccttgataatgcactggaactgaccaccgtagaggatcacgtgaagaattttcgaccccagtgcattgtgcttacaggcgggccaatgacgcgacctgcccttctggacattacacacgcttttacaaaaaactcagggctttgtatctgctgtgaggtgtttgtcggtcctcgcaaattgtgcgtgaaagaaatgaattctggtatggctaagactggcctggcctataaggagcagaatcaggggtttctgtgttgctcaggcggccggttattccagggatggtgccctaaatcaagttctgggttgaggttacgcaagaatgagacaaagcactctggtgattggatctag

SEQ ID NO: 7164 - DNA, 3300 bp, Artificial Sequence
  derived and/or modified sequence
atgtcattgaataacagttcgaacgtttttctagactctgtcccgagtaacaccaatcgatttcaggtgtcagtgatcaacgagaaccacgaatcaagtgcagcagctgatgataacaccgacccaccacattacgaggagacgtcctttggcgatgaggcgcaaaaacggttgaggatttcctttcggccaggaaatcaggagtgctatgataactttctgcagagcggggagaccgctaagaccgatgcctcattccacgcgtacgactcccacactaacacttactatctgcagacgtttgggcataacacgatggacgccgtaccaaagattgaatactaccgcaatactggttccattagcggacccaaagttaaccgcccctctctcctggaaatacatgagcaattggccaaaaatgttgctgtgacaccaagcagcgcagatcgcgttgctaatggcgatgggattcccggagatgagcaggcagagaacaaggaggatgaccaggctggcgtggtcaaattcggctgggtcaaaggggtgctggtgcgctgtatgctcaatatatggggtgtgatgttgttcatccgcctctcctggatcgtgggcgaggcggggataggtttgggagttctgatcattttgcttagcacgatggtgactagcatcacggggctgtccacaagtgccatagctactaacggcttcgtgagagggggcggtgcatattatctgataagcaggagccttggcccggagtttggaggtagtataggtctgatcttcgcctttgccaatgccgtcgctgtggccatgtacgtggtgggattcgctgagactgtggttgacctgctgaaagagtcagattcaatgatggtggacccgactaatgacatcaggatcatcggaagcatcactgttgtgattctcctgggtataagtgtggcaggcatggagtgggaagcgaaagcccaggtgattctgctagttatcttgctgatcgcaattgccaatttttttatcggaacagtgattccatcaaataatgagaaaaaatcacgggggtttttcaactatcaggcctccatcttcgctgaaaactttgggccaagatttacaaaaggcgagggcttcttttctgtatttgctattttttttccagcagccacaggaatcttagccggcgcgaacatcagcggagatctggaggatccccaggacgccattccaaggggaaccatgctggccatttttatcactacagtggcttacctgggggtggcaatttgcgttggagcttgcgtagtgagggacgccactggaaacatgaatgacaccattatcagcggcatgaattgcaatggttcagcagcatgtgggttgggctacgatttctcccggtgtcggcacgagccctgccagtacgggttgatgaacaatttccaggtaatgtcaatggtgagtggttttggaccactgattaccgcaggtatcttctcagctactctcagttctgcccttgccagtcttgtgtcagccccaaaagtgttccaggccttgtgtaaagataacatctacaaggcactccagttcttcgctaaaggttacggtaagaataatgagccactgagaggctacattctgacattcctcattgcaatggcgtttatcctaattgcagagctgaatactattgctccaatcatttctaacttcttcctggcttcctatgcgctcatcaatttcagttgttttcacgccagctatgcaaagtcaccaggctggagacctgcatacggaatctataacatgtgggtatccttatttggcgcagtgctgtgttgcgcagtcatgtttgtgattaactggtgggcagccgtcatcacttacgtgatcgaattttttctttacgtgtacgtgacttgtaagaagccggatgtgaattggggcagctctacgcaggcgctgtcttacgtatccgcactggacaatgctctggaactcacaactgtggaggaccacgtgaagaatttcaggccgcagtgtatagtgctgaccggtggacctatgacaagaccagctctgcttgacataactcatgccttcactaagaactctggcttgtgcatttgctgcgaggtgtttgttggcccccgaaagttgtgtgtcaaggagatgaactccggtatggcaaagaagcaggcatggttaataaaaaacaagataaaggcattttatgcagccgttgccgctgattgtttcagggacggcgtcagatcacttctgcaagcctctggcctgggccgaatgaagccaaataccctagtaatcgggtataagaaaaattggaggaaggcacctctgaccgagatagaaaattacgtgggcataatacatgatgcctttgattttgaaataggcgtggtgattgtgcggatatcccagggcttcgacatctctcaggttctccaggtacaggaagagttggagcgcctggaacaggagagactggcactggaggcaactatcaaggacaacgaatgtgaagaagaaagcggcggcattaggggactgttcaaaaaagccggcaaattgaatatcactaagactacaccaaagaaagacggatcaatcaacacctctcaatccatgcacgtgggcgagttcaatcagaagcttgttgaggcgtccacacaattcaagaaaaagcaagaaaaagggaccatagacgtctggtggctattcgacgatgggggccttaccttactcattccctacattctgacgttgcggaaaaaatggaaagattgtaagttgcgaatctacgtaggcgggaagattaatagaatcgaggaggaaaagatcgttatggcaagtttgctgagcaagtttaggatcaaatttgccgacatacatatcatcggtgatataaatattcgaccaaataaagaatcttggaaagtgttcgaagagatgattgagccttaccggctccatgagagttgcaaagatctcaccaccgccgagaaactaaagcgtgagactccttggaagatcacagacgccgagctggaagccgtgaaagaaaaaagttatcgacaagtacgcctgaacgaactgctccaggagcattcccgggctgctaatcttatcgttctatcactgccggtggccagaaaagggtctatctcagacctgctatatatggcctggctcgaaattcttactaagaacctgccaccagtgctgttagtgcgaggaaatcataagaatgtgcttaccttttactcctag

SEQ ID NO: 7165 - DNA, 1947 bp, Artificial Sequence
  derived and/or modified sequence
atgctaaacatttggggggttatgctctttattaggctgtcctggattgttggcgaggcaggcatcggccttggcgtgctcatcatccttctgagtaccatggttacatccattaccggcctctcgacctccgcaatagccactaatggcttcgtgcgcggaggcggggcttactacttaatttctagaagtcttggccctgagttcggcgggagtatcggattaatctttgcctttgctaatgctgtggctgtagccatgtacgttgttgggttcgccgagactgtagttgatctgctgaaggagtccgattcgatgatggtggatccgacaaatgacattaggatcattggaagcattacagtggtgatccttcttggtatttccgttgccgggatggagtgggaagctaaggcacaggtgatactgctggtaatcctgttgattgcaatcgccaacttctttattggaactgtaatcccctctaataatgaaaagaagagtaggggtttctttaactatcaggcctctatcttcgctgagaattttgggccaagattcacaaaaggagaaggctttttttccgtttttgccatttttttccccgccgccacaggtattttagccggggctaatatatccggtgatctggaagatcctcaggacgcaatacctcgaggcaccatgctggccattttcattaccaccgtcgcttacctcggcgtcgccatctgcgttggcgcatgcgtcgtgcgagatgccacgggaaacatgaatgataccataatctcgggaatgaactgcaatgggagcgcagcctgtggcctcggatacgatttctcccgctgtcgccacgagccatgtcagtacggcctgatgaacaattttcaagttatgagcatggtctccggattcggccccttgataactgcagggatttttagtgcgacgctgtcttccgccttggcttctctcgtgtccgccccgaaagtgtttcaggcactttgtaaggacaatatctataaggccctccagttcttcgctaagggctacggtaagaataatgaaccactccgcgggtatattctaacgtttttaatagcaatggcgtttatcctcatcgcggagctgaacactattgctcctattatctcaaacttctttctggcttcatatgcactaattaacttttcatgctttcatgccagctacgctaaaagtccaggctggcgccccgcatacggaatttacaacatgtgggtcagcttgttcggcgccgtcctatgctgcgccgtcatgttcgtgatcaactggtgggccgccgtgattacctatgtcatcgagttctttttgtacgtttacgtcacctgtaaaaagccagacgtgaactggggtagttcaacacaggcactaagctatgtttcagcactagataacgctctcgaactgacaacagtggaggatcacgtaaagaattttagaccccaatgtatcgtcctaaccggcggccccatgacaaggcctgcccttttggacatcacacacgccttcacaaagaacagcgggctgtgtatatgttgcgaagtattcgttggaccacggaagttatgtgttaaggagatgaactctggaatggccaagaaacaggcctggctgattaagaacaaaatcaaggccttttacgccgcagtggctgccgattgcttcagagacggggtgagatcacttctccaggcttccggcctggggaggatgaagcccaataccttagtgatcggttacaaaaaaaactggcggaaagcccctttgacagagattgaaaattatgtcggtatcatccacgatgcctttgacttcgagataggcgtcgtgatcgtccgcattagccaggggtttgatataagtcaggtcctgcaggtccaggaggagctcgaacgcctggagtag

SEQ ID NO: 7166 - DNA, 1293 bp, Artificial Sequence
  derived and/or modified sequence
atgagcctgaacaacagcagcaatgtgttcctggacagcgtgcccagcaacaccaaccgcttccaggtgtctgtcatcaatgaaaaccacgagagcagcgctgctgctgatgacaacacagaccccccccactatgaggagaccagctttggagatgaggcccagaagaggctgcgcatctccttccggcccggcaaccaggagtgctatgacaacttcctgcagagcggggagacagccaagacagatgccagcttccacgcctatgacagccacaccaacacctactacctgcagaccttcggccacaacaccatggatgctgtgcccaagattgagtactacagaaacacaggcagcatcagcggccccaaggtgaaccggcccagcctgctggagatccacgagcagctggccaagaatgtggccgtgacccccagcagcgctgacagagtggccaatggagatggcatccctggagatgagcaggccgagaacaaggaggatgaccaggccggcgtggtgaagtttggctgggtgaagggcgtgctggtgcgctgcatgctgaacatctggggcgtgatgctgttcatccggctgtcctggatcgtgggggaggccggcatcggcctgggcgtgctgatcatcctgctgagcaccatggtgaccagcatcaccggcctgagcaccagcgccatcgccaccaacggctttgtgcggggcggcggggcctactacctgatcagccgcagcctgggccctgagtttggaggcagcatcggcctcatctttgcctttgccaatgctgtggccgtggccatgtatgtggtgggctttgctgagaccgtggtggacctgctgaaggagagtgacagcatgatggtggaccccaccaatgacatccgcatcatcggcagcatcaccgtggtgatcctgctgggcatctctgtggccggcatggagtgggaggccaaggcccaggtgatcctgctggtgatcctgctgattgccatcgccaacttcttcatcggcaccgtcatccccagcaacaatgagaagaagagccggggcttcttcaactaccaggccagcatctttgctgagaactttggcccccgcttcaccaagggggagggcttcttctctgtgtttgccatcttcttccctgctgccaccggcatcctggccggggccaacatcagcggggacctggaggccctgaggaagcagggcgccagccccctgccccagggcgcccagagcagaagaagacggcagaccagcctcatctag

SEQ ID NO: 7167 - DNA, 3300 bp, Artificial Sequence
  derived and/or modified sequence
atgagcctgaacaacagcagcaatgtgttcctggacagcgtgcccagcaacaccaaccgcttccaggtgtctgtcatcaatgaaaaccacgagagcagcgctgctgctgatgacaacacagaccccccccactatgaggagaccagctttggagatgaggcccagaagaggctgcgcatctccttccggcccggcaaccaggagtgctatgacaacttcctgcagagcggggagacagccaagacagatgccagcttccacgcctatgacagccacaccaacacctactacctgcagaccttcggccacaacaccatggatgctgtgcccaagattgagtactacagaaacacaggcagcatcagcggccccaaggtgaaccggcccagcctgctggagatccacgagcagctggccaagaatgtggccgtgacccccagcagcgctgacagagtggccaatggagatggcatccctggagatgagcaggccgagaacaaggaggatgaccaggccggcgtggtgaagtttggctgggtgaagggcgtgctggtgcgctgcatgctgaacatctggggcgtgatgctgttcatccggctgtcctggatcgtgggggaggccggcatcggcctgggcgtgctgatcatcctgctgagcaccatggtgaccagcatcaccggcctgagcaccagcgccatcgccaccaacggctttgtgcggggcggcggggcctactacctgatcagccgcagcctgggccctgagtttggaggcagcatcggcctcatctttgcctttgccaatgctgtggccgtggccatgtatgtggtgggctttgctgagaccgtggtggacctgctgaaggagagtgacagcatgatggtggaccccaccaatgacatccgcatcatcggcagcatcaccgtggtgatcctgctgggcatctctgtggccggcatggagtgggaggccaaggcccaggtgatcctgctggtgatcctgctgattgccatcgccaacttcttcatcggcaccgtcatccccagcaacaatgagaagaagagccggggcttcttcaactaccaggccagcatctttgctgagaactttggcccccgcttcaccaagggggagggcttcttctctgtgtttgccatcttcttccctgctgccaccggcatcctggccggggccaacatcagcggggacctggaggacccccaggatgccatcccccggggcaccatgctggccatcttcatcaccaccgtggcctacctgggcgtggccatctgtgtgggcgcctgtgtggtgagagatgccaccggcaacatgaatgacaccatcatcagcggcatgaactgcaatggcagcgctgcctgtggcctgggctatgacttcagccgctgcagacatgagccctgccagtatggcctgatgaacaacttccaggtgatgtccatggtgtctggcttcggccccctcatcacagctggcatcttcagcgccaccctgagcagcgccctggccagcctggtgtctgcccccaaggtgttccaggccctgtgcaaggacaacatctacaaggccctgcagttctttgccaagggctacggcaagaacaatgagcccctgcggggctacatcctgaccttcctgattgccatggccttcatcctgattgctgagctgaacaccatcgcccccatcatcagcaacttcttcctggccagctatgccctgatcaacttcagctgcttccacgccagctatgccaagagccctggctggaggcctgcctacggcatctacaacatgtgggtgtccctgtttggagctgtgctgtgctgtgctgtgatgtttgtgatcaactggtgggccgccgtcatcacctacgtgattgagttcttcctgtatgtgtatgtgacctgcaagaagccagatgtgaactggggcagcagcacccaggccctgtcctatgtgtctgccctggacaatgccctggagctgaccaccgtggaggaccacgtgaagaacttccggccccagtgcatcgtgctgaccggcggccccatgaccaggcctgccctgctggacatcacccacgccttcaccaagaacagcggcctgtgcatctgctgtgaggtgtttgtgggccccaggaagctgtgtgtgaaggagatgaacagcggcatggccaagaagcaggcctggctgatcaagaacaagatcaaggccttctatgctgctgtggccgctgactgcttcagagatggagtgcgcagcctgctgcaggccagcggcctgggccgcatgaagcccaacaccctggtgattggctacaagaagaactggaggaaggcccccctgacagaaattgagaactacgtgggcatcatccatgatgcctttgattttgaaattggagtggtgattgtgcgcatcagccagggctttgacatcagccaggtgctgcaggtgcaggaggagctggagcggctggagcaggagcggctggccctggaggccaccatcaaggacaatgaatgtgaggaggagagcggcggcatccggggcctcttcaagaaggccggcaagctgaacatcaccaagaccacccccaagaaggatggcagcatcaacaccagccagagcatgcacgtgggggagttcaaccagaagctggtggaggccagcacccagttcaagaagaagcaggagaagggcaccattgatgtgtggtggctgtttgatgatggcggcctgaccctgctgatcccctacatcctgaccctgaggaagaagtggaaggactgcaagctgcgcatctacgtgggcggcaagatcaaccgcatcgaggaggagaagatcgtgatggccagcctgctgagcaagttccgcatcaagtttgctgacatccacatcatcggggacatcaacatccggcccaacaaggagagctggaaggtgtttgaggagatgattgagccctaccgcctgcacgagagctgcaaggacctgaccacagctgagaagctgaagcgggagaccccctggaagatcacagatgctgagctggaggccgtgaaggagaagagctaccggcaggtgcggctgaatgagctgctgcaggagcacagcagagctgccaacctgattgtgctgagcctgcctgtggccaggaagggcagcatcagtgacctgctgtacatggcctggctggagatcctgaccaagaacctgccccctgtgctgctggtgcggggcaaccacaagaatgtgctgaccttctacagctag

SEQ ID NO: 7168 - DNA, 1782 bp, Artificial Sequence
  derived and/or modified sequence
atgctgaacatctggggcgtgatgctgttcatccggctgtcctggatcgtgggggaggccggcatcggcctgggcgtgctgatcatcctgctgagcaccatggtgaccagcatcaccggcctgagcaccagcgccatcgccaccaatggatttgtgcggggcggcggggcctactacctgatcagccgcagcctgggccctgagtttggaggcagcatcggcctcatctttgcctttgccaatgctgtggccgtggccatgtatgtggtgggctttgctgagaccgtggtggacctgctgaaggagagtgacagcatgatggtggaccccaccaatgacatccgcatcatcggcagcatcaccgtggtgatcctgctgggcatctctgtggccggcatggagtgggaggccaaggcccaggtgatcctgctggtgatcctgctgattgccatcgccaacttcttcatcggcaccgtcatccccagcaacaatgagaagaagagccggggcttcttcaactaccaggccagcatctttgctgaaaattttggcccccgcttcaccaagggggagggcttcttctctgtgtttgccatcttcttccctgctgccaccggcatcctggccggggccaacatcagcggggacctggaggacccccaggatgccatcccccggggcaccatgctggccatcttcatcaccaccgtggcctacctgggcgtggccatctgtgtgggcgcctgtgtggtgagagatgccactggaaacatgaatgacaccatcatcagcggcatgaactgcaatggatctgctgcctgtggcctgggctatgacttcagccgctgcagacatgagccctgccagtatggcctgatgaacaacttccaggtgatgtccatggtgtctggcttcggccccctcatcacagctggcatcttcagcgccaccctgagcagcgccctggccagcctggtgtctgcccccaaggtgttccaggccctgtgcaaggacaacatctacaaggccctgcagttctttgccaagggctacggcaagaacaatgagcccctgcggggctacatcctgaccttcctgattgccatggccttcatcctgattgctgagctgaacaccatcgcccccatcatcagcaacttcttcctggccagctatgccctgatcaacttcagctgcttccacgccagctatgccaagagccctggctggaggcctgcctacggcatctacaacatgtgggtgtccctgtttggagctgtgctgtgctgtgctgtgatgtttgtgatcaactggtgggccgctgtgatcacctacgtgattgagttcttcctgtatgtgtatgtgacctgcaagaagccagatgtgaactggggcagcagcacccaggccctgtcctatgtgtctgccctggacaatgccctggagctgaccaccgtggaggaccacgtgaagaacttccggccccagtgcatcgtgctgactggaggccccatgaccaggcctgccctgctggacatcacccacgccttcaccaagaacagcggcctgtgcatctgctgtgaggtgtttgtgggccccaggaagctgtgtgtgaaggagatgaacagcggcatggccaagacaggcctggcctacaaggagcagaaccagggcttcctgtgctgcagcggcggccgcctcttccagggctggtgccccaagagcagcagcggcctgcggctgaggaagaatgagaccaagcacagcggggactggatctag

SEQ ID NO: 7169 - DNA, 1947 bp, Artificial Sequence
  derived and/or modified sequence
atgctgaacatctggggcgtgatgctgttcatccggctgtcctggatcgtgggggaggccggcatcggcctgggcgtgctgatcatcctgctgagcaccatggtgaccagcatcaccggcctgagcaccagcgccatcgccaccaatggatttgtgcggggcggcggggcctactacctgatcagccgcagcctgggccctgagtttggaggcagcatcggcctcatctttgcctttgccaatgctgtggccgtggccatgtatgtggtgggctttgctgagaccgtggtggacctgctgaaggagagtgacagcatgatggtggaccccaccaatgacatccgcatcatcggcagcatcaccgtggtgatcctgctgggcatctctgtggccggcatggagtgggaggccaaggcccaggtgatcctgctggtgatcctgctgattgccatcgccaacttcttcatcggcaccgtcatccccagcaacaatgagaagaagagccggggcttcttcaactaccaggccagcatctttgctgaaaattttggcccccgcttcaccaagggggagggcttcttctctgtgtttgccatcttcttccctgctgccaccggcatcctggccggggccaacatcagcggggacctggaggacccccaggatgccatcccccggggcaccatgctggccatcttcatcaccaccgtggcctacctgggcgtggccatctgtgtgggcgcctgtgtggtgagagatgccactggaaacatgaatgacaccatcatcagcggcatgaactgcaatggatctgctgcctgtggcctgggctatgacttcagccgctgcagacatgagccctgccagtatggcctgatgaacaacttccaggtgatgtccatggtgtctggcttcggccccctcatcacagctggcatcttcagcgccaccctgagcagcgccctggccagcctggtgtctgcccccaaggtgttccaggccctgtgcaaggacaacatctacaaggccctgcagttctttgccaagggctacggcaagaacaatgagcccctgcggggctacatcctgaccttcctgattgccatggccttcatcctgattgctgagctgaacaccatcgcccccatcatcagcaacttcttcctggccagctatgccctgatcaacttcagctgcttccacgccagctatgccaagagccctggctggaggcctgcctacggcatctacaacatgtgggtgtccctgtttggagctgtgctgtgctgtgctgtgatgtttgtgatcaactggtgggccgctgtgatcacctacgtgattgagttcttcctgtatgtgtatgtgacctgcaagaagccagatgtgaactggggcagcagcacccaggccctgtcctatgtgtctgccctggacaatgccctggagctgaccaccgtggaggaccacgtgaagaacttccggccccagtgcatcgtgctgactggaggccccatgaccaggcctgccctgctggacatcacccacgccttcaccaagaacagcggcctgtgcatctgctgtgaggtgtttgtgggccccaggaagctgtgtgtgaaggagatgaacagcggcatggccaagaagcaggcctggctgatcaagaacaagatcaaggccttctacgccgctgtggccgctgactgcttcagagatggagtgcgcagcctgctgcaggccagcggcctgggccgcatgaagcccaacaccctggtgattggctacaagaagaactggaggaaggcccccctgacagaaattgaaaattatgtgggcatcatccatgatgcctttgattttgaaattggagtggtgattgtgcgcatcagccagggctttgacatcagccaggtgctgcaggtgcaggaggagctggagcggctggagtag

SEQ ID NO: 7170 - DNA, 1293 bp, Artificial Sequence
  derived and/or modified sequence
atgagcctgaacaacagcagcaacgtgttcctggacagcgtgccctctaacactaataggtttcaggtgtcggttatcaacgagaatcatgaaagtagcgccgctgctgacgataacaccgaccccccacattacgaggaaacaagtttcggagatgaggcccagaagcggcttcgtatctcattcagacccggcaaccaggaatgctacgacaattttctacagtccggcgagaccgccaaaacagacgcctcatttcatgcctatgactcccatacaaatacatattacctacagacatttggacataatacgatggatgccgtgccgaagattgagtactatcggaatacagggagtatcagcggcccgaaggtgaacagaccttccctgctggaaattcacgagcagctggccaagaatgtggccgtgacaccatctagtgctgaccgtgtggccaatggcgatggcatcccgggggacgaacaggccgaaaacaaagaggacgatcaggccggcgttgtgaagttcgggtgggtgaaaggcgtacttgtgcggtgtatgctcaacatttggggcgtgatgttgtttattcgtctcagctggatcgtcggggaggctggaattggtctgggagtcctcataattctgctgtccaccatggtcactagcataacagggctaagtacttctgcaatcgcgactaatgggttcgtcaggggcggcggagcatattaccttatttcaagatcattgggacccgaattcggcggcagcattggcttgatctttgctttcgccaatgctgtcgcagtcgctatgtacgtggtcgggtttgccgagaccgtggtggatcttcttaaagagtccgacagcatgatggttgaccccaccaacgacatccgcattataggcagcataaccgtggtgatcttactgggcatctccgtcgctgggatggagtgggaagcgaaggctcaggtcatcctgctggtgattttgctgatcgcaattgcaaatttttttatcgggacggtgattcccagcaacaatgagaaaaaatccagaggtttctttaattatcaagcatccatcttcgctgaaaatttcggcccgaggtttacaaagggcgagggttttttttcagtcttcgcaatcttttttcccgcagctacagggattctggccggggcgaatatttccggggatcttgaggcgttgagaaaacagggagcttcacccctgcctcagggagcccagtcaagacgcagacgccagacctcccttatctag

SEQ ID NO: 7171 - DNA, 3300 bp, Artificial Sequence
  derived and/or modified sequence
atgagcctgaacaacagcagcaacgtgttcctggacagcgtgccctctaatactaaccgcttccaggtcagcgtgatcaatgaaaaccacgaaagtagcgcggccgctgacgacaacacagaccctccccattacgaggagacctctttcggagatgaggcccagaaaaggctgagaatatcttttagacctggcaaccaggagtgctatgacaactttctgcaatcaggggaaacagccaaaactgatgcctcttttcatgcctacgattcccatacgaatacatattacctgcagacttttggtcacaataccatggatgccgttcccaaaatcgaatattatagaaatactgggagcatctccgggcccaaggtaaaccggcccagcctgctggaaattcacgaacaactcgctaaaaatgtggctgtaaccccctcttccgccgaccgagtggcaaatggggatgggatacctggtgacgaacaggccgagaacaaggaggatgatcaggcaggcgtggtaaagtttggctgggtgaaaggagtccttgtccggtgcatgctaaacatctggggcgtgatgctgtttattagattgtcatggatcgttggcgaggctggtatcggattaggtgtgcttatcatcttacttagcacaatggtgacctctatcacaggcttgagcactagtgctattgccacaaacggcttcgtgcgcggaggcggagcctattatcttatcagcaggagtttagggcccgagtttggcggatcaatcggattgattttcgcctttgcaaatgccgtagccgtcgcaatgtatgttgttgggttcgctgagacagttgtcgacttactgaaagagtctgactctatgatggtcgaccccacaaacgacatccgaatcataggtagtattaccgtcgtgatcttgctgggaattagcgtggccgggatggaatgggaagctaaagcccaggtgatactgctagtgatccttctgatagctatcgccaacttcttcattggaaccgtgatcccctctaataatgagaaaaagtcgagaggcttctttaattaccaggctagtatattcgctgaaaactttggtccaaggttcaccaagggagaggggttcttcagtgtatttgctatcttttttccagcagccactggaatcctcgctggcgcgaacatcagcggggatttagaagacccgcaagatgccatccctcggggtacaatgttggccatctttataacaaccgtggcctatctgggtgtcgctatttgcgtgggggcctgcgtggttagagacgccacaggaaatatgaatgatactatcatctcaggcatgaattgtaatggttcagcagcctgcggtttgggctacgatttttctaggtgcaggcatgaaccctgccagtacggacttatgaataactttcaagttatgagcatggtttccggattcggcccccttattacagccgggatcttctccgccaccttgtcgtccgctttagctagtctcgtcagcgcccccaaagtgtttcaggccctatgcaaagataacatttacaaggccctgcaattttttgctaaagggtatggaaagaacaatgagcccctgagaggatatatcttaacctttttgatcgccatggccttcatactcatcgctgaacttaatactatagcaccaatcatttctaactttttcctggcatcatacgcgctcataaatttttcatgtttccatgccagttatgcaaagagtcccggctggaggcctgcatacgggatatataatatgtgggtgtcattgtttggcgccgttctatgttgcgctgtaatgtttgtgatcaactggtgggcggctgtcattacatacgtgatagagttctttctgtacgtctatgtgacttgtaagaagcctgatgtgaactggggctccagtacacaggccctcagttacgtctctgccctggataacgccctggagctgacaaccgtggaggatcacgtaaagaactttcgcccccagtgtatcgtactaaccggtggaccaatgactcggcccgccctcctcgatatcactcacgcctttaccaaaaatagtgggctctgtatttgttgcgaggttttcgtagggccacgtaagctgtgcgtaaaagagatgaatagcggcatggctaaaaagcaggcctggctgattaaaaataagataaaggcgttctacgccgcagtggctgccgattgcttccgcgacggggttcggagcctgcttcaggctagtggcctaggcaggatgaagcccaataccctggtgatcggctacaaaaagaattggcgcaaagcgccactgactgagattgaaaactacgtcggcattatacacgatgccttcgatttcgagataggcgtggtgatcgtgagaataagccaaggcttcgacataagccaggtgctccaggtgcaagaggagctggagagattggaacaagagaggttagcgctggaggccaccattaaagataatgagtgtgaggaagaaagcggtggtatacgcgggcttttcaaaaaagctggcaaacttaacatcaccaaaactactcctaagaaggatggttctattaatacgagccagtccatgcatgttggcgagttcaaccagaagctggtcgaggcgtctactcagtttaagaagaagcaggagaaagggacaatcgatgtctggtggctattcgacgacggcgggctcactctcctgattccctacatcctaaccctgcgcaagaagtggaaagactgtaagcttcgtatttacgttggtgggaagattaatcggatcgaggaagagaaaatcgttatggcctctctgctgtcgaagtttcgcattaagttcgctgatattcatattatcggtgacataaacattaggccaaacaaggagagctggaaggtgttcgaagagatgattgaaccctatcgactgcacgaaagctgcaaggacttgactaccgcagaaaagctaaagagagagacgccctggaagataacagacgccgaactggaggcggtgaaggaaaagagctatcgccaggttcggcttaatgagctgctgcaggagcacagccgcgcagccaacctcatcgtgctgagcctgccagttgcacgcaaaggaagcatctctgatttgctgtatatggcttggctagagattctcaccaagaatttgcctccagtgctgctcgtgagaggcaaccataagaacgtcctcactttctactcctag

SEQ ID NO: 7172 - DNA, 1782 bp, Artificial Sequence
  derived and/or modified sequence
atgctgaacatctggggcgtgatgctgttcatccggctgagctggattgtaggggaggctggcattggactaggggtgttgattatccttctctcgacaatggtcacctctattaccggactgtccacctccgcaattgccaccaatggtttcgtgcgcggtggaggcgcctattacttaatctctagatctctcggcccggagttcggcgggtctattggactgattttcgcgtttgctaacgctgttgcggttgccatgtacgtagtgggattcgcagaaactgtagtcgatctcctgaaggaaagtgattctatgatggtggatccaactaatgatattcgtatcattgggagtatcaccgtggtgatcctactgggtattagcgtcgccggcatggagtgggaagctaaggcgcaggtgatactcctggtcatccttctcattgccattgccaacttctttattggcaccgtcatcccctctaataatgaaaaaaaatctcgcggcttctttaactaccaggctagcatatttgccgagaactttggacccaggttcaccaaaggggagggcttctttagcgtctttgctatcttctttcccgctgcaactggcatcctggccggggcaaacataagcggagacctggaggaccctcaggatgccataccacgcggtaccatgcttgctatcttcataaccactgttgcttacctgggagttgcgatttgtgttggagcatgcgtggtcagggatgcgactggaaatatgaacgacaccatcatctcaggaatgaattgtaatgggtctgcagcttgcggtttggggtatgatttcagcagatgcagacacgagccttgccaatacgggttgatgaacaactttcaagtcatgagcatggtttcaggatttggtcccttgatcactgcgggtatcttctcggcgaccctgagcagtgccctggctagcctggtgtcagcccctaaggtatttcaggccttgtgcaaggataacatctacaaggcccttcagttttttgctaagggatacggaaagaacaacgaacccctccgaggctatatcttgacgtttctcattgcaatggctttcatcctaatcgccgaactgaacacaatcgcaccgataatctcgaatttctttctggcttcatatgccttgataaactttagctgctttcacgctagctacgccaaatcccctggttggcggccagcctatggcatctacaatatgtgggtcagcctgttcggcgcggtgctttgctgcgccgtgatgtttgtgataaactggtgggccgccgtgatcacctatgttatagaattttttctctatgtgtatgtgacttgtaaaaaacctgatgtgaattgggggagttccacacaggccctgagttacgtttcagcactcgataatgctctcgagttaacaacagtagaggaccacgtaaagaacttccggccacaatgcatcgttctgaccgggggccccatgacgcgaccagcccttttagatataactcacgcatttactaaaaattcagggttatgtatctgttgcgaggttttcgtgggcccgaggaaactgtgtgtcaaggaaatgaatagtggtatggccaaaaccggtctggcatataaagagcagaatcagggtttcctgtgctgtagtggtgggcgcctgttccagggctggtgccctaaatctagctccggcctgcggctcagaaaaaacgagaccaagcatagcggcgattggatctag

SEQ ID NO: 7173 - DNA, 3300 bp, Artificial Sequence
  derived and/or modified sequence
atgagcctgaacaacagcagcaacgtgttcctggacagcgtgcccagtaacacaaacaggtttcaggtgagcgtgattaatgaaaaccacgagtcctccgctgctgccgatgacaataccgatcctccccactacgaggagacttcttttggcgacgaagcgcagaagagactgcgcataagttttaggccggggaatcaggagtgctacgacaactttttgcagtccggagagactgccaaaaccgatgcttcttttcacgcctacgactcccatactaacacctactatctgcaaacgttcggtcacaatacaatggatgccgtacctaaaatagaatactacagaaacactggaagcatctctggacccaaagtcaaccgcccctctctcctcgagatccatgagcagttggccaagaacgtggcggtcaccccatctagtgccgatagagtggccaatggagacggcattcctggggatgaacaggccgagaataaagaagatgatcaggcaggtgtagtgaaattcggatgggtgaagggcgtgcttgttaggtgtatgctgaacatctggggagtgatgttattcatccgcctgtcctggattgtgggagaagctgggattggcctcggagtcctgatcatactactttcgacaatggtcacttcaattaccggtctgtccacctctgcaattgccaccaatggctttgtgagagggggcggggcctattatctgatttctcgcagtttagggcccgaatttggcggttctattggccttattttcgccttcgccaacgcggtcgccgttgcaatgtacgtggttgggtttgccgaaacagtagttgatcttttgaaggaaagcgatagcatgatggtcgaccccaccaacgacattcgaattatcggtagtattacggttgttattttactcggtatctctgtggccggcatggagtgggaagccaaggcccaggtcatcttacttgttatactcctcattgcaatagccaacttcttcatcggcaccgtcatcccttctaataacgagaaaaaatctagaggcttcttcaattatcaggcatcgatcttcgctgagaactttgggccccgatttactaaaggcgaggggttctttagtgtcttcgcaatcttctttcctgctgcaaccggcatcctggccggagcaaatatttctggggacctggaagaccctcaggatgccattcctcgggggaccatgcttgccatatttattacgaccgtggcttacttgggggtggccatctgtgtgggagcctgcgtggttcgtgatgccactggtaacatgaacgatacaatcataagcggcatgaattgtaatggttccgccgcatgcggcttagggtatgacttctccagatgtcgccacgaaccttgtcagtacgggttgatgaataattttcaagtgatgtctatggtaagcggcttcggccctctcattacagcaggcatcttctccgctacgctgagtagcgcactcgccagtttggtctccgctccaaaggtgttccaggcactttgcaaggacaacatttacaaggccctccaatttttcgccaaagggtacggtaagaataacgagccgctgcgcggatacatccttacattcctgatagccatggccttcatcttgatcgccgagctgaacacaatcgctccaatcatttccaattttttcctggcaagctacgctctgatcaactttagctgctttcatgcgtcttatgccaagtccccgggatggagacccgcatacggaatctataacatgtgggtaagcctattcggggccgtgctatgctgtgccgtgatgttcgtcattaactggtgggcggctgtaattacctatgtcattgaattttttctatatgtctatgtaacctgcaaaaaacccgacgtaaattggggaagctctactcaggcactgtcatatgttagcgccctggataacgcgctcgaactgaccactgtggaagatcatgtcaaaaactttcgcccacagtgtattgttctcactggaggtccaatgaccagaccagccttactagatattacacatgcatttaccaaaaacagcggtctttgtatctgctgtgaggtgtttgtgggaccacgaaagctgtgtgtgaaggaaatgaattccggtatggccaagaagcaggcctggctcattaaaaacaaaattaaagcattctacgccgcagtcgccgccgattgttttagagacggagtccggtcactcctgcaggcaagcgggctgggccggatgaagccaaatacactagtcatcggctacaagaagaactggcgaaaggctccccttaccgagatcgagaactacgtggggatcatccacgacgcgtttgattttgaaattggagtagttatcgtccggattagccaaggtttcgacatctctcaggtgctccaggttcaggaggagcttgagaggttggagcaggagcggttggctctggaggctactatcaaggacaatgaatgtgaagaggagtccggtgggatacgcgggttattcaaaaaagctggcaagctcaatatcactaagaccacaccaaaaaaagatggttctataaatacgagccagtccatgcacgtcggtgagtttaaccagaaattggtggaggccagtactcagttcaagaaaaagcaagaaaaaggcacaattgatgtttggtggctgtttgatgatggagggttgaccctgctgataccatacatacttaccctgcgcaagaagtggaaagactgtaagctgcgcatttatgttggcggaaaaataaaccgaatcgaagaagagaagatcgtgatggcgagcctgcttagcaaattccgaatcaagttcgctgacattcacattattggagatatcaacattcgcccgaacaaggaatcatggaaggtctttgaggagatgatcgaaccttatcgcctgcatgagtcatgcaaggatctgactaccgccgaaaaactgaagcgcgaaacgccttggaagataacagacgcggaactggaggcggtcaaagaaaaaagttaccgccaggtgcgtctcaatgagttattgcaggagcactcccgcgcagcaaacctgatcgtgctgtcattacccgtcgcacgcaagggaagcatcagtgacctgctgtacatggcgtggcttgagatcttgactaagaacctcccgccagttctcctggttagaggaaaccataaaaacgtgcttactttttactcatag

SEQ ID NO: 7174 - DNA, 1947 bp, Artificial Sequence
  derived and/or modified sequence
atgctgaacatctggggcgtgatgctgttcatccggctgagctggattgttggcgaagcagggattggtctcggcgtgttgataattttgctcagtaccatggtgacttcaatcactggtctctctactagcgcaatcgccacaaacggatttgtgcgcggggggggggcctactaccttattagtagatccctgggaccggagtttggaggatccataggtctgattttcgcgttcgccaatgcagttgccgtggccatgtatgttgtgggctttgcagaaactgtggtggatctgctaaaggaatccgacagcatgatggtggaccctacaaatgacatacgcatcatcggcagcattacagtggtgatcctattaggcatcagcgttgccggtatggagtgggaggcaaaggcccaagttattctcctggtcattcttctcattgctatcgccaatttttttataggtacagtgataccaagtaacaatgaaaaaaagagccgcggattttttaattaccaggcatcgattttcgcggaaaacttcggcccccgattcactaaaggggaaggcttcttttccgtgttcgcaattttctttcctgccgcgactggcatcctcgcaggcgccaatatctccggtgatctggaagacccccaggatgctatccctcggggaaccatgcttgctatctttatcaccaccgttgcatatttaggcgtcgccatctgtgttggggcgtgtgtggtccgagatgctactggtaacatgaatgacaccatcatttccggaatgaattgcaatggttcggcagcgtgtgggctaggctatgatttcagtaggtgccgtcatgagccatgtcagtacggactgatgaacaatttccaggtgatgtcaatggtgagcggttttggacccctcattactgcaggtatcttctctgccactctgtcatctgctctggcctcccttgtatccgctccaaaagtgttccaggcgctctgcaaagacaacatttacaaagccctccagttttttgcaaaaggatatgggaaaaataacgaaccgttacggggttatatacttaccttcctgattgctatggcatttattctcattgccgagttgaatactattgcccctatcatcagtaacttcttcctggcctcatatgcgctgattaatttctcttgctttcatgcttcttatgcaaagtcacccggttggagacctgcttatggcatttacaacatgtgggtatcgctgttcggtgctgttctgtgctgcgccgtgatgttcgtgattaactggtgggccgcggtgatcacttatgtgattgaattcttcctttacgtatatgtgacttgtaaaaaacctgatgtaaattggggatcaagcacccaggccctgtcctatgtttcagctctggataacgccctcgagctgaccacagtcgaagatcatgtcaagaattttagaccgcagtgtatagttttaacgggtggtccgatgacccgacccgctcttctggacatcacccacgcttttaccaagaacagcggactgtgtatctgttgtgaggtttttgtcgggccgcgcaaactgtgcgtcaaggaaatgaactccggaatggctaagaagcaggcctggctgataaagaacaaaattaaagcgttctatgccgcagtggccgccgactgttttagagacggcgtgaggtcactgttgcaggcttcgggactaggtcgtatgaagccaaatacactcgttatcggctataaaaagaactggaggaaggcaccactgaccgaaatcgagaattacgtcggtatcattcatgacgctttcgatttcgagataggcgtcgttatcgtgcgaatcagccagggttttgacattagccaggtattgcaagtgcaggaagagttagaacgcttggagtag

SEQ ID NO: 7175 - DNA, 1293 bp, Artificial Sequence
  derived and/or modified sequence
atgagtctgaataactccagcaatgtgttcctggacagcgtaccgagcaacaccaatcggttccaagtctccgtgatcaatgagaaccatgaatcctccgccgcagcagacgacaacacggacccaccacactatgaggagactagttttggggacgaggctcagaaacggcttcgcatttccttccgcccaggaaaccaggaatgctacgacaattttctgcagtctggggaaacagctaagactgatgctagctttcatgcatatgacagccatacgaacacctactatctgcagacttttggccacaatacaatggatgctgtcccaaagattgagtattaccgaaacaccggcagtatctctggacctaaggttaataggccgtcactcctagagatccacgaacagctggctaaaaacgtggcggtgaccccctcctccgccgatcgcgttgccaacggagatggtataccaggtgacgaacaggctgaaaataaggaagatgatcaagctggtgtcgtcaaattcggttgggtcaaaggcgtcctggtaaggtgcatgttaaatatctggggggtcatgctttttatcaggcttagttggattgtcggcgaggctgggatcggcctaggtgttctcatcatattactttccacgatggtgacaagcattacgggcctgagcacctctgctatcgccacaaacggctttgtcaggggcggaggcgcttattacctgattagcagatctttgggacccgaattcggaggtagcattggtctgattttcgccttcgctaatgctgtagccgtggctatgtacgtggtcgggttcgcggaaaccgttgtagatctgctaaaggagagtgactcaatgatggtcgaccctactaacgatatcagaattattgggtctattacggtggtgattctcttaggaatctcagtggccggaatggaatgggaggctaaggcgcaggtcattctcctcgttatcctgctcattgccatcgccaatttcttcattggaactgttatacccagcaacaatgaaaagaagagccgcggattcttcaactatcaggcatcaattttcgctgaaaactttggcccacgattcacaaaaggtgaaggctttttctccgttttcgcaattttcttccctgctgccacggggatccttgccggagcgaacatctcaggagaccttgaggctctgagaaagcagggcgcttccccgttgccccagggcgctcagtcacgcaggcgcaggcagacaagtctgatttag

SEQ ID NO: 7176 - DNA, 3300 bp, Artificial Sequence
  derived and/or modified sequence
atgtccttgaataacagctccaatgtttttctagactcagtcccttccaatactaatcgattccaggtgagtgtgattaatgaaaaccacgagtcttccgccgcagctgacgacaataccgatccccctcattacgaggaaactagtttcggggatgaggctcagaaaagacttaggattagctttcgcccaggaaatcaggagtgctacgacaacttcctccagagcggcgaaacagctaaaactgatgcttccttccatgcctatgacagccataccaacacctactacctccagacattcggacacaataccatggatgcggtgcccaagatcgagtactataggaataccggatctatcagtggacctaaagttaacagaccctcacttctcgagattcatgaacagctggccaaaaatgtagctgtgactccatcatcagctgaccgtgtggcaaacggcgatggaattcctggggacgaacaggccgagaacaaagaagatgatcaggctggcgttgtgaagttcggatgggtgaaaggtgttctagtgcggtgcatgctgaacatttggggcgtgatgttgttcattaggctgagctggattgtgggcgaggctggtataggactgggcgtgctgatcattttactgtctaccatggtgactagcatcacgggattaagcacctcggctatagcaactaatggttttgttcgcggaggcggagcttactatctgattagcagaagtcttggccctgaattcggcggttctattggccttattttcgctttcgccaacgccgtggcagtcgccatgtatgtcgttggcttcgccgaaacagtggtcgacttgcttaaagaaagcgatagtatgatggtggaccccaccaatgacatcaggataatcggaagcattaccgtggtcatcctgcttggtattagtgtcgctggcatggaatgggaagccaaggctcaggtgatactgctggtgatcctgctcatcgctatcgcgaactttttcatcggtactgtgataccgtctaataacgagaagaaatccagagggttctttaattaccaagcatccatcttcgccgagaattttggccctcgcttcactaaaggggaagggtttttctcggtgttcgcaatcttcttccctgctgcaacaggcatccttgctggcgcaaacatttccggcgatctggaagatccgcaggatgccatccccagggggacaatgctagcaatcttcatcactaccgttgcctatttaggggtggctatatgcgtgggtgcatgtgtcgttcgagatgccacgggtaacatgaacgacactataatctccggtatgaattgtaacggttcagccgcatgcggacttggatacgatttcagtcggtgcagacacgaaccttgtcaatacgggttaatgaataactttcaagtgatgtctatggtgtctggcttcggccctctcatcacagccggaatcttctctgcaaccttgagtagtgcattggcctcgctggtctccgccccaaaagtgttccaagcgctgtgcaaggataacatttacaaagcactgcagttttttgccaagggttacggtaaaaataatgagcctctgaggggatatattctgaccttcctaatcgctatggctttcatcctgattgcagagctgaacaccatcgccccaatcatctctaacttcttcctggcttcttacgccctaatcaatttcagttgctttcacgcgtcgtacgccaaatcacctgggtggaggccagcgtatggaatctataatatgtgggtgtccctgttcggtgccgtcctgtgttgcgccgtgatgttcgtcataaattggtgggcagccgtaatcacctacgtgattgaattcttcctctatgtgtacgttacctgtaaaaagccagacgtgaactggggctcatcgacccaggctcttagttatgtgagcgcgctggataatgcactagagctgaccactgtcgaggatcatgttaaaaacttcaggccgcagtgcatcgtgctcactggaggacccatgacccggcctgccttgcttgacattacgcacgcattcacgaagaactctggcctgtgtatttgttgtgaggtctttgtaggaccaagaaagctctgtgtgaaggaaatgaattctggcatggccaagaaacaggcctggttaatcaagaataagatcaaagccttttatgctgccgtagctgcagactgctttagggacggtgtgcggtcactactgcaggcctctggcctggggaggatgaagccaaataccctcgtgatagggtacaagaaaaactggagaaaggcaccactgacggagatcgaaaattacgttggtatcattcacgatgcctttgactttgaaatcggggtggtgattgtgaggatttcacagggatttgacatatcacaggtcctgcaggtccaagaggagctcgagagactggaacaggagcgactggccctagaagcaacgattaaggataacgagtgcgaggaggaatcaggaggcatacggggactgttcaagaaagccggaaaattgaatatcactaaaactacacccaagaaagacggctccattaatacctcacaaagcatgcacgttggcgaattcaatcaaaaactggtggaagccagcacccagtttaaaaaaaagcaggaaaagggcaccatcgacgtctggtggctctttgacgatggtggcttaactttgctgatcccttacattctgacacttcgaaaaaaatggaaggattgcaaactgcggatctacgtgggtggcaagatcaaccgcatcgaggaagaaaaaatcgtgatggcgagccttctttctaagttccgcataaaattcgctgatattcatattattggggatattaacatccggccaaacaaggaatcttggaaagtttttgaagagatgattgagccctatagattacatgaatcttgcaaggacttgaccaccgcagagaagctcaaacgtgaaacgccctggaaaatcaccgacgcagagttggaagccgtgaaagaaaaatcttaccgtcaggtgcggctcaatgaacttctacaggagcattcacgtgcggcaaatctgatcgtgctaagcctgccagtggccagaaaaggctctatatccgaccttctatatatggcttggttagagatcctgacaaagaacttgccccctgtgttattagtaaggggaaatcacaagaacgtgcttaccttctactcttag

SEQ ID NO: 7177 - DNA, 1782 bp, Artificial Sequence
  derived and/or modified sequence
atgctaaatatctggggagtgatgctatttattcgcctctcttggattgtgggagaagcaggaatcggactgggtgtactgattatcctcctgtccacgatggtaaccagtattaccggacttagcacgtcagccattgccaccaacgggttcgtaagaggcggaggagcctattacttaatatctagatcgctgggtccggaattcggcggttccatcgggctcatctttgcctttgctaatgcagtggctgtcgctatgtacgtggtgggctttgcagaaaccgtggtggacttacttaaggaaagcgatagtatgatggtggaccctaccaacgatatcagaattataggctcaattaccgtggttatcttactgggtattagtgtggccggaatggaatgggaggcgaaggctcaggtaattcttctcgtcattctgttaatcgccatcgccaactttttcattgggacagttattccttccaataacgaaaaaaagtcccgtggatttttcaactatcaggcctcaatctttgccgaaaatttcggcccaaggttcacgaaaggagagggtttcttctccgttttcgccatcttctttcccgcagctaccggtatcttggccggagccaatatctcgggcgacctagaagaccctcaggacgcaatcccgagggggacaatgcttgctatctttattacaaccgttgcttaccttggtgtggctatttgcgtcggcgcatgcgtagtgagagacgcaacagggaacatgaacgacaccattatcagcgggatgaattgtaacggcagcgcggcatgtggcttgggctatgacttttcgcgatgtcgccacgagccttgtcagtacggactaatgaataacttccaggtgatgtcaatggtgagcgggtttggtcccctgatcaccgcgggtattttctcagcaacccttagcagcgcactggcatcattggtgtccgcaccaaaagtgtttcaggcactgtgtaaagataacatttataaggcacttcaattcttcgctaagggttatggaaagaacaatgaacctctgagggggtacatcctgaccttcctgatagcgatggcttttatacttatcgctgaactgaacaccatcgcgcctatcatcagcaatttttttcttgccagctacgcgctaataaacttctcctgcttccacgcgtcctacgctaagtctcccggttggcgaccagcgtacggaatttataacatgtgggtgagtttattcggcgcagtgctgtgctgcgccgtcatgttcgtgatcaattggtgggccgcagtcattacatatgtgattgagttttttctgtacgtgtacgtaacctgcaaaaaacctgatgtgaattggggttcatccacacaggccctgtcttacgtgtcagcccttgacaacgccctggaactgacaacagtggaagaccacgttaagaattttaggccacagtgcatcgtgttaaccgggggaccgatgacaagacccgctcttttggacattacacatgccttcactaagaactcggggctgtgtatatgctgtgaagtgttcgtgggccctaggaagctgtgtgttaaagagatgaattctggcatggctaaaacaggacttgcctacaaggaacagaatcagggtttcttgtgctgtagcggcggtcgcctcttccaggggtggtgcccaaagagcagttccggcttacggctacgcaagaatgagacgaagcacagcggagactggatctag

SEQ ID NO: 7178 - DNA, 3300 bp, Artificial Sequence
  derived and/or modified sequence
atgagcttgaataacagttccaacgtctttttagatagcgtgccaagtaatacaaaccgtttccaggttagcgtaatcaacgaaaatcacgagtcaagcgccgcagccgacgataataccgacccaccccattatgaagaaacctcatttggcgacgaggcccaaaaaaggcttcgcatttccttccggccaggaaaccaggagtgttatgacaacttcctgcaaagtggtgagaccgcaaagaccgatgcatcttttcatgcttatgacagtcatactaacacctactatttgcaaacctttgggcacaacacaatggacgccgtcccaaagatcgaatactaccgaaacaccgggtctatatccggcccaaaggttaataggccatccctgctggagatacacgagcaattggcaaaaaatgtcgctgtcacccccagctccgccgatcgcgtggccaatggcgatggcattcccggagatgagcaagctgaaaataaagaggacgatcaggctggagttgttaaatttgggtgggttaaaggagtgttggtgagatgtatgctgaacatctggggagtcatgcttttcatccggctctcctggatcgtgggggaagctggaattggattgggggtgctcatcattctgctctctacaatggtcacctctattacagggttgagtacaagcgctattgctactaatgggttcgttcgcggagggggagcctactacttgatctctcgctctctgggaccagaattcggcggatcgattggtctgatttttgcattcgccaatgccgttgcggtggccatgtatgttgttggatttgctgagaccgtcgtcgacctcttaaaggagtccgattccatgatggtagatcccactaatgatatccgtatcatcggatctataaccgtcgtgattctgctggggattagtgtggcaggcatggagtgggaggcaaaggcacaggtaatcctgttagtcattctcttaattgcgatcgcaaattttttcatcgggaccgtgataccaagtaataacgagaagaagagccggggattttttaattaccaggccagcatctttgcagaaaatttcggacccaggttcactaagggcgagggatttttcagtgtgtttgccattttcttcccagcagctactggaatactcgccggtgccaatatctctggcgaccttgaggacccccaggatgctattcccagaggcaccatgcttgcaatctttattaccacagtcgcctatttgggggtggcgatatgtgtgggagcctgtgtggtgcgcgacgccactggcaatatgaacgacactatcatctcaggcatgaattgtaatggatcagccgcttgcgggcttggctatgattttagccgctgcaggcatgagccatgccaatatggcctgatgaacaattttcaggtgatgtcaatggtctcggggtttgggccactgataaccgccggaattttttctgcgactctctcttctgctctggccagcctcgtgagtgcccctaaagtttttcaagcattatgtaaggataacatttacaaagccctgcagtttttcgcaaaaggctacggaaagaataacgagccattgcgagggtacatcttaacctttctcatagcgatggcctttattctcattgcagagctcaacacaatagctcctattatttctaatttttttctggcaagctatgctttaatcaacttctcttgcttccacgcttcctatgcaaagtccccgggttggcggcctgcatacggtatttataacatgtgggtgtccttatttggcgcagttctctgctgcgcggtgatgtttgtcatcaattggtgggccgctgtcatcacttacgttattgagttctttttgtatgtttatgtcacatgtaaaaagcccgatgtcaactggggaagttcaacacaggccttgtcgtatgttagcgccctggacaatgcccttgaactgaccacggtggaggaccacgtgaaaaatttccggccacagtgtatagtccttactggcggtcccatgacacgcccagcattgcttgacatcactcacgcgttcacaaagaattccggcctttgcatttgctgcgaagtgtttgtgggtcccagaaaactttgcgtcaaggagatgaatagcggcatggccaagaagcaagcctggcttatcaaaaataaaattaaggctttttacgctgcagttgcagccgattgctttcgcgatggtgtgagatcactcctccaggcttcaggcttagggagaatgaagcctaacacactggtgattggctataagaagaattggagaaaagccccactgacggagatcgagaactacgtgggcattattcatgacgccttcgatttcgaaattggagtggtaatcgtacggattagtcaaggcttcgacataagtcaggtgcttcaggtgcaggaagagctggagcggctcgagcaggaacgacttgccttggaggccacgataaaagataatgagtgcgaagaggagtccggcggtattagaggattatttaaaaaggctggcaaacttaatatcacaaagacaactcccaagaaggatggctccataaacacatcacagtctatgcacgtcggagagtttaatcagaaattggtcgaagcatctacacaatttaagaagaaacaggaaaagggaactattgatgtgtggtggctttttgatgacggaggccttaccctcctgataccctatattcttaccctgagaaaaaagtggaaggactgtaagttaagaatctacgtgggtggaaagattaaccgtatcgaggaggaaaaaatagtgatggccagtctccttagcaaattccgaattaagtttgccgatatccacatcattggtgacataaacattagacctaataaagaatcatggaaagtctttgaagaaatgatagagccatacaggttacatgagagctgtaaagatcttactacagctgagaaattgaaaagggagacaccctggaagatcactgatgctgagctcgaggccgtgaaagagaaaagctaccggcaagtaaggcttaacgaactacttcaggagcattcaagggccgctaatttaattgtacttagccttcccgtggctcggaaagggagcatctcggacctgctctacatggcctggctcgagattctgacaaaaaatttgcctccagtgctgttggtcagaggcaaccacaaaaacgtgctgacgttctacagctag

SEQ ID NO: 7179 - DNA, 1947 bp, Artificial Sequence
  derived and/or modified sequence
atgctcaatatttggggcgtcatgctgttcattagactgagctggatcgtgggggaggccggaatcgggcttggcgttctcatcattctattatctaccatggttacctctattacagggctgtctactagtgcaattgctaccaatggcttcgtgcgcggaggaggcgcttattacctgattagcaggtctcttgggccagagtttggaggatccatagggctcatcttcgctttcgctaatgctgtggcagttgccatgtatgtggtgggcttcgcggaaaccgtcgtggatctcctgaaagagagcgattcgatgatggtggacccaactaatgacattcggataatcggtagcataacagtcgtgatccttctgggcatctctgtcgcaggcatggaatgggaagcgaaggcccaagtgatcctgctggtcattctgctcatagccatagctaactttttcattgggacagtgatcccctctaataatgagaaaaagagccgcggattctttaactaccaggcatccattttcgcggagaatttcggtcctcgctttactaagggggagggcttttttagtgtatttgccatcttcttcccggcagcaacaggcatccttgctggagcaaacatcagcggggacctcgaggatccacaagacgccattcccaggggtacaatgcttgcgatctttattaccaccgttgcttatttgggagtggctatttgcgtcggggcatgcgttgtacgcgatgccacgggaaatatgaatgacacaattatctctggcatgaactgtaacggttctgccgcatgcggtctggggtacgacttttctcgatgccgtcacgagccatgtcagtacggcctaatgaacaatttccaggtgatgtcaatggtgtcaggctttggcccactcattactgccggaatcttcagtgctaccctaagcagcgccctggccagcctcgtgtccgctccgaaggtgttccaggctctttgcaaggacaatatctacaaggctctccagttctttgccaaagggtacggaaagaataacgaaccgctgagagggtacattctgacatttctcatcgccatggccttcatcctgatcgctgaactcaacacaattgcccctattatcagcaacttcttcctagcaagctatgcgctgataaacttctcttgtttccacgcgtcatatgccaagtctccagggtggaggcctgcctacggcatttacaacatgtgggtgagcctgttcggtgccgtgctgtgctgtgctgtgatgtttgtgattaactggtgggcagctgtgattacttacgtcatcgagtttttcctgtacgtttacgtgacctgcaagaaacctgatgttaactggggctcctccactcaggcattgagctacgtgtctgctctcgacaacgctttagaactgaccactgttgaggatcacgttaaaaattttcgtcctcaatgcatcgtgctgaccggcggtccgatgactaggcccgcattgcttgatattacccatgcttttacaaagaattctggcctgtgtatctgttgcgaagtttttgtcggccctagaaaattatgtgtgaaagagatgaattctggtatggcaaaaaagcaggcttggctgatcaagaataaaattaaagccttctacgccgctgtggcggcagattgcttccgagacggcgtccggtcactgctgcaggcgagcggcttggggagaatgaaaccaaatacactggtgattggttacaaaaaaaattggcgaaaggcccctctgacagagatcgagaactacgtgggcatcattcacgatgccttcgacttcgaaattggggttgtgatcgttcgaatttcgcaagggtttgacatttcccaggtgctccaggtgcaggaggagcttgagcgactggagtag

SEQ ID NO: 7180 - DNA, 1764 bp, Artificial Sequence
  derived and/or modified sequence
ctttgaagaacatcctgaagattatatcggagacaatatatcaagaatctatttattgaatcatctagaacaaaagccaggagctccctaatggaagcacattagtgtttattttgatgaagaaatatatagattttttaaaacaaccacaaagtagatagctcagtaaaaaatcaattttggaagatgtcactgaacaactcttccaatgtatttctggattcagtgcccagtaataccaatcgctttcaagttagtgtcataaatgagaaccatgagagcagtgcagctgcagatgacaatactgacccaccacattatgaagaaacctcttttggggatgaagctcagaaaagactcagaatcagctttaggcctgggaatcaggagtgctatgacaatttcctccaaagtggagaaactgctaaaacagatgccagttttcacgcttatgattctcacacaaacacatactatctacaaacttttggccacaacaccatggatgccgttcccaagatagagtactatcgtaacaccggcagcatcagtgggcccaaggtcaaccgacccagcctgcttgagattcacgagcaactcgcaaagaatgtggcagtcaccccaagttcagctgacagagttgctaacggtgatgggatacctggagatgaacaagctgaaaataaggaagatgatcaagctggtgttgtgaagtttggatgggtgaaaggtgtgctggtaagatgcatgctgaacatctggggagtcatgctcttcattcgcctctcctggattgttggagaagctggaattggtcttggagttctcataattcttctttccaccatggtaacttctattactgggttgtcaacttctgcgatagcaactaacgggtttgttcgtggaggtggggcctactatcttatttccagaagtttagggcccgagttcggtgggtcaataggcctgatctttgcttttgctaatgcagtggctgttgctatgtatgtggtgggatttgctgagactgtagtagatcttcttaaggagagtgattcgatgatggtggatccaaccaatgacatccggattataggctccatcacagtggtgattcttctaggaatttcagtagctggaatggaatgggaggcaaaggcccaagtcattcttctggtcattcttctaattgctattgcaaacttcttcattggaactgtcattccatccaacaatgagaaaaagtccagaggtttctttaattaccaagcatcaatatttgcagaaaactttgggccacgcttcacaaagggtgaaggcttcttctctgtctttgccatttttttcccagcagctactgggattcttgctggtgccaatatctcaggagatttggaggcactgaggaaacaaggagcttcacctctccctcaaggagctcagagtcgaaggaggagacagacttcccttatatgaattagaacaagcaagagtagaatcaagtgcaaaggaaagaggaagcagaaattgcctgtcccctcaaaaagtaaaggaagactttcagaagaggggacactcaatccaggttttgagggatgaacaggagtttgccgacaggacaaagaagagacggacatttgaaacagaaggaatgggatgtaagaaggcaccaagaaagatgctgctaatgagaattattttaagtgcagagtagtgtatgtaatccttcattaatatattaataaacatatttataaataa

SEQ ID NO: 7181 - DNA, 4707 bp, Artificial Sequence
  derived and/or modified sequence
tacatttcctcagaagaaggctccttggtgctttgaagaacatcctgaagattatatcggagacaatatatcaagaatctatttattgaatcatctagaacaaaagccaggagctccctaatggaagcacattagtgtttattttgatgaagaaatatatagattttttaaaacaaccacaaagtagatagctcagtaaaaaatcaattttggaagatgtcactgaacaactcttccaatgtatttctggattcagtgcccagtaataccaatcgctttcaagttagtgtcataaatgagaaccatgagagcagtgcagctgcagatgacaatactgacccaccacattatgaagaaacctcttttggggatgaagctcagaaaagactcagaatcagctttaggcctgggaatcaggagtgctatgacaatttcctccaaagtggagaaactgctaaaacagatgccagttttcacgcttatgattctcacacaaacacatactatctacaaacttttggccacaacaccatggatgccgttcccaagatagagtactatcgtaacaccggcagcatcagtgggcccaaggtcaaccgacccagcctgcttgagattcacgagcaactcgcaaagaatgtggcagtcaccccaagttcagctgacagagttgctaacggtgatgggatacctggagatgaacaagctgaaaataaggaagatgatcaagctggtgttgtgaagtttggatgggtgaaaggtgtgctggtaagatgcatgctgaacatctggggagtcatgctcttcattcgcctctcctggattgttggagaagctggaattggtcttggagttctcataattcttctttccaccatggtaacttctattactgggttgtcaacttctgcgatagcaactaacgggtttgttcgtggaggtggggcctactatcttatttccagaagtttagggcccgagttcggtgggtcaataggcctgatctttgcttttgctaatgcagtggctgttgctatgtatgtggtgggatttgctgagactgtagtagatcttcttaaggagagtgattcgatgatggtggatccaaccaatgacatccggattataggctccatcacagtggtgattcttctaggaatttcagtagctggaatggaatgggaggcaaaggcccaagtcattcttctggtcattcttctaattgctattgcaaacttcttcattggaactgtcattccatccaacaatgagaaaaagtccagaggtttctttaattaccaagcatcaatatttgcagaaaactttgggccacgcttcacaaagggtgaaggcttcttctctgtctttgccatttttttcccagcagctactgggattcttgctggtgccaatatctcaggagatttggaggatccccaagatgccatccccagaggaaccatgctggccattttcatcaccactgttgcctacttaggggttgcaatttgtgtaggggcctgtgtggtccgagatgccaccgggaacatgaatgacaccatcatttctgggatgaactgcaatggttcagcagcatgtgggttgggctatgacttctcaagatgtcgacatgaaccatgtcagtacgggctgatgaacaatttccaggtcatgagcatggtatcagggttcggccccctcatcactgcgggaatcttttctgcaacactctcctccgccctggcctcccttgtcagcgcacccaaagtgttccaggctctgtgcaaggacaacatctacaaagccctgcagttttttgcaaagggatatgggaaaaacaatgaacccctgagaggatatattctcacttttcttatagccatggcatttattcttattgcggaactgaacaccattgctcccatcatctccaactttttcctggcctcatatgcacttattaatttctcctgcttccatgcctcttatgccaaatctccaggatggagacctgcgtatggaatttacaacatgtgggtatctctttttggagctgttttgtgctgtgcagtcatgtttgtcatcaactggtgggcagctgtcatcacctatgtcattgaattcttcctttacgtctatgtgacttgtaagaagccagatgtgaactggggctcctccacacaggctctttcctacgtgagtgctttagacaatgctctggaattaaccacagtggaagaccacgtaaaaaacttcaggccccagtgcattgtcttaacagggggacccatgacaagacctgctctcctggacataactcacgcctttaccaagaacagtggcctttgcatctgctgtgaagtctttgtgggaccgcgcaaactgtgtgttaaggagatgaacagtggcatggcgaaaaaacaggcctggcttataaagaacaaaatcaaggctttttatgctgcagtggcggcagactgtttcagggatggtgtccgaagtcttcttcaggcctcaggcttaggaagaatgaaaccaaacactctggtgattggatataagaaaaactggaggaaagctcccttgacagagattgagaactacgtgggaatcatacatgatgcatttgattttgagattggcgtggttatagtcagaatcagccaaggatttgacatctctcaggttcttcaggtgcaagaggaattagagagattagaacaggagagactagcattggaagcgactatcaaagataatgagtgtgaagaggaaagtggaggcatccgaggcttgtttaaaaaagctggcaagttgaacattactaagacaacgcctaaaaaagatggcagcattaacacaagccagtcgatgcatgtgggagagttcaaccagaaactggtggaagccagcactcaatttaaaaagaaacaagaaaaaggcacaattgatgtttggtggttgtttgatgatggagggttaacacttcttatcccctatatcttaactctcagaaaaaaatggaaagactgtaaattaagaatctatgtgggagggaagatcaaccgcattgaagaagaaaaaattgtaatggcttcccttctgagcaaatttaggataaaatttgcagacatccatatcatcggtgacatcaacattaggccaaacaaagagagctggaaagtctttgaagagatgattgaaccatatcgtctccatgaaagctgcaaagatttaacaactgctgagaaattaaaaagagaaactccgtggaaaattacagatgcagaactggaagcagtcaaggaaaagagttaccgccaagttcgactgaatgaactcttacaggagcactccagagctgctaatctcattgtcctgagccttcccgtggcaagaaagggatccatatcggatttgttgtatatggcttggttggaaatcctcacaaagaacctcccacctgtcttactagttagaggaaatcacaaaaatgtcttgacattttactcttaaaacatgaaagattggaatacattttaacttaatgtaatgcataattaagaaacatgttccagtactttatgttgtaaatctgatctatggatatgcaaacctctggagaggatcctaccagattctacatacattgcataatttttatcagttaatgcgagcttttttttctcttctcagcttaaggggttgtcaaagccaatgttatccctagaaaaacatttttgtcactgctgttgataaacaagaaaatcaaggaaactcatgttggcttatgctcatgaaaaccaccaatgtgattgtaaacttctccagacaaacttaaccttttgtttcttaattttttgttttgagtgtttgcttctcagccctggtataggtctcagccccacagcaggatctcaataaatgcttattgacaggctggcatagtaaccacaggtggttatcaaaggaaaagaccaataggctggggaacataattatgcttggccccctcagaggcttatacctccaaagcagatttaaaaatcagtaactcaaaactttaagaagtagttgagtctacaaaatattcaaagcagttacctaaataaggttatttaatgtaacagattatatacttaaagtgatctgagcaatcattgataacatatggcttaaatttgctgctgcctgaaaagtatattaactagattagaagacaccatatactccaataaaatgaaatatattctattctcaatatataaactttaattgtactccctatcaaatattttgaaatttccatcacggcattactttgcatatttttttctaattaaatggttagtacagatgaaatctttatagatgactacttgaaaactaagtgctacaaattttcaaaccattattaagaaatatatcctgaatcatatatttagttactttctatagtgattgtatggatttaaaagaataattaaaatgtgaagttgaaaaacttgtaaaatttggaatatacagatactgatttttttcatttttgttagtatacctataatacataatcacattgacaaaccaatgaaaatattgattttctgatgaatggcttgatttttctccttgacatgttttgactgttcattctaactgaaaacatatatgggaaaatatgaacctgaaataaaagcactcaaattc

SEQ ID NO: 7182 - DNA, 2174 bp, Artificial Sequence
  derived and/or modified sequence
gttactgaaccgatcagcgaacacagacaaacgtgccaacacttaagtctactggctggacttcatctccatggcaacaagcatggaagaatgtggcagtcaccccaagttcagctgacagagttgctaacggtgatgggatacctggagatgaacaagctgaaaataaggaagatgatcaagctggtgttgtgaagtttggatgggtgaaaggtgtgctggtaagatgcatgctgaacatctggggagtcatgctcttcattcgcctctcctggattgttggagaagctggaattggtcttggagttctcataattcttctttccaccatggtaacttctattactgggttgtcaacttctgcgatagcaactaacgggtttgttcgtggaggtggggcctactatcttatttccagaagtttagggcccgagttcggtgggtcaataggcctgatctttgcttttgctaatgcagtggctgttgctatgtatgtggtgggatttgctgagactgtagtagatcttcttaaggagagtgattcgatgatggtggatccaaccaatgacatccggattataggctccatcacagtggtgattcttctaggaatttcagtagctggaatggaatgggaggcaaaggcccaagtcattcttctggtcattcttctaattgctattgcaaacttcttcattggaactgtcattccatccaacaatgagaaaaagtccagaggtttctttaattaccaagcatcaatatttgcagaaaactttgggccacgcttcacaaagggtgaaggcttcttctctgtctttgccatttttttcccagcagctactgggattcttgctggtgccaatatctcaggagatttggaggatccccaagatgccatccccagaggaaccatgctggccattttcatcaccactgttgcctacttaggggttgcaatttgtgtaggggcctgtgtggtccgagatgccaccgggaacatgaatgacaccatcatttctgggatgaactgcaatggttcagcagcatgtgggttgggctatgacttctcaagatgtcgacatgaaccatgtcagtacgggctgatgaacaatttccaggtcatgagcatggtatcagggttcggccccctcatcactgcgggaatcttttctgcaacactctcctccgccctggcctcccttgtcagcgcacccaaagtgttccaggctctgtgcaaggacaacatctacaaagccctgcagttttttgcaaagggatatgggaaaaacaatgaacccctgagaggatatattctcacttttcttatagccatggcatttattcttattgcggaactgaacaccattgctcccatcatctccaactttttcctggcctcatatgcacttattaatttctcctgcttccatgcctcttatgccaaatctccaggatggagacctgcgtatggaatttacaacatgtgggtatctctttttggagctgttttgtgctgtgcagtcatgtttgtcatcaactggtgggcagctgtcatcacctatgtcattgaattcttcctttacgtctatgtgacttgtaagaagccagatgtgaactggggctcctccacacaggctctttcctacgtgagtgctttagacaatgctctggaattaaccacagtggaagaccacgtaaaaaacttcaggccccagtgcattgtcttaacagggggacccatgacaagacctgctctcctggacataactcacgcctttaccaagaacagtggcctttgcatctgctgtgaagtctttgtgggaccgcgcaaactgtgtgttaaggagatgaacagtggcatggcgaaaacaggcctggcttataaagaacaaaatcaaggctttttatgctgcagtggcggcagactgtttcagggatggtgtccgaagtcttcttcaggcctcaggcttaggaagaatgaaaccaaacactctggtgattggatataagaaaaactggaggaaagctcccttgacagagattgagaactacgtgggaatcatacatgatgcatttgattttgagattggcgtggttatagtcagaatcagccaaggatttgacatctctcaggttcttcaggtgcaagaggaattagagagattagaaca

SEQ ID NO: 7183 - DNA, 3426 bp, Artificial Sequence
  derived and/or modified sequence
atcaattttggaagatgtcactgaacaactcttccaatgtatttctggattcagtgcccagtaataccaatcgctttcaagttagtgtcataaatgagaaccatgagagcagtgcagctgcagatgacaatactgacccaccacattatgaagaaacctcttttggggatgaagctcagaaaagactcagaatcagctttaggcctgggaatcaggagtgctatgacaatttcctccaaagtggagaaactgctaaaacagatgccagttttcacgcttatgattctcacacaaacacatactatctacaaacttttggccacaacaccatggatgccgttcccaagatagagtactatcgtaacaccggcagcatcagtgggcccaaggtcaaccgacccagcctgcttgagattcacgagcaactcgcaaagaatgtggcagtcaccccaagttcagctgacagagttgctaacggtgatgggatacctggagatgaacaagctgaaaataaggaagatgatcaagctggtgttgtgaagtttggatgggtgaaaggtgtgctggtaagatgcatgctgaacatctggggagtcatgctcttcattcgcctctcctggattgttggagaagctggaattggtcttggagttctcataattcttctttccaccatggtaacttctattactgggttgtcaacttctgcgatagcaactaacgggtttgttcgtggaggtggggcctactatcttatttccagaagtttagggcccgagttcggtgggtcaataggcctgatctttgcttttgctaatgcagtggctgttgctatgtatgtggtgggatttgctgagactgtagtagatcttcttaaggagagtgattcgatgatggtggatccaaccaatgacatccggattataggctccatcacagtggtgattcttctaggaatttcagtagctggaatggaatgggaggcaaaggcccaagtcattcttctggtcattcttctaattgctattgcaaacttcttcattggaactgtcattccatccaacaatgagaaaaagtccagaggtttctttaattaccaagcatcaatatttgcagaaaactttgggccacgcttcacaaagggtgaaggcttcttctctgtctttgccatttttttcccagcagctactgggattcttgctggtgccaatatctcaggagatttggaggatccccaagatgccatccccagaggaaccatgctggccattttcatcaccactgttgcctacttaggggttgcaatttgtgtaggggcctgtgtggtccgagatgccaccgggaacatgaatgacaccatcatttctgggatgaactgcaatggttcagcagcatgtgggttgggctatgacttctcaagatgtcgacatgaaccatgtcagtacgggctgatgaacaatttccaggtcatgagcatggtatcagggttcggccccctcatcactgcgggaatcttttctgcaacactctcctccgccctggcctcccttgtcagcgcacccaaagtgttccaggctctgtgcaaggacaacatctacaaagccctgcagttttttgcaaagggatatgggaaaaacaatgaacccctgagaggatatattctcacttttcttatagccatggcatttattcttattgcggaactgaacaccattgctcccatcatctccaactttttcctggcctcatatgcacttattaatttctcctgcttccatgcctcttatgccaaatctccaggatggagacctgcgtatggaatttacaacatgtgggtatctctttttggagctgttttgtgctgtgcagtcatgtttgtcatcaactggtgggcagctgtcatcacctatgtcattgaattcttcctttacgtctatgtgacttgtaagaagccagatgtgaactggggctcctccacacaggctctttcctacgtgagtgctttagacaatgctctggaattaaccacagtggaagaccacgtaaaaaacttcaggccccagtgcattgtcttaacagggggacccatgacaagacctgctctcctggacataactcacgcctttaccaagaacagtggcctttgcatctgctgtgaagtctttgtgggaccgcgcaaactgtgtgttaaggagatgaacagtggcatggcgaaaaaacaggcctggcttataaagaacaaaatcaaggctttttatgctgcagtggcggcagactgtttcagggatggtgtccgaagtcttcttcaggcctcaggcttaggaagaatgaaaccaaacactctggtgattggatataagaaaaactggaggaaagctcccttgacagagattgagaactacgtgggaatcatacatgatgcatttgattttgagattggcgtggttatagtcagaatcagccaaggatttgacatctctcaggttcttcaggtgcaagaggaattagagagattagaacaggagagactagcattggaagcgactatcaaagataatgagtgtgaagaggaaagtggaggcatccgaggcttgtttaaaaaagctggcaagttgaacattactaagacaacgcctaaaaaagatggcagcattaacacaagccagtcgatgcatgtgggagagttcaaccagaaactggtggaagccagcactcaatttaaaaagaaacaagaaaaaggcacaattgatgtttggtggttgtttgatgatggagggttaacacttcttatcccctatatcttaactctcagaaaaaaatggaaagactgtaaattaagaatctatgtgggagggaagatcaaccgcattgaagaagaaaaaattgtaatggcttcccttctgagcaaatttaggataaaatttgcagacatccatatcatcggtgacatcaacattaggccaaacaaagagagctggaaagtctttgaagagatgattgaaccatatcgtctccatgaaagctgcaaagatttaacaactgctgagaaattaaaaagagaaactccgtggaaaattacagatgcagaactggaagcagtcaaggaaaagagttaccgccaagttcgactgaatgaactcttacaggagcactccagagctgctaatctcattgtcctgagccttcccgtggcaagaaagggatccatatcggatttgttgtatatggcttggttggaaatcctcacaaagaacctcccacctgtcttactagttagaggaaatcacaaaaatgtcttgacattttactcttaaaacatgaaagattggaatacattttaacttaatgtaatgcataattaagaaacatgttccagtactttatgttgtaaatctgatctatggatatgcaaacctctggagagga

SEQ ID NO: 7184 - DNA, 2176 bp, Artificial Sequence
  derived and/or modified sequence
gttactgaaccgatcagcgaacacagacaaacgtgccaacacttaagtctactggctggacttcatctccatggcaacaagcatggaagaatgtggcagtcaccccaagttcagctgacagagttgctaacggtgatgggatacctggagatgaacaagctgaaaataaggaagatgatcaagctggtgttgtgaagtttggatgggtgaaaggtgtgctggtaagatgcatgctgaacatctggggagtcatgctcttcattcgcctctcctggattgttggagaagctggaattggtcttggagttctcataattcttctttccaccatggtaacttctattactgggttgtcaacttctgcgatagcaactaacgggtttgttcgtggaggtggggcctactatcttatttccagaagtttagggcccgagttcggtgggtcaataggcctgatctttgcttttgctaatgcagtggctgttgctatgtatgtggtgggatttgctgagactgtagtagatcttcttaaggagagtgattcgatgatggtggatccaaccaatgacatccggattataggctccatcacagtggtgattcttctaggaatttcagtagctggaatggaatgggaggcaaaggcccaagtcattcttctggtcattcttctaattgctattgcaaacttcttcattggaactgtcattccatccaacaatgagaaaaagtccagaggtttctttaattaccaagcatcaatatttgcagaaaactttgggccacgcttcacaaagggtgaaggcttcttctctgtctttgccatttttttcccagcagctactgggattcttgctggtgccaatatctcaggagatttggaggatccccaagatgccatccccagaggaaccatgctggccattttcatcaccactgttgcctacttaggggttgcaatttgtgtaggggcctgtgtggtccgagatgccaccgggaacatgaatgacaccatcatttctgggatgaactgcaatggttcagcagcatgtgggttgggctatgacttctcaagatgtcgacatgaaccatgtcagtacgggctgatgaacaatttccaggtcatgagcatggtatcagggttcggccccctcatcactgcgggaatcttttctgcaacactctcctccgccctggcctcccttgtcagcgcacccaaagtgttccaggctctgtgcaaggacaacatctacaaagccctgcagttttttgcaaagggatatgggaaaaacaatgaacccctgagaggatatattctcacttttcttatagccatggcatttattcttattgcggaactgaacaccattgctcccatcatctccaactttttcctggcctcatatgcacttattaatttctcctgcttccatgcctcttatgccaaatctccaggatggagacctgcgtatggaatttacaacatgtgggtatctctttttggagctgttttgtgctgtgcagtcatgtttgtcatcaactggtgggcagctgtcatcacctatgtcattgaattcttcctttacgtctatgtgacttgtaagaagccagatgtgaactggggctcctccacacaggctctttcctacgtgagtgctttagacaatgctctggaattaaccacagtggaagaccacgtaaaaaacttcaggccccagtgcattgtcttaacagggggacccatgacaagacctgctctcctggacataactcacgcctttaccaagaacagtggcctttgcatctgctgtgaagtctttgtgggaccgcgcaaactgtgtgttaaggagatgaacagtggcatggcgaaaaaacaggcctggcttataaagaacaaaatcaaggctttttatgctgcagtggcggcagactgtttcagggatggtgtccgaagtcttcttcaggcctcaggcttaggaagaatgaaaccaaacactctggtgattggatataagaaaaactggaggaaagctcccttgacagagattgagaactacgtgggaatcatacatgatgcatttgattttgagattggcgtggttatagtcagaatcagccaaggatttgacatctctcaggttcttcaggtgcaagaggaattagagagattagaaca

SEQ ID NO: 7185 - DNA, 1293 bp, Artificial Sequence
  derived and/or modified sequence
atgagcctgaacaacagcagcaacgtgttcctggacagcgtgcccagcaacaccaacagattccaggtgagcgtgatcaacgagaaccacgagagcagcgccgccgccgacgacaacaccgaccccccccactacgaggagaccagcttcggcgacgaggcccagaagagactgagaatcagcttcagacccggcaaccaggagtgctacgacaacttcctgcagagcggcgagaccgccaagaccgacgccagcttccacgcctacgacagccacaccaacacctactacctgcagaccttcggccacaacaccatggacgccgtgcccaagatcgagtactacagaaacaccggcagcatcagcggccccaaggtgaacagacccagcctgctggagatccacgagcagctggccaagaacgtggccgtgacccccagcagcgccgacagagtggccaacggcgacggcatccccggcgacgagcaggccgagaacaaggaggacgaccaggccggcgtggtgaagttcggctgggtgaagggcgtgctggtgagatgcatgctgaacatctggggcgtgatgctgttcatcagactgagctggatcgtgggcgaggccggcatcggcctgggcgtgctgatcatcctgctgagcaccatggtgaccagcatcaccggcctgagcaccagcgccatcgccaccaacggcttcgtgagaggcggcggcgcctactacctgatcagcagaagcctgggccccgagttcggcggcagcatcggcctgatcttcgccttcgccaacgccgtggccgtggccatgtacgtggtgggcttcgccgagaccgtggtggacctgctgaaggagagcgacagcatgatggtggaccccaccaacgacatcagaatcatcggcagcatcaccgtggtgatcctgctgggcatcagcgtggccggcatggagtgggaggccaaggcccaggtgatcctgctggtgatcctgctgatcgccatcgccaacttcttcatcggcaccgtgatccccagcaacaacgagaagaagagcagaggcttcttcaactaccaggccagcatcttcgccgagaacttcggccccagattcaccaagggcgagggcttcttcagcgtgttcgccatcttcttccccgccgccaccggcatcctggccggcgccaacatcagcggcgacctggaggccctgagaaagcagggcgccagccccctgccccagggcgcccagagcagaagaagaagacagaccagcctgatctag

SEQ ID NO: 7186 - DNA, 3300 bp, Artificial Sequence
  derived and/or modified sequence
atgagcctgaacaacagcagcaacgtgttcctggacagcgtgcccagcaacaccaacagattccaggtgagcgtgatcaacgagaaccacgagagcagcgccgccgccgacgacaacaccgaccccccccactacgaggagaccagcttcggcgacgaggcccagaagagactgagaatcagcttcagacccggcaaccaggagtgctacgacaacttcctgcagagcggcgagaccgccaagaccgacgccagcttccacgcctacgacagccacaccaacacctactacctgcagaccttcggccacaacaccatggacgccgtgcccaagatcgagtactacagaaacaccggcagcatcagcggccccaaggtgaacagacccagcctgctggagatccacgagcagctggccaagaacgtggccgtgacccccagcagcgccgacagagtggccaacggcgacggcatccccggcgacgagcaggccgagaacaaggaggacgaccaggccggcgtggtgaagttcggctgggtgaagggcgtgctggtgagatgcatgctgaacatctggggcgtgatgctgttcatcagactgagctggatcgtgggcgaggccggcatcggcctgggcgtgctgatcatcctgctgagcaccatggtgaccagcatcaccggcctgagcaccagcgccatcgccaccaacggcttcgtgagaggcggcggcgcctactacctgatcagcagaagcctgggccccgagttcggcggcagcatcggcctgatcttcgccttcgccaacgccgtggccgtggccatgtacgtggtgggcttcgccgagaccgtggtggacctgctgaaggagagcgacagcatgatggtggaccccaccaacgacatcagaatcatcggcagcatcaccgtggtgatcctgctgggcatcagcgtggccggcatggagtgggaggccaaggcccaggtgatcctgctggtgatcctgctgatcgccatcgccaacttcttcatcggcaccgtgatccccagcaacaacgagaagaagagcagaggcttcttcaactaccaggccagcatcttcgccgagaacttcggccccagattcaccaagggcgagggcttcttcagcgtgttcgccatcttcttccccgccgccaccggcatcctggccggcgccaacatcagcggcgacctggaggacccccaggacgccatccccagaggcaccatgctggccatcttcatcaccaccgtggcctacctgggcgtggccatctgcgtgggcgcctgcgtggtgagagacgccaccggcaacatgaacgacaccatcatcagcggcatgaactgcaacggcagcgccgcctgcggcctgggctacgacttcagcagatgcagacacgagccctgccagtacggcctgatgaacaacttccaggtgatgagcatggtgagcggcttcggccccctgatcaccgccggcatcttcagcgccaccctgagcagcgccctggccagcctggtgagcgcccccaaggtgttccaggccctgtgcaaggacaacatctacaaggccctgcagttcttcgccaagggctacggcaagaacaacgagcccctgagaggctacatcctgaccttcctgatcgccatggccttcatcctgatcgccgagctgaacaccatcgcccccatcatcagcaacttcttcctggccagctacgccctgatcaacttcagctgcttccacgccagctacgccaagagccccggctggagacccgcctacggcatctacaacatgtgggtgagcctgttcggcgccgtgctgtgctgcgccgtgatgttcgtgatcaactggtgggccgccgtgatcacctacgtgatcgagttcttcctgtacgtgtacgtgacctgcaagaagcccgacgtgaactggggcagcagcacccaggccctgagctacgtgagcgccctggacaacgccctggagctgaccaccgtggaggaccacgtgaagaacttcagaccccagtgcatcgtgctgaccggcggccccatgaccagacccgccctgctggacatcacccacgccttcaccaagaacagcggcctgtgcatctgctgcgaggtgttcgtgggccccagaaagctgtgcgtgaaggagatgaacagcggcatggccaagaagcaggcctggctgatcaagaacaagatcaaggccttctacgccgccgtggccgccgactgcttcagagacggcgtgagaagcctgctgcaggccagcggcctgggcagaatgaagcccaacaccctggtgatcggctacaagaagaactggagaaaggcccccctgaccgagatcgagaactacgtgggcatcatccacgacgccttcgacttcgagatcggcgtggtgatcgtgagaatcagccagggcttcgacatcagccaggtgctgcaggtgcaggaggagctggagagactggagcaggagagactggccctggaggccaccatcaaggacaacgagtgcgaggaggagagcggcggcatcagaggcctgttcaagaaggccggcaagctgaacatcaccaagaccacccccaagaaggacggcagcatcaacaccagccagagcatgcacgtgggcgagttcaaccagaagctggtggaggccagcacccagttcaagaagaagcaggagaagggcaccatcgacgtgtggtggctgttcgacgacggcggcctgaccctgctgatcccctacatcctgaccctgagaaagaagtggaaggactgcaagctgagaatctacgtgggcggcaagatcaacagaatcgaggaggagaagatcgtgatggccagcctgctgagcaagttcagaatcaagttcgccgacatccacatcatcggcgacatcaacatcagacccaacaaggagagctggaaggtgttcgaggagatgatcgagccctacagactgcacgagagctgcaaggacctgaccaccgccgagaagctgaagagagagaccccctggaagatcaccgacgccgagctggaggccgtgaaggagaagagctacagacaggtgagactgaacgagctgctgcaggagcacagcagagccgccaacctgatcgtgctgagcctgcccgtggccagaaagggcagcatcagcgacctgctgtacatggcctggctggagatcctgaccaagaacctgccccccgtgctgctggtgagaggcaaccacaagaacgtgctgaccttctacagctag

SEQ ID NO: 7187 - DNA, 1782 bp, Artificial Sequence
  derived and/or modified sequence
atgctgaacatctggggcgtgatgctgttcatcagactgagctggatcgtgggcgaggccggcatcggcctgggcgtgctgatcatcctgctgagcaccatggtgaccagcatcaccggcctgagcaccagcgccatcgccaccaacggcttcgtgagaggcggcggcgcctactacctgatcagcagaagcctgggccccgagttcggcggcagcatcggcctgatcttcgccttcgccaacgccgtggccgtggccatgtacgtggtgggcttcgccgagaccgtggtggacctgctgaaggagagcgacagcatgatggtggaccccaccaacgacatcagaatcatcggcagcatcaccgtggtgatcctgctgggcatcagcgtggccggcatggagtgggaggccaaggcccaggtgatcctgctggtgatcctgctgatcgccatcgccaacttcttcatcggcaccgtgatccccagcaacaacgagaagaagagcagaggcttcttcaactaccaggccagcatcttcgccgagaacttcggccccagattcaccaagggcgagggcttcttcagcgtgttcgccatcttcttccccgccgccaccggcatcctggccggcgccaacatcagcggcgacctggaggacccccaggacgccatccccagaggcaccatgctggccatcttcatcaccaccgtggcctacctgggcgtggccatctgcgtgggcgcctgcgtggtgagagacgccaccggcaacatgaacgacaccatcatcagcggcatgaactgcaacggcagcgccgcctgcggcctgggctacgacttcagcagatgcagacacgagccctgccagtacggcctgatgaacaacttccaggtgatgagcatggtgagcggcttcggccccctgatcaccgccggcatcttcagcgccaccctgagcagcgccctggccagcctggtgagcgcccccaaggtgttccaggccctgtgcaaggacaacatctacaaggccctgcagttcttcgccaagggctacggcaagaacaacgagcccctgagaggctacatcctgaccttcctgatcgccatggccttcatcctgatcgccgagctgaacaccatcgcccccatcatcagcaacttcttcctggccagctacgccctgatcaacttcagctgcttccacgccagctacgccaagagccccggctggagacccgcctacggcatctacaacatgtgggtgagcctgttcggcgccgtgctgtgctgcgccgtgatgttcgtgatcaactggtgggccgccgtgatcacctacgtgatcgagttcttcctgtacgtgtacgtgacctgcaagaagcccgacgtgaactggggcagcagcacccaggccctgagctacgtgagcgccctggacaacgccctggagctgaccaccgtggaggaccacgtgaagaacttcagaccccagtgcatcgtgctgaccggcggccccatgaccagacccgccctgctggacatcacccacgccttcaccaagaacagcggcctgtgcatctgctgcgaggtgttcgtgggccccagaaagctgtgcgtgaaggagatgaacagcggcatggccaagaccggcctggcctacaaggagcagaaccagggcttcctgtgctgcagcggcggcagactgttccagggctggtgccccaagagcagcagcggcctgagactgagaaagaacgagaccaagcacagcggcgactggatctag

SEQ ID NO: 7188 - DNA, 1947 bp, Artificial Sequence
  derived and/or modified sequence
atgctgaacatctggggcgtgatgctgttcatcagactgagctggatcgtgggcgaggccggcatcggcctgggcgtgctgatcatcctgctgagcaccatggtgaccagcatcaccggcctgagcaccagcgccatcgccaccaacggcttcgtgagaggcggcggcgcctactacctgatcagcagaagcctgggccccgagttcggcggcagcatcggcctgatcttcgccttcgccaacgccgtggccgtggccatgtacgtggtgggcttcgccgagaccgtggtggacctgctgaaggagagcgacagcatgatggtggaccccaccaacgacatcagaatcatcggcagcatcaccgtggtgatcctgctgggcatcagcgtggccggcatggagtgggaggccaaggcccaggtgatcctgctggtgatcctgctgatcgccatcgccaacttcttcatcggcaccgtgatccccagcaacaacgagaagaagagcagaggcttcttcaactaccaggccagcatcttcgccgagaacttcggccccagattcaccaagggcgagggcttcttcagcgtgttcgccatcttcttccccgccgccaccggcatcctggccggcgccaacatcagcggcgacctggaggacccccaggacgccatccccagaggcaccatgctggccatcttcatcaccaccgtggcctacctgggcgtggccatctgcgtgggcgcctgcgtggtgagagacgccaccggcaacatgaacgacaccatcatcagcggcatgaactgcaacggcagcgccgcctgcggcctgggctacgacttcagcagatgcagacacgagccctgccagtacggcctgatgaacaacttccaggtgatgagcatggtgagcggcttcggccccctgatcaccgccggcatcttcagcgccaccctgagcagcgccctggccagcctggtgagcgcccccaaggtgttccaggccctgtgcaaggacaacatctacaaggccctgcagttcttcgccaagggctacggcaagaacaacgagcccctgagaggctacatcctgaccttcctgatcgccatggccttcatcctgatcgccgagctgaacaccatcgcccccatcatcagcaacttcttcctggccagctacgccctgatcaacttcagctgcttccacgccagctacgccaagagccccggctggagacccgcctacggcatctacaacatgtgggtgagcctgttcggcgccgtgctgtgctgcgccgtgatgttcgtgatcaactggtgggccgccgtgatcacctacgtgatcgagttcttcctgtacgtgtacgtgacctgcaagaagcccgacgtgaactggggcagcagcacccaggccctgagctacgtgagcgccctggacaacgccctggagctgaccaccgtggaggaccacgtgaagaacttcagaccccagtgcatcgtgctgaccggcggccccatgaccagacccgccctgctggacatcacccacgccttcaccaagaacagcggcctgtgcatctgctgcgaggtgttcgtgggccccagaaagctgtgcgtgaaggagatgaacagcggcatggccaagaagcaggcctggctgatcaagaacaagatcaaggccttctacgccgccgtggccgccgactgcttcagagacggcgtgagaagcctgctgcaggccagcggcctgggcagaatgaagcccaacaccctggtgatcggctacaagaagaactggagaaaggcccccctgaccgagatcgagaactacgtgggcatcatccacgacgccttcgacttcgagatcggcgtggtgatcgtgagaatcagccagggcttcgacatcagccaggtgctgcaggtgcaggaggagctggagagactggagtag

SEQ ID NO: 7189 - protein, 1030 aa, Artificial Sequence
  derived and/or modified sequence
MAELPTTETPGDATLCSGRFTISTLLSSDEPSPPAAYDSSHPSHLTHSSTFCMRTFGYNTIDVVPTYEHYANSTQPGEPRKVRPTLADLHSFLKQEGRHLHALAFDSRPSHEMTDGLVEGEAGTSSEKNPEEPVRFGWVKGVMIRCMLNIWGVILYLRLPWITAQAGIVLTWIIILLSVTVTSITGLSISAISTNGKVKSGGTYFLISRSLGPELGGSIGLIFAFANAVGVAMHTVGFAETVRDLLQEYGAPIVDPINDIRIIAVVSVTVLLAISLAGMEWESKAQVLFFLVIMVSFANYLVGTLIPPSEDKASKGFFSYRADIFVQNLVPDWRGPDGTFFGMFSIFFPSATGILAGANISGDLKDPAIAIPKGTLMAIFWTTISYLAISATIGSCVVRDASGVLNDTVTPGWGACEGLACSYGWNFTECTQQHSCHYGLINYYQTMSMVSGFAPLITAGIFGATLSSALACLVSAAKVFQCLCEDQLYPLIGFFGKGYGKNKEPVRGYLLAYAIAVAFIIIAELNTIAPIISNFFLCSYALINFSCFHASITNSPGWRPSFQYYNKWAALFGAIISVVIMFLLTWWAALIAIGVVLFLLLYVIYKKPEVNWGSSVQAGSYNLALSYSVGLNEVEDHIKNYRPQCLVLTGPPNFRPALVDFVGTFTRNLSLMICGHVLIGPHKQRMPELQLIANGHTKWLNKRKIKAFYSDVIAEDLRRGVQILMQAAGLGRMKPNILVVGFKKNWQSAHPATVEDYIGILHDAFDFNYGVCVMRMREGLNVSKMMQAHINPVFDPAEDGKEASARGARPSVSGALDPKALVKEEQATTIFQSEQGKKTIDIYWLFDDGGLTLLIPYLLGRKRRWSKCKIRVFVGGQINRMDQERKAIISLLSKFRLGFHEVHILPDINQNPRAEHTKRFEDMIAPFRLNDGFKDEATVNEMRRDCPWKISDEEITKNRVKSLRQVRLNEIVLDYSRDAALIVITLPIGRKGKCPSSLYMAWLETLSQDLRPPVILIRGNQENVLTFYCQ

SEQ ID NO: 7190 - DNA, 3093 bp, Artificial Sequence
  derived and/or modified sequence
atggcagaacttcccaccaccgaaactccgggtgatgctactttgtgctcaggccgcttcactatcagtacactgctgtcaagcgatgaaccatccccacccgcagcatacgatagctctcatccaagccatttaacgcactccagtactttctgcatgcgcacatttggatacaataccatagatgtggtacccacatacgagcattacgcaaactccacacaaccaggagagccaagaaaggtccggcccaccctggcggatctccattctttcctcaagcaggaaggaaggcatcttcatgcgctggctttcgacagccgcccttctcatgaaatgactgatgggcttgtggaaggggaggcagggacatcctccgagaaaaaccctgaggaacccgtcaggtttggttgggttaagggggtgatgatccgatgtatgctcaatatttggggtgtaatcctgtatctcaggttgccatggattaccgcccaggcgggaatcgttctgacttggatcataattcttctctctgtgacagttacttctatcaccgggttatcaattagtgccatctcaacaaacggtaaggtgaagtcaggcggcacttactttttaatctctaggtctctggggccagaactgggaggtagtattggcctgatcttcgcctttgccaatgcagttggggttgcaatgcacacggtcgggttcgcagagaccgtgcgcgacttgctgcaggaatatggggcccctatcgtggaccctataaacgacattcggatcatcgccgtggtgagcgtgaccgtgctgctcgccatttctctcgctggtatggagtgggaatcaaaggcccaggtgctgttctttctggttatcatggtgtcttttgctaactacctcgtcggtaccctgatcccgcctagtgaggataaagctagtaagggctttttcagttaccgagccgatatcttcgtccagaatctagtaccggattggcgggggccggatgggacatttttcgggatgtttagtattttctttccttctgcgaccggtatcctggctggggctaatattagcggggacttgaaagatccggccatcgccatccccaaggggacactgatggccatcttctggacaacgatctcctacctagctattagcgccaccattggttcatgcgtggttcgcgatgccagcggtgtgctgaacgacaccgtcactcccggctggggagcctgtgagggtctcgcttgtagctatggttggaattttacagagtgtacccagcagcactcatgtcactatggtctaataaactactaccagaccatgtccatggtatcggggtttgctcctctaattacagcggggatcttcggggctacattaagctctgccctggcatgcctggtgtccgccgccaaggttttccaatgcttgtgtgaagaccagctgtatccattaataggttttttcggtaaaggatatggaaagaataaagagcctgtgcgtgggtatctgctagcttacgctatagctgtcgcgttcattattattgccgagctcaacacaatcgcacctatcataagcaacttttttctgtgctcatatgccctgatcaacttttcatgttttcacgcttcaatcacgaactcaccagggtggagaccttcttttcagtattacaacaaatgggccgccctgttcggcgcaataataagtgtggtgattatgtttctgctaacatggtgggcggccttaatagcaatcggggtggtgcttttcctcctcctctacgttatttacaagaaacctgaagtcaactggggatccagtgtgcaggccggtagctacaacctggctctcagttactctgtgggtctaaatgaggtggaggaccatattaagaattatagaccccagtgtttagtgctgaccggcccccccaacttcaggccggctctggtcgattttgtggggacatttacgagaaatttgtccctcatgatatgtggtcacgtgttgattgggccccataagcagcggatgcctgaactgcagttgattgcaaacgggcatacaaaatggctgaataagcgtaagattaaggctttctactcagacgtgattgcggaagaccttcggagaggagttcaaattcttatgcaggcagccggtcttggtagaatgaagcccaacatactcgtcgtgggttttaagaaaaattggcagtcggcccatcccgccaccgttgaggactacataggcatcttgcatgacgctttcgatttcaattacggagtgtgcgtgatgcgcatgcgtgagggcctaaacgtgtctaagatgatgcaagcacatatcaatcctgtgttcgaccctgctgaggacggcaaagaagcatctgccaggggtgcacggcccagcgtctctggtgctcttgatcccaaagccttggtgaaggaagaacaagcaacaactatctttcagagcgagcagggaaaaaagaccatcgatatttactggcttttcgacgatggcggcctgacgcttttaatcccctacctgctgggacgaaaaagacggtggtccaagtgcaagatccgggtttttgtcggcggccagattaatcgtatggaccaagaacggaaggccattatctccctcctgtctaaatttcggctcggcttccacgaggtccacatccttccagatatcaatcagaacccacgtgcagagcatactaagaggttcgaggacatgattgccccctttagactcaacgacggatttaaggacgaagcaaccgtgaatgaaatgcgaagggattgtccctggaaaattagcgatgaggaaattaccaaaaacagagtgaaaagcctgcgccaagtgaggctcaatgagatagtattggattattcacgggatgctgcccttatcgttattaccctgcccatcggccgtaaaggaaaatgcccttcttccctgtacatggcgtggctggaaaccctatcacaggacctccgtccacccgttatacttataagaggcaaccaagagaacgtcctaacattctactgtcagtag

SEQ ID NO: 7191 - DNA, 3093 bp, Artificial Sequence
  derived and/or modified sequence
atggccgagctgcccaccacagagaccccaggagatgccaccctgtgcagcggccgcttcaccatcagcaccctgctgagcagtgatgagcccagccccccagctgcctatgacagcagccaccccagccacctgacccacagcagcaccttctgcatgaggaccttcggctacaacaccattgatgtggtgcccacctatgagcactacgccaacagcacccagcccggggagcccaggaaggtgcggcccaccctggccgacctgcacagcttcctgaagcaggagggccgccacctgcacgccctggcctttgacagccggcccagccatgagatgacagatggcctggtggagggggaggccggcaccagcagcgagaagaaccctgaggagcctgtgcgcttcggctgggtgaagggcgtgatgatccgctgcatgctgaacatctggggcgtcatcctgtacctgcggctgccctggatcacagcccaggccggcatcgtgctgacctggatcatcatcctgctgtctgtgacagtgaccagcatcaccggcctgagcatcagcgccatcagcaccaacgggaaggtgaagagcggcggcacctacttcctgatcagccgcagcctgggccctgagctgggcggcagcatcggcctcatctttgcctttgccaatgctgtgggcgtggccatgcacacagtgggctttgctgagaccgtgcgggacctgctgcaggagtatggagcccccatcgtggaccccatcaatgacatccgcatcatcgctgtggtgtctgtgacagtgctgctggccatcagcctggccggcatggagtgggagagcaaggcccaggtgctcttcttcctggtgatcatggtgtcctttgccaactacctggtgggcaccctcatccccccatctgaggacaaggccagcaagggcttcttctcctacagagctgacatctttgtgcagaacctggtgcctgactggaggggcccagatggcaccttcttcggcatgttcagcatcttcttccccagcgccaccggcatcctggccggggccaacatcagcggggacctgaaggaccctgccatcgccatccccaagggcaccctgatggccatcttctggaccaccatctcctacctggccatcagcgccaccatcggcagctgtgtggtgagagatgccagcggcgtgctgaatgacacagtgaccccaggctggggcgcctgtgagggcctggcctgcagctatggctggaacttcacagaatgtacccagcagcacagctgccactacggcctcatcaactactaccagaccatgtccatggtgtctggctttgcccccctcatcacagctggcatctttggagccaccctgagcagcgccctggcctgcctggtgtctgctgccaaggtgttccagtgcctgtgtgaggaccagctgtaccccctcatcggcttcttcggcaagggctacggcaagaacaaggagcctgtgcggggctacctgctggcctatgccatcgctgtggccttcatcatcatcgccgagctgaacaccatcgcccccatcatcagcaacttcttcctgtgcagctatgccctgatcaacttcagctgcttccacgccagcatcaccaacagccctggctggaggcccagcttccagtactacaacaagtgggccgccctgtttggagccatcatctctgtggtgatcatgttcctgctgacctggtgggccgccctgattgccatcggcgtggtgctcttcctgctgctgtatgtgatctacaagaagccagaggtgaactggggcagctctgtgcaggccggcagctacaacctggccctgagctacagcgtgggcctgaatgaggtggaggaccacatcaagaactaccggccccagtgcctggtgctgactggaccacccaacttccggcctgccctggtggactttgtgggcaccttcaccaggaacctgagcctgatgatctgtggccacgtgctgattggcccccacaagcagaggatgcctgagctgcagctgattgccaacggccacaccaagtggctgaacaagaggaagatcaaggccttctacagtgatgtgattgctgaggacctgcggcggggcgtgcagatcctgatgcaggccgccggcctgggccgcatgaagcccaacatcctggtggtgggcttcaagaagaactggcagagcgcccacccagccaccgtggaggactacatcggcatcctgcatgatgcctttgacttcaactatggagtgtgtgtgatgaggatgagggagggcctgaatgtgtccaagatgatgcaggcccacatcaaccctgtgtttgatcctgcagaagatggcaaggaggccagcgcccggggggcccggcccagcgtgtctggggccctggaccccaaggccctggtgaaggaggagcaggccaccaccatcttccagagcgagcagggcaagaagaccatcgacatctactggctgtttgatgatggcggcctgaccctgctgatcccctacctgctgggcaggaagaggcgctggagcaagtgcaagatccgggtgtttgtgggcggccagatcaacaggatggaccaggagaggaaggccatcatcagcctgctgagcaagttccggctgggcttccacgaggtgcacatcctgcctgacatcaaccagaaccccagggctgagcacaccaagagatttgaggacatgattgcccccttccggctgaatgatggcttcaaggatgaggccaccgtgaatgagatgagaagagactgcccctggaagatcagtgatgaggagatcaccaagaacagagtgaagagcctgcggcaggtgcggctgaatgaaattgtgctggactacagcagagatgctgccctgattgtcatcaccctgcccatcggcaggaaaggaaaatgtcccagcagcctgtacatggcctggctggagaccctgagccaggacctgcggccccctgtgatcctgatccggggcaaccaggagaatgtgctgaccttctactgccagtag

SEQ ID NO: 7192 - DNA, 3093 bp, Artificial Sequence
  derived and/or modified sequence
atggccgagctgcccaccaccgagacccccggcgacgccaccctgtgctccggccgctttacaatatcgacactgctatcctcagatgaaccaagcccgcctgccgcatatgatagttctcatcccagtcaccttacgcactccagcaccttctgtatgaggacgttcggatacaataccatagatgtggtgccaacctacgagcactatgccaactccactcagcccggagagccccggaaggtgcgtcccacactcgccgatttgcattcgttcctcaaacaagaggggcgccatctgcacgcactcgcctttgatagcagaccttctcatgaaatgactgacgggctcgtcgagggcgaagccgggaccagctccgagaaaaacccagaagaacctgtcagatttggatgggtaaagggcgttatgatcaggtgcatgttgaatatctggggggtgatcctgtatttacgactgccgtggataacagcccaggccggaattgtgctcacatggataatcatactgttatccgtgaccgtcacatccatcacgggcctgtccatatctgcaatatcaacaaacggcaaggtgaagtccggcgggacatactttctcatcagtcggagtctcggccccgagttggggggctctattggcttgatcttcgcgtttgccaatgctgttggcgttgccatgcacaccgtcggttttgccgaaactgtaagagacctactccaagagtatggagcccctatcgtggaccctattaacgatatacgcatcattgccgtagtctcggtaacagtgctgttggccatcagcttggcaggcatggagtgggaaagcaaggcacaggtgctcttcttcctggtgattatggtgtcctttgcgaattacctggtaggcacattaattccgccaagcgaagacaaagcctccaagggcttctttagctatcgggctgatatctttgtccagaacttagtccccgattggcgtggacccgacggcacatttttcgggatgtttagcattttctttccttccgccactggaattctggccggtgccaacatttctggtgacttaaaggacccagctatcgccatccctaaaggaaccttgatggcaatcttttggaccacaatatcctacctggccatatcagcgactatcgggtcctgtgtagtgagggatgcaagcggagtgctgaacgatactgtgacccctggatggggcgcttgcgaaggcctggcgtgtagctatggctggaatttcaccgaatgcacccagcagcattcctgtcactatgggctcatcaactactaccagactatgagtatggtgtctggctttgcccctttgattactgcaggcatttttggagctactctgtcctccgcactggcgtgcttagtatccgcggctaaggtctttcagtgtctatgtgaagaccagctctatccactgatcggtttttttggaaaaggatatggcaagaataaagagcctgtgaggggctatctgttggcctacgctatagcggtagcctttatcattattgccgagctgaatactatcgcaccaataatctcaaatttttttctctgtagctatgccctgattaacttttcttgtttccacgcttcgataactaacagccctggctggcgccccagcttccagtattataacaaatgggccgcgctcttcggcgctatcatctctgtggtgattatgttcctgttaacatggtgggctgccctgatcgccatcggagtcgtcctctttttactgctgtacgttatctataaaaagcccgaagtgaattgggggtccagcgttcaggccggatcctataacctcgcgctgagttattctgtgggccttaatgaagtggaagaccacataaagaattataggccccagtgccttgtgcttaccggtcccccaaactttaggcctgccctcgtggattttgtggggacattcacgagaaatctgagcctcatgatttgcggccatgtgctcatcggaccccataagcaacgtatgcctgagcttcagctgatcgctaacggtcataccaagtggcttaacaaaaggaaaatcaaagcgttttactccgatgtgatcgcagaagatttgcgacggggggtgcagatcttgatgcaagccgccggcctcgggcgcatgaagcctaacatcttagtagtcgggttcaaaaagaactggcagagcgcccaccccgctacggtcgaggactacatcgggatactgcatgatgccttcgactttaattacggggtgtgtgtgatgcgtatgagggaggggttgaatgtgagtaaaatgatgcaggcacacatcaaccctgttttcgatccagccgaagatggtaaggaggctagcgccagaggcgccagaccaagtgtttctggggctctcgaccctaaggcactggtgaaagaggaacaagctaccacaatctttcagagcgaacagggcaaaaaaaccattgacatttactggctgttcgacgatggcgggctgacactgctcatcccttacctattggggcgcaaacgcaggtggagtaaatgcaagatcagagtgttcgtcgggggtcaaattaatcggatggaccaggaacggaaggctattatcagtctcttgtctaaattccgtctcgggttccacgaagttcacatattgcccgacatcaatcagaaccctcgagcagagcacacgaagagatttgaagacatgattgctccatttcggctgaacgacgggtttaaggatgaggccactgttaacgaaatgagaagagattgcccttggaagatcagtgatgaggagattacgaagaaccgcgttaagtccctaagacaggtgcgacttaacgagatcgtattagactactctagagacgccgctctcatcgtgataacccttcctatcggtaggaagggcaagtgccccagctctctgtacatggcttggctcgaaacgctgtcacaggatctgcgcccacccgtcattctaataaggggaaaccaggagaatgtcctgaccttttactgtcagtag

SEQ ID NO: 7193 - DNA, 3093 bp, Artificial Sequence
  derived and/or modified sequence
atggccgaactcccaaccaccgaaacgccaggggatgcaacactctgttcagggagatttacaatctcaacactgctttctagcgacgagccatcacctccagccgcttacgactcctcccacccgtctcacctcactcattcctctacattctgcatgagaacgttcgggtataacaccatcgatgtagttcctacatatgaacattacgcaaattctactcagcctggagagcctcgcaaggtccgcccaaccttagccgaccttcactcatttctgaagcaggaaggcagacacctgcacgctcttgctttcgatagtaggcctagccacgaaatgaccgacggactagtggagggagaggctggcacgagctcagaaaagaatcctgaagagcccgtacgcttcggatgggtgaagggcgtcatgattcgctgcatgttgaatatctggggcgtaatcctgtacctgcggctgccatggattactgcccaggcaggaatcgtcctgacatggatcataatcctgctgtcagtcaccgtaacttccataacaggtcttagcatcagcgcgatatccacaaacggtaaggtgaagagtggtggcacctattttctaatcagtaggtcgctaggcccagagttggggggttctattggactgattttcgccttcgctaacgccgtgggcgtcgcgatgcacaccgtaggatttgcggaaaccgtccgagatcttctgcaagagtacggagctccaattgtggacccaatcaacgatatccgaattattgcagtcgtcagcgtgacagtcttactcgcgatatctttggcgggtatggagtgggagagcaaggcccaagtgctcttctttctggtgattatggtctcttttgccaactacctcgtcggaacactcatccccccaagcgaagacaaggcctccaaagggtttttttcatacagggcggacattttcgtgcagaatcttgtaccagactggcgcggaccggacgggacattctttggcatgttttctatcttctttccaagcgctacgggcattcttgctggtgccaacatctctggcgatctgaaggatcctgccatagctattccaaaaggcactcttatggctattttctggacgacaatttcgtacctcgccattagtgctaccatcgggtcttgtgtcgtccgtgatgcatctggggtgctcaatgacacggtcacgcctggctggggagcatgcgaagggctggcatgctcttatgggtggaattttacagaatgcacccagcagcattcttgccactatgggctgattaattactaccagacaatgtctatggtgagcgggttcgcgcctttgatcacggccggaatcttcggtgccaccctcagttctgccttggcttgcctggtctccgcagccaaggttttccagtgtctgtgtgaggatcagttgtatcccctcattggcttctttgggaaaggctatggtaaaaacaaggagcccgtcagggggtatctgctcgcttacgctatcgctgtcgccttcataatcatcgccgagttaaataccatcgcgccaatcattagcaatttctttctgtgttcttacgcactgataaatttcagttgctttcatgcctctattactaattcccccggatggcggccatcctttcagtactataataagtgggcagcactttttggggctatcatatcggttgtcatcatgttccttctcacttggtgggcagcactcatcgctatcggagtcgtgctgtttttattgttgtacgttatctacaagaagcctgaggtgaattggggctcttcagtgcaggccggaagttacaacctcgcgctcagctacagcgtggggttaaacgaggtagaggaccatataaagaattacagaccccagtgcctggtgctgactgggccacctaacttcagaccagccttggtggactttgtcgggacatttaccaggaacctctcactgatgatctgtgggcatgtgcttatcggaccccataaacaaagaatgccagagctgcagcttattgccaatggacataccaagtggctgaataaacgtaaaatcaaggccttctattctgatgtcatagcagaggatttgcgtaggggagtccagatcctgatgcaagccgctgggctaggcaggatgaagccaaacattcttgtggtgggcttcaagaagaactggcagtcagcgcatccagcaacagttgaagattatattggcattttgcacgatgcgttcgacttcaattatggagtctgcgtgatgagaatgcgggaaggcctgaatgtgtccaagatgatgcaggcacatattaaccccgtctttgatccggcagaggatgggaaagaagccagcgcccgaggcgctagaccttccgtctctggggctctcgaccccaaagctctggtaaaagaggagcaggctaccactattttccaatccgaacaggggaaaaaaaccatcgatatctactggctgttcgatgacggaggcttaactctcctgataccgtacttattaggcaggaagcggaggtggagcaaatgtaaaatccgggttttcgtcggtggacaaataaatagaatggaccaggagcgaaaagccatcatctctctcttatcgaagtttcggcttggatttcacgaggtgcacattctgcctgatatcaaccagaacccacgggctgaacacaccaaacgattcgaggatatgattgctccctttcggctgaacgacgggttcaaggatgaggccaccgtcaacgaaatgagacgtgattgcccgtggaagatttccgacgaggaaatcacaaagaaccgggtaaagagtcttcgccaggtgagactcaacgagatcgtgctggactatagccgggacgccgcactaattgtgatcactctccctatcggcaggaaaggtaaatgccccagttctctgtacatggcatggctcgagacattgagtcaggatttaaggccaccagtcatactcattaggggtaaccaggaaaatgttttgactttttactgccagtag

SEQ ID NO: 7194 - DNA, 4235 bp, Artificial Sequence
  derived and/or modified sequence
tccctggacacccaggcgacaatggcagaactgcccacaacagagacgcctggggacgccactttgtgcagcgggcgcttcaccatcagcacactgctgagcagtgatgagccctctccaccagctgcctatgacagcagccaccccagccacctgacccacagcagcaccttctgcatgcgcacctttggctacaacacgatcgatgtggtgcccacatatgagcactatgccaacagcacccagcctggtgagccccggaaggtccggcccacactggctgacctgcactccttcctcaagcaggaaggcagacacctgcatgccctggcctttgacagccggcccagccacgagatgactgatgggctggtggagggcgaggcaggcaccagcagcgagaagaaccccgaggagccagtgcgcttcggctgggtcaagggggtgatgattcgttgcatgctcaacatttggggcgtgatcctctacctgcggctgccctggattacggcccaggcaggcatcgtcctgacctggatcatcatcctgctgtcggtcacggtgacctccatcacaggcctctccatctcagccatctccaccaatggcaaggtcaagtcaggtggcacctacttcctcatctcccggagtctgggcccagagcttgggggctccatcggcctcattttcgctttcgccaatgccgtgggtgtggccatgcacacggtgggctttgcagagaccgtgcgggacctgctccaggagtatggggcacccatcgtggaccccattaacgacatccgcatcattgccgtggtctcggtcactgtgctgctggccatctccctggctggcatggagtgggagtccaaggcccaggtgctgttcttccttgtcatcatggtctcctttgccaactatttagtggggacgctgatccccccatctgaggacaaggcctccaaaggcttcttcagctaccgggcggacatttttgtccagaacttggtgcctgactggcggggtccagatggcaccttcttcggaatgttctccatcttcttcccctcggccacaggcatcctggcaggggccaacatatctggtgacctcaaggaccctgctatagccatccccaaggggaccctcatggccattttctggacgaccatttcctacctggccatctcagccaccattggctcctgcgtggtgcgtgatgcctctggggtcctgaatgacacagtgacccctggctggggtgcctgcgaggggctggcctgcagctatggctggaacttcaccgagtgcacccagcagcacagctgccactacggcctcatcaactattaccagaccatgagcatggtgtcaggcttcgcgcccctgatcacggctggcatcttcggggccaccctctcctctgccctggcctgccttgtctctgctgccaaagtcttccagtgcctttgcgaggaccagctgtacccactgatcggcttcttcggcaaaggctatggcaagaacaaggagcccgtgcgtggctacctgctggcctacgccatcgctgtggccttcatcatcatcgctgagctcaacaccatagcccccatcatttccaacttcttcctctgctcctatgccctcatcaacttcagctgcttccacgcctccatcaccaactcgcctgggtggagaccttcattccaatactacaacaagtgggcggcgctgtttggggctatcatctccgtggtcatcatgttcctcctcacctggtgggcggccctcatcgccattggcgtggtgctcttcctcctgctctatgtcatctacaagaagccagaggtaaattggggctcctcggtacaggctggctcctacaacctggccctcagctactcggtgggcctcaatgaggtggaagaccacatcaagaactaccgcccccagtgcctggtgctcacggggccccccaacttccgcccggccctggtggactttgtgggcaccttcacccggaacctcagcctgatgatctgtggccacgtgctcatcggaccccacaagcagaggatgcctgagctccagctcatcgccaacgggcacaccaagtggctgaacaagaggaagatcaaggccttctactcggatgtcattgccgaggacctccgcagaggcgtccagatcctcatgcaggccgcaggtctcgggagaatgaagcccaacattctggtggttgggttcaagaagaactggcagtcggctcacccggccacagtggaagactacattggcatcctccatgatgcctttgatttcaactatggcgtgtgtgtcatgaggatgcgggagggactcaacgtgtccaagatgatgcaggcgcacattaaccccgtgtttgacccagcggaggacgggaaggaagccagcgccagaggtgccaggccatcagtctctggcgctttggaccccaaggccctggtgaaggaggagcaggccaccaccatcttccagtcggagcagggcaagaagaccatagacatctactggctctttgacgatggaggcctcaccctcctcattccctatctccttggccgcaagaggaggtggagcaaatgcaagatccgtgtgttcgtaggcggccagattaacaggatggaccaggagagaaaggcgatcatttctctgctgagcaagttccgactgggattccatgaagtccacatcctccctgacatcaaccagaaccctcgggctgagcacaccaagaggtttgaggacatgattgcacccttccgtctgaatgatggcttcaaggatgaggccactgtcaacgagatgcggcgggactgcccctggaagatctcagatgaggagattacgaagaacagagtcaagtcccttcggcaggtgaggctgaatgagattgtgctggattactcccgagacgctgctctcatcgtcatcactttgcccatagggaggaaggggaagtgccccagctcgctgtacatggcctggctggagaccctgtcccaggacctcagacctccagtcatcctgatccgaggaaaccaggaaaacgtgctcaccttttactgccagtaactccaggctttgacatccctgtccacagctctgagtgtgtgggataagttggaacttgattgcctctagtccacagggatgagactcatgttctgttgcactttaagtggcagcatctgatgatctcaccgaaaaagatggtagatttccaaatctggctggactccacttccatgggacacattccctgggtcttgtgtttataggctagagaaatagcagatggagctgcaaggaaaactctctaaagcatcctattccttttaaaggatttcttttgattttgatgaccattaattaagagttcagtctttgatttgtatgcaaattggagtcccaatgctgggcgtgaatcttgacagtttctacagaccttcctgggtgaaagttcctaaatcatgccctgcttcctccaataggagaatgggagcctcacctgtaggacctacaggctctctaaggaatgcaggtctctctctgagcctccacagccaggcaaatacatatatatatattttttttttagatgaagttttttctcttgttgcccaggctagggtgtaatggcatgatctcaggtcactgcaacctcctcccgggttcaagcatttcttctgtctcagcctcccgaatagctgggattacaggcacctgccatcacacgagctaatttttgtatttttagtagagatggggtttcaccatgttgaccaggctggtgttgagctcctgacctcaggtgatccacccacctcggtctcccaaagtgctggggttacaggcctgagccactgcgcccggcccaggcaaatttcttgaaccacttctcactcccgtcactttcaataaggggtctttgatgtcttcactggttctttggacgagggacttttcgaacttttttggttgcaacacacagtaagaaatatacttcacactgagacttgcagcgcacacacacggaaacgaccaaaacaaaaatgtcacaaaacaatacttacccttccctgggggacgtcctccagtatgttctgttctgtttatttttcactgttggttgcaatccaataaaatgactttgggatccactcatgggtggggacccacacatttgaaaggca

SEQ ID NO: 7195 - DNA, 3093 bp, Artificial Sequence
  derived and/or modified sequence
atggccgagctgcccaccaccgagacccccggcgacgccaccctgtgcagcggcagattcaccatcagcaccctgctgagcagcgacgagcccagcccccccgccgcctacgacagcagccaccccagccacctgacccacagcagcaccttctgcatgagaaccttcggctacaacaccatcgacgtggtgcccacctacgagcactacgccaacagcacccagcccggcgagcccagaaaggtgagacccaccctggccgacctgcacagcttcctgaagcaggagggcagacacctgcacgccctggccttcgacagcagacccagccacgagatgaccgacggcctggtggagggcgaggccggcaccagcagcgagaagaaccccgaggagcccgtgagattcggctgggtgaagggcgtgatgatcagatgcatgctgaacatctggggcgtgatcctgtacctgagactgccctggatcaccgcccaggccggcatcgtgctgacctggatcatcatcctgctgagcgtgaccgtgaccagcatcaccggcctgagcatcagcgccatcagcaccaacggcaaggtgaagagcggcggcacctacttcctgatcagcagaagcctgggccccgagctgggcggcagcatcggcctgatcttcgccttcgccaacgccgtgggcgtggccatgcacaccgtgggcttcgccgagaccgtgagagacctgctgcaggagtacggcgcccccatcgtggaccccatcaacgacatcagaatcatcgccgtggtgagcgtgaccgtgctgctggccatcagcctggccggcatggagtgggagagcaaggcccaggtgctgttcttcctggtgatcatggtgagcttcgccaactacctggtgggcaccctgatcccccccagcgaggacaaggccagcaagggcttcttcagctacagagccgacatcttcgtgcagaacctggtgcccgactggagaggccccgacggcaccttcttcggcatgttcagcatcttcttccccagcgccaccggcatcctggccggcgccaacatcagcggcgacctgaaggaccccgccatcgccatccccaagggcaccctgatggccatcttctggaccaccatcagctacctggccatcagcgccaccatcggcagctgcgtggtgagagacgccagcggcgtgctgaacgacaccgtgacccccggctggggcgcctgcgagggcctggcctgcagctacggctggaacttcaccgagtgcacccagcagcacagctgccactacggcctgatcaactactaccagaccatgagcatggtgagcggcttcgcccccctgatcaccgccggcatcttcggcgccaccctgagcagcgccctggcctgcctggtgagcgccgccaaggtgttccagtgcctgtgcgaggaccagctgtaccccctgatcggcttcttcggcaagggctacggcaagaacaaggagcccgtgagaggctacctgctggcctacgccatcgccgtggccttcatcatcatcgccgagctgaacaccatcgcccccatcatcagcaacttcttcctgtgcagctacgccctgatcaacttcagctgcttccacgccagcatcaccaacagccccggctggagacccagcttccagtactacaacaagtgggccgccctgttcggcgccatcatcagcgtggtgatcatgttcctgctgacctggtgggccgccctgatcgccatcggcgtggtgctgttcctgctgctgtacgtgatctacaagaagcccgaggtgaactggggcagcagcgtgcaggccggcagctacaacctggccctgagctacagcgtgggcctgaacgaggtggaggaccacatcaagaactacagaccccagtgcctggtgctgaccggcccccccaacttcagacccgccctggtggacttcgtgggcaccttcaccagaaacctgagcctgatgatctgcggccacgtgctgatcggcccccacaagcagagaatgcccgagctgcagctgatcgccaacggccacaccaagtggctgaacaagagaaagatcaaggccttctacagcgacgtgatcgccgaggacctgagaagaggcgtgcagatcctgatgcaggccgccggcctgggcagaatgaagcccaacatcctggtggtgggcttcaagaagaactggcagagcgcccaccccgccaccgtggaggactacatcggcatcctgcacgacgccttcgacttcaactacggcgtgtgcgtgatgagaatgagagagggcctgaacgtgagcaagatgatgcaggcccacatcaaccccgtgttcgaccccgccgaggacggcaaggaggccagcgccagaggcgccagacccagcgtgagcggcgccctggaccccaaggccctggtgaaggaggagcaggccaccaccatcttccagagcgagcagggcaagaagaccatcgacatctactggctgttcgacgacggcggcctgaccctgctgatcccctacctgctgggcagaaagagaagatggagcaagtgcaagatcagagtgttcgtgggcggccagatcaacagaatggaccaggagagaaaggccatcatcagcctgctgagcaagttcagactgggcttccacgaggtgcacatcctgcccgacatcaaccagaaccccagagccgagcacaccaagagattcgaggacatgatcgcccccttcagactgaacgacggcttcaaggacgaggccaccgtgaacgagatgagaagagactgcccctggaagatcagcgacgaggagatcaccaagaacagagtgaagagcctgagacaggtgagactgaacgagatcgtgctggactacagcagagacgccgccctgatcgtgatcaccctgcccatcggcagaaagggcaagtgccccagcagcctgtacatggcctggctggagaccctgagccaggacctgagaccccccgtgatcctgatcagaggcaaccaggagaacgtgctgaccttctactgccagtag

SEQ ID NO: 7196 - protein, 524 aa, Artificial Sequence
  derived and/or modified sequence
MTEDKVTGTLVFTVITAVLGSFQFGYDIGVINAPQQVIISHYRHVLGVPLDDRKAINNYVINSTDELPTISYSMNPKPTPWAEEETVAAAQLITMLWSLSVSSFAVGGMTASFFGGWLGDTLGRIKAMLVANILSLVGALLMGFSKLGPSHILIIAGRSISGLYCGLISGLVPMYIGEIAPTALRGALGTFHQLAIVTGILISQIIGLEFILGNYDLWHILLGLSGVRAILQSLLLFFCPESPRYLYIKLDEEVKAKQSLKRLRGYDDVTKDINEMRKEREEASSEQKVSIIQLFTNSSYRQPILVALMLHVAQQFSGINGIFYYSTSIFQTAGISKPVYATIGVGAVNMVFTAVSVFLVEKAGRRSLFLIGMSGMFVCAIFMSVGLVLLNKFSWMSYVSMIAIFLFVSFFEIGPGPIPWFMVAEFFSQGPRPAALAIAAFSNWTCNFIVALCFQYIADFCGPYVFFLFAGVLLAFTLFTFFKVPETKGKSFEEIAAEFQKKSGSAHRPKAAVEMKFLGATETV

SEQ ID NO: 7197 - DNA, 1572 bp, Artificial Sequence
  derived and/or modified sequence
atgaccgaggacaaggtgaccggcaccctggtgttcaccgtgatcaccgccgtgctgggcagcttccagttcggctacgacatcggcgtgatcaacgccccccagcaggtgatcatcagccactaccgccacgtgctgggcgtgcccctggacgaccgcaaggccatcaacaactacgtgatcaacagcaccgacgagctgcccaccatcagctacagcatgaaccccaagcccaccccctgggccgaggaggagaccgtggccgccgcccagctgatcaccatgctgtggagcctgagcgtgagcagcttcgccgtgggcggcatgaccgccagcttcttcggcggctggctgggcgacaccctgggccgcatcaaggccatgctggtggccaacatcctgagcctggtgggcgccctgctgatgggcttcagcaagctgggccccagccacatcctgatcatcgccggccgcagcatcagcggcctgtactgcggcctgatcagcggcctggtgcccatgtacatcggcgagatcgcccccaccgccctgcgcggcgccctgggcaccttccaccagctggccatcgtgaccggcatcctgatcagccagatcatcggcctggagttcatcctgggcaactacgacctgtggcacatcctgctgggcctgagcggcgtgcgcgccatcctgcagagcctgctgctgttcttctgccccgagagcccccgctacctgtacatcaagctggacgaggaggtgaaggccaagcagagcctgaagcgcctgcgcggctacgacgacgtgaccaaggacatcaacgagatgcgcaaggagcgcgaggaggccagcagcgagcagaaggtgagcatcatccagctgttcaccaacagcagctaccgccagcccatcctggtggccctgatgctgcacgtggcccagcagttcagcggcatcaacggcatcttctactacagcaccagcatcttccagaccgccggcatcagcaagcccgtgtacgccaccatcggcgtgggcgccgtgaacatggtgttcaccgccgtgagcgtgttcctggtggagaaggccggccgccgcagcctgttcctgatcggcatgagcggcatgttcgtgtgcgccatcttcatgagcgtgggcctggtgctgctgaacaagttcagctggatgagctacgtgagcatgatcgccatcttcctgttcgtgagcttcttcgagatcggccccggccccatcccctggttcatggtggccgagttcttcagccagggcccccgccccgccgccctggccatcgccgccttcagcaactggacctgcaacttcatcgtggccctgtgcttccagtacatcgccgacttctgcggcccctacgtgttcttcctgttcgccggcgtgctgctggccttcaccctgttcaccttcttcaaggtgcccgagaccaagggcaagagcttcgaggagatcgccgccgagttccagaagaagagcggcagcgcccaccgccccaaggccgccgtggagatgaagttcctgggcgccaccgagaccgtg

SEQ ID NO: 7198 - DNA, 1572 bp, Artificial Sequence
  derived and/or modified sequence
atgacagaggacaaggtgactgggaccctggtgttcacagtgataactgctgtcctggggtcgtttcagttcggatatgatattggtgtgatcaacgcgccccagcaggtgattatctcgcattataggcatgtgctgggcgtgcccctggatgatagaaaagcaatcaacaattatgtaattaacagcacggatgagctcccgactatatcctactcaatgaatcccaagcctaccccctgggccgaggaagaaactgtggcagctgcccagttgatcactatgctttggtcactcagtgtgtcctccttcgccgtgggaggcatgacagcctccttcttcggagggtggcttggtgacaccttgggtaggatcaaagcgatgttggtcgctaacattctttcactggtgggcgccctccttatgggcttcagtaagctcggacctagtcacatcttaataatcgcgggccggagcatatcagggctgtactgtgggctcatttctggtctggtgcccatgtatatcggggagattgctcctacggcactgcgcggggccctgggtacatttcaccagttggccatcgtgaccggtatcctgatcagtcagattattggcctggagtttattctcggaaactacgacctttggcacattcttctgggactaagtggcgttcgcgccattctgcagtcccttctcttattcttttgcccagagtctccaagatacttgtatattaagctggatgaggaggtcaaagccaagcagagcttaaagcgtcttagagggtatgatgatgtgacaaaggatataaatgaaatgagaaaggagcgcgaggaggcaagcagtgagcagaaagtgtccatcatccagctcttcaccaattcttcatatcggcaacccatcctggtcgccttgatgctgcacgtggcacagcagttctcaggcataaacggtatcttctactattccacttcaatcttccagaccgccggcatctccaagcccgtgtacgctaccattggcgtgggggcagtcaatatggtgttcaccgcggtgagcgtcttcctcgtggaaaaagccggaagacgctcgctatttttaatcggaatgagcggtatgttcgtttgcgctatcttcatgtcagtgggactcgtgctccttaacaagttctcttggatgtcatacgtttctatgattgctatctttctttttgtcagcttctttgaaatcggccctggaccaatcccatggttcatggtagccgaattctttagtcagggaccaagacctgccgccctggcaatagccgccttttccaattggacttgtaactttatcgtggcactgtgttttcaatacattgctgacttttgcgggccctacgtttttttccttttcgcgggcgtcctgctcgcctttacgctttttaccttttttaaggtgcccgagactaaaggcaagagttttgaagaaatagccgcagagttccagaagaagtctgggtctgcccaccgcccgaaggccgcagtggagatgaaattcctcggggccaccgaaactgtc

SEQ ID NO: 7199 - DNA, 1572 bp, Artificial Sequence
  derived and/or modified sequence
atgaccgaggataaggtgactggtactctcgtctttactgtcatcaccgccgtgcttggatccttccagttcggctacgacatcggagtgatcaatgctcctcagcaggtgatcatctcccactacaggcacgtgctgggcgtgccactcgacgatcggaaagctatcaataactacgtgatcaactcgaccgacgagctgccgactatctcatactctatgaatcctaagcccaccccgtgggcggaagaagaaactgtggccgcggcccagctgataactatgctgtggtccctgtcagtgtcctcgtttgcggtgggcggaatgactgccagtttctttggaggatggctgggggacaccctgggacggatcaaagcaatgctggtggctaacattctgtctttggtgggtgccctgctgatgggtttctcgaagctgggaccatcacacatcctcatcatcgcaggacgctcgatctcgggcctgtactgcggactcatttcaggcctcgtacctatgtacatcggtgagatcgcaccgaccgcgttgcgcggggctctgggtactttccatcaactggcaatcgtgacgggaatactcatttcacagatcattggtctggagttcatcttgggaaattacgacctgtggcatatactgctcggcctctcgggagtgcgtgcaattctccaaagcctgctcctgttcttttgtccagaatcaccgcggtatctgtatatcaaactggatgaagaagtcaaggctaagcagtcccttaagagattgcgtggatacgacgatgtcacgaaggatatcaacgagatgcggaaggaacgagaggaagcgtcgtcagagcagaaagtgagcatcatccaactctttactaactctagctaccgccagcccatcctcgtcgccctcatgctgcacgtggcccagcaattctcgggaattaacggaattttctactactcgacctccatcttccagaccgccggcatcagcaaaccggtctacgccactataggtgtgggggcggtgaacatggtgttcacggcagtctctgttttcttggtcgagaaagcgggtaggcgctccttgttcctgattggaatgtccggtatgttcgtctgcgctatctttatgagcgtgggactggtgctcctcaacaagttctcgtggatgagctacgtttcgatgatcgctatcttcctgtttgtgtcgttcttcgaaatcggacctggacccatcccatggttcatggtcgccgagttcttcagccaagggccgcgcccagcagcgctggccatcgctgccttttccaactggacttgcaactttattgtggcgttgtgcttccagtacatcgccgacttctgtggcccttacgtcttttttctctttgcgggtgtcctcctggccttcaccctgttcacgttcttcaaagtcccagagacgaaaggtaagagctttgaagagattgccgccgaattccaaaagaagtcggggtccgcccatcgaccgaaagccgcggtggaaatgaagtttttgggcgcgaccgaaaccgtg

SEQ ID NO: 7200 - DNA, 1572 bp, Artificial Sequence
  derived and/or modified sequence
atgaccgaggataaagtcactggcaccctggtgtttactgtcattaccgccgtgctgggttcatttcaattcggatacgacattggtgttatcaacgccccacagcaggtgataatctcgcattaccgacacgtgcttggcgtgccacttgatgatagaaaggcaatcaacaattatgtcattaacagtacggatgaactgcctaccatctcatactctatgaatcctaagccgacgccttgggctgaggaagaaactgtggcagccgcgcagctcattactatgctgtggtcactttcagtgtcatcattcgcggtcgggggcatgaccgcgtcgttttttggcggatggctcggtgacactctgggtcgcattaaggcgatgctggtggcgaacatcctttccctggttggggccctcctcatggggttttcgaaacttggtccttcacatattctcattatcgcaggaaggtcaatctcggggttgtactgtggacttatttcagggctggtccctatgtacatcggcgaaattgcaccaactgcgctgaggggggcactggggactttccaccagctggcgatagtgactggaattctgatatcccaaatcattggtcttgaattcattctgggtaattacgacctgtggcatattctccttggactctccggagtgagagccattctgcaatcactcctgctgttcttctgccccgaatcccccaggtacttgtacattaaactggatgaagaagtgaaggccaagcagagccttaagcgcctgaggggttacgatgatgtgaccaaagacattaacgaaatgcggaaggagcgagaggaagcatcgagcgaacagaaggtcagcattatacaacttttcaccaactcctcctacaggcaaccaatccttgtggcgttgatgctccatgtcgcacagcaattttccggaatcaacgggattttctattactcgactagcatctttcaaaccgcgggtatatccaagcccgtgtacgccacgattggagtgggagcagtgaacatggtctttaccgcggtatcggtctttcttgtggaaaaggccggccggcgtagcctgtttcttatcgggatgtccggtatgtttgtttgcgcaatattcatgtcggttggactggtcctgttgaacaaattctcctggatgtcgtacgtgtcaatgatcgcgattttcctgtttgtctcctttttcgaaatcggacctggaccaatcccatggtttatggtcgcggagttcttttcgcaaggacctcggccagcagcacttgccatcgcagcattttcgaactggacctgtaatttcatcgtggcgctttgttttcagtacattgcggatttttgcggaccatacgtgttctttctgtttgccggtgtgcttctggcgtttaccctgttcactttctttaaggtgccagagacgaagggaaaatcctttgaggaaattgcagccgaatttcaaaagaagtccggatccgctcacagaccgaaggccgcggtggagatgaagttccttggagcaaccgaaaccgtg

SEQ ID NO: 7201 - DNA, 1572 bp, Artificial Sequence
  derived and/or modified sequence
atgacggaggacaaggtcaccggtaccctggttttcacagtgataaccgcggtgctaggcagcttccagttcggttacgatattggcgtcataaatgccccccagcaagttattatcagtcattaccgccacgttctcggtgtcccgcttgacgaccgtaaggctatcaacaattatgtcatcaactccaccgacgaacttcccacgatatcatattcgatgaacccaaaacctacgccctgggctgaagaggaaacagttgcggcagcacaactcatcacgatgttgtggagtctgagtgtttcgtcgttcgctgtcgggggtatgactgcgtcttttttcggcggatggttaggcgacactctgggccgtataaaggcaatgctcgtggctaacatactttcgctagtcggagcattgctgatgggtttttcgaagctgggcccttcccacattctcattatcgctgggaggtcgatttctggtctctattgtggtcttattagtggtctcgttccaatgtacatcggggagattgcccctactgcgctgcggggtgccctcggtacctttcaccaattggcaatcgtgaccgggatcctcatttcccaaataatcggattggaatttattctgggaaattacgatctgtggcatatcttgctggggctttcaggggtgcgtgccatcctccagtcactgctgctctttttttgccccgagtcgcctcgttacttatacatcaaactggatgaggaggttaaggccaagcaatcgttgaaacgtctccgaggctatgacgacgtgacaaaagatattaacgaaatgcgaaaggaacgcgaagaagcctcgtccgagcagaaggtttccatcatccagctcttcaccaattcttcataccggcagccaatcttggtcgccctcatgctacacgttgcacagcagttttctggaatcaatggtatcttttactactccacttctatcttccaaacagccgggatctccaagccggtatatgcgacaatcggcgttggcgcggtaaatatggtgttcaccgcagtgagtgtattccttgtggagaaggctgggcgacgatccctctttcttattggcatgagcggcatgtttgtttgtgcaattttcatgtcggttggccttgtacttctcaacaagttcagctggatgagttacgtctccatgattgctatcttcctattcgtctcgttttttgaaattgggccaggaccaattccctggtttatggtggcggagttcttttcacaagggcctcgcccagcggccttggccatagcggcgttctcgaattggacatgcaatttcatagtggctttgtgcttccaatatatcgccgatttctgcggtccctatgttttcttcctgttcgcaggcgtcttgctcgcgtttaccctctttacgttctttaaggttcccgagaccaaaggtaagtcattcgaggagattgccgcggagttccaaaagaaatctgggagtgcccatcgaccaaaagcagccgttgaaatgaagtttctcggtgcgaccgaaaccgtg

SEQ ID NO: 7202 - DNA, 1572 bp, Artificial Sequence
  derived and/or modified sequence
atgactgaggataaggtgacaggcaccctggtgtttactgtgatcaccgccgtcctcggaagtttccagtttggatacgatatcggagtgattaatgcgccccagcaggtcatcatcagccattaccgacatgtgctgggagtacccctggatgaccgaaaggccatcaataactatgttataaattccacagatgaactccctacaatttcctactcaatgaatccaaaacccaccccatgggccgaggaggaaacagtcgccgcagcacaattgatcactatgctgtggtccctcagcgtgagttctttcgcggtcggcggcatgacagcctcatttttcgggggctggcttggagatactctgggacggataaaagccatgctggttgccaatatactgtcattagtgggtgcgctcctaatggggtttagcaaacttgggccttcacatattctgattatcgccggacgttccatctcaggcctctactgtggcctgattagcggtctcgtccctatgtacatcggcgaaatagcccccaccgctctgagaggtgcactcggaacctttcatcagctggccattgtgactggaatcctgatcagccagattatcggcctcgagttcatcttgggaaattacgacttgtggcacatcctgcttggcttgtctggagtcagagcaattctgcaatctctgctgctgtttttttgtccagaatctccgcgatatctttacattaagttagacgaagaagtgaaggcaaaacagagtctaaaacgacttcgaggttatgacgatgtgaccaaggacatcaatgaaatgagaaaagagagagaggaggcaagctctgagcagaaagtgtcaattatccagctgttcactaactccagttacaggcagccgatccttgtcgccttgatgctgcacgtggcccagcagttctccggcatcaatgggatcttttattacagtaccagcatctttcaaaccgctggcattagtaaacctgtgtatgctacaatcggtgtcggcgctgttaatatggtttttacagcagtgagcgtgttcctcgtggaaaaggctgggcgaagatccctgtttctgataggaatgtcgggaatgtttgtttgcgccatatttatgtcagtcgggttagtgctgcttaacaagttttcttggatgtcatacgtctctatgattgccatctttctcttcgtgagcttttttgagatcggaccaggccccattccctggttcatggtggccgaatttttttcgcagggccctaggcctgcagctcttgcaatcgccgccttctctaattggacctgtaactttatagtggcactttgcttccaatacatagctgacttctgcggcccatatgtgttctttctgtttgctggggtgctgctcgctttcactctgttcacattcttcaaagtgccggaaaccaaagggaaatcttttgaggaaatcgccgccgaattccaaaagaagtccggttctgcacacagacctaaagctgctgttgaaatgaagtttcttggtgccactgaaaccgtc

SEQ ID NO: 7203 - DNA, 1572 bp, Artificial Sequence
  derived and/or modified sequence
atgaccgaagataaggtcaccggtactctggtttttaccgtgatcactgccgtcctcggctcgtttcagttcgggtacgacatcggagttatcaatgcacctcaacaggtgatcatcagccactaccgccacgtgcttggcgtccctctggacgaccgcaaggccataaacaattacgtgatcaactccaccgacgaactgccgactatttcctactcgatgaacccaaaaccaactccttgggcggaagaggaaaccgtggccgccgcccagctgatcaccatgctgtggagcctcagcgtctcatcgtttgctgtgggagggatgacggcgtctttctttggcggctggctgggagatactctcggccggatcaaagccatgctcgtggccaacatcctctccttggtcggagctctgctcatgggatttagcaaactgggcccgtcccatatcctgattattgcgggaaggtcgatttcgggactgtactgcggactgatcagcggcctggtgccgatgtacattggagagatcgctccgactgcgctcaggggcgcgctgggaacctttcatcagctggcgatcgtgaccggaatcctgatctcccagatcatcggcctggaattcatccttggaaactacgatctctggcatatcctgctcggtctgtcaggagtgcgggctatcctgcagtccctcctcttgtttttctgcccggaatcaccgcgatacctgtacatcaaactggatgaggaagtgaaggccaagcaatcgctcaaacggcttagaggctacgacgatgtgactaaggacatcaatgagatgaggaaggaaagagaagaggcatcatcggaacaaaaggtgtcgatcatccagctgtttaccaattccagctacagacaaccgattctggtggccctgatgctccacgtggcacagcaattcagcggaatcaacggaatattctattactcaacttcaatcttccaaactgccggcattagcaagccagtgtacgcaaccattggagtgggcgccgtgaatatggtgtttaccgcagtgtcggtctttctggtggaaaaagcaggacggcggagcctgttcctgatcggcatgtcagggatgttcgtgtgtgcaatcttcatgagcgtgggcctggtgttgcttaacaagttctcctggatgtcgtatgtcagcatgatcgcgatcttccttttcgtctcattcttcgagatcggtcctggccctatcccttggttcatggtggcggagttcttctcgcaagggcctcggccggccgcgctcgcaatagccgcgttctccaactggacttgcaatttcatcgtggcgctctgtttccaatacatcgccgacttctgcggaccttacgtgtttttcctgttcgccggagtcctcctggctttcaccctgttcactttcttcaaggtgccagaaacgaagggcaagtcatttgaagagattgctgccgagttccagaagaagtcaggatccgctcacagacccaaggcggcggtcgagatgaagtttctcggagccaccgaaaccgtg

SEQ ID NO: 7204 - DNA, 1572 bp, Artificial Sequence
  derived and/or modified sequence
atgacagaagacaaggtaacaggcacccttgtgttcactgtcattaccgccgtgctgggctcattccagtttggctacgacataggcgtgatcaatgccccgcagcaggtgatcatctctcactataggcacgtgctgggggtccccctagatgaccgcaaggctatcaacaattatgtgatcaatagtaccgacgagcttccaactatctcctacagcatgaatccgaagccaactccctgggccgaggaagagactgtggctgccgcccagttaataactatgctatggtccctaagtgtatcttcatttgctgttggcggcatgaccgcgagcttcttcgggggatggctcggcgatactctagggagaatcaaggccatgctcgtcgctaacattctatctctcgtgggagccttactgatgggcttcagtaaactgggccccagtcacatcctgatcatagctggccgctcgatatccggcctgtattgcggccttatctcaggtttagttcccatgtacataggagaaatcgcaccaacagctttgcgaggggctctgggaacattccatcagctcgccatagtcacagggatcttgatctcccagatcataggactggaatttatcctcggcaactacgatctgtggcatattctcctaggtttatcaggagtaagggcgattctccagtctttgctcctgtttttttgtcccgagtcccctcggtacctgtatatcaagttggacgaagaggtgaaagccaaacagtcattaaagagattaaggggctacgatgacgtcaccaaggacatcaatgagatgagaaaggaaagagaggaggctagcagtgagcagaaagtgagtatcattcagttgttcaccaattcaagttaccgtcagcccatcctcgtcgcgctgatgctgcacgtcgctcaacagttctctggcattaacggaatcttttactactcgacaagcatctttcagaccgccgggattagcaagcctgtgtatgccacaattggcgtgggggccgtcaacatggttttcaccgcagtgtcagtgttcctggtagagaaggcaggcagacgcagcctttttctcattggaatgagcgggatgtttgtctgcgccatctttatgagcgtcggtctcgtgctcctcaacaaatttagctggatgagttatgtgagcatgatcgcaatattcctgttcgtgtcatttttcgagattggtccaggcccgatcccctggtttatggtggcagagttttttagtcagggacctaggcctgctgcactggccatagcagccttttccaattggacctgtaatttcatcgtagctctgtgcttccagtacatagcagacttctgcggtccttacgtgttcttcctgttcgctggagtgttgctcgccttcactctgttcaccttcttcaaggtgcctgagacgaagggaaaaagcttcgaagagatcgcggcggaattccagaaaaagagtggctccgctcaccgtcctaaagctgccgtggagatgaaattcctgggtgccacagagactgtt

SEQ ID NO: 7205 - DNA, 1572 bp, Artificial Sequence
  derived and/or modified sequence
atgaccgaagacaaggttaccggtaccctggttttcactgttatcaccgcagtactcggttcattccaatttggttacgacatcggtgtcattaacgcgccccaacaagtcatcatatcgcactatcgccacgtccttggcgtcccactggatgacaggaaggctattaataattacgtgatcaactccacggacgagctcccaactatcagttactcgatgaacccaaagcccacgccgtgggccgaagaagaaaccgtcgctgctgcccaattaatcacgatgctttggagtctgtccgtctcctccttcgccgtcggtggcatgaccgcttccttctttggaggctggctcggtgacaccttgggccgtattaaagccatgcttgtcgccaacattctcagcttagtcggcgccctccttatgggtttctcgaagcttggtccgagccacatcctgatcattgccggtcggtctatcagcggtttgtactgcgggctcatttcaggcttggtgcccatgtacataggtgagatcgcccccaccgctctccgtggcgccctcggaaccttccaccagctggctatcgtcactggaatcctcatttcacagataatcggtctggaattcatcctaggcaactacgatctgtggcatatcctcttgggcctgtccggtgtccgggctatcctgcagtccttgttgctgttcttctgccccgagtccccccgatacctgtatatcaagttggacgaggaggttaaggccaagcagtccttgaagcgcctccgtggctacgacgacgtgacgaaagatatcaacgagatgcgcaaggagcgtgaagaagcctcgtccgagcagaaggtgtctatcatccagctttttactaacagctcgtacaggcaaccaatcttggtagctctgatgctccatgtggcacagcagttctctggcatcaacgggatcttctactattcgaccagtatttttcagaccgcgggtatctccaagcccgtatatgccactatcggtgtcggtgctgtcaacatggttttcactgcagtctctgtcttccttgttgagaaggcgggacgacgctcgctgttcctcatcggtatgtccggaatgttcgtctgcgccatctttatgagcgttggactcgttctcttaaacaagttttcgtggatgtcctacgtctcgatgattgccatctttctcttcgtcagcttcttcgagatcggccctgggcccatcccatggttcatggtggcagagtttttttctcaaggcccacgccccgccgccctggccattgctgccttcagcaactggacctgtaattttatcgtcgccctttgcttccagtacatagccgacttctgcgggccttacgtcttcttcctcttcgctggcgtactccttgccttcacattattcacgtttttcaaggtccccgagacaaagggtaagtcatttgaggaaatcgccgccgaattccaaaagaagtccggctcggctcaccgtcctaaggctgctgtggagatgaagttcctgggggcaacggagactgtg

SEQ ID NO: 7206 - DNA, 1572 bp, Artificial Sequence
  derived and/or modified sequence
atgactgaagataaggtgactggcaccctggtctttactgttatcactgcagtgctgggttccttccaattcggttacgacattggagtcattaacgccccgcaacaggtcatcatcagccactacaggcacgtgttgggagtgccgctggatgaccgcaaagccattaacaactacgtcatcaactcgactgatgagctccctactatttcctactctatgaatcccaagccgacgccatgggcggaggaagagactgtcgccgcagcgcaactgattaccatgctgtggtcgctctcggtgtcatcctttgcggtcggagggatgactgcctcattctttggaggatggctcggcgacactcttggaagaatcaaggcaatgctggtcgccaacattctcagcttggtgggggcgcttctgatgggtttctcgaagctgggaccttctcacattctcatcatcgccggacgctccattagcggactgtactgcggcctcatctcgggattggttcccatgtacatcggagaaatcgctccgactgccctgcgcggagcgctgggaacttttcaccaactcgcgatcgtcaccggtatcctcatttcacagatcatcgggctcgaattcatcctgggcaattacgacctctggcatatacttcttggattgtcgggcgtgcgcgccatcttgcagagcctgctgctcttcttctgtccggaaagcccacgctacctttacattaagctggacgaggaagtgaaggccaagcaatcccttaaaaggctgcggggctacgacgatgtcaccaaggacatcaacgaaatgcgcaaagagcgcgaggaagccagcagcgaacaaaaagtgtcgatcatccagctgttcaccaattcgtcgtaccgccagccaatcttggttgctctgatgctgcatgtcgcccaacaattttccggcatcaatgggatcttctactactccacttccatctttcaaaccgccgggatttccaagcccgtgtacgcaactatcggagtgggagctgtgaacatggtgttcactgcagtgtctgtgttcctggtcgaaaaagcgggacggcgctcgctcttcctgatcgggatgtcaggaatgtttgtgtgcgccatcttcatgtcggtcggactggtgctcctcaacaagttctcatggatgtcgtacgtctccatgattgcaatcttcctgttcgtttcgttctttgaaatcggaccgggccccattccatggttcatggtggcggagttcttctcccagggaccacggccggcggctctggcaattgccgctttcagcaattggacttgcaatttcattgttgccctgtgcttccagtacatcgcggacttctgcgggccttatgtgttcttcctctttgccggagtcttgctggctttcaccttgttcaccttcttcaaggtgcctgaaactaagggaaagtccttcgaggaaatagccgccgaatttcagaagaaatcgggatcagcccaccgcccgaaagcagcggtggaaatgaagttccttggagccaccgagactgtc

SEQ ID NO: 7207 - DNA, 1572 bp, Artificial Sequence
  derived and/or modified sequence
atgacggaagataaagtaacaggtaccctggtattcacagttattacggccgtcctgggtagcttccaatttggttacgatataggcgttatcaacgcgccgcagcaagtgattatctcgcactatcgtcatgtacttggtgttccattagatgatagaaaagcgattaataactatgtgattaactctacagatgaactgccgacgatttcatatagtatgaacccaaagccgacaccgtgggctgaggaggaaaccgtcgctgccgctcagctgataacaatgctttggtcattatcagtatcatcgttcgctgttggcggtatgactgcgagctttttcggtggctggttaggggatacacttggacggattaaggcgatgcttgttgctaacattctgtctctggtcggcgcattacttatgggcttttctaaacttggaccctcacatatcttaattatcgccggacgtagcatctcaggactttattgtggattgatttctggtttagttccgatgtacattggcgagattgccccgactgccctgaggggcgcgcttggaacctttcatcaactggcaatcgttacgggcatcctgataagccagataatcgggctagaattcattcttggaaactatgatttgtggcatattttacttgggctttcaggagttagagcaatccttcaaagccttcttctgtttttttgtccggaaagtccgcggtatctatacattaagcttgatgaagaagtcaaagctaaacagtcattaaaaagactgagaggatatgatgacgtcacaaaggacataaacgaaatgcggaaagaacgcgaagaggcgtcgagcgaacaaaaagtctccatcattcagttgtttactaatagctcgtatagacagccaatcttagttgcgcttatgttacatgttgcacagcagttttcggggatcaacggaattttctattactcaacaagtatctttcagacagcaggcattagcaaaccggtgtatgcgactattggggtgggcgcggtgaatatggtgtttacagcggtttctgtctttttagttgaaaaagcaggacgccggagcctgtttctgattggcatgtccgggatgtttgtatgcgccatcttcatgtctgtgggtttggtactgcttaataaatttagctggatgtcttacgtttcgatgattgccatttttctgtttgtaagctttttcgagatcgggccagggccgatcccttggttcatggtagcagaattcttttctcaaggaccgcgcccggctgcattggcgattgcagcctttagtaattggacttgtaattttattgtcgccctctgctttcaatatattgccgatttttgcggcccttacgtattttttctgtttgcgggagtgctgttagcgtttacgttgtttacattttttaaagtgccagaaacaaaggggaagtcattcgaagagatcgctgcggagtttcaaaaaaaatccggaagtgctcatcggcctaaggccgccgttgaaatgaaattcttgggcgccactgaaacggtc

SEQ ID NO: 7208 - DNA, 1572 bp, Artificial Sequence
  derived and/or modified sequence
atgacggaagataaagtgactgggactctggtctttacggtcattactgcagtgctgggatcctttcaattcggatacgatataggagtcatcaatgccccccaacaggtgataatctcacactacagacatgtgctgggggtgcctttggatgacaggaaggcaatcaacaactacgtcattaactctaccgacgaacttcctaccatttcctactcaatgaaccctaaacctactccttgggccgaggaagaaaccgtcgccgccgcccagcttattaccatgctgtggtcactgtcagtctccagctttgcggtcggaggaatgacggcatcgttttttggaggttggttgggcgacacgctgggaagaatcaaagcaatgctcgtggctaatatccttagcctggtgggtgctctccttatgggattttcaaaactcggtccttcccatatcctgattatcgcaggacgaagcattagcggtctgtactgtggactcatttcaggcctggtccctatgtacattggagagatcgcgcctactgcactcagaggtgcgctgggcacctttcatcagctggccatcgtgaccggtatacttatctcgcagataatcggcctggagtttatactcggcaattacgatctttggcacattctccttggtttgtcgggtgtgcgtgctattctgcagtcgctgcttctgttcttttgtccggagtcaccacgttacctctacatcaagctggatgaggaagtgaaggcaaagcagtccctgaagagacttcgcggttacgatgatgtgaccaaggacatcaatgaaatgcggaaggagcgagaagaggcatcatcggaacaaaaggtgagcataatccagctctttaccaactcttcctacaggcaaccaatcctggtcgcccttatgcttcatgtggcacagcaattttcagggattaatggcatcttctactattccactagtattttccagactgcaggaatttcgaagccagtgtacgcgaccatcggtgtgggtgcagtgaatatggtgtttacggcagtgtcggtctttttggtggaaaaagcgggaaggaggtcgctgttccttattggcatgagcggcatgtttgtttgcgcgattttcatgtccgtcggacttgtacttcttaacaaattcagctggatgtcttatgtgtccatgattgcgatttttctctttgtttcattcttcgaaatagggcccggacccattccgtggttcatggtcgcagaattctttagccaaggccctcggccagcggccctggcgatcgccgcattctcaaactggacttgtaactttattgtggcgctttgctttcaatacattgcggatttttgtgggccttacgtcttttttctttttgcaggggtccttcttgcgtttaccctctttacgttctttaaggttccagaaaccaaaggtaaatcgtttgaagaaattgccgcagaattccagaagaaaagcggttctgcccatcgccctaaggcagctgtggaaatgaagttccttggagctactgaaaccgtc

SEQ ID NO: 7209 - DNA, 1572 bp, Artificial Sequence
  derived and/or modified sequence
atgactgaagataaggtgaccgggactctcgtgttcactgtcattactgcagtgctcggatcgtttcaattcggttacgacattggggtgattaacgctccacagcaggtgatcatatcacattaccgtcacgtgttgggggtgcctcttgatgatcggaaagcaatcaacaactacgtgattaactcgaccgatgaacttcctactatctcgtactcaatgaacccaaaacctactccctgggcggaagaagaaacggtcgctgctgcccaacttatcaccatgctgtggtccctgtcggtgagctcctttgcagtcggaggaatgaccgcatcgttcttcggaggctggcttggggataccctcggcagaataaaggcaatgctggtcgcgaatattctttcactggtgggggcactccttatggggtttagcaagctggggccatcccatattctcatcattgcggggcggtccatctcgggactgtactgtggactgatctcgggtttggtccccatgtacataggcgaaattgcaccaactgccttgcggggtgcactcggaacttttcatcaactggcaatcgtgactgggatacttattagccagattatcggcctggaattcattctgggcaactacgacctttggcatattcttcttggactgtcgggtgtccgcgccattttgcaaagccttctgctctttttctgtccggaatcaccgagatacctctacattaagctggatgaagaagtcaaagccaagcagagcctgaaacgtcttagaggatatgatgatgtgactaaggacattaatgaaatgaggaaggaacgggaggaagcctcgtcggaacagaaagtgtcaatcattcagctttttaccaattcttcgtacaggcagccgattctggtggcactgatgctccacgtggcacagcaattttcaggtattaacgggattttctattactccacttccattttccagaccgcaggaatttcaaaacctgtctatgcaactatcggtgtcggcgctgtgaatatggtctttacggccgtgtccgtgttcctcgtggagaaagcaggacggcgctcgctttttctgattggcatgtccgggatgttcgtgtgtgccatctttatgtcagtgggcctggtcctccttaacaaattctcgtggatgtcatacgtttccatgattgccatcttccttttcgtctcgttttttgagattggtcctggaccaattccctggtttatggtggcggagtttttcagccaaggacctagaccagccgctctcgccatcgcagcattctccaactggacctgcaactttattgtggcgctttgttttcagtacattgccgatttctgcggtccttacgtattctttctgtttgcgggcgtcctgctggcatttaccctgtttacgtttttcaaagtccctgaaaccaaggggaaatcctttgaggaaatagccgctgaatttcagaagaaatccggctcagcacatagacccaaggcagccgtggaaatgaaatttctgggtgcgaccgaaaccgtc

SEQ ID NO: 7210 - DNA, 1572 bp, Artificial Sequence
  derived and/or modified sequence
atgacagaggacaaggtgacaggaacgttggtgtttacggtgattaccgctgttctcggatcgttccagttcggttatgacataggagtgattaatgctcctcagcaggtcattatcagccactaccgccacgttctcggcgtgcccttggacgacaggaaagccatcaacaactatgtgattaatagcaccgatgagctcccaactatttcttattctatgaaccccaagcctaccccctgggctgaagaggagacagtcgcggcagcacagctgataacaatgctgtggagcctcagcgtttccagtttcgctgtaggtggtatgactgccagcttttttgggggctggctcggtgacaccttggggaggatcaaggctatgctcgtggctaatatcctatccttagtgggtgccctcttgatgggtttttcgaagttgggcccctcgcatattctgatcattgccggccgatccattagcggactttactgtggcctaatatcaggcctcgtgccaatgtatattggcgagatagcccctaccgcactaagaggagccctagggaccttccatcaactcgcaatcgtgaccggaatactgatatctcagatcataggcctggaatttattctgggcaactatgacctgtggcatatactgctcggcctgtcgggggtgcgcgctattcttcagagtctcctgctgttcttttgtcctgaaagtccgcggtacctgtacattaaactggacgaggaagtaaaggctaagcagagtttgaagcgactgaggggctacgatgatgtcactaaggatattaatgagatgcgaaaagaaagagaagaggcgagctccgaacaaaaagtgtccataatccagctgtttacaaattcttcctaccgacagcccatacttgttgctctgatgctgcacgtggcacagcagttcagtggtatcaacggaattttttactattccacctccatatttcagacagccggcataagcaagcccgtatacgcaaccatcggcgtgggcgccgtgaatatggtcttcactgctgtctccgtcttccttgtggagaaggccgggcgtcggagcctgtttttaattgggatgagcgggatgttcgtgtgtgctatatttatgtctgttggcctggtgctccttaataagttttcatggatgtcctacgtttccatgattgccatctttctgtttgtgtccttttttgaaataggacccgggcctataccatggtttatggtggcagagtttttctctcagggccctaggccagccgcgttggccattgccgcgttcagcaattggacctgtaactttattgtggcattgtgcttccagtacatagccgacttttgtgggccctatgtgtttttcctctttgcgggcgttctgctggccttcactctcttcacattttttaaagtccccgagacaaagggtaagtccttcgaagagatcgctgccgaattccagaagaaatccgggtccgcccaccggccgaaggcagctgtcgaaatgaagtttctgggagccaccgagacagtt

SEQ ID NO: 7211 - DNA, 1572 bp, Artificial Sequence
  derived and/or modified sequence
atgaccgaggataaggtgactggaaccctggtgttcactgtgatcaccgcggtgctgggttcatttcaattcgggtacgacatcggagtgatcaacgcaccgcaacaggttatcatttcacactacagacacgtgctgggcgtgccacttgatgatcgcaaagcaatcaacaattacgtgataaactcgacggatgagctgccaaccatctcatattcaatgaatccgaagcccacgccttgggcggaggaagagactgtcgccgccgctcagctcattaccatgctgtggtccctttcagtcagctccttcgctgtggggggaatgaccgctagcttcttcggtggctggttgggcgataccctcgggcgcatcaaagcaatgctggtcgcaaatatcctgtccctggtcggtgccctgcttatgggattcagcaagttgggtccgtcgcatattctcatcatcgccggaagaagcatatcaggactctactgcgggctcatctcaggactggtacccatgtacataggagagatcgcccccactgcactgagaggggctttggggactttccatcagctcgcaattgtcacgggtatcctgattagccaaatcatcggactggagtttatcctgggaaactacgacctctggcatatcctgctgggactgagcggcgtccgggcgatcctgcagtccctgttgctcttcttttgcccagaatcccctcggtacctgtacatcaaactggacgaggaagtgaaggctaagcaatccctgaagcggctccggggatatgacgacgttactaaggacatcaatgaaatgcgcaaggagcgggaagaggcttcctcagaacaaaaagtctcgatcattcaactgtttacgaactcgagctaccgccagcctatcctcgtggccctgatgcttcacgtggctcagcagttctcaggcataaacggaatcttttactactcgaccagcatctttcagaccgccggcatttcgaagccagtctatgcgactattggcgtgggagcggtcaacatggtattcaccgccgtctctgttttcctcgtggaaaaggccggcagaagatccctgtttctgatcgggatgtccggaatgttcgtctgcgcaatctttatgtccgttggactcgtgctcctgaacaagttctcttggatgtcgtacgtgagcatgatcgccatcttcctgttcgtgtctttctttgagatcggcccggggccgattccgtggtttatggtggctgagttcttctcgcagggaccccgccccgccgctctggccattgccgcatttagcaattggacttgtaactttattgtcgccctctgctttcaatacatcgccgacttctgcggcccgtacgtgttctttcttttcgccggcgtgctgcttgcctttactcttttcaccttctttaaagttcctgaaacgaagggcaaatcgttcgaagaaatcgccgcagaattccagaagaagagcgggagcgcacaccgacctaaggccgcggtggagatgaaattcctgggagctactgaaactgtg

SEQ ID NO: 7212 - DNA, 1572 bp, Artificial Sequence
  derived and/or modified sequence
atgaccgaagataaagtgacgggaacgctggtgtttaccgtcatcactgcagtgctgggctcattccagtttggatacgacattggagtcatcaacgctcctcaacaagtgattatttcccattaccgtcacgtgctgggagtgccgctcgatgacagaaaagccatcaacaactacgtcatcaacagcaccgacgagctcccaacgatttcgtacagtatgaatccgaaaccgaccccgtgggctgaagaagaaacggtggcagcggcgcagctgatcaccatgttgtggagcctgtcagtttcgagcttcgccgtgggaggcatgacggcctcctttttcggtggctggctgggcgacaccctcgggcgcatcaaggcaatgcttgtggcgaacattctgtcgctggtgggagcactgctcatggggttctccaaactcggaccttcgcacattttgatcatcgctgggcgttctatttccggattgtactgcggtctgatctccggcctcgtcccaatgtatatcggggagatcgcccctaccgcgctgcgcggcgccctcggtaccttccaccagctggcgatcgtgactggtatccttatctcacaaatcatcggacttgagtttatcctcggaaattacgatttgtggcatattctccttggactctcgggagtgcgcgccatcctgcaaagcctgctgctgttcttctgtcctgaatctccacgctacctttacatcaaacttgacgaagaggtgaaggcaaagcagagccttaagaggctccggggatacgatgatgtgaccaaggatataaacgagatgcgcaaggagcgcgaagaggcatccagcgagcagaaggtttccatcattcagctgttcaccaactcaagctatcggcaacccatcctcgtggcactgatgctgcacgtagcgcagcagttctcgggtatcaatggcatcttctactacagcacttcaattttccagactgccggcatctctaaaccggtctacgcaaccataggagtgggggccgtcaacatggtcttcactgctgtgtcggtgttccttgtggaaaaggctggacggcggtcgctcttccttatcggaatgtccgggatgttcgtgtgcgccatcttcatgtcggtgggactggtcttgctgaataagttctcctggatgtcatatgtatccatgattgcgatcttcctcttcgtgagcttctttgaaatcggtcccggacctataccctggtttatggtggcggagttcttttctcaaggaccccggcccgcagccctggccatcgcggctttctcaaattggacctgcaatttcatcgtggccctgtgcttccagtacatcgcggacttttgtggaccatacgtcttcttcctgttcgcaggggtcctgttggccttcactctgttcacttttttcaaggtgccggaaactaaggggaagtcgttcgaagaaatcgccgcagagttccagaagaagagcggaagcgctcacaggccgaaggctgctgtggagatgaagttcctgggagccactgaaactgtc

SEQ ID NO: 7213 - DNA, 1572 bp, Artificial Sequence
  derived and/or modified sequence
atgactgaagataaggtgaccggcaccctcgtgttcactgttataactgcagtcctgggatcctttcagtttggttacgatatcggggtgatcaacgcgcctcagcaggtgatcatcagccactacagacatgttttgggcgtgccactcgatgaccgaaaggcaatcaacaattatgtcatcaattcaaccgatgaactccctaccatctcgtactccatgaacccaaagcccaccccgtgggcagaggaagaaaccgtggccgccgcacaactcattactatgttgtggtcgctgtcggtgtcgtcatttgcagtgggagggatgacggcatcgttctttggtgggtggcttggagacactcttggtaggattaaggcaatgcttgttgccaacatattgagcctggtgggagcgcttcttatgggttttagcaagctcggtccgtcccatatacttatcatagcaggccggtccatttccggactctactgcggccttatctcggggctggtgcctatgtacattggtgagattgcaccaactgcactgcgtggagcattgggaacttttcatcaactggccatcgtcaccggaatacttatctctcagattattggacttgagttcatcctgggcaactacgacctgtggcacatcctgctggggctgtcgggcgtccgcgcaatactgcaatccctcctcctgttcttttgtccagagtcgccccggtacctttacattaaacttgatgaagaggtgaaggcaaaacagtcccttaagcgattgcgtgggtacgacgatgtgactaaagacattaatgagatgagaaaagaacgagaagaggcttcatctgagcagaaagtctcgataattcaattgtttaccaattcgtcctataggcagcctatcctggtggcccttatgcttcacgtggctcaacagttttcggggattaatggcatcttttactacagcacctcgatttttcagaccgcgggtatctcgaagccagtctatgcgaccattggagtgggcgcagtcaacatggtgtttacggctgtgtccgtctttttggtggagaaggcaggtaggagaagcctctttctcattggaatgtccggtatgtttgtctgtgcaatcttcatgtcagtgggtcttgtccttctgaataagttcagctggatgtcatacgtgtcaatgattgctattttcctctttgtgagcttttttgagattggacccggaccgattccgtggttcatggtggcggagtttttcagccagggcccacggccagccgccctcgcaatcgcagcattttcgaattggacttgtaactttatagtggccctctgttttcaatacattgccgatttctgtgggccatacgtcttttttctgtttgctggcgtgctgctcgcattcactctgtttaccttcttcaaagtccccgaaactaagggaaagtcctttgaagaaattgcagccgaattccagaaaaagtcggggtccgcccatcgcccaaaggccgctgtggagatgaaatttcttggggctactgaaacggtg

SEQ ID NO: 7214 - DNA, 1572 bp, Artificial Sequence
  derived and/or modified sequence
atgacggaagataaggttacgggaacattagttttcacggtgatcactgcggtgttgggtagtttccagtttgggtatgacataggtgtcatcaacgctcctcagcaggtgatcatctcacactaccggcacgtcctgggagtccccctagatgaccgcaaggcgatcaataactacgtcatcaattcgactgatgaattaccaacaatcagctactccatgaatcccaaaccaactccctgggccgaagaggagaccgtcgccgccgcacagctgattactatgctatggagtctcagcgtttcctccttcgccgttggcggtatgacggcaagctttttcggcggatggctgggagatacccttggcagaattaaggccatgctggtagctaacattttgtctctggtgggggctcttctaatggggttttcaaagctggggccgtctcatatattgattattgccggacgttcaatcagcggcctttactgcgggctcatcagcggactggtcccaatgtacattggcgagattgctcccactgccctgagaggcgcactcggtactttccatcagctggccattgttaccggcatcctgataagccagattattggactggagtttatcctgggaaattacgacctgtggcatatcctcctcggcttaagcggagtccgagccatacttcagtccctactcctgttcttctgccccgagtcccctaggtatctctacatcaagctcgacgaagaggtaaaggctaaacagtctcttaagcggctgagaggatatgacgacgtcaccaaggatataaatgagatgcgcaaggagagagaagaggccagcagtgagcagaaggtgtccattattcaattatttaccaattctagttacagacaacctattctggtagcactgatgctccacgtagcacaacagttctccggtataaatggcatcttctactattctacgtctatttttcagactgccggcatttctaaacccgtttatgctacgattggtgttggagccgtgaacatggtattcacggccgtcagtgtcttccttgtcgagaaggccggccgccggtccctctttcttatcgggatgagtgggatgtttgtgtgtgcaatcttcatgtcagtggggttagttctcttgaacaaattctcatggatgtcctacgtcagtatgatagccatttttctgttcgtgtcatttttcgagatcggacccgggccgatcccatggttcatggtggcagaattcttctcgcagggtcctcgaccagccgctctagcgattgcagccttctcgaattggacttgcaacttcatagtggccctgtgtttccagtatattgctgacttttgcggaccctacgtgttcttccttttcgcaggagtattgttggcattcactctttttactttcttcaaggtaccggaaacaaaaggcaagtcctttgaggagattgctgcagaattccagaaaaaatccggctcagcccatcggcctaaagctgcagtggaaatgaagtttcttggggctactgagacagtg

SEQ ID NO: 7215 - DNA, 1572 bp, Artificial Sequence
  derived and/or modified sequence
atgacagaagataaggtaactggcactcttgtgttcacagtgattacagctgttcttggtagcttccagttcggctatgatattggggttatcaacgctccgcaacaggtcattatctcgcattacagacacgttctgggcgttcctctggacgatcgaaaggcaattaacaactatgtaattaatagcactgacgagttaccaacgatttcctactcaatgaacccaaaaccgaccccatgggctgaagaggaaacagtggctgcagcacaacttatcactatgctatggtccttgtcggtttccagttttgctgtaggcggaatgactgcatccttttttggtggatggcttggtgatacacttggaaggatcaaagccatgctagtagctaacatcttgagtctggtcggagcgcttcttatgggattcagtaaacttggacctagccatatactcataattgcgggcaggagtatttccggactttattgcggattgattagcggacttgttccgatgtatataggagaaatagctccaactgcacttaggggagcgttgggaactttccatcaactggctattgtaaccggtatcttaatctctcaaatcattggactcgagtttattctcggtaattacgacttgtggcatattcttttaggactctcgggcgttagagctattcttcagtccttgctcctgttcttctgccctgagagcccgaggtacctgtatattaagctcgatgaggaggtgaaagccaaacaaagcttgaaaagactcagaggttatgatgatgtgacaaaggatatcaatgagatgaggaaagaacgtgaagaggcatcttctgagcaaaaggtttcaattattcagttattcactaacagtagctatcgccagccaatcttagtagcccttatgctacatgttgcacagcaatttagtggaattaatggcatcttttactattcaacaagtatctttcaaaccgccggtataagtaaacctgtttacgccaccataggagttggtgcagttaatatggttttcactgctgtttccgtttttctggttgaaaaggctgggagacgctccctcttcctgattgggatgagtggaatgtttgtttgtgccatctttatgagcgttggacttgtactattaaacaaattttcttggatgtcatatgtttcgatgattgctattttcttattcgtgagtttttttgagatcggtcctggaccaatcccatggtttatggtcgcagaattcttctctcagggaccacgtcctgcggctttagcaattgccgcattttctaactggacttgtaattttatcgtggcattatgttttcagtacattgctgacttctgtggtccctacgtgtttttcttgtttgccggtgttttgttagcttttactctattcactttctttaaggttcctgaaaccaaggggaagagtttcgaagagattgctgctgaatttcaaaagaaatccgggagtgcacacagaccaaaggccgccgtggagatgaaattccttggtgctacggagactgtt

SEQ ID NO: 7216 - DNA, 1572 bp, Artificial Sequence
  derived and/or modified sequence
atgactgaagataaggtgacgggcactcttgtattcacagtaataactgctgtgctcgggagcttccaattcggctacgacattggcgtcattaatgctcctcagcaggtcattattagccattacaggcacgtcctgggcgtgcccctcgacgatagaaaggcaatcaacaattatgtcattaacagtacagacgagttgcccacaatctcttacagcatgaatccaaagccaaccccatgggctgaggaagagacggtcgctgctgcacagttaattactatgttgtggagcctgagcgtctcatcatttgcagtgggcgggatgactgcgagcttttttggaggatggctcggtgacactcttgggagaatcaaggccatgctagtcgctaacatcctcagtctggtcggggcccttttgatgggcttttccaaactaggtcccagtcacatcttaatcatcgcaggcagatctatttccggactgtattgtggactgattagcggcctcgtgccaatgtatatcggagagatcgcccctacagccctgaggggggcactgggtacattccatcagctcgctatagtgaccggcatcctcatttcgcagatcattgggttggagtttattttggggaactacgatctctggcacatactgttgggcctgtccggcgttcgtgcgatcctccagagcctgttgctcttcttctgtcccgaatccccgcggtatctctatatcaaactggatgaggaggtcaaggcgaagcagagtctgaaacgtctgagggggtatgacgacgtaaccaaggacataaatgagatgagaaaggaaagagaagaagcctcctctgagcagaaggtaagcataatccagctgtttacaaattcctcctatcggcagccgatcctggtagccctgatgctgcacgtagcacagcaattttcgggcattaatgggatcttctattactctacaagcattttccagactgccgggattagtaaacctgtctacgccacaataggcgtaggggcggtgaatatggtgttcacagccgtgagtgtgtttttggtcgaaaaagctggacggcggagtcttttccttataggtatgtccggcatgttcgtctgtgctatttttatgagtgtgggactcgttctgttgaataagtttagctggatgagttatgtgagtatgatcgccatattccttttcgtgtccttttttgagataggccccggtcccatcccctggttcatggtagcggaatttttttcccagggccctaggcccgccgcgctggcaatcgccgcgttctctaactggacctgcaactttatcgtggcactatgtttccagtacatagccgacttctgtggaccatacgtgttcttcctctttgctggggtgctgctggctttcaccctgttcacattctttaaggtgcccgaaacaaagggcaagtccttcgaggagatcgcggccgagtttcagaaaaagtctgggtctgctcataggccaaaagcagcagtggagatgaaattccttggcgccactgaaaccgtg

SEQ ID NO: 7217 - DNA, 1572 bp, Artificial Sequence
  derived and/or modified sequence
atgaccgaggacaaggtgactgggacactggtcttcaccgtaattaccgccgtgctgggctcgttccaattcggttacgatattggagtcatcaatgctccacagcaggttataatttctcactatagacatgtgttgggagtcccccttgatgatcgcaaggccattaataattacgtgattaatagtacagatgagctcccaacaatctcttactctatgaaccccaagcccaccccctgggctgaggaggaaaccgtggcagccgctcagctgatcaccatgttgtggtccctcagcgtgagtagcttcgccgttggcgggatgactgccagctttttcggagggtggttaggcgacacccttgggaggattaaagcaatgctcgttgcaaacatactgtcacttgtgggggccctcttaatggggttcagtaaattgggaccctcacacatactcataatagccggccgctctatatcaggactctactgtggccttataagtgggctcgtaccaatgtacattggagaaatagccccgacagccctgcgcggagcgcttggcacatttcatcagctcgcaatcgtgaccggcatactcatttcacagataatcgggctagagtttattctgggcaattacgacctgtggcatatacttttaggactatcaggagtgagggcaatactgcaaagcttgctgctgttcttttgcccagagtcaccgaggtacctgtacatcaagctggatgaggaagtaaaagcaaaacagtctctcaaaaggctaagaggctacgacgatgtcaccaaggatattaatgaaatgcgaaaggaaagggaggaagcaagctcagagcagaaggtgagcattatccagctatttaccaactcttcctacaggcagcctatcctcgttgctcttatgctgcatgtggcccagcagttttcgggaattaatggcatcttttattatagcacctctatctttcaaaccgccgggatttccaaaccagtgtacgctacgatcggagtgggggccgtgaacatggtgtttactgccgttagcgtgttcctggtggagaaggcaggtaggagaagtctattcttaattgggatgtctggcatgtttgtttgcgccattttcatgagtgtaggcttggtactgctgaacaagttctcctggatgagctacgttagcatgattgcaatttttttattcgtttcattttttgagatcgggcctggccctattccttggttcatggtcgcagagttctttagtcagggacccagaccagccgctttggcaattgccgccttttccaactggacatgtaacttcatagtagcactgtgcttccagtatatcgccgatttctgcgggccctacgtctttttccttttcgccggggtactgctcgccttcacactgttcaccttcttcaaggtccctgaaacgaagggcaaaagtttcgaagaaattgctgcagagtttcagaagaagtctgggtctgctcacagacccaaagcagccgttgagatgaagttcctcggggccactgagaccgtg

SEQ ID NO: 7218 - DNA, 1572 bp, Artificial Sequence
  derived and/or modified sequence
atgactgaggacaaagttacagggacccttgtcttcacagtgatcacggctgttctggggtctttccagtttggatatgacattggtgtgatcaatgcgccacagcaagtgattatctcgcattaccgtcatgttctaggcgtgcctctggatgatcgaaaggcgatcaacaactacgtgatcaattctaccgatgaactccctacgatttcatatagcatgaacccaaagcccacaccctgggcagaagaagagactgtagccgccgcccaactcatcacaatgttgtggtctctatcggtatcatccttcgcggtgggcggcatgacagcttcattctttgggggatggctgggcgacaccctcggccggatcaaagctatgttagtggctaacatactatccctggtgggagctctcctgatgggttttagcaagctgggacctagccacattctgattatcgctggacgctcaatttctgggttgtattgtggactcatatcaggcttggtgccaatgtacatcggtgagatcgccccaactgcgctccgcggcgcccttggcactttccatcagctggcgattgtgacagggattctcatttcccagataattggattagagtttatcttaggaaactatgacctctggcacatactcctcgggctcagtggggtgagggcgattcttcagtcactgctgttgttcttctgcccagagagccctagatacttgtacatcaagctggatgaggaggtgaaggctaagcagtccctgaagcgcttaaggggatacgatgatgtgaccaaagatattaatgagatgcggaaggagagagaagaggcatcttctgagcaaaaggtaagtatcatacaactcttcacaaattcctcttatcgacagcctatcctggtagccctgatgctgcacgttgcgcagcagttcagcggtatcaacggaattttttactactccaccagcattttccaaactgctggcatttccaaaccagtctacgctaccataggtgtcggagccgtcaatatggtctttacggctgtgagcgtctttctggtggagaaggcaggacggcggagtctgtttctgatcggcatgtccgggatgtttgtgtgtgctatttttatgtctgtgggcctggtgctcttgaacaaattctcctggatgtcctacgtctcaatgattgccatcttcctgtttgtctccttctttgaaatagggcccggtccgataccctggttcatggtcgccgagttctttagccagggaccgcgacccgctgccttagccattgcagccttctcgaattggacctgcaattttattgtcgcattgtgttttcaatacattgcggatttctgcggcccgtacgtgttttttttatttgcaggagttctgctggcatttacactattcaccttctttaaagtgccagaaacaaaaggaaaaagcttcgaggaaatagccgccgaatttcagaagaagagcggctctgctcacaggcctaaggccgctgtcgagatgaaattcctcggagctaccgagaccgtg

SEQ ID NO: 7219 - DNA, 1572 bp, Artificial Sequence
  derived and/or modified sequence
atgaccgaagataaggtgaccggaaccctggtgtttaccgtgattaccgcagtccttggttcctttcagttcggatacgacattggggtgattaatgcacctcaacaagtgatcatttcgcattacaggcatgtgcttggggtgcctctggacgatagaaaagccataaacaattacgtcattaacagcaccgacgagctcccaactatttcctactcaatgaatcctaagcccactccatgggcagaagaagaaaccgtcgcggcagcccagctcattaccatgctgtggtcgctcagcgtctcttccttcgcagtgggaggtatgacggcatccttctttggaggctggctgggcgatactctcggcaggatcaaagccatgctggtggcaaatatcctcagcctcgtgggagctctgcttatgggattttctaaactcggaccaagccatatcctgataattgcgggacggagcataagcggtctgtactgtggcctcatcagcggtttggtgcccatgtacatcggagagattgcacccaccgcactccgaggcgcgcttgggacttttcaccagctggcaatcgtgaccggaatcctgataagccagattatcgggctcgaattcattctcggtaactacgacctctggcacatacttcttggattgtccggagtgagggctatccttcaaagccttcttttgtttttctgtcctgaaagccctcgctacttgtacattaagttggacgaggaggtgaaggcaaagcagagcctgaagcgactgagaggatacgatgatgtgacgaaggatatcaacgaaatgaggaaggaaagagaggaggcttcgtccgaacaaaaggtgagcattattcaactctttaccaactcgagctacagacagcctatcctcgtcgcacttatgctccatgtggcccaacaattctcaggtattaacggaatcttttactactccacctcaattttccaaactgccggaatttccaagccagtgtacgcaactataggggtcggtgcagtcaatatggtctttaccgcagtctcggtctttctggtggagaaggccgggagacgtagcctttttctgattggaatgtcaggcatgtttgtgtgcgccatctttatgtccgtgggactcgtcctgcttaacaagttctcgtggatgtcctacgtgtcgatgatagccatctttttgttcgtctctttcttcgaaatcggacccggtcccattccatggtttatggttgccgagttcttttcgcagggacctcggcctgctgcccttgctatcgccgcattctccaattggacgtgcaactttatcgtggctctgtgttttcaatacattgcagatttctgtggaccttacgtgttcttcctcttcgccggtgtcctccttgcatttaccctctttacctttttcaaagtgccagaaacgaagggcaagtccttcgaagagattgcagcggagttccagaagaaaagcggatccgcacataggccaaaggcagccgtggagatgaagtttctcggtgccactgagactgtt

SEQ ID NO: 7220 - DNA, 1572 bp, Artificial Sequence
  derived and/or modified sequence
atgactgaggacaaggtgaccggaactctcgtgtttactgtgataacggcagtcctcggctcgttccagtttggttacgatatcggagtgatcaacgcacctcaacaagtcatcatttcacattacaggcatgtgctcggagtgcctcttgacgatcggaaggcaatcaacaattacgtgatcaattcgaccgacgagctccccactatttcctactcaatgaatcctaagcctaccccatgggccgaagaagaaactgtggcagccgcacaactgatcactatgctttggtccctgtcggtcagtagcttcgcggtggggggaatgaccgcatccttttttggaggatggctgggcgacactctcggtaggataaaggccatgctggtggcaaacatccttagcctggttggtgcactgctgatgggattttcgaagctcggtccctcgcacatattgattattgctggtcgtagcatatcgggcctgtattgtgggcttattagcgggctggtccctatgtacatcggcgaaattgcacccaccgcacttcggggggcacttgggacgttccaccagctggcaattgtcactgggattctcatctcccagattataggactggagttcattctgggaaattacgatctttggcacatacttcttggcctttccggtgttagagcaatccttcagtcgcttcttctcttcttttgtcctgaatcgccgaggtacctgtatatcaagctcgatgaagaggtgaaggcgaagcagagcctcaagcgtctgagaggatacgacgacgttaccaaggacattaatgaaatgcgtaaagaaagggaagaagcgtcctccgaacagaaggtcagcatcattcaactgtttactaattccagctacagacaacctattctggtcgcgctgatgttgcacgtggcacaacaattttcgggaatcaatggaatcttctactacagcaccagcatctttcagacggcaggaatctctaagccggtctacgctactattggcgtgggcgcagttaacatggtttttaccgctgtgtcggtgttcctcgtcgaaaaggctggacgacgatcactgtttttgataggaatgtcgggaatgtttgtctgcgcaatctttatgtcggtcggtcttgtcctgttgaacaagttttcgtggatgagctacgtgtcaatgatcgctattttccttttcgtgtcctttttcgaaattggtcctgggcctattccgtggtttatggtggcggagtttttctctcagggccctcgccctgcagcgctcgcaattgcggcattttcgaactggacttgtaatttcattgtcgcgctgtgctttcagtacattgccgatttctgtggaccatacgtgtttttcctgttcgccggagtcctgcttgccttcacgctcttcactttctttaaggtgccagaaactaagggcaagtcgtttgaggaaattgccgcagaatttcaaaagaaatccgggtcggcacatcgtccaaaggccgcagtggagatgaagtttctcggggcaaccgaaaccgtg

SEQ ID NO: 7221 - DNA, 1572 bp, Artificial Sequence
  derived and/or modified sequence
atgactgaagataaagtgactggaacccttgtttttacagtgataactgcggttctgggaagctttcaatttggatatgacatcggtgtcattaacgctccacagcaagtcattatttcgcactatagacacgttttgggtgttccattagatgatagaaaggcgatcaataattatgttattaatagtactgacgagcttccaactatttcatactctatgaacccaaagccaactccatgggcagaggaagaaacagtagctgcggcccaattgatcactatgctgtggagcctttctgtatcttcattcgccgttggcggaatgaccgcttcgttctttggaggttggcttggagacactttaggcaggattaaggctatgctggttgccaatatcctatcactcgtcggagctcttcttatgggtttttccaaattaggaccatcacacatactgataatcgcgggacgaagtatttctggtctttattgcggacttatcagtggactagtgccgatgtacatcggagagattgctccaactgcgctcaggggagcactaggaacattccatcagctcgccattgtcaccggtattctcattagtcaaatcataggtctagagtttatccttggaaattatgacttgtggcatatcttgctaggactctctggtgtcagagctattttgcaatcgctcctgttgtttttctgcccagagagtccacgttacctttacatcaagttagatgaagaagtcaaagctaaacaatcccttaaacgattgcgtggctacgatgatgtcactaaggatattaatgagatgcgaaaagaacgagaagaagctagcagcgaacaaaaagtcagtataatccaactttttacgaactcatcgtaccgacaaccgatcttagtagccttaatgttacacgtagcacagcagttttcgggcattaatggaatcttctattattctacttcgatttttcaaactgctggaataagcaaaccggtttatgccactattggcgtaggggctgttaacatggtgttcactgcagtgtccgtgttcctagttgaaaaggcgggaagacgtagtctctttcttattggaatgtcaggaatgttcgtgtgtgcgatcttcatgtcggtcggcctggtcctcctaaataaattctcctggatgtcttacgtgagtatgatcgcaatttttttgtttgtgtcgttttttgagattggaccaggtccaattccgtggtttatggttgctgaattcttttctcaaggaccacgtccggccgccctcgccatcgcagctttcagtaattggacgtgcaatttcattgtcgcattgtgtttccaatacatcgctgatttctgtgggccttatgtcttctttctctttgcaggagttttgttagcttttacgttatttacattcttcaaagttccagaaacaaagggaaagagcttcgaggagattgcagctgagttccaaaagaaatcgggctctgctcatagaccaaaggctgcagttgagatgaaattcttaggtgctaccgaaacagta

SEQ ID NO: 7222 - DNA, 1572 bp, Artificial Sequence
  derived and/or modified sequence
atgacagaggacaaggttacaggcactctcgtgtttaccgtcatcacagctgtgctgggatccttccagttcggttatgacatcggcgtgattaatgccccacagcaggtgatcatctcccactatcgccacgttcttggggtgcctctcgatgaccggaaagctataaataattacgtaattaactcaactgatgaactgccaactattagctactctatgaaccctaagccaacaccctgggccgaggaggagacagtggccgctgctcagcttattacaatgctatggtccctttccgtttctagctttgccgtaggaggaatgaccgcctcattttttggggggtggctgggtgataccttaggtagaatcaaggctatgctggtggccaacattttatctctggttggcgctctcctcatgggtttctctaaattagggccttctcacatcctcatcattgccggccggagtatctccgggctgtactgcggcctcatctctggtctggtgcctatgtatattggagaaattgccccaaccgcactgcggggtgccctgggcaccttccaccagcttgctatcgttactggcatcctcattagccagattataggtttagagtttatactgggcaattatgatttatggcacattctgttaggcctgtctggagttcgtgccatacttcaatctctcctgctgttcttttgccccgagagtccccgctacctgtacatcaagcttgatgaagaagttaaagccaagcagagccttaaaaggttgcgcggatacgatgatgtgaccaaggacattaacgagatgcgaaaagagagagaggaggcttcttccgagcagaaggtcagcatcatccagctcttcaccaatagctcctaccgtcagcccatactagtggccctgatgctgcacgtcgctcagcaattttctggtatcaatggcattttttattatagtacatcgatttttcagacagccggcatctccaaacctgtgtatgccaccattggcgtaggcgccgttaatatggtcttcaccgccgtgtcagtcttcctcgtcgaaaaagctgggcgtagaagtctgttcctgatcggcatgagcggaatgtttgtgtgcgccatcttcatgagcgtgggattggtactgctgaacaaattttcctggatgagctacgtatcaatgatcgctatatttctgttcgtctctttcttcgaaattgggcctgggccaataccctggttcatggtcgccgagtttttttcgcagggtccaaggcccgcggctctcgctatcgctgctttctccaactggacttgtaatttcatcgttgcactgtgttttcagtacattgcagacttttgtggtccgtacgttttcttcctcttcgccggtgtgctgctggcattcactctgttcacttttttcaaagtgccagagaccaaggggaaatctttcgaagaaatcgccgcggagttccagaaaaagagcggctcagctcatagacctaaggccgccgtcgagatgaagttcctgggtgccacagagacagta

SEQ ID NO: 7223 - DNA, 1572 bp, Artificial Sequence
  derived and/or modified sequence
atgactgaggacaaagtgactggaaccttggttttcaccgttattaccgcagttcttggatcgtttcaatttggttacgatattggcgtcattaatgcaccccaacaagtgatcattagccattatcgccacgtgttgggcgtcccactggatgacagaaaagcaattaacaattacgtgattaactcgacggatgaactgccaaccattagctactcgatgaatcctaagccaacgccttgggcggaagaggaaacggtcgcagcagcacaactcatcaccatgctttggtcactgtccgtgagctcgttcgctgtcggaggaatgaccgcatcattctttggaggttggttgggtgacacgttgggcaggattaaggcaatgctcgtcgccaacattctctcgctcgtgggggcacttctgatgggcttttccaaacttggaccttcgcatatccttatcatagccggtcggtctatctcgggtctgtactgtggactgatcagcggactcgtgcctatgtacatcggagaaatcgcgccaacggctctgagaggtgctcttggcacctttcaccagttggcaatcgtcaccgggatcctgattagccagatcattggactcgaattcatcctcggcaattacgacctttggcacatattgcttggcctgtcgggagtgcgcgcaattcttcagagcctgctcctgtttttctgtcccgagagcccccgatacctttacattaagctcgatgaagaagttaaagcgaagcagtcccttaaacgccttagaggatacgatgacgtgaccaaggatatcaatgaaatgcgcaaagaacgggaagaagcaagctcggaacagaaggtgtccattatccaactgtttaccaatagcagctacagacagccaattctggtcgccctgatgttgcatgtggcacaacagttttcgggaatcaatggaatcttctattactcaacttcgatttttcagaccgcgggaatcagcaagcctgtgtacgcgactatcggtgtcggtgccgtgaatatggtgttcaccgcagtctcggtgttcctggtggagaaggcggggcgtaggtcgctgttcctgataggaatgagcggtatgtttgtctgcgcaatcttcatgtccgtgggtctggtgctgctgaataagtttagctggatgtcatacgtgtccatgatcgccatttttctcttcgtgtcgttctttgaaattggtcctggtcctattccatggtttatggtcgcagaattcttttctcaaggaccacggcctgcagctttggccattgccgcattttccaactggacttgtaacttcattgtggcgctgtgttttcaatacattgccgatttttgtgggccttacgtgttttttctgtttgccggagttctgctggcattcacccttttcacctttttcaaagtgccagaaaccaaaggcaagtccttcgaagaaatcgcggcagaattccagaagaagagcggatccgcccatagaccaaaggcagcggtcgagatgaagttccttggtgccactgaaaccgtc

SEQ ID NO: 7224 - DNA, 1572 bp, Artificial Sequence
  derived and/or modified sequence
atgactgaggataaagtcactggcaccctggtttttaccgtgatcacagctgtgctggggagctttcaattcggatacgacattggcgtgattaatgctccgcagcaggtgatcatttctcattatcgacacgtattgggtgtaccgttggacgacagaaaggccattaataactacgtaataaatagtacagatgagctgccgacaatatcttattctatgaatcccaagcctactccctgggctgaggaagagactgtggcagcggctcagcttattaccatgctctggtctctctccgtgagcagttttgcggtcggggggatgaccgccagctttttcggaggatggctgggcgataccctggggagaatcaaggccatgctggtggctaatattctgtcccttgtcggagctctcctgatgggcttcagtaagttgggccctagtcacatcctgatcatcgctggccgttccattagcgggttgtattgtggtttgatctctggacttgttccaatgtatatcggcgaaatcgctcctactgccctgcggggagcccttgggacttttcatcagttggcaatcgttacggggatcctcatctcgcagattattggcttggaattcatactgggtaactatgacctgtggcacattttgctggggctgtcaggtgtgcgtgccattctccaaagtcttctgctgttcttttgtccagagtctccccgttatctgtacattaagctcgatgaagaggtcaaagcaaaacagagtctgaagagactgcgggggtacgatgacgtcactaaggatattaatgagatgcgaaaggaacgagaggaagcctcatctgaacagaaggtttccatcatccagctgttcaccaacagttcgtacaggcagccaatcctggttgcactgatgttacacgttgctcagcaattcagcgggatcaacggcatcttctattacagtaccagcatcttccagaccgctgggatatccaaaccagtctatgccacaatcggggttggtgccgttaacatggtcttcacggccgtctctgtgttcctggtcgagaaggcaggtcgaaggtccttattcctgatagggatgagcggcatgttcgtgtgcgccattttcatgtcagtgggcctggtcctgctcaataaattctcctggatgtcttacgtctctatgatagccatattcttgttcgtctccttttttgaaatagggcctgggcccattccctggttcatggttgcagagttcttcagccagggacctagaccagccgccctcgcaattgccgcattcagcaattggacctgcaacttcatcgttgccctgtgctttcaatacatcgcagacttctgcggcccgtatgtgttcttccttttcgcaggggttctgctggcattcactctgttcaccttcttcaaggtgcccgagactaaggggaagagcttcgaagagatagctgccgaattccagaaaaaatctgggtcggcccacaggcccaaagcagcagtggaaatgaagtttcttggggctactgaaaccgtg

SEQ ID NO: 7225 - DNA, 1572 bp, Artificial Sequence
  derived and/or modified sequence
atgaccgaagataaggtaaccggtacccttgtttttaccgtgattacggcggtgcttggtagcttccagttcggctacgacatcggagtcataaacgccccgcaacaggtgatcatttcacactaccgccatgtcctcggcgtgccccttgacgacaggaaggctatcaacaactacgttatcaactcgaccgatgaactcccaactatctcatacagcatgaaccccaagcctaccccatgggcagaagaagaaaccgtggctgcagcccagctcataactatgctgtggtcgctttcggtgtcatcgtttgcagttggaggtatgactgcgtcgtttttcgggggatggctgggagatactctgggccgcattaaggcgatgctggtggccaatattctttcactggttggtgccttgcttatgggttttagcaagctggggcctagccatattcttatcatcgcggggagatcgatttccggcctgtactgcggtcttatttccggactggtgccaatgtacatcggagaaattgccccaacggctctcagaggtgcacttggaacttttcatcaactggcaatcgtgactggaatacttatttcacaaatcatcggacttgaattcattcttggcaattacgatttgtggcatattctgctgggacttagcggagtgcgagcaattctccagtccctgctgctgtttttctgtcctgaatcccctaggtacctttacatcaagctggatgaagaggtcaaggcaaagcaaagcctcaaaagacttagggggtacgacgatgtgaccaaggacattaacgaaatgcgtaaggaacgggaggaagcgtcgtccgaacaaaaggtgagcataatccaactgtttactaactcgtcatatcggcagcctatactggtggcactgatgctgcacgtggcccagcaattctccggaatcaatggcatcttctattactcaaccagcatttttcaaaccgcagggatttccaaacctgtttacgctactattggggtcggggcagtgaatatggtctttaccgccgtgtccgtgttcctggttgaaaaagccgggcgcagatccctgttcctgatcggcatgtccgggatgtttgtctgtgcaatctttatgtcagtgggactggtgctccttaacaagtttagctggatgtcgtacgtgtccatgatagctattttcctttttgtctcatttttcgaaattggtcctgggcccattccttggttcatggtggcagagtttttctcacaaggaccaagaccagcagcactggcaattgccgcattttcgaactggacgtgcaactttatagtggcattgtgctttcagtacatcgcagacttctgtggcccttacgtgtttttcctcttcgcaggcgtgctgctggcatttactctttttaccttctttaaggtccctgaaactaaggggaagagctttgaagaaattgcagcagagttccaaaagaaatccggctccgcacatcgcccgaaggctgcagtggaaatgaaattcctgggcgcaactgagactgtt

SEQ ID NO: 7226 - DNA, 1572 bp, Artificial Sequence
  derived and/or modified sequence
atgacagaagacaaggtgaccgggacgctggtgttcacagtcattaccgcggtcttgggaagcttccagtttggatatgacattggcgtgataaacgcaccacagcaggttatcatctcccactacagacatgttctgggtgtgccgctggatgacagaaaagctatcaataattacgtcatcaatagcaccgatgagctgcctactataagctactctatgaacccgaagcccacgccctgggccgaagaagagaccgtggccgctgctcagctgattacaatgctgtggtctctgagtgtttcatcattcgctgtgggaggaatgaccgcaagcttctttggcggctggctgggggatacattgggacggattaaagccatgctggttgccaacatcctgtccctcgtcggcgcactgctgatgggattctccaaactcggaccgagccatatcctgatcatcgctggcagaagcatcagcggactgtattgtggactgatttccggactggtgcccatgtacatcggggaaatcgcaccaaccgcactgcggggcgccctggggaccttccatcagttggccattgtgaccggtatcctcatctcacagatcatcggccttgagttcattcttggaaactatgatctgtggcatatcctccttggtctgtccggcgtacgggcaattttgcagtccctgctgctgtttttttgccctgaatcccctagatacctgtacataaagctggacgaggaggtgaaggcaaagcagtctctgaaacggttgcgcggctacgatgatgtgacgaaagatatcaatgaaatgaggaaggagcgcgaagaagccagtagcgaacaaaaggtcagcataatacagctcttcaccaactcctcttatcgccaacctattctggtggccctgatgctgcatgtggcacagcagttcagcgggataaacggtatcttttattattcaacctccatcttccagactgctgggatcagcaagccggtatatgcaacaatcggcgtaggtgccgtgaacatggtctttaccgccgtttctgtctttctcgtggagaaagctggtcggcgcagcttgtttctgattgggatgagcgggatgttcgtgtgcgcaatcttcatgtctgtgggtctggtgctgctcaacaaattctcatggatgtcatacgtgtccatgattgccatttttctttttgttagtttcttcgagatcgggccaggacccattccttggtttatggtggcggagtttttctcacagggcccgcgccccgctgccttggcgattgccgcctttagtaactggacgtgtaactttattgtggcgctctgtttccagtacattgccgatttttgcggtccatacgttttttttctgttcgccggcgttctcctcgcctttactctcttcacatttttcaaagttcccgagacaaaggggaagtcttttgaggaaattgccgctgagtttcagaagaagagcggctcagcacaccgccccaaggctgcggttgagatgaaattcctcggggctacggagactgtt

SEQ ID NO: 7227 - DNA, 1572 bp, Artificial Sequence
  derived and/or modified sequence
atgactgaggataaagtgacggggaccctggtatttaccgtaatcacggccgtactcggatccttccagtttgggtatgacattggcgtgattaacgctccacagcaagtcatcattagtcactaccggcatgtcctgggcgtcccacttgacgacaggaaagcaattaacaattacgtgataaactcgacagatgaactccctacgatatcctattctatgaacccaaaacctaccccctgggctgaagaagagactgtggcagctgcccaactgataaccatgctgtggtcgctgagcgtgtcctcgtttgccgttggcgggatgacggcttccttttttggcggctggctcggggatacccttggacgaatcaaggccatgctcgtggccaacatcctttcgcttgtcggcgccctgctgatgggattctccaaactgggaccttctcacatccttataatcgccgggcgaagtatatctggtctttattgcggcctgatatcggggcttgtccctatgtatatcggcgagattgcaccaaccgcattgaggggagcacttggtactttccaccagctggccattgtcacgggtatcctgattagtcagatcataggtttggagtttatactgggcaactatgatttgtggcatatccttctcggactcagtggggtccgggcgattctgcaatctctgcttctattcttttgccccgagtcaccaaggtacctttacattaaattggatgaggaggtgaaggctaagcaatcattgaagcgtctgcgcggctatgacgatgtgacaaaggatattaacgaaatgagaaaggagcgggaggaggcctcttcagaacagaaggtgtccatcatccagttatttacaaacagctcctacaggcaacctatcctagtggccttgatgctgcacgtcgcgcaacaatttagcggtatcaatgggatcttttattactcaacctccatatttcaaaccgccggcatctccaaacctgtgtatgcgacaattggcgtcggggccgtgaacatggtgtttacagcagtctctgttttcttagtggagaaggctggacggcggtccctgtttctgatcggcatgtcaggcatgtttgtgtgtgcgatcttcatgagcgtgggactggtcctattgaataagttttcatggatgagctacgtaagcatgattgctatatttctgtttgtgagttttttcgagatcgggcccggacccatcccctggtttatggtggcagagttttttagtcagggcccccgcccagctgccctggctattgccgctttctcaaactggacttgtaacttcatcgttgccttgtgcttccaatatatagccgatttttgcggcccgtacgtcttcttcctgttcgcgggagtcctcctggcctttaccctgttcacttttttcaaggtgcctgagaccaaggggaagtccttcgaggagatcgctgccgaattccaaaagaaaagtggatctgcacatcgacctaaagcagcggtggagatgaagttcctgggcgccaccgagacggtc

SEQ ID NO: 7228 - DNA, 1572 bp, Artificial Sequence
  derived and/or modified sequence
atgactgaggacaaagtcaccgggaccctcgtgtttaccgtgatcactgcagtcctgggctcgtttcaattcggatacgacatcggagtgatcaatgcgccacagcaggtgatcatctcgcactatcggcacgtcctgggggttccgctggacgaccggaaggcaatcaacaactatgtgattaactcgaccgatgaactgccgaccatctcttactcaatgaatcccaaaccgaccccctgggccgaagaggaaactgtcgctgcagctcaactgatcactatgctgtggtccctttcggtgtcgtcgttcgcggtagggggaatgactgcatccttcttcggggggtggctgggagacactctcggacggatcaaggcaatgctggtcgctaatatcctgagcctcgtgggagccctgctcatgggattctcgaaattgggaccttcgcatatcctgatcatcgcaggacgatccatctcaggcctgtactgcgggctgatctcagggttggtgccgatgtacattggggaaatcgcgcctaccgcgctgcggggagcccttggaactttccaccagctcgccatcgtgaccggtatcctgatcagccagattatcggactggaattcatcctcggcaactacgacttgtggcacatcctgctggggttgtcgggcgtccgcgcgatcctgcagtccctcctgctgttcttctgcccagagtcccctcggtacctgtatatcaagctcgacgaagaagtgaaggctaagcaatctctcaagcgcctgcgcggttacgacgacgtgacgaaggacattaacgagatgagaaaggaacgggaagaggcgagcagcgaacaaaaagtgtcaatcatccagctctttaccaatagctcctaccggcagccgatactcgtggctctcatgctccatgtcgctcagcaattctcagggatcaatggaatcttctattactcgacttccatcttccagactgctggcatcagcaagcctgtttacgccactatcggcgtcggagccgtgaatatggtgtttaccgcagtgtcagtgttcctggtggaaaaggcgggacgcaggtcattgtttctgatcggtatgtccgggatgttcgtgtgcgctatcttcatgtcggtgggactcgtgttgcttaacaagttttcctggatgagctacgtgtcgatgatcgctattttccttttcgtctccttctttgagattgggccaggaccgatcccatggttcatggtggccgaattcttttcacaagggccaagaccagccgccctcgcaattgcggccttctcgaactggacgtgcaacttcatcgtggcactgtgcttccagtacatcgcggacttctgcggaccgtacgttttcttcctctttgccggtgtcctgctggcgttcaccctcttcactttctttaaggtcccggaaaccaaaggcaagtcgtttgaagaaatcgctgccgagttccagaaaaagtcgggctcggctcaccgccccaaagcggctgtcgagatgaagtttctgggagcaaccgagactgtg

SEQ ID NO: 7229 - DNA, 1572 bp, Artificial Sequence
  derived and/or modified sequence
atgaccgaagataaagtcaccggaaccctggtgttcactgtcatcaccgcagtccttggatcgtttcaattcggttacgatatcggagtgatcaatgcacctcaacaggtgattatctcccattaccgacacgtgctgggagttccactcgatgatagaaaggccataaacaactacgtgatcaattccacggatgagttgcccactatctcctactccatgaatccaaagccgaccccttgggcagaagaggaaactgtcgcggccgcgcagctcatcaccatgctttggtccctcagtgtctcctccttcgctgtcgggggaatgactgcatcattcttcggaggctggttgggcgacacgctggggaggattaaggcgatgctggtcgctaatatcctgtcgctggttggagcgctgttgatgggtttctcgaaattgggaccttcgcacatcctgatcattgcagggaggtccatctcgggtctgtactgcggcttgatctccggtcttgtcccaatgtatatcggagagatcgcaccgactgccctgaggggagccttgggaaccttccaccaactcgccatcgtcacgggaatcttgattagccaaatcattggactcgaattcatccttggcaactacgacctgtggcatattcttttgggcctctcgggagtgcgggccatcctgcagtcactgctgctctttttctgcccggagtcgccgcgctacctgtacattaagttggatgaggaagtgaaggccaagcagtcactcaagcgcctccggggatacgacgacgtgaccaaggacattaacgaaatgcgcaaggaacgggaggaagcgtcgtccgagcagaaggtgtccatcatccagctgtttacgaactcctcctatcgccagccgatcctggtcgctctcatgttgcacgttgcacaacagttctcaggaattaacggaatcttctactactccaccagcatcttccaaactgcgggtatctctaagcccgtgtacgcgaccatcggagtgggcgcggtgaatatggtgtttacggccgtgtctgtgttcctcgtggaaaaggcgggaagaaggtccctgtttcttatcggaatgtcaggaatgtttgtgtgtgctattttcatgtcagtgggtctggtcctgctcaataagttctcatggatgagctacgtgagcatgattgcgatcttcctgttcgtgtcttttttcgagatcggaccgggaccgatcccgtggttcatggtggcagagtttttctcacagggacccagaccggcggctcttgctatcgctgctttttccaactggacttgcaactttatcgtggccctctgtttccagtacatcgccgacttctgcgggccgtacgtgttctttcttttcgccggagtgttgctggccttcaccctcttcacgttcttcaaggttccggaaaccaagggaaaatccttcgaagagatagccgccgagttccagaagaaatcgggctccgcccaccgcccgaaggctgccgtcgaaatgaaattcctgggagctactgaaactgtc

SEQ ID NO: 7230 - DNA, 1572 bp, Artificial Sequence
  derived and/or modified sequence
atgaccgaggataaagttaccggcactctcgtcttcactgtgataactgcagttctaggttcttttcagtttggttatgatatcggcgttattaatgccccccagcaggtcataattagccactataggcacgtgcttggggttccactggatgatcgtaaggcaataaacaactacgtgattaactctaccgacgaactgcctactatctcttactctatgaacccaaaaccaactccatgggccgaagaggagactgtggcagccgctcagctaatcaccatgctttggtccctgtccgtgtcctcattcgccgtcggcggtatgaccgccagtttcttcggcggatggttaggcgatactctgggccggatcaaggcaatgctcgttgccaatatcttgtctctcgtcggcgcactactcatgggctttagcaagctgggccccagccacattttaattatagcagggaggtccataagcgggttgtactgcgggctgatttcaggtctggtgccaatgtacattggcgagatcgcacccacagccctgaggggagccctgggcactttccaccagctagctattgtgacaggcattctgatatctcagatcatcggtctggaattcattctgggcaattacgacttatggcacattttgcttggactgtccggagtgcgggcaatacttcaatcactgctgctttttttctgccctgaatcaccaaggtatttgtatattaaactggatgaggaagtcaaggccaagcagtctctgaaacgcctgaggggctacgatgacgtgactaaggacatcaatgaaatgcgtaaggagcgagaggaggcctcatctgagcaaaaggtgtctattatccaacttttcactaatagcagttataggcagccaatcctggttgctctgatgctgcatgttgcccagcaattcagtgggataaacggcattttctattacagcacctccatattccagaccgctggcatctccaaaccagtttacgccactattggtgttggcgccgtcaacatggtattcaccgccgtatcagtgtttctggtcgagaaagcaggaaggcgttccctgtttctgatcggcatgtcaggcatgttcgtgtgcgccatcttcatgagcgtgggtctggttctcttgaacaaattcagctggatgagctatgtgtccatgatagctatatttctgttcgtgagtttcttcgaaattggccctggacctattccctggtttatggtggcagagtttttttcacagggtccccggcctgcagcccttgcaattgcagcattctctaactggacatgtaatttcattgtcgcactgtgtttccagtacatagccgatttttgtggcccatacgtttttttcctgtttgctggcgttctcttggcctttaccctgtttacttttttcaaagtgccggaaacaaaggggaaaagcttcgaagaaattgcagctgagttccagaaaaagtctggctctgcccatcgtcctaaagcagctgttgagatgaagtttctgggcgccactgaaactgtc

SEQ ID NO: 7231 - DNA, 1572 bp, Artificial Sequence
  derived and/or modified sequence
atgactgaagataaggttactgggacccttgtgttcaccgtgatcactgcagtgctcggttcgtttcagtttgggtacgacattggagtgatcaatgcgccgcagcaagtgatcatctcccactacagacacgtgctcggcgtcccactcgatgaccgaaaggccatcaacaattacgtgatcaattccactgacgaactgccgaccattagctacagcatgaaccctaagccaactccatgggctgaggaggaaaccgttgccgcggcccaattgattactatgctgtggtcgctctccgtgagctcctttgccgtgggaggcatgaccgctagcttcttcggcggatggctgggagacaccttgggcaggataaaggccatgttggtggcgaatattctctcactcgtcggcgccctgctgatgggattcagcaagctcggcccatcgcatattctgatcatcgcaggaagatccatctccggactctactgcggactgatctcgggactcgtgccaatgtatatcggcgagatcgcccccaccgcccttagaggagccctggggactttccatcaactggcaatcgtgactggaattctcatctcacaaatcattggcctcgaattcatcctcggaaactacgacctgtggcacatcctcctgggattgtccggagtgagagccatcctccagtcgttgctgctgttcttctgcccggaatcaccaaggtacctgtacatcaaacttgacgaagaggtcaaggcgaagcaatcactgaagcgcttgcgcggatacgacgacgtgactaaggacattaatgagatgagaaaggaacgcgaggaagcgagctcggaacagaaggtgtcgatcatccagctgttcactaactcctcctaccgccaaccaatcctggtggccttgatgctgcatgtcgcccaacaattctcggggatcaatgggatcttctactacagcacctccatttttcagaccgccggaattagcaagcctgtgtacgcgaccatcggagtgggagccgtgaatatggtgttcaccgctgtgtcggtgttcctggtcgagaaagccggacgtcgcagtctttttcttattggaatgtccggtatgttcgtgtgcgccatcttcatgtcggtggggctcgttctgctgaacaagttctcctggatgagctacgtgtcaatgatcgcgatcttcctcttcgtgagcttttttgagatcggcccggggccaatcccgtggttcatggtggctgagttctttagccaaggccctcggcctgcagcgctggctatcgcagcattctcgaactggacctgcaacttcatcgttgcattgtgcttccagtatatcgctgatttttgtggaccttacgtcttttttctcttcgccggggtgctgctggctttcaccctgttcactttcttcaaggtgccagagactaagggtaaatcgttcgaagaaatcgcagcggaattccagaagaagtcgggatcggctcatcgcccgaaggcagccgtggagatgaagttcctgggcgccaccgagactgtg

SEQ ID NO: 7232 - DNA, 1572 bp, Artificial Sequence
  derived and/or modified sequence
atgaccgaggacaaggtgaccggtacactagttttcacggtcatcaccgccgtgctgggcagcttccagttcggctatgacataggagttattaacgcccctcagcaagtgatcatatcccattatcgccacgtactcggtgtacctctagatgatagaaaagctatcaataattatgttatcaacagcacagacgagttaccaaccatctcttacagtatgaatccaaagcctacaccttgggctgaggaggaaacagtggctgccgctcagctgatcaccatgctctggtccctttctgtcagctccttcgcagtgggcgggatgaccgcttcgttctttggcggctggttaggagacaccctcggaaggatcaaggctatgctggtggcaaacatcttatccctggtgggggctctgttaatgggattcagtaagttagggccgtctcatattctcatcattgcaggccgaagtataagcggcctgtactgtggtctgattagtggactagtgcctatgtacataggcgagattgctcccaccgcactaagaggagcccttggaactttccatcagctggcgatcgtcacaggaattctcatcagccagattattgggctggaattcattctcggcaattatgatctttggcacattctattgggtctgtctggtgttagggccattctccagagccttctgctcttcttctgtcctgaatcccccaggtatttgtatatcaagctggacgaagaagtcaaggctaagcagtccctgaagagactcagagggtacgatgatgttactaaggacatcaacgagatgcgcaaggagagggaggaagctagtagcgaacaaaaggtatcgattattcagctgtttacgaactctagctacaggcaaccaattctggtcgctctgatgttgcatgtggcccaacagttcagtggcatcaacggaatcttctattatagcacctctatatttcaaaccgcaggcatctctaagccagtgtacgccacgatcggcgtcggggccgtgaatatggtgtttacagctgtctctgtgtttctggtcgagaaggccgggaggcgatccttgttccttataggtatgtcgggtatgtttgtatgcgctatctttatgagcgtagggctcgtgctgttaaacaagttttcatggatgtcctacgtcagcatgattgcgatctttcttttcgtttcctttttcgaaatcggtccgggccccattccctggttcatggtggcagagttcttctcacagggccccagacctgctgcacttgcgattgccgctttttccaattggacatgcaatttcatcgtggcgttgtgctttcagtatatcgctgacttctgtggcccgtacgtcttttttctgtttgcaggtgtgctcctggcatttactctgttcaccttcttcaaagtgccagagaccaaaggaaaatccttcgaagagatcgcagcagagtttcagaaaaagagtggctcagcacaccgacctaaggcagctgtggagatgaagtttctgggcgccacagagacagtt

SEQ ID NO: 7233 - DNA, 1572 bp, Artificial Sequence
  derived and/or modified sequence
atgaccgaggataaggtgactggcaccctggtgtttaccgtcattactgcagtgttgggttcctttcagtttggttacgatataggtgtgattaacgcaccacagcaagtgattatctcccactaccggcatgtgcttggtgtccctctggatgatcggaaagccatcaacaattacgtgataaacagcaccgatgagctgccgactatttcgtactcaatgaatccaaagccaacgccgtgggcggaagaggaaaccgtggccgccgcacagctgattactatgctttggtctttgagtgtctcctcctttgcagtcgggggcatgactgcgagcttctttgggggatggctgggagacaccctcggacgaatcaaggcaatgcttgtggcaaacatacttagcctggtgggtgctcttctgatgggttttagcaagctcggaccttcccatattctgattattgcaggacgtagcatcagcggactgtattgtggtctgatttcggggttggtgcccatgtacattggtgaaatcgcgcccacggcgctgcggggtgctcttggcacttttcaccaacttgccatcgtgaccgggattcttatctcgcaaatcatcggactggaattcattctcggaaattacgacttgtggcatatccttcttggtctgtccggggtgcgggcgatacttcaaagcctgttgcttttcttttgtcctgaatccccaagatatctgtacataaagctggacgaggaggtgaaagcgaagcagtcgctcaagcggcttcgaggatacgatgatgtgactaaagatatcaatgaaatgcggaaagaaagggaagaagcgagctcggaacagaaggtgagcattattcagttgttcaccaattcgagctacagacaaccaattcttgtcgctctcatgttgcatgtggcacaacaattttccggcattaacggaattttctactactccactagcatattccagaccgcaggcatctcgaagcctgtgtacgcaactatcggcgtgggagcagtgaacatggtgttcaccgcagtgtccgtttttcttgtggagaaagctggacggcgttcattgttccttattgggatgtcaggaatgtttgtgtgcgccattttcatgagcgttggactggttctcctgaacaagtttagctggatgtcttacgtctcgatgatcgcaatcttcttgttcgtctcttttttcgaaatcggacccggcccaatcccttggtttatggtagcagagtttttcagccaaggaccccggccagcagcccttgccattgccgccttttcgaactggacctgtaatttcattgtggcactttgtttccagtatatagcagacttttgcggtccctacgtgttttttcttttcgccggtgtgctgctcgcatttaccctctttaccttctttaaggtcccagaaaccaagggaaaatcattcgaggagatcgccgcagaatttcagaagaaatcaggttccgcacatcgtcctaaggcagcagtggagatgaaatttcttggtgcgactgaaactgtg

SEQ ID NO: 7234 - DNA, 1572 bp, Artificial Sequence
  derived and/or modified sequence
atgaccgaagataaggtgaccggtaccctggtgttcaccgtcattactgcagtgctgggttccttccagtttggctacgacattggcgtgatcaacgcaccacagcaggtgatcatcagtcactatagacacgtgttgggtgtgcccctggatgacaggaaagcaataaacaattacgtgatcaattctactgatgagctgccaacaatttcttactcaatgaaccctaaacctacgccttgggccgaggaagaaaccgtggccgctgcacagcttattactatgctgtggtcccttagcgtcagctcttttgcagtgggcggtatgaccgctagttttttcggaggatggctcggtgacacccttggaaggataaaggctatgctggtggcaaacatcttgtcccttgttggtgccctgcttatggggttctcaaaattagggcccagtcacatcctcatcattgcgggcagatcaattagtggactgtattgcggactgatttccgggctcgttccaatgtacatcggcgaaatcgcgccaaccgctctgcgtggtgctctgggcacttttcatcagctagcgatagttacaggcatcttgatttcgcagatcatcggcctggagtttatcctgggaaactatgacttgtggcatatcctgctgggcctgtccggcgttcgcgccattctgcagagcctcctcctgtttttttgtccggaatcacccagatacctgtatatcaaactggacgaagaggtgaaggcgaagcagagccttaaaagactgagagggtacgacgacgtcaccaaagacatcaacgaaatgaggaaggagcgggaggaagcttcatccgagcagaaagtcagcataatccagctgttcacaaacagcagctaccggcagcctatcttggtggccctcatgctccacgtcgcccagcagttctctgggatcaacggtatcttttattactcaacctcaatatttcagacagccggcatctccaagcctgtctacgccactataggcgtcggcgccgtgaatatggtgtttaccgcggtcagcgtatttctggtcgagaaggccggccgccgttctttgttcctcatcgggatgagtggcatgttcgtttgtgccatcttcatgagcgtaggactcgtgctcctgaacaagttcagctggatgagctacgtgtccatgatagctattttcttattcgtaagcttttttgagattggacctgggcccattccgtggtttatggtggctgagttcttctctcaaggacctcgccctgccgctctggcaatcgctgcgtttagcaactggacctgtaacttcattgtagccctatgctttcagtatatcgccgacttctgcgggccttacgtattcttcctgttcgccggcgtcttgctggcttttaccttgtttacattcttcaaagttcctgaaaccaagggcaaaagtttcgaggagatcgccgccgaatttcaaaaaaagagcggaagtgcccatcgacccaaagccgcagtggaaatgaagttcttaggcgctactgaaacggta

SEQ ID NO: 7235 - DNA, 1572 bp, Artificial Sequence
  derived and/or modified sequence
atgacggaagataaggttaccggcaccctcgtgtttacggtgatcacagcggtccttggaagcttccagttcggctacgacattggcgtgatcaatgccccgcaacaggtcattatctcccactacaggcacgtgttgggtgtgccactggatgaccgaaaagccatcaacaattacgtcattaattcgactgatgaactgccaacgatcagctattcgatgaatcccaagcccacgccttgggccgaggaggagacggtggctgcagcgcaactgattacaatgctgtggtcgctgtctgtgagcagctttgcggtgggtggtatgacggcatccttcttcgggggctggctaggagatacactgggccgtattaaggccatgctggtcgccaacatcctttcgctggtcggagctttgctcatgggtttttcaaaattggggcccagtcacatactaatcattgccggccggtccatcagcggcctgtactgcggtctaatctcgggtctcgtcccaatgtatatcggtgaaatagcacctactgccctgcgcggagcgttaggcacgtttcatcagctggccatcgtcacaggcatcttgattagtcaaataatcggacttgagttcatactggggaactatgacctctggcacatattattggggctctccggagttcgggcaatcctgcagagtctgctgctgtttttctgcccagagtccccgagatacctgtacatcaaactcgatgaggaagttaaggcaaagcagtctctgaagcggctgcgggggtatgacgatgttaccaaggatataaacgagatgaggaaggagcgggaagaggcctcttcggaacaaaaggtttccataattcagctctttacgaattcctcttaccgccagccgattttggtggccctgatgctccacgtggcgcagcagttctcgggcatcaatggtatattttactacagcacgagcatcttccagacagccggcatttcgaagccggtgtacgccacgatcggtgtaggagccgtgaacatggtgttcacggccgtgagcgtgttcctggtagaaaaggcgggccgcagatcgctgtttcttatcggcatgtctggcatgtttgtttgtgcgatattcatgtccgtgggactggtgttgctaaataagttcagttggatgagctacgtgtcgatgatcgctattttcctgttcgtgagctttttcgaaattggacccggtccgatcccgtggtttatggttgccgaattcttcagtcaaggccctcgtccagccgcgttggcgatagcagctttttccaactggacgtgcaatttcattgtggcactatgttttcaatatattgccgatttctgcggcccgtacgtattcttcctgtttgccggcgtgctactggcattcactctgttcacgttctttaaggtcccggagacgaagggcaagtcttttgaagagattgccgccgagttccagaagaaatccggaagcgcgcacaggcctaaggcagctgtggagatgaagtttttgggggccacggagaccgtg

SEQ ID NO: 7236 - DNA, 1572 bp, Artificial Sequence
  derived and/or modified sequence
atgaccgaggacaaggtcaccgggacgctcgtgttcaccgtgattactgcagtgctgggaagttttcaatttggatacgatattggcgtcataaacgcaccacagcaggtgatcataagccactacagacatgtgcttggcgtgccactggacgataggaaagcaattaacaattatgtcattaactcaaccgacgagctccctactatttcgtacagcatgaaccccaagcctactccctgggcggaagaagagactgtcgcagcggcccagctcattactatgctctggtccctttcagtgtcctcatttgccgtcggtggaatgactgcgagcttctttggtgggtggcttggcgataccttgggaagaattaaggcaatgcttgtcgccaacatcctgtccctcgtgggggcgcttctgatggggttttcgaaactgggcccctcccacattctcataattgcgggtagatccatttccggcctctactgcggacttattagcgggctggtccctatgtatattggcgagatcgcacctaccgcactcagaggagccttgggaacctttcatcaattggcaatcgtgactggaatccttatttcccagattattggcctggagttcatccttggtaactacgatctttggcatattcttctcggactttcaggagtgcgtgcaattctgcaatccctgcttcttttcttctgccctgaatcgccccgttatctctacatcaaattggatgaagaagtcaaggccaagcaatcgctgaagaggcttaggggatacgacgacgtgaccaaggacattaacgaaatgcggaaggaacgagaagaggcctccagcgagcaaaaggtgtcaatcattcagttgtttaccaactcatcgtacagacaaccaatcctggttgcattgatgctgcatgtggctcagcaattttccggtattaacggaatcttctactactcgacttccatatttcaaaccgcggggatctccaagcctgtctacgcgacgatcggcgtgggagcggtgaacatggtgtttaccgcagtgtcggtctttcttgttgagaaagccgggagaagatcactgttcctgattggcatgtcagggatgttcgtgtgcgcaattttcatgtccgtgggactcgttcttctcaacaaattcagctggatgagctacgtgtccatgattgcaattttcctgttcgtttcgttcttcgaaattggtcctgggcctataccgtggttcatggtggcagaattcttcagccaaggacctcgccctgcagcactggctatcgcagcattttcgaactggacctgtaactttattgtggccctgtgttttcaatacattgcggatttctgtgggccttacgtgtttttcctttttgccggggtgctgctggcatttaccctgtttaccttctttaaggtcccagaaactaaaggaaagtccttcgaagaaattgcagccgaatttcaaaagaagtcgggttcggcacacagaccaaaggcagccgtggagatgaagtttcttggagcgactgaaactgtc

SEQ ID NO: 7237 - DNA, 1572 bp, Artificial Sequence
  derived and/or modified sequence
atgactgaagacaaggtcactggtaccctcgtgttcactgtaataactgcagtcctggggtcttttcaattcggctacgatatcggggtcataaacgctccccagcaggttataattagccattaccgacacgtgttaggagtccccttggacgataggaaagcgattaataactatgtgataaattcaaccgacgagttgcctactatttcttattctatgaacccgaagcccactccctgggcggaggaagagacagtggccgctgcacaactgatcactatgctctggagcttgagcgtatctagcttcgctgtaggggggatgacagccagctttttcggtggttggttgggcgacaccctcgggagaattaaagcaatgctggtcgccaacatcctaagcttggttggcgctcttctgatgggctttagcaaactgggcccttcacacatcctcatcattgctgggaggtcaatctcaggcctctattgtggcctgatatcaggccttgtgcctatgtatataggggaaattgcacccactgcgctgcgcggagccctcggcacgtttcatcagttggccatcgtgacaggcattctcatctcccagattattggcctggaatttatcctgggaaactacgacctgtggcacattttgttaggcttatcgggggtgcgagctattttgcaaagcctgctcttatttttctgccctgaatcacccagatatctgtacatcaagctggacgaggaagtgaaggctaagcagagcctgaagaggttacgcggatatgatgatgtgactaaggacatcaatgaaatgcgcaaggaacgcgaggaagcaagctctgaacagaaagtctctatcattcagctcttcacgaactcatcataccgacagcctattctggtagcattaatgctgcatgtagcacagcagttttctggaattaatggaattttttactattcgaccagcattttccagacggcaggaatctccaagcccgtctacgcgaccatcggagttggggcagtgaacatggtcttcacagctgtgagtgtattcctggtcgagaaggctggtaggaggtccttgttccttattggaatgtctggtatgtttgtatgcgctatctttatgtcggtgggcctcgtactgttgaacaagtttagttggatgagctatgtgtctatgatcgcgatcttcctgttcgtcagcttcttcgagattggtccaggacctataccttggttcatggtggccgaattcttcagccagggacctaggcctgctgccctggctattgccgctttctctaattggacttgcaactttatagtggccctgtgcttccagtacatcgccgacttttgtggaccatacgtgttctttcttttcgcgggggtattgctggcgtttacattgtttaccttctttaaggtgcctgaaactaagggtaagtcctttgaggagatcgctgccgaattccaaaagaaaagcggctctgcgcaccggcccaaggcagccgtcgagatgaagttccttggggctaccgagacagta

SEQ ID NO: 7238 - DNA, 1572 bp, Artificial Sequence
  derived and/or modified sequence
atgacggaggacaaagtgacaggtacgctggtatttaccgtgattactgctgttctgggaagcttccaattcggctacgacattggggtgataaatgcacctcagcaggtaattatcagtcactataggcacgtgctgggggtgccgctggacgatcgcaaggcaattaacaactatgtgattaatagtaccgatgaactgccaactatttcttacagcatgaacccgaaaccaacgccctgggccgaagaggagacagtcgctgccgctcaactgatcaccatgctttggtccctcagcgtctctagcttcgcggtgggcgggatgaccgcgtccttcttcggcggctggctaggtgatacgttagggagaattaaggcaatgctggtggccaatatccttagtctggtcggggcacttttgatgggcttcagcaaactgggacctagtcacatcctgataattgcgggacggagcatcagtggattatactgtgggctcatttctggcctagtgcccatgtatatcggagagatcgccccaacagcattgcggggcgctctcggcacctttcaccagctcgcgatcgtaactggcatcctgatttcccagatcatcggcttagaattcatcctcgggaattatgacctttggcacattctgctgggtctttctggggtgcgcgccatactgcagagtcttctactgttcttctgtcccgagagcccaaggtatctatatatcaaactggacgaagaggtcaaagctaagcagtccctgaaaaggttacgtggttacgatgacgtgactaaagacataaacgaaatgcgcaaggaacgggaagaggcttcatccgagcagaaggtgtctatcattcagttgttcacaaactcctcttacagacagccaattctagtcgccctgatgctgcacgtggctcagcagttctcaggcattaacggaattttctactattccactagtatattccagaccgctggcatatcgaagcctgtctatgccaccatcggggtgggtgctgttaatatggtctttacggccgtttccgttttcttagtcgaaaaagccggtagacggtctctcttcctgattggcatgagcggcatgttcgtgtgcgcgatctttatgtctgtgggcttggtcttgctcaacaagttcagctggatgagctacgtttccatgatcgcgatattcctgttcgtcagcttttttgagatcggcccagggccgatcccgtggttcatggtcgctgagtttttctcccagggccctagacctgccgccctggcaattgccgctttttcgaactggacctgtaactttattgtcgcactgtgtttccagtatattgctgatttttgcggaccttacgtgttcttcttgttcgcgggggttctgcttgccttcacactgtttacctttttcaaggtgcccgagaccaagggtaaatccttcgaggagattgctgcggagttccaaaagaagtccgggagtgcccatcgacctaaagctgcagtggaaatgaagttcctgggagctacagaaacagtg

SEQ ID NO: 7239 - DNA, 1572 bp, Artificial Sequence
  derived and/or modified sequence
atgaccgaagataaggtcaccgggactctggtgttcacggtgattactgctgtgctcgggtcgtttcaattcggttacgatatcggagtcatcaacgcgccccaacaagtgatcatttcccactacagacatgtcctgggagtgccactggacgatcggaaagccataaacaactacgtcatcaattccacggatgaacttcctactatctcgtattcaatgaatcctaaaccaaccccctgggcggaagaagaaaccgtggctgcagcacagctgataactatgctttggtcgttgtccgtgtcctcgtttgcagtgggagggatgaccgcatcattctttggcggatggctgggggatacgctggggagaatcaaggcgatgctcgtggcaaacatcctgtccctggtgggtgctcttctgatgggtttttccaaactcggtccgtcacacatattgattatagcaggccggagcatctctggtctttactgcggccttattagcggcctcgtgccaatgtacatcggagaaattgcgcctaccgcactgcgaggtgcacttggtacctttcatcagcttgccattgtgaccggtatcctgatttcccagattattggactggaattcattttggggaactacgacctttggcacattctgctgggcctgtcaggggttagggctattttgcaatcccttctgctcttcttctgtcctgaaagccctcgttacctgtacattaagctggatgaggaagtgaaggcgaaacagtccctgaagaggctgagaggttatgatgacgtgactaaagacattaatgaaatgcggaaggaaagagaagaagcatcctccgaacaaaaggtgtccattatccaactttttaccaattcttcgtataggcagccaatcttggtggccctgatgctccatgtcgcccaacaattttccggcataaatgggattttctactactcgacctcaattttccaaaccgccggaatttctaaacccgtgtacgcaaccatcggggtcggtgcagttaacatggtgtttactgcggtgagcgtgttcttggtcgaaaaggcaggacggcgcagcctgtttcttattggtatgtcgggtatgtttgtgtgtgccatctttatgtccgtgggcctggtcctgcttaacaagttttcctggatgagctacgtgtctatgattgcaatcttcctttttgtgtccttttttgaaataggacctggacctatcccctggtttatggtggccgaattcttttcccaagggccacggccggccgcccttgctattgcggcattcagcaactggacctgcaactttattgtggcgctttgttttcagtacatcgcagacttctgcggtccttacgtgttctttcttttcgcaggtgttctgttggctttcaccctttttaccttctttaaagtgccagagactaaggggaagtcgtttgaggagatcgccgccgagtttcaaaagaagtcaggatcggcacatcggccgaaagcagcagtggaaatgaagtttcttggcgcaactgaaactgtt

SEQ ID NO: 7240 - DNA, 1572 bp, Artificial Sequence
  derived and/or modified sequence
atgaccgaggacaaggtgaccggcaccctggtctttactgtcatcaccgcagtcctggggtcgtttcagttcggctacgatatcggagtcatcaacgctccgcaacaggtgatcatctcgcattacaggcatgtgctgggcgtgccactggacgataggaaagccatcaataactacgtgatcaattccactgacgagttgccaaccatctcctactcgatgaacccgaaaccgactccttgggcagaagaggagactgtcgctgcagctcaactgattaccatgctttggtcgctcagcgtctcctcgttcgccgtgggaggcatgactgcctccttcttcggtggatggctgggagataccctggggagaatcaaggcaatgctcgtggcgaacatccttagcctggtgggagcgctgttgatgggtttctcgaagctcgggccatcacacatcctgatcattgcaggccgctctatctcaggactctactgcggcctgatcagcgggctggtgcccatgtatatcggagaaatcgcccccactgccctgcggggagccctgggaaccttccaccaactggccatcgtgaccgggatcctgatctcgcagatcattggactcgaattcattttgggcaattacgatctgtggcatattctcctcgggctctcaggcgttcgcgctattcttcagtcgctcctcctctttttctgtccggaatccccacgctacttgtacatcaagctcgacgaagaggtcaaagccaagcaaagtctgaagagactgcggggatacgatgacgtgacgaaggacatcaacgaaatgagaaaggagcgggaggaagccagctcagaacaaaaggttagcattatccagctgttcacgaacagcagctaccgccagccgatcctggtggcgctgatgttgcacgtggcccagcagttctccggaatcaacggaatcttctactactcaacctcgatcttccagaccgcgggaatctcaaaaccggtgtacgcgactattggagtgggagccgtgaacatggtgttcactgccgtgagcgttttcctggtggaaaaagcaggtcggcgttctctcttcctgatcggaatgtccggcatgttcgtctgcgcaatctttatgtccgtgggacttgtgttgctcaataagttttcatggatgtcatacgtgtccatgatcgccatcttcctcttcgtgtcgtttttcgagatcggtcctggcccgattccctggtttatggtcgcggaatttttctcgcagggtccacgccctgcagcccttgccatcgccgcgttctccaactggacctgtaatttcatcgtcgctctgtgcttccaatacatagctgacttctgcggcccttatgtgttcttcctgttcgctggtgtactgctggcctttactctcttcactttcttcaaggtcccggaaactaagggaaaatcctttgaagagatcgcggcggagtttcagaagaagtcgggaagcgcacaccgaccgaaggctgcggtcgagatgaaatttcttggagcgacggaaaccgtg

SEQ ID NO: 7241 - DNA, 1572 bp, Artificial Sequence
  derived and/or modified sequence
atgaccgaggacaaggtgaccggcacgctggtcttcactgtgattaccgctgtactgggcagcttccagtttggctatgacattggagtcattaacgctcctcagcaggtgataatttcccactatcggcatgtcctgggcgtcccactggacgataggaaggccataaacaattacgtgataaatagtacagacgagctcccaacaatctcttattccatgaaccccaagcctaccccttgggcagaggaggaaactgtggctgcagctcaactaataaccatgctgtggagccttagtgtttcatccttcgccgtgggcggtatgacagcaagcttctttggcggctggttaggcgatactctggggcggataaaagctatgctggtggccaatattctgtccttggtcggcgcgctgttgatggggttctccaagctcggcccaagtcacatcctgattatcgccgggaggtctatctcagggctatattgcgggttaatttctggcctggtaccgatgtacatcggcgaaattgctccaacggcactgcgtggagcccttgggacttttcatcagctggcaattgtaaccggtatcctgataagccaaatcattgggcttgaattcatcctgggaaactatgacttgtggcatatcctgttaggacttagtggggtccgtgccatcctgcaatccttgctgctatttttctgccctgaatctccacgctacctgtacattaagctcgatgaagaggttaaagccaagcagagccttaaacggttgagaggctacgatgacgttacaaaagacataaacgaaatgagaaaggagagagaggaggccagctccgagcagaaggtttctattattcaacttttcaccaacagtagctaccgccagcccatcctggttgctctcatgctgcatgtggcccagcagttctcagggattaatggtattttctactattccactagcattttccaaacagccggaatctcaaagcccgtgtacgctactattggggttggcgcagtaaatatggtcttcaccgcagttagcgttttcctggtggaaaaggcaggccggcggtccctgttcctgattggaatgtctgggatgttcgtgtgcgccatcttcatgagcgtgggcctggtgttgcttaacaagttctcttggatgtcttacgtgagtatgatagctattttcctgtttgttagtttctttgaaatagggccggggccaattccgtggtttatggtggctgaatttttcagtcagggaccaagacctgccgccctcgcgatcgccgccttctcaaattggacgtgtaacttcatcgtggctctgtgtttccaatacattgctgacttctgtggaccatatgtcttctttctatttgcgggggtgttgctggctttcaccctttttaccttttttaaggtgccagagacaaagggcaaaagttttgaagaaatcgctgctgaattccagaaaaagtctggtagcgcccaccggcctaaagccgctgtagagatgaaatttctgggtgcaacagaaactgtg

SEQ ID NO: 7242 - DNA, 1572 bp, Artificial Sequence
  derived and/or modified sequence
atgaccgaggataaggtgaccggaactcttgtctttactgtgatcactgctgtgctcggatcattccaattcggctacgatatcggagtgatcaatgccccacaacaggtcatcatttcgcactatcgccatgtcctgggagtcccgctcgatgatcggaaagctataaacaactacgtcatcaactcaaccgatgagctgccgactatcagctactcgatgaacccgaaaccgaccccttgggcagaggaggagactgttgcagcggcccagctgatcaccatgctctggagcctctcggtgtcctccttcgctgtggggggaatgactgcctcattctttggtggatggctgggcgacactctgggacggattaaggcaatgctggtggctaacatcctgtcgctggtgggcgccctgctgatgggtttcagcaagctggggccctcacatatcctgatcatcgccggccgctccatttccggattgtattgcggactgatctcaggactcgtgccgatgtatataggcgaaattgccccaactgcccttcgaggggctctgggcacttttcaccaactggctattgtcacgggaattctgatcagtcaaatcatcggacttgagtttattctgggcaattacgacctgtggcatatcctgctgggactgtccggcgtgagggcgatcctccagtcgctgctgcttttcttctgtcccgaaagcccccggtacctctacattaagttggacgaggaggttaaagctaagcagtcgctcaaaagactgcgcggatacgacgacgtgaccaaagacataaacgaaatgaggaaggaacgcgaggaagcctcgagcgaacaaaaggtcagcataatccagctgtttaccaatagctcctacagacagccgatcctggtggcactgatgctgcacgtggcccagcagttctccggaatcaacggtatcttctactactccacgtccatcttccagaccgccggtatttccaaacctgtgtacgccacgatcggcgtcggagctgtgaacatggtgtttacggctgtgtcggtctttctggtggagaaggcaggccgcagatcactgttcttgatcggcatgtccgggatgttcgtgtgtgccatcttcatgtcggtcggccttgtattgctcaacaagttctcgtggatgtcgtacgtgagcatgatcgccatctttcttttcgtgagttttttcgaaatcggaccgggacctatcccgtggttcatggtggccgaattcttttcccagggaccaaggccagcggcgctcgccattgcggcattcagcaattggacctgcaacttcatcgtcgccctttgtttccagtacatcgccgacttctgcggaccatacgtattctttctcttcgcaggcgtgctgcttgccttcaccctgttcacttttttcaaggtgccagaaaccaagggtaaatcatttgaagagatcgcggcggaattccaaaagaagtcaggatccgcgcaccgaccgaaggcagctgtcgaaatgaagttcctgggtgctacggaaacggtg

SEQ ID NO: 7243 - DNA, 1572 bp, Artificial Sequence
  derived and/or modified sequence
atgactgaggacaaagtcactggaactctggtattcactgtcatcactgcagtcctcggatcgttccagttcgggtacgatatcggagtgatcaatgcgccgcaacaggtgatcatctcccattacagacacgtcctgggagtgccgctggacgaccggaaggccatcaacaactacgtgatcaactcgaccgatgagctgcctaccatatcgtactccatgaaccctaaaccgaccccttgggccgaggaggaaaccgtggccgcggcccaactgatcacgatgctctggtcactcagcgtctcatccttcgccgtgggaggaatgaccgcttccttcttcgggggctggttgggagatactctcggacggatcaaagccatgctggtggcaaatatcctgtcactcgtcggagccctgctcatggggttctcaaagctcggcccctcgcatatcctgatcatcgcggggagatccatctccggcctgtactgtggactcatcagcggcctggtgccgatgtatattggcgaaatcgcaccgaccgcactgcgaggagcactgggcacttttcatcaactcgcaatcgtgacgggaatcttgatctcgcaaatcatagggttggaattcatcttgggaaattacgatctttggcatatcctgcttgggctctccggagtgcgcgccatcctgcagagcctccttctcttcttctgcccagagtcaccacgctacctctatatcaagctggatgaggaagtgaaggccaagcagagcctgaagcgactgcgcgggtacgacgacgtgactaaggacatcaacgaaatgcgcaaagaacgcgaagaagcgagctccgaacaaaaggtttcgattatccagctgtttaccaattcctcataccggcaaccaatcctggtggccctgatgcttcacgtggcgcagcaattctcaggaattaacggaatcttctactactccacctccatcttccaaaccgcggggatctcgaagccagtgtacgcgactatcggagtgggagctgtgaacatggtgtttaccgcggtgtccgtattcctggtggaaaaagcaggcaggcgctccctcttcctgatcggaatgtcaggaatgttcgtgtgcgccatcttcatgtcggtcggtttggtgctgctgaataagttctcatggatgagctacgtgtcgatgatcgccattttcctcttcgtgagctttttcgagatcggtccaggcccaatcccctggttcatggttgccgagttcttttcgcaaggccctcgaccggctgctctggcgattgcagcattctcaaattggacgtgtaacttcatcgtcgcgctgtgcttccagtacatcgcagatttttgcgggccctatgtgttcttcctctttgccggtgtgctgctggccttcaccctgtttaccttctttaaagtgccggaaacgaaagggaagtctttcgaggagattgccgcggaatttcagaagaagtcggggtccgcgcaccggccgaaggctgcagtggagatgaagttcctgggcgcaaccgagactgtg

SEQ ID NO: 7244 - DNA, 1572 bp, Artificial Sequence
  derived and/or modified sequence
atgaccgaagataaggtcactggaactctcgtgttcaccgtcatcactgccgttctcgggtcatttcaatttggctacgacatcggagtaatcaacgcaccgcaacaggtgatcatttcgcattacagacacgtcctcggcgttccgctggacgaccgcaaagccatcaataactacgtcatcaattctaccgatgaattgcccaccatctcatacagtatgaacccaaagccgactccatgggccgaagaggaaaccgtggctgccgcacagttgatcacgatgctgtggtccctgtcggtgagctcgttcgccgtgggaggaatgactgcgagtttcttcggggggtggctcggagacaccctgggaagaattaaggccatgcttgtggcgaacattctgtccctggtcggagccctcctgatgggtttttccaagctgggtccatcacacatcctgatcatcgcgggacgctcgatctcgggcctgtactgcggattgatctccggactggtgcccatgtatatcggcgaaatcgcccctacggcactccggggtgctctgggaactttccatcagctggcgatcgtgacgggcattttgatctcgcagatcattgggctggagttcatcctgggtaactacgatctgtggcacattctgctgggactgtcgggagtgcgtgctattttgcagtcgttgctcctgttcttttgccctgagagcccacggtacctctacattaagctggatgaagaagtcaaggctaagcagtccctgaaacggcttcggggttacgacgatgttactaaagacatcaatgagatgcgcaaggagcgcgaagaagcctcgtccgagcaaaaggtatcgatcatccagctttttactaacagctcatataggcaacctatccttgtcgccttgatgttgcatgtggctcagcagttctcgggaatcaacggtatcttctactactctacctccatctttcaaactgccggcatttcaaaaccggtgtacgcgaccatcggcgtgggggcagtgaatatggtgttcactgccgtgtctgtgttcctggtcgagaaggccggaaggcgcagcttgtttcttatcggaatgtccggaatgttcgtgtgcgcgatattcatgtccgttggactggtgcttctcaataagttttcctggatgtcgtacgtgagcatgatagctatcttccttttcgtgagcttcttcgaaataggccctggaccgatcccgtggttcatggtcgcggagttcttctcacaaggcccacgaccggcagccctggcgattgccgcgttttccaactggacctgtaactttatcgtggctctgtgcttccaatacatcgccgacttctgtggaccatacgtctttttcctgttcgcaggagtgcttctggcgttcaccctcttcacctttttcaaagtaccggaaaccaaggggaagtcttttgaagagatcgcagccgaattccagaaaaagtccggtagcgcacacagacccaaagccgccgtcgagatgaagttcctcggcgcaactgagactgtg

SEQ ID NO: 7245 - DNA, 1572 bp, Artificial Sequence
  derived and/or modified sequence
atgaccgaggataaagtcacggggacgctcgtgttcacggtgatcacggctgtgctggggtcattccagtttgggtatgatattggggttattaatgccccgcagcaggtgataatatcccactatcggcacgtgctgggagttccgctcgacgataggaaagccattaataactatgtgatcaatagcaccgacgaactaccgaccatatcttattctatgaatcctaaacctactccgtgggctgaagaggagactgtggccgcagcccagcttattaccatgctttggtccttatccgtcagcagcttcgctgtgggaggaatgaccgcgtctttttttggcggttggttaggcgacactctgggcaggattaaggccatgctagtagcaaatatcctctcactggtgggggcattactgatgggattcagcaaactcggccccagtcacatactgatcatagccgggcggtcgatcagtgggctgtactgtggactaatctccggcttagttcctatgtacatcggagagatcgcccctaccgcattacgaggagcactgggcacttttcatcaacttgccattgtgacggggattctgatcagccagatcattggtctggaatttatcctgggcaattatgatctgtggcatatactgctgggcctgagcggtgtgcgcgccatcctgcagtccttactcctgttcttttgccccgagagccctaggtatttgtatattaagctggacgaagaagtgaaagccaagcagtcactgaaaagactgaggggttacgacgacgtcactaaggacataaatgagatgcgaaaagagagagaagaagcatcatcagagcagaaggtgtccatcattcaactctttacgaattcttcttatcgtcagcctattctggtggcgctgatgctacatgtggcccagcagttcagcgggatcaatgggatattctactacagcactagtatattccagacagcaggtatttctaagcccgtatatgcaactattggagtgggtgccgtcaatatggtgtttacagcggtttcagtgtttttagtcgagaaggccggacggagatcattgttcctaatcggcatgagcgggatgtttgtgtgcgccatatttatgtccgtgggcctggtgctgctcaacaagttctcttggatgagctatgtgagcatgatcgccattttcttgttcgtatctttctttgagattgggcccgggcccatcccttggttcatggtggccgagttcttctctcagggtcccagacctgccgccctggccatagcagctttctcgaattggacctgtaacttcatagtggctttatgcttccagtacatcgccgatttttgcgggccatacgtgtttttcctctttgctggtgtactgctggcttttactctattcacatttttcaaggtgccggagacaaaagggaaatctttcgaagaaatcgcagccgaattccagaagaagtcagggtcggcacatcgcccaaaggccgccgtggaaatgaaattcttgggcgccaccgaaactgtt

SEQ ID NO: 7246 - DNA, 1572 bp, Artificial Sequence
  derived and/or modified sequence
atgaccgaagacaaggttaccgggaccctggtgttcaccgtgattacagccgtcctggggtccttccagttcgggtacgacataggagtgattaatgcaccgcagcaggtgataattagtcactatcgccacgtactgggtgtacccctggatgatcgtaaagccatcaacaattacgtcataaattctacagacgagttgccaaccatttcttattcaatgaacccgaaacccactccctgggctgaggaggagacggtagctgctgcgcagctcatcactatgttgtggtccttgtccgtgtccagcttcgctgtcggcgggatgacagcctccttttttggaggatggctcggcgacacactggggaggatcaaagctatgcttgtggcaaatatcttgagcttggtgggggcactcctgatgggattctcaaagctggggcctagccacatcttgattattgctggccgctctatctcaggactgtactgcggcctcatatccgggctagttcctatgtacatcggggagatcgcgcctactgctctgcgcggggccctcggcacatttcaccagctggcaattgtgacgggtatccttatcagtcagatcatcgggctagaatttattttagggaactatgatctctggcacatcctcctaggcctttcaggagtacgcgcaatactccagtcactcttactttttttctgccccgagtccccccggtatctctacatcaaactcgatgaagaggtgaaagccaaacagagcctcaaacggcttcgcggctacgacgatgttactaaggatatcaacgaaatgaggaaggaaagagaggaagcgagcagtgagcagaaggtgtccattatccaactttttacaaacagcagctatagacaacctattcttgtggcgctcatgctccacgtggcccagcagtttagcgggattaatggaatcttttattattccaccagcatattccagaccgcaggtatctccaaaccagtctatgccacaatcggagtaggagccgtgaatatggtatttaccgccgttagcgtgtttctggtggagaaagccgggcgaaggtccctattcctgattgggatgagcgggatgttcgtctgtgcgatcttcatgtcggttgggttggtccttctgaacaagttttcctggatgtcatacgtgagcatgattgctatattcctattcgtgtccttttttgagatcggccctgggcctataccctggtttatggttgctgagttctttagtcagggcccgcggcccgcggcactggcaatagccgctttctcaaactggacctgcaactttatcgtcgccctgtgttttcaatacatcgccgatttctgtggcccatacgtgttcttcctgttcgccggggtcctattggcattcacactttttactttctttaaggttccagaaaccaagggcaaatcttttgaggagattgctgcagagttccagaaaaagtccggttcagcacaccgaccaaaggctgcagtagagatgaagttcctcggggcaaccgagacagtg

SEQ ID NO: 7247 - DNA, 1572 bp, Artificial Sequence
  derived and/or modified sequence
atgaccgaagataaggtcacaggaaccctggtcttcacagtgatcactgctgtccttggcagcttccagtttggctatgatattggcgtcatcaatgccccccagcaggtcatcatttctcattacagacacgttttgggcgtgccactcgacgacaggaaggccataaacaattacgtcattaatagcaccgacgagctgccaaccattagttattcaatgaatccaaaacccactccttgggccgaagaggagaccgtagccgctgcccagctgatcacaatgctctggtcattgtccgtgagcagtttcgctgtcggtggtatgacagctagcttcttcggaggctggctcggtgataccctgggccgcatcaaagctatgctcgtcgctaatatcctttcactggttggcgctctcctgatgggttttagtaagctcggcccctctcacatccttataattgcaggccgctccatctctggactctattgcggcctgatatccggtttggtaccaatgtatatcggcgagatcgcccctaccgccctcaggggtgcccttggtaccttccatcaactggctatcgtgactggtattctgatttctcagataatcggattggaatttatcctgggcaactatgacctctggcacattctgctcggtctgagtggcgtgcgcgcaatccttcagtccctccttctgtttttttgcccagaatcccctcgttatctgtatatcaaacttgacgaagaagtcaaggcaaaacaatctctcaagaggcttagaggatacgatgatgtgaccaaggacatcaacgagatgaggaaagagcgtgaagaggccagctccgagcagaaggtttcaatcatccagctgtttaccaactcctcttaccgtcagccaatcttggtggccctcatgctgcacgttgctcagcaattcagtggcattaacggaatcttctattactcaacaagcatcttccaaactgccggcatctctaagcccgtctatgccacaatcggtgtcggtgcagtcaatatggtcttcacagccgtttccgtctttcttgtagagaaggctggtaggcgctctctgtttttgattggcatgagtggtatgtttgtttgcgctatctttatgagtgttggtcttgtgcttttgaacaagttttcatggatgtcctacgtgtccatgatagctatattcctttttgtgtctttctttgaaattggacctggcccaatcccctggttcatggtagccgaatttttctctcagggtccccgtcccgccgcacttgcaatcgctgccttctctaactggacttgtaattttattgtcgccttgtgtttccagtacattgcagatttttgcggcccctatgtgttcttcctcttcgctggcgtgttgttggcttttacacttttcactttcttcaaggtgcctgaaacaaagggcaaatcatttgaggagatcgcagccgagttccagaagaagtctggttccgctcacagacccaaggctgctgttgaaatgaagttccttggcgcaaccgagacagtg

SEQ ID NO: 7248 - DNA, 1572 bp, Artificial Sequence
  derived and/or modified sequence
atgaccgaggataaggtgaccggtaccctcgtgtttaccgtgatcaccgctgttctcggatcattccagtttggatacgacatcggtgtcatcaacgcacctcagcaagtcatcatctctcactaccggcatgtcctgggagtccctctcgacgatcgtaaggcaatcaacaattacgtcattaactccaccgacgagttgccaactatctcgtactccatgaatccaaaacccaccccgtgggcagaggaggaaactgtggctgccgctcaactgatcactatgctgtggtcgctgtcggtgtcgtcatttgctgtcggcggtatgacggcatcgttttttggagggtggctgggcgacaccctgggccgcatcaaagccatgctcgtggcaaatatcctgtcgctggtgggagcgctcttgatggggttctctaaactgggtccgtcacacatactcatcatagctggtcgctcaataagcggactgtactgcggcctcatttccggattggtgccgatgtatattggagagatcgccccaactgcgctcagaggtgctctgggtacctttcatcaattggcgatcgtcaccgggatcctgatctcgcagatcattggactggaattcatcctcggtaattacgatctctggcacattctgttgggactctcgggagtccgcgcgatcctgcagagcctgctgctgttcttttgtccggaatccccgcgctacctttacatcaagctggatgaggaggtgaaggccaagcagtcgttgaagaggcttcggggctacgacgacgttaccaaagacattaatgaaatgcgcaaagaacgggaggaagcctccagcgagcagaaggtgtcaattatccaactgtttaccaactcatcgtaccgccagcctattctggtggcactcatgctccacgtggcccaacagttctcaggcatcaacggaatcttctattactccacttccatcttccagacggctggaatttctaaacctgtgtacgcgaccatcggagtgggcgcagtcaacatggtctttactgcagtgtcggtgttcctcgtcgaaaaggctggcaggcggtcactgttcctgatcggaatgtccggcatgttcgtgtgtgcgatcttcatgtccgtcggactggtcttgttgaacaaattctcgtggatgtcctacgtgagcatgatcgctatcttcttgttcgtttccttcttcgagatcggaccgggacctattccgtggttcatggtggcagaattctttagccagggcccacggcccgccgccctggccatagcggcgttctcaaactggacttgcaactttatagtggccctgtgcttccaatacatcgcggatttctgtggtccgtacgttttcttcctgttcgctggcgtgcttctcgcattcactctcttcaccttctttaaagtaccagaaactaaggggaagtcgttcgaagaaattgcggcggaatttcagaagaagagcgggtcagctcatagacctaaggccgccgtggaaatgaagttcctcggcgcaaccgagacggtg

SEQ ID NO: 7249 - DNA, 1572 bp, Artificial Sequence
  derived and/or modified sequence
atgactgaggacaaggtcaccggaacacttgtgttcacagtgatcactgccgtgctgggctccttccagtttggatacgacataggggtgatcaacgcacctcagcaggtaattatcagccactaccgccatgtcctcggagtgccactcgatgaccgcaaggcgattaacaattacgtgatcaatagcactgatgagctcccaaccatttcctattcaatgaaccccaagcccacgccatgggcggaggaggaaacagtagctgccgcccagttgatcacgatgctctggtccctttctgtcagcagctttgccgtgggaggcatgaccgctagcttttttggcgggtggctgggagatacgctcgggaggataaaagccatgctggtggccaacatactgagccttgtgggagccctcttgatgggcttttctaaactggggcccagccatattcttatcattgccggtaggtcaatttccgggctgtactgtggcctcattagtgggcttgtccctatgtacatcggagaaattgctcctacagcgctgagaggcgccttgggtaccttccaccagctcgccatagtgaccgggatcttgatctctcagattatagggcttgagttcatccttggcaactacgacctctggcacatcctgctgggcttgagtggcgtgcgcgcaattttgcagtccctgctcttgttcttctgccccgaatctcccaggtacctgtatatcaagctggatgaggaggtgaaagccaagcagagccttaagcggcttcgggggtacgacgatgtaactaaggatatcaacgaaatgcgaaaggaacgagaggaggcgagttctgagcagaaagttagcattatccaactcttcacaaactcatcttatcgccagcctatactggtggctcttatgcttcacgtggcccaacagttctccggaatcaacggaattttttactactcaacttcaatattccagactgctgggatttcaaagccagtgtacgcaactatcggggtgggcgccgtaaacatggttttcactgcagtgagtgtgttcctggtggaaaaggctggcagacggagtctctttttgatcggcatgtctggtatgttcgtctgtgcaattttcatgagtgtggggttggtcctgctgaacaagtttagctggatgtcatatgttagcatgatcgcgatctttctctttgtgtccttttttgaaatcggacccggtccgatcccctggttcatggtcgcggagttcttctctcaaggcccaaggcctgccgccctggccatcgccgcattttcaaattggacatgcaacttcatcgtggccctttgcttccagtatatcgctgatttttgtgggccttacgtgtttttcttgtttgccggggtcctgctggcgtttacacttttcacattctttaaggtccccgagacaaaggggaagagctttgaagagatcgcagctgagttccagaagaagtcaggttccgcccaccgacccaaagctgccgtagaaatgaaatttctgggagcaaccgagacagtc

SEQ ID NO: 7250 - DNA, 1572 bp, Artificial Sequence
  derived and/or modified sequence
atgactgaagataaggtgaccggcaccctcgtgtttacggtgatcacggcagtgcttggttctttccagtttggttacgatattggagtgattaacgcaccacaacaagtcatcatatcgcattaccgccatgtcctgggtgtgcccctcgatgatcggaaggcaataaacaactatgtgatcaattcaactgatgagcttccaaccatatcgtactccatgaacccaaagcctacgccatgggcagaagaggaaactgtggccgcagcacagttgataaccatgctttggagcctttccgtcagttcattcgccgtgggtggcatgactgcatcgttttttggaggttggctcggtgacactcttgggcggataaaggcaatgcttgtagcaaatatcctgtccttggtgggtgcccttcttatgggattttcgaaactcggtccatcgcacatcctgattattgcaggacgtagcatatcaggcctgtactgtgggcttatttccggcctggtgccaatgtacatcggagagattgcacctactgcgctgagaggagcccttggtacttttcatcaacttgccatagtgacgggcattctcatttcgcagatcattggtctggagtttatccttggcaattacgacctgtggcacatcctcctgggactttcgggagtccgggcaatactccaaagccttcttcttttcttttgtcctgaatccccacggtacttgtacattaaacttgacgaggaagtcaaggccaagcagtcactgaagcgactgcgcggatacgacgatgtcacgaaagacattaatgaaatgagaaaggagcgggaggaagcgagctcggaacagaaagtgtccataatccagctctttaccaacagctcctaccgccagccaattctggtggcgcttatgttgcatgtggcgcaacagttttcaggaattaacggaattttctactattcaacttccatatttcagaccgcaggtatttcgaagcctgtgtacgcaaccattggagtcggagccgtgaatatggtgttcactgcagtttcggtctttctggtggaaaaggcgggccgaagatcactgttcctgatcggcatgtcgggtatgttcgtgtgcgcaatctttatgtcggtggggctggtgcttctgaacaagttttcgtggatgtcgtacgtctcaatgattgccatctttctgtttgtgtccttcttcgaaattggacccggtccaattccttggtttatggtggccgaattcttttcacagggaccaagacctgcagcactggcgatcgctgcgttttcgaattggacttgcaatttcattgtcgcactgtgctttcagtacattgcagatttttgtggcccatacgtgttttttctcttcgcgggggtgcttctggcatttactctcttcactttctttaaagtgccagaaaccaaaggaaaatcgttcgaagaaatcgcagccgaattccaaaagaaatccggctcagcgcaccgcccaaaggccgctgtcgaaatgaagtttctcggagcaaccgaaaccgtg

SEQ ID NO: 7251 - DNA, 1572 bp, Artificial Sequence
  derived and/or modified sequence
atgacagaagacaaagtgacgggcactctggttttcacagttatcaccgccgtgcttggaagttttcagtttggttacgatattggtgtcatcaacgcccctcagcaggttatcatcagccactacagacacgtactgggcgtgccacttgacgacagaaaagccattaacaattacgtgatcaattctaccgatgaactgccgacgatttcttactccatgaaccccaagcccactccgtgggccgaggaggagacagtggcggctgcccagttgatcacgatgctgtggagcctttcagtctcttcattcgcagtcggcggtatgaccgcttccttctttggcggctggctgggagataccttgggccgcatcaaggcgatgctggtcgccaacatcttgtccctggtcggtgctctgctcatgggcttctccaagcttggtccatcacatatattgatcatcgccggtaggagcatctctggcctttactgtggacttataagcggacttgtgccaatgtacatcggagagattgccccaacagcgctcaggggagcgctgggtacattccaccagttggctatcgtaacaggtattctgatctctcagataatcggtctcgagttcattctgggcaattatgatctgtggcatattcttctgggtctctccggtgttcgcgcgatcctgcagtccctgctgctcttcttctgtcctgagtctcctcgctacttgtatattaagcttgatgaggaggtgaaagccaagcagtcacttaagaggctgcgcggttacgatgacgtgacgaaggacataaacgaaatgagaaaggagcgcgaggaggctagctctgaacagaaggtgtctattattcagctcttcaccaattcttcatacagacaaccaattctcgtggcgctgatgctccacgttgcacagcagttcagcggaattaacggcatcttctattactcaacttcaatctttcagactgccggcatctctaagccggtctatgctaccattggtgttggcgcagtcaacatggtcttcaccgctgtgtctgtgttcctggtcgaaaaggccggtagacgcagcttgtttctgattggtatgagcggcatgtttgtctgcgccatcttcatgtcagtgggcctggtcctgctgaacaagttctcttggatgagctacgtgagtatgatagccatcttcctttttgtcagtttttttgaaattggtccaggtccgataccctggttcatggttgcagagtttttctcccagggccctagacccgctgccctggctatcgctgctttttctaactggacgtgcaattttatcgttgcgttgtgctttcagtatatcgcggacttctgtggtccctacgtgttctttttgttcgccggtgttttgctggcctttaccctcttcactttcttcaaggtacccgagaccaagggtaaaagcttcgaagaaatcgcagccgagtttcaaaaaaagagtggatccgctcacaggcctaaagccgccgtcgaaatgaaattcttgggagccaccgaaacggtg

SEQ ID NO: 7252 - DNA, 1572 bp, Artificial Sequence
  derived and/or modified sequence
atgactgaagacaaggtgaccggcaccctggtttttacagtgataactgctgtactgggttcctttcagtttgggtacgatatcggtgttatcaacgcgccccagcaagtgattattagtcattaccggcacgtcttgggtgtccccctggatgaccggaaagccattaataactatgtaattaactcaactgacgagctgcccaccatcagttacagtatgaatcccaagcctaccccctgggcagaagaggaaactgtggccgctgcgcagctgataacaatgctgtggagcctgagcgtgtcatcgtttgccgttggcggaatgactgccagtttctttggcgggtggctaggcgataccctgggccggatcaaggctatgctggtcgctaatatactgtctctggttggggcactgctaatgggattttcaaagctgggtcccagccacatccttatcatcgccggtcgatctattagtggtctctattgcggtctgatctctgggctggtccctatgtacatcggcgaaattgcccctaccgccctccgcggggctctgggcacttttcaccagctggcaattgtgaccggaatactcatatcacaaattatcggactggaattcatcctcggcaactacgatctgtggcacatactgctaggtttgtctggagtgcgagccattctccaatccctgctgttgtttttctgcccagaaagccccagatatctttatatcaaactggacgaggaggtcaaggccaagcaaagccttaagcggctcagggggtacgacgatgtgactaaggatattaatgaaatgagaaaagaacgggaagaagcctcttccgaacaaaaggtgagtatcattcagctatttactaacagtagttatcggcagccgatactggtcgccctgatgctccacgtggcccagcagttcagcgggatcaacggcattttttattacagcacgtctatcttccaaacggccgggatctctaaacctgtgtatgctaccataggtgtgggtgcggtgaacatggtatttaccgccgtttccgtgtttttggtcgagaaagctggaagaaggtcattgtttcttatcgggatgtctggtatgtttgtgtgcgcaatctttatgagcgtgggcctggtcctcctcaataagttttcctggatgagctatgtgtcaatgatcgccatattcctgttcgtgtccttctttgagattggaccagggcctataccgtggttcatggttgcggaattcttctcccaaggccccaggccggctgccctggcgatcgccgcattttcgaactggacctgtaactttatagtggctctgtgcttccagtacatcgcagacttctgtggcccttacgtgttttttctgttcgcgggggtgctcctcgccttcaccctgtttactttctttaaggtaccagaaaccaaaggaaaatctttcgaggagatcgcagccgaattccaaaagaaatcaggcagcgcgcacagaccaaaagcggctgtagaaatgaaattcctcggcgccactgagaccgtg

SEQ ID NO: 7253 - DNA, 1572 bp, Artificial Sequence
  derived and/or modified sequence
atgaccgaagataaagtgacgggaaccctggtttttaccgtgatcacagctgttctcggctccttccagttcggctacgatatcggcgtaattaacgctccccaacaggttatcattagccactaccgacatgtacttggagtgccactggatgataggaaggcgattaacaattacgtgataaattctactgatgaactgccaactatttcttactctatgaatcctaagcctacgccctgggctgaggaggagacggttgccgctgcgcagctgatcacaatgctctggtctcttagcgtgtcctcctttgctgtgggtgggatgaccgcgtctttcttcggtgggtggcttggagataccctcggacggattaaagctatgctcgtagcaaatatcctcagcctcgtcggggctctccttatgggatttagtaagctgggtccaagtcatatcctgatcatcgcaggccggtctatctctggcctgtattgtgggctgattagtggcctggtgcctatgtacattggtgagattgcgccgaccgcacttcggggagctcttggcacttttcaccagctcgctatcgtcactggaatcctgatctcacaaattatcggccttgaatttatactgggtaactacgacctctggcacatcttgcttggactgtcaggcgttagggctatcttgcaatccctgctgctgtttttctgccccgagagtccacggtacctgtatataaaacttgacgaggaggtcaaggccaagcaatcccttaagcggctgcgcgggtatgacgatgttaccaaagatattaatgagatgcggaaggaaagagaggaagcttccagtgaacaaaaggtctccatcattcagctgtttactaactcttcctatagacagcccatcctcgttgcgcttatgctgcacgttgctcagcaattcagtggcattaatgggatattctattactcaacttccatcttccagaccgcaggcataagtaagcccgtgtacgccaccattggtgtgggcgctgtgaacatggtgttcaccgccgtttccgtattcctcgtcgagaaggctggacgacgatcactcttccttatcggaatgtccggtatgtttgtgtgcgctattttcatgtcagtgggactcgtgctgttgaataagttttcctggatgagttacgtgagcatgatcgccatctttttgtttgtctctttctttgagataggcccaggaccgatcccatggtttatggttgcggaatttttttctcaaggacccaggccagcagccctggctatcgccgcgtttagtaactggacttgcaacttcattgtggctctgtgttttcagtacatcgcagatttctgcggcccctatgtgtttttcctgtttgccggcgtcctgctcgccttcacgctgttcacttttttcaaagtccccgagacaaaaggcaagtcattcgaggagatcgcagctgagtttcaaaagaagagtgggtctgcgcatcggccaaaggcagctgtagagatgaagttccttggagctacagagacggtc

SEQ ID NO: 7254 - DNA, 1572 bp, Artificial Sequence
  derived and/or modified sequence
atgaccgaggataaggttactggcacgctcgtttttactgtgatcactgctgtcttggggagttttcagtttggttatgatattggggtgatcaatgcacctcaacaggtaatcatctctcattacaggcatgtgctgggcgtgccccttgatgacaggaaggccatcaacaattacgtgattaatagcacagatgaactgccaactattagctatagcatgaatcctaagcctaccccttgggctgaggaagaaactgtggccgcagcccagctgattactatgctctggagcctatcagtgtcctcattcgctgtaggagggatgacagctagtttttttggcgggtggcttggtgacacactcgggcggataaaggcaatgctcgttgccaacatcctgtccttagtgggagcacttttgatgggcttcagtaagctggggccaagtcatatcctgattattgccggacggagcatctcgggtctatattgtggattaataagtggcctcgtcccaatgtatatcggtgagatcgctccaactgcccttcgcggggccctaggtacctttcatcagctggcaattgtcactgggatcctgatttcccagatcattggcttagaatttatcctgggaaattacgatctctggcacattctcctggggctgtctggagtccgggctattctgcaatcattgttgctgtttttctgcccagagagcccccgttacctgtacattaagctggatgaggaggtgaaagcaaaacagtcactgaagcgcttgcgcggttacgatgacgtcacgaaagacatcaatgagatgagaaaagaaagggaggaagcctcctctgaacagaaagtgtcgattatccagctgttcacgaactcctcttatcgacagcctatactcgtggctctgatgctccacgtggcccagcaattctctggaatcaacggcatattttactacagtacctcaatcttccaaactgcggggatatctaagccagtgtatgcaactattggcgtaggagcagtgaacatggtcttcacagccgttagtgtgttcttggtggaaaaagccgggaggagaagtctatttttgatcggtatgagcggaatgtttgtgtgtgcgatcttcatgtccgtcgggttggtgctgctgaacaagtttagctggatgtcttatgtgagcatgattgccattttccttttcgttagcttcttcgagatcggcccagggccgataccatggttcatggtagccgaatttttttcccaggggccaaggcctgcggcactggctatcgcagcattcagcaactggacctgcaatttcatcgttgcactgtgttttcagtatattgccgatttctgtggcccttacgttttcttcctgtttgctggagtacttcttgccttcaccctgttcaccttttttaaggtacctgagaccaaggggaagtccttcgaagaaattgccgccgaatttcagaaaaaaagcgggtccgctcacagacctaaggccgctgtcgagatgaaatttctgggtgctacagaaaccgtg

SEQ ID NO: 7255 - DNA, 1572 bp, Artificial Sequence
  derived and/or modified sequence
atgaccgaggataaggttactggaaccctcgtgtttactgtgatcactgcagtgttgggtagcttccagtttggttacgacatcggcgtcattaacgccccgcagcaggtcatcatctcccactaccggcacgtccttggtgtgccgctggatgatcgcaaggccatcaataactacgtgatcaattctaccgacgaactgccgacgatttcatacagcatgaacccgaagccgacgccgtgggccgaggaggagacggtggcggccgcccaactcatcactatgctgtggtcgctgtcggtgagctcgttcgcggtgggagggatgactgcgtcattcttcggcggatggctgggcgacaccctgggacggatcaaggccatgttggtggccaatatcctgtcgctcgtcggggccttgctgatgggattctcgaaacttggtccttcccacatcctcatcatcgctggtcgctccatctcgggactctactgtggactgattagcgggttggtcccgatgtacattggtgaaatcgctccaaccgcgctgagaggagcactgggcacgtttcatcaactcgcgatcgtgaccgggatcctgatctcacaaatcattggactcgagttcatcttgggaaattacgacctctggcatatcctgctgggcctgtccggagtgagagccatcctgcaatccctgctgttgttcttctgcccggaaagcccgcggtatctgtacatcaagctggacgaggaagtgaaagctaagcagagcctgaagcgcctgcgcggctacgacgacgtgactaaggatatcaacgagatgcgcaaggagcgcgaggaggcatcgagcgaacaaaaagtctcaatcatccagttgttcactaattcctcgtatcggcagccgattttggtcgctctcatgctccacgtggcccagcagttctccggaatcaatggaatcttctactactccacttcgatcttccagaccgccgggatttccaagccggtttacgctactattggcgtcggagcagtgaacatggtgttcaccgcagtcagcgtgttcctggtcgagaaggccgggagacggagcctcttcctgataggaatgtcaggaatgttcgtctgcgcaattttcatgagcgtggggctggttctgttgaacaagttcagctggatgagctacgtcagcatgatcgccatattcctcttcgtgagctttttcgagatcgggccagggccaatcccgtggttcatggtggccgagtttttctcccagggtcccagacctgccgcactggccatcgcagccttctccaactggacttgcaatttcatcgtggcactctgcttccagtacatcgccgacttctgcggaccatacgtgttcttcctctttgcgggagtgctgctggccttcaccctgttcacttttttcaaagtgccggagactaagggaaagtcgtttgaagaaatagctgccgaattccagaagaagtcgggcagcgcacatcggcccaaggctgcggtggagatgaagttcttgggagccacggaaacggtc

SEQ ID NO: 7256 - DNA, 1572 bp, Artificial Sequence
  derived and/or modified sequence
atgactgaagataaggtgactggtaccctggtgtttacggtgattaccgcagtacttggtagctttcaatttggttatgacatcggtgtcattaacgcacctcaacaagtgatcataagccattaccgccacgtcctgggagtgccccttgacgatcgaaaggcaattaacaactacgttatcaacagcacggatgaacttccaaccatttcctacagcatgaaccctaagcctacgccttgggcggaggaagagactgtcgcagcagcacagctgatcactatgctgtggtcactgtctgtctctagctttgcagttggggggatgacggctagcttctttggaggctggcttggggacactctgggtagaataaaggcgatgcttgtggcaaatatcctgtcgctggtgggtgcactgcttatgggcttcagcaagctggggccttcccatatactcattattgccggaagatcaattagcggactttactgcggcctgatctccggactggtgcctatgtacattggggaaatcgcacccaccgcacttagaggcgcactcggaaccttccatcagctcgcaatcgtgaccggaattttgatctcgcagatcataggactggagtttattctcggaaattacgatctttggcacattttgttgggtctttctggtgtccgtgcgattctccaatcactgctcctcttcttttgcccagagtcccctcgatacctgtacatcaagctggacgaagaagtgaaggctaagcaatccctgaagagactgaggggctacgacgatgtcacgaaagatatcaacgaaatgaggaaagaacgggaagaggccagcagcgaacagaaggtgagcatcatccagctttttaccaattcgtcgtaccgccagcccatccttgttgccctcatgttgcatgtcgcacaacaattttcaggaattaacgggattttctactactccacctccatctttcaaaccgccggcatcagcaagccggtgtacgcaaccatcggcgtcggcgctgtgaacatggtgtttaccgcagtgtcggtgttcctggtggagaaggccggacgaagatccctttttctcattggcatgagcggcatgttcgtctgtgcaattttcatgtcggtcggacttgtgttgctcaacaagtttagctggatgtcgtacgtctcgatgattgcaattttcctcttcgtgtcgtttttcgagatcggccccggacctatcccatggttcatggtcgcggagttcttttcacagggacctcggccagcagcactggcaatcgcagccttttccaactggacctgcaatttcatcgttgcactttgttttcaatacattgctgacttctgcgggccctacgtattctttctttttgcaggagtgcttctggcattcaccctgtttactttctttaaagtgcccgaaaccaaggggaaatcctttgaagagattgcagcagaattccagaagaagtcgggatccgcacatcggccaaaggcggcagtggaaatgaagttcctcggcgcaactgagactgtg

SEQ ID NO: 7257 - DNA, 1572 bp, Artificial Sequence
  derived and/or modified sequence
atgacggaggataaagtgactggaaccctggtgttcactgtgatcaccgcagtccttggttcgtttcaatttggatacgatattggcgtcattaatgcaccacagcaagtgattatcagccactaccggcacgtgcttggcgttccactggatgatcggaaggctataaacaattacgtgatcaacagcactgacgagctgccaaccattagctactcgatgaatcctaagccaaccccttgggcagaagaagagactgtcgccgcagcccagctgatcaccatgctgtggtcccttagcgtgtcctcgtttgcagtaggtggtatgacggcatccttcttcggcgggtggctgggcgatactctcgggcgaattaaggctatgctggtggccaacatccttagcctggtgggtgcgcttctgatgggattttcgaagctcggacctagccatattctgattatagccgggagaagcatttctggcctgtactgtggcctcatctcaggactcgtcccaatgtacatcggtgaaattgcccccactgctctgcgtggagccctggggaccttccatcaacttgcaatcgtcactggcattctcatatcgcagatcattggccttgagtttattcttggtaactacgatctgtggcatatcctgcttggcctttccggggtccgggcaattttgcaaagcctgcttttgttcttttgtccggaatcgccgaggtacctgtacatcaaacttgacgaggaggtcaaggccaagcaaagtctcaagagacttcggggctacgacgatgtgaccaaagacataaacgagatgagaaaggaaagggaggaggcttcctcagaacaaaaggtgagcattatccaacttttcactaattcgtcgtatcgacaaccgattctggtcgccctgatgctgcacgtggcacagcagtttagcgggattaacggaatcttttactactcgactagcatttttcagaccgcaggaatctctaaaccagtgtacgcgacgatcggtgtgggtgcagtgaatatggtttttactgcagtcagcgtctttctcgtggaaaaggcaggccgaagatcgctttttcttatcggcatgtccgggatgttcgtgtgcgcaattttcatgtcagtcggtctggtgctgctgaacaagttctcatggatgtcctacgtgtccatgatcgcaattttcctcttcgtgtcgtttttcgaaattggacctggtccgataccgtggtttatggtcgcagagtttttctcgcaaggaccccgtcccgcagcgctggccattgcagcatttagcaattggacctgtaatttcattgtggcattgtgctttcagtacattgcagacttttgtggaccctatgtgttttttctgttcgcgggtgtcctgctggcctttacccttttcaccttcttcaaggtgcccgaaaccaagggtaagtcctttgaagaaatcgccgccgaattccaaaagaagtcagggtccgcacatcgaccgaaggctgcggtggagatgaaatttctcggggctactgaaactgtg

SEQ ID NO: 7258 - DNA, 1572 bp, Artificial Sequence
  derived and/or modified sequence
atgaccgaggacaaagtcacaggaaccctcgtgttcaccgtgattaccgcagtgctcggcagctttcagtttgggtatgatatcggagttatcaatgctccccagcaagtcattatatcccattacaggcatgtcttgggggtgcccctggatgatcgtaaggcaattaataactacgtaattaacagcaccgacgaacttcctacaatcagctacagcatgaaccccaaacccacgccgtgggctgaggaggagactgttgccgccgcacagttgatcacaatgctgtggtctctgtcagtctcatcctttgcagtgggaggcatgacagccagcttcttcggagggtggctaggggacacgctcggcaggataaaagctatgttggtggcaaatatactctcattggtaggagcactgttaatggggttctccaagttgggaccaagccatatactgatcatagctggtaggtccatctctggtctctactgtggactaatttccgggctggttccaatgtatatcggtgagatagcccctactgctctgcggggcgcattaggaacttttcaccaactcgctatagttaccgggatcctgataagtcagattataggtctggaattcatcttgggcaattatgacttgtggcatatactcctggggttgagcggtgtcagggctatacttcagagcctgctcctcttcttctgccccgagagtccacgatacttatatatcaagctagatgaagaggtgaaggcgaagcagtcactgaagagactgcgaggctatgatgacgtcacaaaggatatcaacgaaatgcgaaaagaaagagaggaagcttcctcggagcaaaaagtcagcataattcagctattcaccaacagctcctaccgacagcctatcctagttgcccttatgctccatgtggcacagcagttctccggaattaacgggatcttctactattccacttctatctttcagacagccggaatctctaagccagtgtatgccactatcggcgtaggcgcagtgaacatggtctttacggccgtcagcgtatttctggtggaaaaggcgggtcgacgatccctgttcctgatcggcatgtccggtatgtttgtgtgcgcaatatttatgtcggtgggactagtgctcctgaacaagttctcctggatgagctacgtgtctatgatagcgattttcctctttgtttcattcttcgaaatcggtcctggcccaatcccatggtttatggtcgcggagttcttttctcaggggccgcgccccgccgccctggccatagccgcattctcaaattggacctgtaatttcatagtggccctgtgtttccaatatatcgccgatttctgtgggccatacgtgttctttctattcgctggcgtacttttggcgttcacgcttttcactttttttaaggttcctgagaccaagggcaaatctttcgaggagattgctgccgaattccagaaaaagagcggcagcgctcacaggcccaaagccgctgtggagatgaagtttttaggcgcgacggaaaccgtt

SEQ ID NO: 7259 - DNA, 1572 bp, Artificial Sequence
  derived and/or modified sequence
atgactgaggataaggtgaccggcacactagtcttcactgtaatcacggccgtgttggggtcatttcagttcgggtacgacattggggtgatcaatgctccgcagcaggtgattatcagccattatcggcatgttctgggagtccccttggacgatcgtaaggccattaacaattacgtgattaacagtacggatgagctacccaccatttcttattcgatgaatcccaagcctactccatgggctgaggaggagaccgtggccgctgcccagctcatcactatgttgtggtcactctctgtgagctctttcgcagtgggaggaatgacagcaagtttctttgggggatggttgggtgatacgctgggcagaatcaaagccatgcttgttgctaacatcctgtctctggtcggggcccttctgatggggttctcaaagcttggcccctcccacattctgattatagccggccgctctattagcgggttgtactgtggcctcatttcgggccttgtcccgatgtacataggggagatcgctccaacagcacttagaggcgctctgggcactttccaccagttggctatagtcaccggtattttaatatcccaaattattggactggagttcatcctcgggaactatgacctatggcacatacttctggggctctcgggggtccgcgctatcctgcagagcctactgttgttcttttgccccgagtctcctaggtacctttacatcaagctggatgaggaggtcaaggcaaagcagtctttaaagaggctgagagggtatgacgacgtaacaaaggatatcaacgagatgcgcaaggagagagaggaagcgtccagcgagcagaaggtatctatcatccagctctttaccaatagttcctatcggcagccaatccttgttgcccttatgcttcacgttgcacagcagttttctggcatcaatggcatcttttactactccacttccatttttcaaacggccggcataagcaaacccgtttatgccacaattggggtgggcgccgttaatatggtcttcactgcggtgtcagtttttctggtggagaaggcaggccgccgctctctgttcttaatcggaatgtccggcatgtttgtgtgtgcgatcttcatgtccgtgggcctggtcctcctcaacaaattctcttggatgagctatgtttccatgattgctatctttctcttcgtgtctttctttgaaattggaccaggacctatcccttggttcatggtggccgaattcttttcacaggggcccagaccggccgccttagctattgcagccttttcaaactggacctgtaatttcatcgtcgcgctttgttttcagtatatcgctgatttctgcgggccttatgtgtttttcctattcgctggtgtgctgttggcttttacactttttacatttttcaaagtacctgaaaccaaaggaaagagcttcgaggagatagcagctgaatttcagaagaaatccggcagtgcccatcgtccaaaggcagcagtggaaatgaagttcctgggtgctactgaaactgtg

SEQ ID NO: 7260 - DNA, 1572 bp, Artificial Sequence
  derived and/or modified sequence
atgacagaggacaaggtaacaggtacccttgtgtttaccgttatcactgcagtgcttggatccttccagtttggatatgatattggtgtgatcaacgccccacaacaggtgatcataagccactacaggcatgtcctgggggtgccactggacgatcgcaaagctataaataactatgtgatcaactccactgacgaactccctactatctcttactctatgaacccgaaacccaccccttgggccgaagaggagaccgtggcagctgctcagctgattacgatgctttggtcccttagcgtttcttcctttgccgtggggggcatgaccgcctccttcttcgggggttggctgggcgatacacttggtaggatcaaagccatgttggtggccaacattctgtcactggtgggagctttgttgatgggcttttctaaactagggccctcgcatatcctgattatcgcaggtcggtccatatctggtctgtactgtggactaatcagcggcctggtgcccatgtacataggagagatcgctcccaccgccctccgcggggcgcttgggacttttcatcaacttgccattgttaccggcatcctgatttcccagatcatcggactggagtttatactgggcaattatgatctctggcatatccttcttggactctccggggtgcgggcaattctgcagagcctcttactattcttctgtcctgagtctccaagatacctctacataaaactagacgaagaagttaaggccaaacagagtctgaagagactgcgtggatacgacgatgtgaccaaggacatcaatgaaatgagaaaggagagagaagaggcttcttccgaacagaaggtcagtatcatccagcttttcactaactcctcctataggcagccgatcctggttgctctcatgttacatgtggcgcagcagtttagtgggatcaatggaatcttttattacagcacatccatcttccaaacggccggtatcagtaagccagtatatgccacaattggggtgggagccgtgaatatggttttcacagccgtctctgtattcctggtcgagaaggcaggcagacggtcgctgtttctgattggaatgtcaggtatgttcgtttgcgcaattttcatgagcgtgggcctggtgctgttaaataaattctcttggatgtcatatgtgagcatgatcgcgatcttcctgtttgtatcattctttgaaattggtccaggccctatcccgtggtttatggtggctgaattctttagccagggcccccgaccagccgccttggctatagctgccttttcaaattggacgtgcaacttcattgtggccctgtgtttccagtacatcgctgacttttgcgggccatacgtcttctttctcttcgcaggggtgcttctggccttcaccttgttcactttctttaaagtaccagagacaaaaggaaaatcatttgaagagattgctgcggagtttcagaaaaagtcaggcagtgcgcaccggccaaaggccgcggtcgagatgaagttcctgggcgccactgagactgtt

SEQ ID NO: 7261 - DNA, 1572 bp, Artificial Sequence
  derived and/or modified sequence
atgacggaagataaggtgactggtacgcttgtgttcaccgtcattaccgcagtgctggggagctttcagtttgggtacgatattggagtgataaacgccccccagcaagtgatcatatctcattaccgccatgtcctgggcgtgcccctggacgatagaaaagcaattaacaattacgtcatcaattcgactgatgaactcccgacgatctcgtattcgatgaaccctaagcctaccccgtgggccgaggaagaaaccgttgccgcagcccaactgattaccatgctgtggtcactgtccgttagctccttcgcagtgggaggcatgaccgcctctttcttcggaggatggttgggagacactctgggacggattaaggccatgctggttgcaaatatcctgtccctcgtgggcgctctgcttatgggcttttcgaagctcgggccttcacatatcctcattatcgccggacgatccattagcggcctgtactgcggtcttatatcggggctggtgcctatgtacattggagagatcgcacctacggcgctccgtggtgccctcggaaccttccaccaactggcaattgtcaccggtatactgatttcacagataattggtctggaattcatcctgggcaactatgatctttggcatatcttgttgggtctgtctggcgtgagggcgatcctccagagccttcttctcttcttttgtccggaatcccctaggtacctttacatcaaacttgatgaagaagtgaaagctaaacaatccctcaagcgactgcgtggctacgacgatgtgaccaaagacataaacgaaatgcgcaaggagcgcgaagaggccagcagcgaacaaaaggtgtccattattcaactttttacgaattcgtcgtacaggcagcctatacttgtggcactgatgctgcacgtggcacagcaattttcgggcattaatggtatcttttactactcaacttccatctttcagactgcaggaatttcgaaacctgtgtacgcaactataggtgtgggagcagtgaatatggtgtttactgcagtcagcgtgtttttggtggagaaggcaggaagaagatcgctcttcctcatcggtatgtcgggtatgtttgtctgcgctatctttatgagcgtcggccttgtgctccttaacaagtttagctggatgtcatacgtttccatgatagccattttcctctttgtctcgttctttgaaattggaccaggaccaatcccttggtttatggtcgcggagttcttttcccaagggcccaggcctgccgctcttgctattgctgcattttcgaactggacttgtaacttcatcgtggcactctgctttcagtacatcgccgacttctgcggaccttacgttttctttttgttcgcgggcgtgcttcttgcgttcaccctttttacctttttcaaagtgccagagactaagggaaagtcattcgaggaaatcgcagcagaattccaaaagaagtcgggaagcgcccatcgccccaaggcggcagtcgagatgaagtttctgggcgcaactgagactgtg

SEQ ID NO: 7262 - DNA, 1572 bp, Artificial Sequence
  derived and/or modified sequence
atgaccgaggataaagttactggaacactggtcttcacagtcatcacagcggtgttgggctcctttcagttcggctacgacattggcgtcattaatgccccacaacaggtcatcatcagccattatcgtcatgtgctgggggtaccgctcgacgatcgcaaagctattaacaactacgtaatcaatagcacagacgaattgcctaccataagctacagtatgaaccctaaaccgactccgtgggctgaagaagagacagttgctgctgctcagctgataactatgctgtggagcttgagcgtgagcagctttgcggtgggaggaatgaccgcatccttttttggaggatggctcggcgatacgctcggtaggattaaggccatgctggtggcgaatatcctgagcctggtcggcgccctgctcatgggctttagcaagctgggcccgtcccatatcctgatcatagccggaaggtccatttcaggcttgtattgcggccttatctcaggactggtccctatgtacatcggcgagattgcacccactgctcttcgcggagcccttggcactttccaccagctggcaatcgtgactggaatcctcatctcacagattatcggcctggaatttattctggggaactatgacttgtggcacattctccttggcctgtcaggcgtcagagccatcctccaatccttgcttctgttcttttgcccagaatctccccgatacctgtacattaaactggatgaggaggtcaaagctaaacagagcctgaaaaggctccgcggttacgacgacgtcactaaggatattaatgaaatgagaaaagagcgcgaagaggctagctctgaacagaaagtcagcatcatccagttgtttactaattccagttatcgccaaccaattcttgtggctttaatgttgcacgtggcgcaacagttctccggaatcaacgggatcttttactacagcacctccatcttccaaaccgctggcatcagtaaaccagtctacgccaccatcggggtcggcgccgtgaacatggtgttcacagccgtgagcgtcttcttggtggagaaagcaggccggcgcagtctctttttgatcggcatgtctggaatgttcgtgtgtgccatctttatgtctgtaggtctggttctgttgaacaaattttcatggatgagttacgtctcaatgatcgctatctttctcttcgtatctttctttgagattggccccggcccaatcccttggttcatggtagccgaatttttctcacagggcccaagacccgccgccttagcaatcgcggcctttagcaactggacctgcaactttattgtagccctgtgtttccagtacattgctgatttttgcggaccttatgtattttttctgttcgcaggcgtgctgctggctttcaccctctttaccttttttaaggtgccagagactaaggggaagagttttgaggaaatcgctgctgagttccagaagaagtccggctctgcacacaggcccaaagcagctgtagaaatgaagttcctgggcgcaaccgagaccgtg

SEQ ID NO: 7263 - DNA, 1572 bp, Artificial Sequence
  derived and/or modified sequence
atgactgaagataaggtgactgggacacttgtgtttactgtgatcacagctgtactagggagtttccaatttggatacgatataggagttataaacgctccacaacaggttatcatatctcattatcgacacgtactgggagttcctttggatgataggaaagctattaacaactatgtaataaactctacagatgagctcccaacaatatcgtattctatgaaccccaagcctacaccttgggctgaagaagagacagtggcagccgcacaactcattactatgttatggtccctttccgtcagttcctttgcggtggggggaatgactgcttctttctttggaggatggcttggagacacattagggaggataaaagccatgttagtggccaatattctctcactagtgggggccctactgatgggattttctaaactgggaccatctcatatcttaataatcgctgggcgctcaatttcaggactatattgtgggctcatctctgggctggtgcctatgtacatcggagaaatagcaccaacagccctccgcggagcactagggacatttcaccagttagcaatagtcacaggaatcctaatatctcagataatagggctcgaatttatacttggaaactatgacctatggcatatactactcgggcttagtggggtcagggccatcctccagagtctgctgctcttcttctgtcccgaatccccccgctatctctatataaaactagatgaggaagtgaaagctaaacagagtctgaagcggcttcgagggtatgatgatgtcacaaaagatataaacgaaatgcggaaggaaagagaagaagcctcctcagagcagaaagtgtccatcatccagttgttcacaaactcctcttatagacagcctatcctcgtggcattgatgttacatgtagctcagcagttctcagggatcaatggaatattctattattccacatccatatttcagactgctggaatctcaaagccagtatacgcaactattggagttggagcggtcaatatggtctttacagcagtgagtgttttcttggtggaaaaagccggacggcggagtttattcttgatcgggatgtctggaatgttcgtctgtgctatctttatgagtgtaggactcgttctgcttaataaattctcttggatgtcctacgtgagtatgattgctatattcctctttgtgagtttctttgaaatagggccagggccaataccctggttcatggtcgccgaatttttctcacaggggcctcggcccgctgccctcgcaatagctgcattctctaactggacatgcaattttattgtcgccctgtgtttccagtatattgccgatttttgtgggccatacgtgttttttctgttcgccggggtattactggcattcacactttttacattttttaaagttcctgaaactaaaggaaaatccttcgaagaaattgctgctgagttccagaaaaaaagtggatccgcgcacagacccaaagctgccgtcgaaatgaaatttttgggggccactgaaacagtc

SEQ ID NO: 7264 - DNA, 1572 bp, Artificial Sequence
  derived and/or modified sequence
atgaccgaagataaggtgactggaactctggttttcaccgtgatcactgctgtgctgggatcgtttcagttcggttatgacatcggtgtgattaacgctccccagcaggtcattatctcccactacaggcacgtgctgggggtgcccctcgatgatcgcaaggccatcaataactacgtgataaactcgaccgacgaacttcctaccatcagctacagcatgaacccgaagcccaccccttgggcagaggaagagacggtcgccgccgcccagctgatcaccatgctctggtcgctgtccgtgtcgtcgttcgcggtgggcggaatgacggcctcgtttttcggcggatggctcggagacaccttgggtaggatcaaagctatgctggtggctaatatcctcagcctcgtgggagcgcttctgatgggcttctctaaactgggaccttcacacatcttgatcatcgcaggacgctcaatctccggtctgtactgtggactcatctccggattggtccctatgtacatcggagaaatcgccccgaccgccctgcggggagcgctcggaacttttcaccaactggcaatcgtgacgggtattctgatcagccaaatcatcggattggagttcatcttgggaaattacgacctgtggcatatcctgctgggtttgtccggtgtgagggccatcctgcagtcgctgctgctcttcttctgcccagaatccccgagatacctttacattaagttggacgaggaagtcaaggcgaaacagtccttgaagcggttgcggggttacgatgatgtgaccaaggacattaacgaaatgcgcaaggagcgggaagaggcaagctccgagcagaaggtgtcaattatccagctgttcactaactcgtcatatcggcaacccattcttgttgcgctcatgctgcatgtcgcccaacaattctcaggaatcaatggtatcttttactactcgacctcgatttttcagactgctgggatctcgaaaccagtgtacgccaccatcggcgtcggtgctgtgaatatggtctttaccgccgtctcagtgtttctggtggaaaaggccggccggaggtcgctgtttctgattggtatgtccggaatgttcgtctgcgcaatcttcatgtcggtgggactggtcctgttgaacaagttctcatggatgagctacgtgagcatgatcgcgatcttcctgttcgtgtccttcttcgaaatcggacctggcccaattccgtggttcatggtcgcagaattcttctctcaggggcctagacctgcggcgctcgcgatcgccgcgttctctaattggacctgtaacttcatcgtcgccctgtgctttcagtacatcgcggacttctgcggtccatacgtattctttctgttcgccggcgtcctcttggcatttactctgttcactttcttcaaggtccccgaaaccaagggcaagtcgttcgaggaaatcgcggcggaattccagaagaaatccggctcggctcatagaccgaaagcagccgtggaaatgaaatttctgggagccactgaaaccgtc

SEQ ID NO: 7265 - DNA, 1572 bp, Artificial Sequence
  derived and/or modified sequence
atgactgaagataaggtgaccggcacactggtgtttactgtaataacggcggtcctcggaagcttccagtttggatacgatatcggggttataaacgcgccgcagcaggtgatcatttcccactataggcatgtgcttggggtacctttagatgatcgaaaagccatcaataactatgtaattaattctaccgacgagttgccaacgatttcatactccatgaatcccaaacctaccccatgggccgaggaagaaactgtcgccgccgcacaactgataacaatgctgtggtccctcagtgtaagttcattcgccgttggagggatgactgcgagcttttttggcggctggctgggggatacattgggccgcataaaagctatgctcgtggctaatatactcagcctggtcggcgcgctgttaatgggcttttctaagttagggcccagtcatatactcatcattgctggccggtcaatttctgggctgtactgtggactgatcagcggtctggttcctatgtacattggcgagatcgctcctaccgccctgcggggggcattagggacgtttcatcagctggcgatcgtcaccggtatcttgatcagccagattatcggcttagagttcattctcgggaactatgacttatggcacatcctgctgggccttagcggcgttagggccatactgcagtctttgctgttgtttttttgccccgagtcaccgaggtacctgtacatcaagctcgatgaagaggtgaaagctaagcagtctctgaaacgactccgtggctatgatgacgtgactaaagatatcaacgaaatgagaaaggaaagagaagaagcctcttctgaacagaaagtgagtataatccagctgtttaccaacagttcctatagacagccgattctcgtggccctgatgttgcacgtggcccagcagttctccgggatcaacggcattttctattactctacgagcattttccagaccgctggcatctctaagcccgtgtacgctacgatcggggtgggagctgttaatatggtgttcacagccgtgtccgtctttctcgtggagaaggcggggcgccggtccctgttcctgatcggaatgtccggcatgtttgtctgcgccatcttcatgtccgttggactggtgctgctgaacaaattttcttggatgtcctacgtcagcatgatcgctatattcttgtttgtgagtttcttcgaaattgggccagggcccataccgtggtttatggtggctgaatttttctcccaaggaccaagaccagccgctctagccattgcagcattctctaactggacatgtaacttcattgtcgccttatgctttcagtatatcgctgatttttgtggaccgtatgtgttttttctattcgctggtgtgctgctagctttcactctcttcacttttttcaaggtgcctgaaaccaaagggaaatctttcgaggagatcgccgccgagttccaaaagaagtcagggtctgcccatcggccgaaggccgctgtggagatgaagttcctaggcgccaccgagaccgtg

SEQ ID NO: 7266 - DNA, 1572 bp, Artificial Sequence
  derived and/or modified sequence
atgaccgaggacaaagtaactggcacactagtgtttacagtgatcactgcagtgcttgggagttttcaattcggctacgatattggggtgattaacgcccctcagcaggtaattataagccactaccgacatgtgctgggggttccccttgacgaccgcaaggctattaataactacgttataaattcaacagacgagctgccgactatatcgtatagcatgaaccctaaacccactccatgggcagaggaagaaactgttgctgccgcccagcttataaccatgctgtggagcctctctgtttcctcttttgccgtcgggggtatgacagctagcttcttcgggggatggctaggcgacactctcggccggatcaaagctatgctggtcgctaatattctgtccctggtcggtgcgctccttatgggatttagcaagcttggcccaagtcatattctgatcatcgccggacgttccattagtggcttgtattgcggcttgatttccggacttgtcccgatgtatataggagagatagcaccaacagcccttcgtggtgctctgggtactttccaccaactagccatcgtgactgggatcttgatcagtcagatcattggcctggaattcatcctgggcaattacgacttatggcatattctgcttggcctctctggcgttagggctatcttgcagtccctcctgctgtttttttgtcccgaatcccctcggtacctgtatattaagctggacgaggaggtaaaagcgaaacaatcactcaagaggctccgaggatacgatgatgtgaccaaggacatcaatgaaatgagaaaggagcgcgaggaggccagttcagaacagaaggtgagcattatccaactctttactaacagttcttacaggcagccaatcctcgtggcgttaatgctgcatgtcgcccaacaatttagtggcataaacgggatattctactattccacatctatcttccaaactgcaggcatctccaagcccgtctacgcaacaatcggcgtcggtgcagttaatatggtgttcacagctgtgtctgtattcctcgtagagaaagcagggcgcaggtctctgttcctgatcggcatgtccggtatgtttgtctgcgccatctttatgtctgtcggattggtgctgctaaataaattcagctggatgtcttacgtgtccatgatcgccatctttctttttgttagctttttcgagataggtcctggccctatcccatggttcatggttgcagagtttttctcccaggggccccgcccagccgctctcgcaatagccgcattctcaaattggacatgcaactttattgttgcactgtgcttccaatatattgcagatttttgtgggccatatgttttttttctttttgcaggggtgttgttggccttcaccttgtttacgttcttcaaggtgcctgaaactaagggcaaaagcttcgaggaaattgccgcagaatttcaaaaaaaaagcggaagcgctcacagacccaaggcagctgtggaaatgaaattcctgggggcaactgaaaccgtt

SEQ ID NO: 7267 - DNA, 1572 bp, Artificial Sequence
  derived and/or modified sequence
atgacagaggataaggtgacaggaaccctagtgttcacggtgatcaccgccgtcttgggcagttttcaatttgggtacgatattggtgtgatcaacgctcctcagcaggtgatcatcagccattacaggcatgtgctcggagtccctttggacgatcgcaaagcgataaacaattatgtcataaactccacagacgaactccccactatttcttactcaatgaatccaaagccaaccccctgggccgaagaagagaccgtggcagctgcgcagttaataaccatgctttggtctctgtctgtgtcttcttttgccgtgggggggatgaccgcctcgtttttcggcgggtggttgggtgataccctgggaagaattaaagcaatgctcgtagcaaacatcctgagtctggttggagccttgctcatgggcttttctaagctcggtccctctcacatattgatcatagctgggcgcagcatctccggtctgtactgtgggctgatttccggactggtgcctatgtacattggggagatcgctcctaccgcgctccgcggtgctttaggcaccttccatcagctcgctatcgtgactggaattttgatctcccagattatcggcctggaatttattctcgggaattacgacctgtggcacattctcctgggactttccggagtgcgcgctatccttcagtcgttgctgctgttcttttgccctgagagtccgcgatacttgtacatcaaattggacgaggaggtgaaagccaaacagtcactgaaacggctccgcggatatgatgacgtgaccaaagacattaacgaaatgcggaaggagcgagaagaggcctcaagcgaacagaaggtgagcataattcagctctttaccaatagcagctatagacaacccatcctggtggcgctgatgctgcatgttgcccaacagttctcaggcattaatggcattttctattactccacctccatcttccaaacagcgggcatcagcaaacccgtctacgctaccattggcgtgggagcagtgaacatggtgtttaccgccgtttcagtgttcttagtcgagaaagcagggcgtcgttcactgtttctgatcggcatgtccggaatgttcgtttgtgctatcttcatgtcagttggactggtgcttctcaacaaattcagttggatgtcatacgtaagtatgatcgcaatcttcctgtttgtgagctttttcgaaatcgggcctggcccaattccatggttcatggtggccgaattcttcagccagggaccacgcccggccgccctggccatagcagccttctctaattggacttgcaacttcatcgttgccctgtgtttccagtacattgcagatttctgcggcccctacgtgtttttcctctttgctggtgtactgttggccttcaccttgtttacctttttcaaggtgcctgagacgaagggcaagtcattcgaagagattgccgcagagttccagaaaaagagcgggtctgcacacagaccaaaggccgccgttgagatgaaatttttgggagcgaccgagacagtg

SEQ ID NO: 7268 - DNA, 1572 bp, Artificial Sequence
  derived and/or modified sequence
atgaccgaggacaaggtgaccgggacactggtcttcaccgtgataacagcggtgctgggctccttccagtttggctacgacatcggggtgatcaacgcaccccagcaagtgattatctcgcactaccgacatgtgctcggagtaccactcgatgaccgcaaggccatcaataactatgtgatcaacagcacagacgagctgccgaccatttcgtattcaatgaatcctaagccaactccctgggccgaggaggagactgttgcggcggcccagctgatcaccatgctgtggtccttaagcgtgtcttcctttgctgttgggggcatgacagcctcgttcttcggtgggtggctcggcgacacacttgggaggatcaaggctatgctagtggccaatatcctctccttagttggtgctctgctcatgggcttcagtaaactggggccctcccatattctgatcatcgcgggacggtctattagtggactatattgcgggttgatctcaggcctcgtgccaatgtacatcggtgagatcgcccccactgcacttcgcggcgcactcggaaccttccaccagttggcaatcgtcaccggaattctcataagccagatcattggcctagaattcattttaggcaattacgacctgtggcacatcctcctgggcctttctggcgtaagggccatcctacagtcccttctgctctttttctgccctgaatcaccaagatatctatacatcaagctagacgaagaggtgaaggccaaacagtctctcaaacggctgcggggatacgacgacgtgactaaagacatcaacgagatgcggaaagaacgagaagaagcgtcctctgagcagaaggtatcgattattcagctgtttactaattctagttatcgacagcctatactagtggcccttatgctccacgtggctcagcagttctcaggcatcaatggtatcttttattactctacaagcatctttcagacagctgggatctctaagccagtgtacgccactattggggtgggggcagtaaatatggtgttcactgcagtgtctgtatttctggttgagaaggccgggagacggagcttgtttctgattggaatgtctggcatgttcgtatgcgctatctttatgagcgtgggcctggtgctgttgaataagttttcctggatgagttacgtttcaatgattgcaattttcctgttcgtaagcttctttgaaattgggccaggcccgattccgtggttcatggtcgctgaattcttctcacaaggtccccgaccggctgccctggccattgcagctttctctaactggacctgcaattttatcgtcgcgttgtgttttcaatacatagctgacttttgtggcccctatgtgttcttcttattcgccggcgtgctactggcctttactttatttaccttctttaaggtcccagaaacgaaaggcaaatccttcgaagaaatcgccgccgaattccagaaaaaatccgggagtgctcaccgacccaaagctgctgtcgaaatgaaattcctcggcgccaccgaaacagtc

SEQ ID NO: 7269 - DNA, 1572 bp, Artificial Sequence
  derived and/or modified sequence
atgactgaggacaaggtgaccggtactctggtgttcaccgtcatcaccgcggtcctgggttcgttccagttcggttacgatataggtgttattaatgcgccacagcaggtgatcattagccactaccggcacgtactaggtgtccctctggatgatcgcaaggctatcaataactatgtgatcaactctacggacgaactccctacgattagttatagcatgaatccaaagccgactccgtgggcagaagaggaaaccgtcgcggccgcccagctgatcacgatgttgtggagcctgagcgtgtctagcttcgccgtgggtggaatgactgcgagcttttttggtgggtggcttggagataccctgggtcgcatcaaggcgatgctggtggcaaatatcctatcgctggtgggagctctgctgatgggcttttctaagcttggcccgtcgcacattctgatcatcgcgggccgtagcatcagcggcctgtactgtggcctgatttctggtctggtgccaatgtatatcggtgagatagctccgaccgcactgcgcggcgcattgggcacgttccaccagttggcaatcgtgaccggtatcctgatttcccaaatcatcggcctcgagtttattctgggcaactatgacctgtggcacatcctgttgggcctgagcggtgtgcgcgccatactgcaaagcctgctgctgttcttctgtccagagagcccacgctacttgtacatcaagttggatgaagaagtaaaggcaaaacagagcctgaagcgcctccgcggctatgacgatgtgacgaaagatatcaacgagatgcgcaaggagcgagaggaggccagcagcgagcagaaggtgtcgatcattcaactgtttaccaacagctcttacaggcagccgatcctggtcgcattgatgctgcacgttgcacagcaattttccggcatcaacggaattttctattactctacttcgatttttcagaccgccggtatctctaaaccagtgtacgccacaattggggttggcgcagtcaacatggtattcactgctgtctctgtgttcctcgtagaaaaggccggtcgccgaagcctgttcttgattggtatgagcggtatgtttgtatgtgccatttttatgagcgttggactcgtgctgctcaacaagttcagctggatgagctatgtttcgatgatcgccattttcttgttcgtgtctttcttcgaaatcggaccgggtcctattccttggttcatggtcgcagaattcttcagccaagggccgcgcccagccgcgttagcgatcgctgccttcagcaattggacctgcaatttcatcgtcgccctgtgttttcaatacatcgcggacttctgcggtccgtatgttttctttttatttgctggagtgctgttggcgtttaccttgtttacattctttaaagtgcccgagacgaagggcaaaagcttcgaagagatcgctgcggagtttcagaaaaaaagcggctcagctcaccgtccaaaagccgcggtggagatgaagtttttgggcgccaccgaaactgtg

SEQ ID NO: 7270 - DNA, 1572 bp, Artificial Sequence
  derived and/or modified sequence
atgacagaagacaaagtgacgggcacgctagtttttacagtcataaccgccgtgttagggtcctttcagttcggatacgatattggcgtcatcaacgcccctcagcaggtaatcatttcccactaccgtcacgtgctgggagtgccgctagatgatcggaaagcgatcaataattacgtaatcaactctacagatgagcttcctacaattagctattcaatgaaccctaaaccgactccgtgggcagaagaggagacagtggccgcagcacaactaattacaatgttgtggtccctgagcgtgagtagcttcgcggtgggcggcatgacagcctcgttcttcggcggatggctgggggataccctgggcaggatcaaggccatgctcgtcgcaaatatcctcagcctggtgggtgccttactcatggggttctctaagttggggccttctcatattcttattatcgccggcagaagcatatccgggctgtattgtggtctgatatcaggccttgtccccatgtatattggcgaaatagcccctactgcattgcgcggggccctgggtactttccatcagctagcaatcgtcaccggaattctaatctctcagatcatcggactggagtttatactgggcaactacgatctgtggcatatacttttagggctgtctggcgtgcgagccattctacagagccttctgctcttcttttgcccagaatccccccgatacctctatatcaagctcgacgaggaggtaaaagccaagcagagtctgaagaggcttaggggctacgacgatgtaacaaaggatataaatgagatgcggaaagaaagggaggaggcctcctcagagcagaaggtgtctatcatccagctgttcaccaacagttcctataggcagcccatcctcgtggccctcatgctgcacgttgcccagcaatttagcggaatcaacgggattttctattactcaactagtatcttccagaccgctggaatctctaaacctgtgtatgctacaatcggcgtaggtgcagtcaatatggtattcactgccgtgtcggtttttcttgtggagaaagcagggcgccgttccctgttcttgattggaatgagcggtatgtttgtgtgcgccatcttcatgagtgtaggtctagtcctgctcaataagttctcctggatgtcttacgtttccatgatcgcaatcttcctgttcgtgtccttctttgaaatcggacctggtcctattccttggtttatggtggctgagtttttcagccagggacctagaccggccgccctcgcaatcgccgctttcagtaactggacctgtaactttatagtcgctctctgcttccagtacatcgcggacttctgtgggccttacgtgttttttctgtttgccggggtcctgttggcttttactctgtttactttctttaaggtccccgagactaaggggaaatccttcgaagagatagccgcagaatttcagaagaagagcggaagtgcgcaccgcccaaaggcagctgtggagatgaagttcctcggagcgacagagactgtg

SEQ ID NO: 7271 - DNA, 1572 bp, Artificial Sequence
  derived and/or modified sequence
atgacggaagacaaggtgacaggaactctggttttcacagtgataacagccgtgctcggatcctttcagttcgggtacgacattggagtgatcaacgcaccccaacaggtgatcatatctcattataggcacgtcctgggagtgcccctagacgatagaaaagctatcaataattacgtcatcaactcaactgatgaactgcccactatctcctattctatgaaccctaaaccaacaccctgggctgaggaagagactgtcgccgctgcacagctcattacaatgttgtggtccctgtccgtgtcatcatttgctgttggggggatgactgcttcctttttcggaggatggctgggggatacacttggacggataaaagccatgctcgtcgctaatatactgtcactggtgggagcccttttaatggggttttccaaactggggccttctcacatccttataatcgcaggacggagtattagtggactatattgtgggttgattagtggattagtgcccatgtacattggagaaatagcaccgacagccctacggggagccctgggaactttccaccagttagctatcgttacaggaattcttatctctcagattatcgggttagaatttattctagggaactatgatctgtggcatatcttattaggactgtctggggtgcgcgccatcttacagtctttacttctattcttttgtccagaatctcctagatatctctatattaaactagatgaagaggtcaaagcaaaacagagtttgaaaaggctcagggggtatgatgacgtcacaaaggatatcaacgaaatgcgaaaagaacgagaagaagcttcaagtgaacagaaagttagtatcatccagttgttcacaaactcatcgtaccggcagccaattcttgttgcactcatgctccatgtcgcccagcaattctcagggatcaatgggatattctattacagtacatctatatttcagactgctggaattagtaaacctgtctatgcaacaattggggtgggggccgtcaatatggtgttcactgcagtttctgtattcttagtcgaaaaggcagggagacggtctctattccttatagggatgtcaggaatgtttgtatgcgctatcttcatgtcagtggggcttgtcctccttaacaaattctcttggatgtcatacgtgtctatgatcgctatctttctctttgttagtttcttcgaaatcggacctgggccaataccctggtttatggtcgccgaattcttctcacaggggcccaggcctgctgccctcgccattgccgccttttctaactggacttgcaactttatcgtagccctttgtttccagtacatcgccgatttttgcggaccttacgtgttttttttattcgccggagtacttctcgcatttacgctgttcacattctttaaagttccagaaactaaggggaaatccttcgaggaaatcgctgccgagtttcagaagaaatccgggtcagcacataggcctaaagcagctgttgagatgaaatttcttggagctacagaaacagtg

SEQ ID NO: 7272 - DNA, 1572 bp, Artificial Sequence
  derived and/or modified sequence
atgacggaagataaagtaacgggtacgctagtttttacggtaataacggcggtattaggttcgtttcaatttggttatgatataggtgtaataaatgcgccgcaacaagttataatatcgcattatcgtcatgtattaggtgtaccgctagatgatcgtaaagcgataaataattatgtaataaattcgacggatgaactaccgacgatatcgtattcgatgaatccgaaaccgacgccgtgggcggaagaagaaacggtagcggcggcgcaattaataacgatgttatggtcgctatcggtttcgtcgtttgcggttggtggtatgacggcgtcgttttttggtggttggttaggtgatacgctaggtcgaataaaagcgatgctagtagcgaatatattatcgctagtaggtgcgttactaatgggtttttcgaaattaggtccgtcgcatatattaataatagcgggtcgttcgatatcgggtctatattgtggtctaatatcgggtttagtaccgatgtatataggtgaaatagcgccgacggcgttacgaggtgcgctaggtacgtttcatcaactagcgatagtaacgggtatattaatatcgcaaataataggtctagaatttatattaggtaattatgatttatggcatatattactaggtctatcgggtgtacgagcgatattacaatcgctactactatttttttgtccggaatcgccgcgttatctatatataaaattagatgaagaagtaaaagcgaaacaatcgttaaaacgattacgtggttatgatgatgtaacgaaagatataaatgaaatgcgtaaagaacgtgaagaagcgtcgtcggaacaaaaagtttcgataatacaactatttacgaattcgtcgtatcgacaaccgatactagtagcgttaatgttacatgttgcgcaacaattttcgggtataaatggtatattttattattcgacgtcgatatttcaaacggcgggtatatcgaaaccggtttatgcgacgataggtgtaggtgcggtaaatatggtatttacggcggtatcggtatttttagttgaaaaagcgggtcgtcgttcgttatttctaataggtatgtcgggtatgtttgtatgtgcgatatttatgtcggtaggtttagtattactaaataaattttcgtggatgtcgtatgtatcgatgatagcgatatttttatttgtttcgttttttgaaataggtccgggtccgataccgtggtttatggtagcggaatttttttcgcaaggtccgcgtccggcggcgctagcgatagcggcgttttcgaattggacgtgtaattttatagttgcgttatgttttcaatatatagcggatttttgtggtccgtatgttttttttctatttgcgggtgttctattagcgtttacgttatttacgttttttaaagtaccggaaacgaaaggtaaatcgtttgaagaaatagcggcggaatttcaaaaaaaatcgggttcggcgcatcgaccgaaagcggcggttgaaatgaaatttttaggtgcgacggaaacggta

SEQ ID NO: 7273 - DNA, 1572 bp, Artificial Sequence
  derived and/or modified sequence
atgaccgaggacaaggtgactggcacgcttgttttcactgtcatcactgccgttcttggctcgtttcagttcgggtacgatattggtgtgatcaacgctcctcagcaggtcatcatctcgcactaccggcacgtgctgggtgtgccgctggatgaccgtaaagccatcaacaattacgtgatcaatagcaccgacgagctccctaccattagctattccatgaaccctaaaccaaccccatgggccgaagaggaaaccgtcgccgcggctcaactcatcaccatgctgtggtcattgtcggtgtcgtcatttgcagtgggcggaatgaccgctagtttcttcggcgggtggctgggagacacgctcgggcgcattaaagccatgctggtggcgaatatcctgtctctggtgggagctttgctgatgggattctcaaaactcggtccctcacatatccttatcatcgctggcaggtccatctccggactgtactgcggactgattagcggactggtgcccatgtatataggagaaatcgcgcctactgcactgcggggcgcgctgggaacctttcatcagctggcaatcgtgaccgggatcctcatctcacaaatcatcggacttgagtttatcctcggcaattacgacctgtggcacatcctgctgggactctcgggcgtgcgggccatcctccaatcgcttctcctcttcttctgcccagaatcgccgcgctacctgtatatcaagctcgatgaggaagtcaaggccaagcaaagcctgaaaagacttcgcggatacgacgatgtcacgaaggatatcaacgaaatgcgcaaggaacgggaagaggcctcgtccgagcaaaaggtgtccatcatccagcttttcactaactcctcgtaccgccagccgatccttgtggccctcatgctgcacgtggcacagcagttctcgggaatcaatgggattttctactacagcaccagcattttccagactgcaggtatctcaaagccagtgtacgcgactattggagtgggcgcagttaacatggtatttaccgccgtcagtgtgttcctggtcgagaaggccggtagaaggagccttttcctgattggcatgagcggcatgtttgtatgcgctatcttcatgagcgtgggcctggtgctgctgaacaagttttcctggatgtcttacgtctcgatgatcgccatcttcctctttgtgtcgtttttcgaaatcggaccggggccgattccgtggttcatggtggctgaattcttcagtcaaggtccacggccggcggccttggccatcgccgccttctccaattggacttgcaacttcattgtggcgctctgttttcagtacatcgcagacttttgtggaccatacgtgttcttccttttcgccggggtcctcctcgcgttcaccctgtttacgttcttcaaggtaccggaaactaagggaaaatccttcgaggaaatcgcagcagagttccagaaaaagtcgggctccgcgcatagaccgaaggccgccgtcgaaatgaagttcctcggagcgaccgagactgtc

SEQ ID NO: 7274 - DNA, 1572 bp, Artificial Sequence
  derived and/or modified sequence
atgactgaggacaaagtgaccggtactctcgtgttcactgttatcactgcagtgctcggatcatttcaattcggatacgacattggagtcatcaacgctccgcaacaggtgataatcagccattaccgccacgtcctcggagtgccactcgacgaccgaaaggcaatcaacaattacgtgatcaactccaccgacgagctcccgactatctcatactccatgaatccgaagcctactccgtgggcggaagaggaaaccgtcgccgcggcacaactcatcaccatgctgtggtccctctccgtgtcgtcctttgccgtgggtggaatgactgcatcctttttcggaggatggttgggcgacacccttggccggatcaaggcaatgcttgtcgctaacatcttgtccctggtgggagcactcctgatggggttttccaagctgggaccgtcgcacatcctgattatcgccgggagatctattagcggactgtattgtggtctgatctcggggctggtgcccatgtacattggtgaaatcgcacctactgcgctgagaggagcactgggtaccttccatcagctcgcgatcgtgacgggaatcctcatctcacagatcattggtctggagttcatactgggaaactacgatctttggcatatcctgctcggtctttcgggcgtcagggcgatcctgcagtctctcctgctcttcttctgtcctgaatcgcctcgctacctctacatcaagctcgatgaggaagtgaaggcgaagcagtcgctcaagcgattgaggggctacgacgacgtcactaaggatatcaatgagatgcgcaaagaacgggaggaggcttcgagcgagcaaaaagtctcgattatccagctgttcactaactcgtcgtaccgccagcctatcctcgtggccctgatgcttcacgtggcgcagcagtttagcggaatcaatggtatcttctattactcgacttctattttccaaaccgccggaatctcaaagccagtgtacgcgaccatcggggttggagccgtgaatatggtgtttaccgccgtgtccgtgtttctggtggaaaaagcgggtcggaggtccctgttcctcatcggaatgagcggaatgttcgtctgcgccatcttcatgtcggtgggcctggtcttgcttaacaagttctcatggatgagctacgtgtcgatgatcgcaattttcctctttgtgtccttctttgaaattggcccaggacctatcccctggtttatggtggccgagttcttctcccaagggccgcggccagccgcgctggcaattgcagccttttccaactggacgtgtaacttcatcgtcgcgctgtgctttcagtacatcgcagatttctgcgggccatacgtctttttcctcttcgcgggcgttctgctggcattcaccctcttcacgttctttaaagtgccggaaaccaaaggcaagtcctttgaagagattgccgctgagttccagaagaaatcagggtcagcgcaccgccccaaagccgccgttgagatgaaattcctgggcgccaccgaaaccgtg

SEQ ID NO: 7275 - DNA, 1572 bp, Artificial Sequence
  derived and/or modified sequence
atgacggaggataaggtgactgggaccctagtgtttacagtgattaccgccgtacttggctcatttcagtttggatacgacattggggtgatcaacgcgccccaacaagtgatcatatctcactatagacacgttctgggggtgcctcttgacgaccgcaaggctatcaacaactacgtcatcaacagcacagatgagttacccacaatttcatactctatgaaccctaagccaactccctgggcagaagaggagacggttgccgcagctcagctgattacaatgctctggtctctgagtgtgagcagctttgccgtgggcggtatgaccgcgagctttttcggcggttggttgggagatacgctgggccgcattaaggcaatgctggtggcaaacatccttagtctggtcggagccctgctcatggggttctctaagctaggcccaagccacatcctaatcatcgcgggcagatctatctccggactgtactgcggactgatctctggcctggtgcccatgtatattggagaaattgcaccaactgcactcaggggcgcattgggaacattccaccagctggcaatcgttacaggcatactgatcagtcagatcattgggctcgagtttatcctggggaattacgatttatggcatattctcctggggctcagtggcgtcagggccattctccagagcttgctcctgttcttttgtccggaaagcccgagatatctgtacatcaagcttgacgaagaggttaaggccaagcagtctctcaaacgtcttagggggtacgacgatgtgactaaggatatcaatgagatgagaaaagagcgcgaggaggcctcctcggagcagaaggtgtccatcattcagctatttacaaactcttcgtaccgccagcccattctggtcgcgttgatgctgcacgtggcacagcagttctccggaatcaacggcattttctattattctacaagtatcttccagactgcaggcatcagcaagccagtttacgccaccatcggggtgggagctgtgaatatggtgttcaccgccgtgagcgtctttctagtcgaaaaggccggtcggcgaagccttttcctcattggaatgtccgggatgttcgtctgcgccatttttatgtccgttgggttggttctgctcaataaattcagttggatgagttatgtgtctatgatcgcaatctttctgtttgtgtcctttttcgagattggcccgggtcctattccctggtttatggtggccgaattcttttcacagggaccacgcccagctgctcttgcgatcgctgcgttctcaaactggacctgtaattttatcgtcgctctgtgctttcagtacatcgccgacttctgcggcccctacgtgtttttcctgttcgccggcgttctgctggcctttaccctgttcacctttttcaaagtaccggagaccaagggcaaatctttcgaggagatcgctgccgagttccagaaaaaaagcggaagtgcccataggccaaaggcagccgtagaaatgaagtttctgggagccaccgaaacggtt

SEQ ID NO: 7276 - DNA, 1572 bp, Artificial Sequence
  derived and/or modified sequence
atgacagaggacaaagttacagggactttagtttttacagtaataactgcagttcttggatcatttcaatttggatatgatatcggagttattaatgcaccacaacaagttattattagtcactatagacatgttttaggagtaccacttgatgatagaaaagctattaataattatgttataaatagtacagatgaattaccaactattagttattctatgaatccaaaaccaactccatgggcagaagaagaaacagttgctgcagctcaacttattacaatgttatggagtctttcagttagttcatttgcagttggaggtatgactgcatcattttttggaggttggttgggagatacattagggagaattaaagctatgttagtggctaatattctatctttagttggagctttattaatgggattttcaaagttaggaccaagtcatattcttatcattgcagggagatctatttcaggattgtactgtggattgatttctggacttgttccaatgtatattggagaaattgctccaactgctttaagaggagctcttggtacatttcatcaacttgccattgtcactggaattcttataagtcaaattattggtcttgaatttattttaggtaattatgacttatggcatatattattaggtcttagtggagttagagcaattttacaatctttattattatttttctgtccagaatctcctagatatctttatattaaattagatgaagaagtaaaagctaagcagtcacttaaaagattaagaggatatgatgatgttactaaagacattaatgaaatgcgtaaggaaagagaagaagcatcttcagaacaaaaagtttctataattcaactttttacaaattcaagttataggcaaccaatccttgttgcacttatgcttcatgtggctcagcaattttcgggaataaatggaattttttactattcaacaagtatttttcaaactgctggaatttctaaacctgtttatgctacaattggtgttggagcagttaatatggtttttacagctgtttcagtctttcttgtagaaaaagcaggtagaagaagtctttttttaattggaatgtctggaatgtttgtatgtgcaattttcatgagtgttggattagttcttttaaataagtttagttggatgtcatatgtttcaatgattgctattttcttatttgtttcattttttgaaattggtccaggtccaataccttggttcatggttgcagaattttttagtcaaggaccaagaccagcagcattagctatagcagcattctcaaattggacatgtaattttattgtagctctatgttttcaatatatagcagacttttgtggaccatatgtatttttcttatttgcaggtgtattacttgccttcacactttttacattttttaaagttccagagacaaaaggtaaatcatttgaagaaattgctgctgaattccaaaaaaaatccggttctgcacatagaccaaaagctgcagtagaaatgaaatttttgggagctacagaaactgtt

SEQ ID NO: 7277 - DNA, 1572 bp, Artificial Sequence
  derived and/or modified sequence
atgaccgaggacaaagtcaccggaactctcgtgtttaccgtgatcactgcagtcttgggtagcttccaattcggatacgatatcggagtgataaacgcgccacagcaggtgataatctcacactatagacacgtgctgggtgtgccgctggacgatcgcaaggcaattaacaactacgtgatcaactcgactgatgaactgccgaccatttcctattcgatgaacccaaagcctaccccgtgggcggaggaagaaactgttgccgcggcacagctgattactatgctctggtcccttagcgtgtcgtcgttcgccgtggggggaatgactgcgtcattcttcggggggtggctgggagacaccctgggtcgaatcaaagcgatgctggtggccaatattctctccctggtgggggcactgctcatgggtttttccaaactggggccgtcgcacatcctgatcatcgctggccgatcaattagcggactgtactgcggcctcatcagcggtctggtgccaatgtacatcggcgagatcgcccccactgcacttcggggagcactgggaaccttccatcagttggccatcgtgacgggaatcctgatctcgcaaatcatcggtctggaattcatcttgggaaattacgacctctggcatatccttctgggactgtcaggagtgcgcgccattcttcagagcctgctcctgttcttctgtcccgagtcccctaggtacctttacatcaagctcgatgaagaggtgaaggcaaagcagtccctcaagcgcctgcggggatatgacgacgtgacgaaagacatcaatgagatgagaaaagaaagggaagaggcctcgtctgaacaaaaggtgtcgatcattcagctctttaccaactcctcgtaccgccagccgatcttggtggctcttatgttgcatgtcgcccagcaattctccggcattaacgggatcttttactatagtactagtatcttccaaaccgccggaatcagcaagccagtctacgcaaccatcggagtaggagcggtcaacatggtgttcaccgccgtcagcgtgtttctggtggaaaaggccggtcgccgctctctgtttctgatcggaatgtccggaatgtttgtgtgcgccatcttcatgagcgttggactggtgctgctcaataagttttcctggatgtcatacgtgagcatgatcgcaatcttcctcttcgtgagctttttcgaaataggacctggcccgattccgtggttcatggtcgcggagttcttttcgcaggggccgcgcccagcggcgcttgccatagccgcgttttcgaattggacttgtaatttcatcgtcgcactctgcttccaatacatcgccgatttctgcggcccgtacgttttctttcttttcgccggagtgttgctcgcgttcacgctctttactttctttaaggtgccggaaactaagggaaagtcgttcgaggagatcgcggcagagttccaaaagaaatccggttcggcccacagaccgaaggcagccgtggagatgaagttcctcggagccaccgagactgtg

SEQ ID NO: 7278 - DNA, 1572 bp, Artificial Sequence
  derived and/or modified sequence
atgacggaggataaagtgacgggtactctggtgtttaccgtaattactgccgtgcttggttcctttcaatttggctacgacatcggagtcataaatgcgcctcaacaggtgataatctctcactaccgtcatgtcttgggggtgccactggacgatagaaaggcgattaacaactacgtgattaactccactgatgaactgccaactatctcatactcgatgaatccaaagccaactccatgggcagaagaagaaacggtggcagcagcccaactgatcaccatgctgtggtccctgagcgtgagctcgtttgctgtgggtgggatgactgctagcttctttggcggatggctgggtgacacgcttgggcgcattaaggcaatgctggtggcgaacattctgtctcttgtgggtgcactgctcatgggatttagcaaactggggcctagccacattctcataattgcaggtcgctctatctcgggactgtattgcggacttattagcggtttggtgccgatgtacattggtgagattgcgcctaccgcactgagaggtgcacttggaacctttcatcagctggcgattgtcaccgggatccttatatcccagataatcgggctcgaattcattcttggtaattacgatttgtggcatattcttctcggtctttccggagtgagggccatactccagtcgcttttgctgttcttttgtcctgaatcaccccggtacctctacattaaactcgacgaggaggtcaaagccaagcagtcattgaagcgcctgcggggatacgacgatgtgactaaagatatcaatgagatgcgcaaggaaagggaagaagcatcgagcgagcaaaaggtgtcaattatccaactgtttaccaacagctcatacagacagcctattttggtcgcactgatgcttcatgtcgcccagcaattctccggaataaacggtatattctactactcaacctcgatctttcagaccgctggaatctctaaacccgtgtacgcaaccattggagtcggcgcagtgaacatggtattcaccgcagtgtcggtgtttctcgtcgagaaggcaggaagaagatcgctcttcctgattggcatgagcggcatgttcgtctgtgcaatctttatgtcagtgggcctcgtgctcttgaataagttttcctggatgtcatatgtgtcgatgatcgcaattttcctttttgtgagcttctttgaaataggaccggggcctataccgtggtttatggtggcagagtttttctcccaaggtccacgaccggcagctcttgccatagcggcatttagtaactggacctgcaactttattgtggccctctgtttccaatacatcgcagacttttgtggcccttacgtctttttcctctttgccggcgtgttgctcgcgtttactctgttcactttcttcaaagtcccagaaaccaaggggaagtcgttcgaggaaattgccgcagaattccaaaagaagtcgggctccgcccaccgccccaaggccgcagtagaaatgaagtttcttggagcaactgaaactgtt

SEQ ID NO: 7279 - DNA, 1572 bp, Artificial Sequence
  derived and/or modified sequence
atgacagaagataaagttacaggaactctcgtgtttaccgttattactgccgttctgggcagttttcagttcggatacgatattggcgtgataaatgcaccccagcaggtgatcatctcgcattaccggcacgtgttgggagtcccactggatgacaggaaagccataaataattatgtaataaattctactgacgaattgcccaccatctcatattctatgaatccgaagcctaccccttgggcagaggaggagacagtggccgcggcccagctgatcacaatgttgtggagcctatcagttagctctttcgccgtcggtggaatgactgcctccttttttggtggctggctgggcgacacactggggcggatcaaagcaatgctggtggctaacatcctgtctctggtcggagctctgttgatgggctttagtaaactcggaccctctcacatcctcattatagctggccggtccatcagcgggctatattgcgggctgatatccggactcgtccctatgtacattggcgaaatcgcccctacagccctgaggggggcgttgggaacttttcatcagctcgctatcgtcactggcatactgataagccaaatcatcggactcgagttcatcctcggaaattacgacctatggcacattctgctcggattgtcaggcgtcagggccattctacagagcctcctccttttcttttgtccagaaagtccccgatacctgtatatcaaactagacgaggaggtaaaggcaaagcagagtctgaaaaggctcaggggctacgatgatgtaactaaggacataaatgagatgagaaaggaacgcgaagaggcctcctccgagcaaaaggtcagcatcattcaactatttacaaactccagttacagacaacctatactcgtggccctcatgctacatgtggctcagcagttctccggtatcaacggaatcttctattattctacaagcatctttcagactgccggtattagcaaacccgtttacgccaccatcggagttggggcagtgaacatggtttttacggccgttagcgtctttcttgtcgaaaaagccggtcggcgatcactatttctgatcggtatgagcggcatgtttgtgtgtgccattttcatgtcggtgggattggtcctgttaaataagttttcatggatgtcttacgtgtctatgatcgctatctttctgtttgtctcttttttcgagatcggcccaggaccgattccatggtttatggtggcagagttcttcagtcaggggcctagaccagccgcactcgcaatcgcagcttttagcaattggacatgcaatttcatcgtcgctttgtgttttcagtatatcgctgatttttgtggaccgtatgtattcttcctattcgccggcgtgctcctcgcttttactctgtttacatttttcaaggtgccggagaccaaggggaagagctttgaggaaatagctgctgaattccagaagaaatctggatcggcccaccggcctaaggcagccgtagagatgaagtttctgggcgcgacagagaccgtg

SEQ ID NO: 7280 - DNA, 1572 bp, Artificial Sequence
  derived and/or modified sequence
atgacggaagacaaggtgaccgggaccctggtcttcaccgtgatcactgccgtgctgggatctttccagttcggatatgacattggagtcataaatgcccctcagcaggtgataatctcccattatagacacgtgttaggagttcctcttgacgaccggaaggctatcaacaactacgtgatcaactccactgatgagctgcctacaatatcttactctatgaatcccaagccaaccccttgggctgaggaagagaccgtcgcagccgcccagctgattaccatgttgtggagcctgtccgtttcctctttcgcagtgggagggatgacagcttcatttttcggcgggtggctgggcgataccttgggtcggatcaaggccatgctcgtcgcaaatattctgtcactcgttggcgccctgctcatgggttttagcaagttgggcccgtctcatatccttataattgcggggagaagcatctctggcttgtactgcggattaatatccggcctggttccgatgtatattggagaaatcgcaccaacggccctccgaggcgctctgggtacctttcaccagctggcaatagtcactgggattctgatctcacagattattgggctcgagttcatactcggtaactatgacctgtggcacatcttgttaggcttaagtggggtgcgagccatactccagagtctgctgttgtttttttgtcctgagtctcctcggtacttgtacatcaagctggacgaggaggtgaaggcaaagcagtctctcaaaaggctgcgcggttacgacgacgtcaccaaagacatcaatgagatgcgaaaggagcgtgaggaagccagcagcgaacagaaagtatccataattcagctctttactaatagtagctaccgccagcccatcctggtagcactcatgctgcatgtcgcgcaacaatttagcggaattaatgggattttttactacagtacgtctattttccaaaccgcaggaatcagcaagcccgtgtacgcgacgataggggttggcgcggtgaatatggtgttcactgctgtgtctgtcttccttgtcgagaaggctggacggaggagtcttttcctgattggtatgtccggaatgtttgtttgtgctatttttatgtcagtcgggctggtgctactgaataaattctcctggatgtcctatgtcagtatgatagccatttttcttttcgtctctttcttcgagatagggcccggtcctatcccttggtttatggttgccgagttcttctctcagggcccaagaccagctgcactggctattgcggcttttagcaactggacatgcaactttattgtagctctgtgcttccagtatatagctgatttttgtggcccctatgtttttttcctgtttgctggggtcctgctggcattcactctctttactttcttcaaggtaccagaaactaaaggcaaatcttttgaggagatcgcagccgagttccaaaagaagagtgggtccgctcaccggcctaaggccgctgtggagatgaagtttttgggcgccaccgaaaccgtt

SEQ ID NO: 7281 - DNA, 1572 bp, Artificial Sequence
  derived and/or modified sequence
atgaccgaagataaggtgacgggcactctcgtgttcaccgtcattaccgccgtgctcggcagctttcaattcggctacgacatcggagtgataaatgcaccacagcaggtgatcatttcgcactaccggcatgttctcggggtcccgcttgatgaccgcaaggcaatcaataactacgtgatcaactccaccgatgaactgcccaccatcagctactcaatgaacccgaagccaaccccctgggccgaggaagaaaccgtggcagctgcgcaattgatcactatgctgtggtcgctgtcagtgagctcatttgcagtgggaggcatgaccgcatccttcttcggaggatggctcggcgatactctgggacgcatcaaagctatgttggtggctaatatcctgtccctggtcggggccctcttgatgggcttctcaaaactcggaccgtcgcacatcttgatcatcgcgggtcgctcaatctcagggttgtactgcgggctcatcagcggactggtccccatgtatattggcgagatcgccccaactgctttgcggggtgctctgggcactttccaccaactcgccattgtcaccggcatcctgatctcccagatcatcggactcgaattcattctgggaaattacgacctgtggcatatcctgttgggcctctctggcgtgcgcgccatcctgcagtcgctgctcctgttcttctgcccagagtcgccaagatatctctacatcaaactggacgaggaagtgaaggccaaacagtcattgaaaaggctccggggatacgacgacgtgaccaaggacatcaacgaaatgcgcaaggagcgggaggaggcttcgtccgagcagaaggtgtcgattatccagctcttcactaattcatcctaccgccagccaatcctggtggctctgatgctgcatgtggcccagcagttctccgggatcaacggtatcttctactactcaaccagcatctttcaaactgcaggaatctccaagccggtgtacgcgactatcggtgtcggtgcagttaacatggtgtttacggcagtgagtgtgttcttggtggaaaaggctggccgccggagtctgttcctcatcggaatgtctggcatgttcgtctgcgctatctttatgtcggtgggactggtgctgctcaacaagttttcgtggatgagctacgttagcatgattgccatctttctcttcgtctcgttctttgaaatcgggccaggacctatcccgtggttcatggtcgctgaattcttttcgcagggaccgcgccccgctgcgctggccattgctgctttttcgaactggacttgcaactttatagtggccttgtgcttccagtacatcgctgatttctgtggaccttacgtattcttcctcttcgctggagtgcttctggcgttcacgctgtttactttctttaaggtgccggaaaccaagggaaaatcgtttgaagagatcgcagcggaatttcagaagaagagcggcagcgcccaccgcccgaaggcagccgtggagatgaaattcctcggggcgaccgaaactgtc

SEQ ID NO: 7282 - DNA, 1572 bp, Artificial Sequence
  derived and/or modified sequence
atgaccgaggataaagttaccgggacactggtgtttacagtaattacggctgtgctggggtcgttccagttcggctacgacattggcgtgattaatgcccctcagcaagttatcatttcccactatcgccatgtgctgggggtacctctagacgatcgaaaagccatcaataattatgtaattaattcgaccgatgagctcccgaccatctcatactccatgaaccctaaacctacaccttgggccgaggaagaaacagtcgcggccgcacaattaattacaatgctgtggtcactgtcggtgagcagctttgcggtcgggggtatgacagcctctttctttggaggctggctgggagatacgctgggtcggatcaaggccatgctcgtagctaatatcttgagccttgttggcgccctgctgatgggattctccaagctgggtccttcccacattctcatcattgccggccgcagtatctctgggctctattgtggattaatctctggcttggttcctatgtacatcggagagattgcacccacagccctgcgcggcgcgttgggtacttttcatcagttagccatcgtgacaggaatcctcatttcccagattatcggccttgagttcatactcgggaattacgacctctggcacattctgctgggcctctccggtgtccgcgccatactccagagcctgctgctcttcttctgcccggagtccccgcggtacctgtatatcaagctggatgaggaggtcaaggccaagcagtcgctaaagaggcttcgcggatacgatgatgtcaccaaggacataaatgagatgcgaaaggagagagaggaggcgtcatccgaacagaaggtatctattatccagctgtttaccaactcttcatatagacaacccatccttgttgccctgatgttacacgtggctcaacagttctctggcattaatggaatcttttattatagcacgagcatcttccagactgctggcatcagtaagcccgtgtacgctactatcggagttggagctgtcaacatggtctttacggcagtgtccgtcttcctcgtagagaaggccggccggcgcagtctcttcctgatcggcatgtccgggatgtttgtgtgtgcaattttcatgtccgtgggacttgtactccttaacaaattttcctggatgtcttacgtgagtatgattgcgatattcctttttgtgagcttctttgaaatcggtccgggccccattccttggtttatggtcgctgagttctttagccagggacctagacctgcagcactggccattgccgccttttcaaactggacttgtaatttcatcgtcgcattatgcttccaatacattgctgatttttgtggtccttatgtcttcttcctgttcgctggcgtcctgctcgcttttaccttgtttacattcttcaaagtacctgaaacaaaaggaaagagcttcgaagagatagcagctgagttccagaaaaagtctgggtctgcgcaccgacccaaggccgccgtagaaatgaagttcttaggcgctacagagaccgtg

SEQ ID NO: 7283 - DNA, 1572 bp, Artificial Sequence
  derived and/or modified sequence
atgaccgaagataaggtcaccggtactctggtctttaccgtgatcactgcagtgctgggatcatttcaatttggatatgacataggagtgatcaatgccccacagcaggtgataatctcccattatcggcacgtcctgggcgtgccccttgatgaccgtaaggctatcaacaactatgtcatcaattctaccgacgaactgccaaccatctcatattcaatgaaccccaagcctactccttgggcagaagaggaaactgtggcagcggcacagctgataaccatgctttggtcactctcagtctccagctttgccgtgggaggtatgaccgccagtttctttggcggctggctcggcgataccctcggacgaataaaggcaatgctggttgctaatatcctctcccttgtgggagcactgctcatgggcttttccaagctcggcccgagccatattctgatcattgcaggtaggtccatatcgggtctttactgcggcctcatttcaggactcgtgcctatgtacatcggagaaattgcccctaccgcacttcgcggcgccctcgggacttttcaccaactcgcaattgtcacgggaattttgatttcacaaatcatcggactggaattcattcttggtaactacgatctttggcatatcctgctcgggctgagcggtgtgcgagcgatactgcaatccttgttgctctttttctgtcctgaatcccctagatacctgtatatcaaactggatgaggaagtcaaggcaaagcagagcctcaagagacttcgaggatacgatgatgtgacgaaggacatcaacgagatgcgaaaggagagggaggaggcctcatccgaacagaaagtgagcattattcaactgtttactaattcgtcctacagacagccgattcttgtcgcgttgatgctgcatgtcgcccagcaattctccggaattaacggaattttctactactccacttcgatattccaaactgctgggattagcaaaccagtgtacgcaaccataggcgtgggagctgtgaacatggtgttcaccgctgtgagcgtgtttcttgttgaaaaagcaggacgcagatcgctgtttctgattggcatgtcgggaatgtttgtctgcgcaatctttatgtcagtgggtcttgtccttctgaacaagttctcgtggatgtcctatgtctcgatgatagcgatcttcctttttgtgtccttcttcgaaattggacctggccccataccttggtttatggtggcagaattcttttcccaaggaccgcggcctgccgcacttgcaattgctgcattttccaactggacgtgtaactttattgtagcgctctgctttcaatacattgccgacttctgtggaccctacgtgtttttcctcttcgcaggggtcctgctggcattcaccttgttcaccttctttaaagtgcctgaaactaagggtaagagcttcgaagagatagccgcggaatttcagaagaaaagcggctctgcccatcgtcccaaggcagcagtggagatgaagtttctgggtgctaccgagactgtg

SEQ ID NO: 7284 - DNA, 1572 bp, Artificial Sequence
  derived and/or modified sequence
atgaccgaagataaagtcacgggcacactagtctttaccgtaatcaccgcggtgctcggatcgttccagttcggttatgatatcggggtgattaacgcaccccagcaggttatcatctctcactacagacacgtcctcggtgttccacttgatgacaggaaggccataaataattatgtgattaattccactgacgagttaccgacgatctcgtacagcatgaatcctaagccaacaccctgggcagaggaagagaccgtggctgccgcccagctcataacaatgctgtggtccctttcagtcagtagctttgccgttggcgggatgactgcttctttttttggtggctggctaggcgacactctgggcaggatcaaggccatgctagtagctaacatcctgtccctggtgggcgctcttctgatggggttctccaagcttggacctagccacatacttataatcgccggccgctccatttctgggttgtattgtggtctcatctcgggactcgtacctatgtatataggagaaattgcaccaactgctcttaggggggctctcggtacctttcaccaactagcgatagttactggcattttgattagccagatcattggccttgagtttatcttggggaattatgacctgtggcatattttactgggactgtccggtgtgcgtgctatactgcagagcctgctcttgtttttttgccctgagagcccacgctacctgtacataaaactggatgaagaggtcaaagctaaacagagcttgaaaagattgcgagggtatgacgacgtgactaaggacatcaatgaaatgagaaaagagagagaagaagctagctccgagcagaaggtgtctataattcagctgtttaccaacagctcctatcgtcagcccattctggttgctttgatgttgcacgtggcccagcagttctcagggatcaatgggatattttattactccacctctatcttccagactgccggaatttctaaaccggtgtacgctacaattggagtaggtgccgtcaacatggtctttaccgccgtgagcgtatttttggttgagaaggctggacgcagatctctgtttctgataggaatgagtgggatgttcgtttgtgctattttcatgtcggtagggctggtactgttgaacaagttctcctggatgtcgtatgtttccatgatagccatctttctctttgtgagcttctttgagatcggacccggtcccatcccatggtttatggtagctgaatttttttctcaggggcctcggcccgccgcccttgcgatagccgcattcagcaactggacttgcaatttcattgtagcactgtgttttcaatacatcgcggacttctgtggcccctacgtcttctttttgttcgccggcgtgctcctcgcctttacactgttcacatttttcaaagttccggaaacgaaagggaaatcctttgaggagatagccgccgaattccaaaagaagtcaggctctgcgcatcggcctaaggcagccgttgagatgaagttcttgggcgctaccgaaaccgtc

SEQ ID NO: 7285 - DNA, 1572 bp, Artificial Sequence
  derived and/or modified sequence
atgacagaggataaggtgaccgggacattggtgttcactgttattaccgctgtcctaggcagttttcagttcggctatgacatcggtgtgattaacgcaccgcaacaggtcatcatctcacattacagacacgtgcttggggtccctctggatgaccgaaaggccatcaacaattacgtaatcaacagtactgatgagctcccaaccatctcttacagcatgaacccgaaaccgactccctgggccgaggaggaaacagtggctgcggcacagctcatcacaatgctctggtcactcagcgtctcttcatttgcagttgggggcatgacagctagtttcttcgggggctggctgggggacacgctgggtaggatcaaagctatgctagtggcaaatattctatcactcgttggtgccctgttaatgggattcagtaaactggggcctagccacatcttgatcatcgccggtcgaagcatttctgggctgtactgcggactcattagcggattagtgcccatgtatattggggagattgcacctaccgccctaagaggcgcactaggaacttttcaccagttggcaattgtgactggaatcctgatcagccagattatcgggctagagtttatcctgggtaactatgacctttggcatatcttgttgggcctgtctggcgtacgggcaatactgcagagtctgcttcttttcttctgtccagaatcacccaggtatctgtatatcaagctggatgaggaggttaaggcaaaacagtccctcaaaaggttaagaggctacgacgacgttactaaagacattaatgagatgcggaaagagagggaagaggcaagctcagaacaaaaggtcagtatcattcagttgtttaccaactcatcttacagacagcctatcctcgtggctctgatgctgcacgttgcgcagcagttttccggcatcaacggaatcttttattatagtaccagcatcttccaaactgcaggaatctccaagccagtgtacgcgactataggagtgggagcggtgaacatggtttttactgccgtctccgtcttcttggtggagaaggcagggaggcggtccctgtttcttatcggaatgtcaggaatgtttgtttgcgccatctttatgtccgtaggcctggttctgctgaacaagttttcttggatgagctacgtctcaatgatagcgatcttcctattcgtcagtttctttgagatcggacctggccctattccttggttcatggttgcggaattcttttcgcaaggaccaaggccagccgcccttgctatcgcagcattctctaactggacatgtaactttattgtggccttgtgtttccagtatatcgccgatttctgcggcccctatgttttttttttattcgctggcgttctgctggcctttacactctttaccttcttcaaggtgccagaaacaaaggggaagtcatttgaggagattgcggcagaatttcagaaaaaaagtggcagcgcacatagacccaaggccgcagtagagatgaagtttctaggcgcgaccgaaacagtc

SEQ ID NO: 7286 - DNA, 1572 bp, Artificial Sequence
  derived and/or modified sequence
atgactgaggataaggtgaccggtaccctggtgtttaccgttatcacggctgtgttgggtagtttccagttcggatacgatatcggcgttataaacgcaccacagcaggttatcatatcacattatcgccatgtgcttggcgttcccctcgatgaccgcaaggcaattaacaattacgtgatcaattcaacagacgaattgcccacaatctcctacagcatgaaccccaaacccacgccttgggcggaagaggagaccgtcgcggcagctcagttgatcacgatgctctggagcttatccgtctcatcatttgccgtcggaggaatgactgctagctttttcggagggtggctgggagataccctgggccggatcaaagcaatgctggttgccaatatcttgtctctggtcggagctctgctgatggggttcagtaagctcgggccctctcacatactgattatcgccggccgctcaatcagtggattatattgcgggctgatctcaggactggttcctatgtacattggcgaaatcgctccgacagccctgcggggggccttgggaactttccaccaactggctatcgtcacaggtatcctgatttctcagattatcggcctcgagttcatcttgggtaactacgatctctggcatattcttctgggacttagtggggtgagagcaattctgcagtcattactcttgttcttttgcccagaatctccccgttacctgtatattaagctcgacgaggaggtgaaggcgaagcaatctctgaaacggctccggggctatgatgatgtgaccaaagacattaatgaaatgagaaaggaacgtgaggaagcaagctcagagcagaaagttagcattattcagctgttcacaaacagcagctatcggcagcctattttggtggccctgatgctacacgttgcccagcaattctctgggataaatgggatcttttactattccaccagtatctttcagacggcgggcataagtaaacctgtatacgccaccattggcgtgggagcagttaatatggtttttaccgctgtgagtgtgtttctcgttgaaaaggcaggtcgcaggtcccttttcttaatcggcatgtccgggatgtttgtatgcgccatcttcatgtctgtgggcttggtcttgctgaataaattttcatggatgtcttatgtgagtatgattgctattttcttgttcgtgagctttttcgaaatcgggccaggccctatcccatggtttatggtcgctgaatttttctcccagggaccccgtcctgctgccttggcaatagctgcctttagtaactggacttgtaacttcatagtagccctgtgcttccagtacatcgctgacttctgcggaccctatgtgtttttcctcttcgccggagtactgctggcgtttaccctgtttactttctttaaagtgcccgagaccaaagggaaatcttttgaggagatcgctgccgaattccagaagaaatcagggtctgcacaccgtcctaaggctgccgtggagatgaaatttctgggcgctacagagactgtc

SEQ ID NO: 7287 - DNA, 1572 bp, Artificial Sequence
  derived and/or modified sequence
atgactgaagataaagtgaccggcaccctcgttttcaccgtgataaccgcagtgctgggtagctttcagttcggatatgatatcggcgtgataaatgctcctcaacaggtgattatatcccattatcggcatgtactgggggtgcccctggacgaccggaaagctatcaataattacgtgatcaattccaccgacgaactccccaccatttcctatagtatgaatcccaagcctacaccctgggcagaggaagagaccgttgctgccgctcagcttataacaatgctgtggagcctgtccgtgtcttctttcgccgtgggagggatgacagcttccttctttggcggctggctgggagacacccttggaagaattaaggccatgctcgtggcaaacatcctgtccctggtcggagctctgctaatgggctttagcaagttaggtccaagccacattctgatcattgctggccgatctatcagtggcctctattgcggtctaattagtggtttagtccctatgtacattggggagatcgccccaaccgctctgagaggcgctctcggcactttccaccagctcgccattgtgaccgggatcctgatttcccaaattatcggacttgagtttatcctaggcaactacgatctgtggcacatcctactggggctgtccggagttcgtgcaatactgcaatcactgctcctgttcttctgccctgagtcaccacgttatctgtatataaaactcgatgaggaggtgaaggcaaagcaatctctgaaacggctacgcgggtacgatgatgtaaccaaggatattaacgagatgcgcaaagaaagggaggaagccagcagtgaacaaaaagtgtctataatacaactgttcactaactcctcctatcggcagcctattcttgtggctctgatgctgcacgtggctcaacagttcagcgggattaatggcattttctattactctacttcaatatttcagacagccggaattagtaaacctgtgtatgctactatcggcgtgggagccgttaatatggtttttactgcagtgtccgtattcctggttgaaaaggccggaagaagaagcctattcctgattggcatgtctgggatgtttgtttgcgccatattcatgagcgtgggcctggtgctactgaacaagttttcctggatgtcatatgtcagcatgatagctatattcctgttcgtttcctttttcgagatcggccccgggcctattccctggttcatggtcgccgagttcttttctcaggggcctcgaccagccgcactagctattgctgcattctctaattggacttgtaacttcatcgttgccctgtgtttccaatacattgcagatttctgcggtccatatgttttctttctatttgccggcgtgctgctggctttcactctgttcacatttttcaaggtcccagagaccaaggggaaaagcttcgaagagattgcagctgaattccagaaaaagagtggttccgctcaccgacccaaagccgcagttgagatgaagttcctgggcgctaccgagactgtt

SEQ ID NO: 7288 - DNA, 1572 bp, Artificial Sequence
  derived and/or modified sequence
atgacagaagacaaggtaactggcacactggtgtttaccgttatcaccgcggttctgggctcctttcagtttggctatgacatcggcgtgataaatgcgccgcagcaggtgattatcagccactatcgacacgttctaggcgtgccgttggacgatcgcaaggcaatcaacaactacgtgattaactccactgatgaactacctaccatctcatactcaatgaaccccaagcccacgccatgggctgaagaggaaactgtggccgccgcccagctcattacgatgctgtggtcattgtcggtcagctcgttcgcggtgggcggaatgaccgcctcatttttcggtggttggttgggcgacaccctgggaaggatcaaagccatgttagtagccaacatcctgtccctcgtgggcgccctgttgatgggcttcagcaaactgggtccgtctcacatcctaatcatcgccggaaggagtatctccggcttgtattgtggtttaatcagcggtctggtgccaatgtatataggcgagattgccccgacggccttgcggggtgcgctaggcacgtttcaccagcttgctatcgtgaccggcatcctgatatcgcagatcatcggcttggagttcattctgggtaattacgatctgtggcacatccttctcggactgtcgggtgtgcgcgcaatcctgcaatctctgctgctgtttttctgccccgagagtccgcgatatctgtatataaagttggatgaagaggtgaaggccaagcagagtttgaagcgccttcgtggctatgacgatgtaaccaaagatatcaatgaaatgcgcaaggagcgtgaggaggcttcgtccgagcagaaggtctcgatcatccagttgttcactaactcatcctacagacaaccgattctggtggccctcatgctgcacgttgcccagcaattcagtgggataaacggcatattttactacagcacctcaattttccaaacagctggcatctctaagcctgtctacgcgactatcggcgtcggcgctgtcaatatggtttttaccgccgtgtccgtatttctggttgaaaaagccggccgccgaagcctattcctgattggtatgtcgggaatgttcgtgtgcgcgatctttatgtctgtcggactggtgttgctgaataagtttagctggatgtcttacgtgagtatgatcgcaatttttcttttcgtcagcttcttcgagattggtcccggtccaattccctggttcatggtggccgaattcttcagccagggtccccgccccgccgctctggccatcgccgcattctccaactggacgtgcaactttatagtagccctgtgctttcaatacatagccgatttttgtggaccctacgtgttcttcctgttcgccggagtactgctggccttcacactgttcaccttctttaaggtaccagaaacaaagggcaagagtttcgaagaaatcgccgcagaatttcagaagaaatcaggctccgcccaccgtccaaaggcggccgtggaaatgaagttcttgggcgctactgaaaccgtt

SEQ ID NO: 7289 - DNA, 1572 bp, Artificial Sequence
  derived and/or modified sequence
atgactgaggacaaggtcacaggtacactggtcttcacagtcatcaccgccgtcctcggttctttccagtttggttacgacatcggagtaatcaatgcaccccaacaggtcataattagccattacaggcacgtactcggcgtacccctggacgacaggaaagctatcaataactacgtgatcaactctaccgatgagttgcctactatatcttactccatgaacccaaagcctactccttgggctgaggaagaaaccgtcgcagctgcccagctcatcaccatgctctggtcactcagcgtttcctcattcgctgtaggtggaatgacagcatcctttttcggcggctggcttggcgataccctgggtagaattaaggccatgcttgtcgccaatatccttagccttgtgggtgccctccttatgggattcagtaagctgggtccttctcatatcttgatcatcgctggccgttctatttccggtctgtactgcggattgatctccggcctcgtgcccatgtatatcggcgaaatcgcaccaacagctctcaggggagccctgggcactttccatcagctggctatagtgacaggaattttgattagtcaaataattggcttggagttcatactgggcaattacgatctgtggcacatactgcttggactgtctggagtgcgtgctattctccaatcactgttgttgttcttttgtcccgagtcaccccgttacttgtatattaagttggatgaagaggtgaaggctaaacagtccttgaagaggcttagaggctatgacgatgtgactaaggacatcaacgaaatgcgcaaggaacgcgaagaggcttcatctgaacagaaagtgtctataatccagctcttcaccaactcttcttatcgtcaaccaatccttgttgctctgatgctccacgtcgcccagcaattttccggaattaacggaatattttactacagtaccagtatatttcagactgccggcatctccaagccagtgtacgcaaccattggcgtcggagccgtaaacatggtattcacagccgtaagtgttttcttggtggagaaggcaggcaggcgttctctgttccttataggcatgagtggaatgttcgtatgtgccatcttcatgtctgtgggcctggtccttctgaacaagttttcttggatgtcctacgtttcaatgatagccatctttttgtttgtttcatttttcgagatcggtcctggccctattccttggttcatggttgcagagttcttttctcaaggacccaggcctgcagcccttgctatcgctgccttctctaattggacttgcaatttcattgtggccttgtgtttccaatacattgccgacttctgtggtccctatgtcttcttcctctttgctggcgttcttctcgcattcacactttttactttctttaaggtgcccgagaccaagggcaaatctttcgaagaaatcgccgcagaatttcaaaagaaatctggctcagcccataggcctaaggccgccgtggagatgaaatttttgggtgccactgaaacagtg

SEQ ID NO: 7290 - DNA, 1572 bp, Artificial Sequence
  derived and/or modified sequence
atgaccgaggacaaagtgactggtacccttgtgttcacagtcatcactgccgtccttgggtctttccagttcggatacgacattggcgtgatcaatgccccccagcaggttattatctctcattatcggcatgtgcttggggtgccactggatgatcgcaaggccattaacaactacgtgatcaatagtaccgacgagttgcctacaatttcctattcaatgaatcctaagccaacaccatgggctgaggaagagacagtggctgccgctcagctcattacgatgctgtggtccttatcagtcagctctttcgccgtgggaggcatgactgcttcctttttcggaggatggctcggcgacactctgggcagaatcaaggcaatgctggtagctaacattctctccctggttggggccctgctgatggggttctcaaagttggggccatcacacatccttataatcgctggtcggtcaatcagtggactgtactgtggcttaatatcaggcctcgttcctatgtatatcggcgagatcgcaccaacggctcttaggggtgcactggggacctttcatcaactggccattgtaaccggcatactcatctcccagattattggtctggagttcattctgggcaactatgacttatggcatatcctccttggactcagcggagttcgagctatccttcagagtctcctgctattcttttgccccgagtctcctaggtatctgtatattaagctggacgaggaagttaaggctaagcagtctcttaagagactgcggggctatgatgatgttacaaaagatatcaacgaaatgaggaaggagagagaggaggcatccagcgagcagaaggttagcataatccagctgttcaccaattctagttaccgtcagcctatcctcgtggcactcatgctgcacgtggcccaacagttcagtgggattaacggcatcttttattatagcacttccattttccagacagctgggatctccaagccagtttacgctactataggcgtgggcgctgtgaatatggttttcactgccgtgtccgtgtttctagtcgaaaaagccggacgccggagcctgttcctgatcggcatgtcgggtatgttcgtgtgtgcaatctttatgtccgtggggttggtgctgctcaataaattttcctggatgtcctacgtttctatgatcgcgattttcttgttcgtatcattcttcgaaatcggtcctggccccataccatggtttatggtggccgagtttttttcccaggggcccaggcccgccgccctagctattgcagcgttcagcaactggacctgtaatttcatcgtggccctatgtttccagtacatcgcagatttttgtgggccctacgtgttttttttgtttgcaggagtccttctggcatttaccctgttcaccttcttcaaagtgcccgaaaccaaagggaagagttttgaagagatagccgccgaatttcagaagaagtctggatctgcccataggcctaaagctgccgtggaaatgaagtttttgggcgccacagaaacggtc

SEQ ID NO: 7291 - DNA, 1572 bp, Artificial Sequence
  derived and/or modified sequence
atgacagaggataaggtcactggtacgcttgtgttcacagtaattaccgccgtcctgggatcctttcagtttggttacgacatcggtgtgatcaacgccccccagcaagtgataatttcacactatagacatgtgcttggtgtcccattggacgatcgcaaggctattaataattatgtcattaattctacagacgagctgccaaccatttcttattctatgaatcccaagccgacaccgtgggccgaagaggaaactgtggccgcggctcaactcatcaccatgctgtggtctctatcggtttcttcgttcgctgttggcggaatgactgcatcgtttttcgggggctggctgggggatacactcggcaggatcaaggctatgcttgtcgccaatatcttgtcactggtgggcgcccttcttatgggattcagcaagttggggccgagccacatccttataatcgccggtaggtcgatcagtggcttgtactgtggccttataagcggtctggtccccatgtatatcggcgagatcgcgccaactgcgctccgcggggcgctaggcacattccaccagctcgccatcgtgacgggcatcctcatttcccagattattggtctggagttcatcttgggcaattacgacttgtggcacatccttctgggattgtctggcgttcgtgcgatccttcaaagcctgctgttgttcttttgtcccgaaagtcctcgctatctttacataaagctagatgaagaagtgaaggcaaagcagtcgttgaaacgtctccggggctacgacgacgtcacaaaggacattaacgagatgcgtaaggaacgagaggaagcttcgtccgaacagaaggtttcgatcatccagttgttcaccaactcgtcatatcgccaacccattctagtcgccctcatgttacatgttgcacagcagttttccgggatcaacggcatcttctattattctacatcaatctttcaaactgctgggataagtaagccggtctacgctaccatcggagttggagcggttaacatggtgttcactgctgtctcggtgttcttggtcgagaaggctggacgtcgctctctcttccttatcgggatgtctggaatgttcgtttgcgccatttttatgagtgtaggtctggttctattaaataagttctcttggatgagttacgtgtctatgatcgccatatttcttttcgtgtcttttttcgaaatagggccggggcccatcccctggttcatggtcgcggaatttttttcacaaggaccgcgcccggcggcattggctatcgccgcgttctctaactggacatgtaatttcatcgtggccctctgtttccagtacatcgctgatttctgcgggccctacgtcttctttttgtttgctggcgttttgctcgcgtttaccttgttcaccttcttcaaggtgcctgaaactaaggggaagtcgttcgaggagatcgctgctgaattccaaaagaagagtggtagtgctcatcgccccaaagccgcagttgagatgaaattccttggcgcaaccgaaacagtc

SEQ ID NO: 7292 - DNA, 1572 bp, Artificial Sequence
  derived and/or modified sequence
atgacggaggacaaggttactggaaccctggtatttaccgtgattacagccgtcttgggttcctttcagttcggatacgatatcggggtcatcaatgcacctcaacaagtgattatttcccactatcggcacgtcttgggtgtaccactcgacgatcggaaagcaattaataattacgtgatcaactcaaccgatgagctgcctaccatttcctacagtatgaatcccaagcccaccccctgggctgaagaggaaacggtagcagccgctcaacttattaccatgctctggtcacttagcgtgtcttcgttcgccgttgggggcatgacagctagctttttcggagggtggctgggcgataccctaggtcgcatcaaggctatgctagtcgctaacatacttagcttggtgggtgcgctgctcatgggcttcagcaaactgggaccatctcacatccttatcattgccgggcgcagcatctcaggcctgtactgtggccttattagtggactggtgccaatgtatatcggcgagatagcacctacagcgctgaggggcgcgctcggcactttccaccagctagccattgtgacaggcatactgatctcgcagataatcgggctcgaatttatcctggggaactacgacctctggcatattcttctgggtctgagcggggtgagggccatccttcagtcactcttgttgttcttctgccccgaaagcccaaggtacctgtacattaagcttgacgaggaggtaaaggcgaaacagtccctcaagcgtctgcgcggttacgacgacgtgacgaaggatattaatgagatgcgaaaggaacgcgaagaggcaagtagcgagcagaaggtctccattatccagctgttcaccaacagcagctatagacagccgatactcgttgccctgatgttgcacgtggctcagcaattctctggcatcaatgggattttctactacagcacttccatattccagaccgcaggaataagcaaaccggtgtatgctactatcggcgtcggcgccgttaatatggtgtttacagctgtttctgtattcctggtggagaaggcaggacgccgcagcttatttctaataggtatgtctgggatgttcgtgtgtgctatcttcatgtcagtggggctggtcctactgaacaagttttcctggatgtcctacgtcagtatgatcgcaatctttctgttcgtcagtttctttgaaattgggcccggccctatcccatggtttatggtcgctgaattcttctcccaaggtccgagacccgcagcactcgccatcgccgcgttctccaactggacttgcaatttcatcgtggcattgtgctttcaatatatcgcagacttttgcggaccctatgtgttctttctatttgccggggtgctgctcgcattcacactgtttaccttctttaaggtgccggagacaaaggggaagagctttgaggaaatcgccgcagaatttcaaaaaaaatccggctccgcgcataggccgaaggcggcggtggagatgaagttcctcggggctacagagaccgtt

SEQ ID NO: 7293 - DNA, 1572 bp, Artificial Sequence
  derived and/or modified sequence
atgacagaggataaggttactggaacactggtctttacagtgatcacagccgtgctgggaagttttcaatttgggtatgatatcggggtgataaatgcgccccagcaggtgattatatcccattatcggcacgtgttaggagtaccactagacgatcggaaagccatcaataattatgtgatcaatagtactgatgaactccccacaataagttatagtatgaacccaaaacccactccatgggccgaagaagagacagttgccgctgcacagctcatcacaatgctctggtccctgtctgtgtcttcctttgcagtgggaggaatgacagcctccttcttcggagggtggctcggagatactcttggaaggattaaagccatgctggttgcaaatatactgtcactggtcggagcactgctgatggggttcagtaaacttgggccttctcacattctgatcatagctggacgctcaatatcgggactttattgtggactcataagtggactcgtaccaatgtatatcggggaaattgcacccacagcccttcggggggctctagggacttttcaccagcttgcaatcgtgactgggatcctcatttctcagatcataggactagaattcatcttgggaaattatgacttatggcacatcctgctggggctctcgggagtgagagcgattctacagtctctcttactttttttttgccccgagtctcctcggtacctctacattaaactcgatgaagaagtcaaagcaaaacagtccctgaagagactacgcgggtatgatgatgttacaaaagacattaatgagatgaggaaagagcgggaagaagcatcctctgaacagaaagtgagtatcattcagctcttcacaaactcctcttatagacagccaatactggtggcactgatgctgcatgtggctcagcagttcagtgggattaacggaatattctattattctacaagtatcttccaaactgcagggatttctaaacccgtgtatgcaacaatcggggtgggggcagtcaacatggtgttcacagccgtgagtgtgtttttagtggagaaggctgggaggaggtctctctttctgatcggaatgtccgggatgtttgtctgtgctattttcatgtcagttgggctcgtgctgctaaacaaattctcctggatgagttacgtttccatgatagcaatcttcctgttcgttagtttcttcgaaatagggcctgggcccataccctggttcatggtcgccgaatttttctctcagggaccccggcccgccgcactcgctatagccgctttttctaattggacttgcaattttattgtggccctctgctttcagtatattgctgatttctgtggaccctatgtctttttcctgtttgccggggtacttctagcttttacactcttcacattctttaaagtacccgagacaaaaggaaaatcgtttgaagaaatcgccgccgagttccagaaaaaatcaggatcagcccatcggcctaaggccgccgtggaaatgaaatttctgggagctactgaaacagtc

SEQ ID NO: 7294 - DNA, 1572 bp, Artificial Sequence
  derived and/or modified sequence
atgacagaggacaaggttacaggcactcttgtgttcacagtaataacagccgtgcttggctcattccagttcggctacgacattggagtgataaatgccccacaacaagtgatcatctcccattaccgacatgtgctcggagtgcccctcgatgaccgcaaagccatcaacaactacgttattaacagcactgatgaactcccgaccatcagttactccatgaatccaaagcccacaccgtgggcagaggaggaaacggtggcagccgctcagctgatcactatgctctggtcactcagcgtctctagttttgccgtgggaggcatgacggcgtccttttttggtgggtggcttggtgatactctgggacgcatcaaagcaatgctggttgctaatatcctgagcctggtgggtgctttgttgatgggattcagtaagctgggtcccagccatattctgataatcgccggtcgctccatatccggcctgtattgtggtctcatcagtggtctggtcccaatgtatatcggcgagatcgcccctacagctctccgcggagcgttgggcacgtttcaccagctcgcgatcgtaaccgggattctcatctctcagatcattggcctggagtttatcctcgggaactatgatctctggcacatcctgttgggactgagtggcgtccgcgccatccttcagagcctgcttcttttcttctgccccgagagtccacggtatttgtacatcaaactcgatgaagaagtcaaagctaagcagagtctcaagaggttgcgcggatatgacgatgtgacaaaggatatcaacgagatgagaaaggagcgcgaggaagcgtcaagtgagcaaaaggtctctatcatccagcttttcactaacagctcctatagacagccaatcctggttgcgctgatgctgcatgtggctcagcagttctctgggatcaatggtatcttctactactctacctctatcttccagacagctggaattagcaagccagtctatgcaaccataggcgtgggtgcagttaacatggtgtttaccgctgtctctgtgttcttggtcgaaaaggccgggcggcgcagcctgtttctgataggaatgagcggcatgttcgtatgcgctatattcatgagcgtgggcctggtgctgctcaacaagttttcctggatgagttacgtatccatgattgccatcttcctgtttgtcagcttttttgagatcggcccaggtccgatcccctggttcatggtagccgagtttttttctcagggaccccgccccgccgctttggccatcgccgccttcagcaactggacatgtaactttattgtcgctttgtgtttccagtatatcgcggatttttgcgggccatacgtgttcttcttgtttgctggcgtgctgctggcttttaccctcttcacttttttcaaggtgcccgagaccaaaggcaaatctttcgaggagattgccgccgagtttcaaaagaagagtgggagtgcccacaggccaaaagccgctgttgagatgaagttcctgggagctacggagacagtc

SEQ ID NO: 7295 - DNA, 1572 bp, Artificial Sequence
  derived and/or modified sequence
atgacagaagataaagttaccgggacccttgtatttaccgtgattactgctgtgttggggagtttccaattcggatatgacattggcgtcatcaatgcaccccagcaggtgataatcagtcattacagacacgtccttggtgtgcctctggatgatcgaaaggctatcaacaactacgtgattaacagtacggacgaactgccaacaatttcatacagcatgaatcctaagcccactccctgggccgaggaagagaccgttgcggctgctcaactgatcaccatgctgtggtccctgtctgtttcaagctttgctgtcgggggaatgactgcaagcttcttcggcggatggttgggggacacccttgggcgcataaaagcaatgctcgtcgctaatattctgtctctggtgggtgctcttcttatggggtttagtaaactcggcccttcccatatcctgattatcgcgggtagatccatctcaggactgtactgcggcctcatatccgggttagtgcccatgtatatcggagagattgccccaacagctttgcgcggcgctcttggcacattccatcagctggctatagtcaccggcatcctcatcagtcaaataatcggtcttgaattcatccttggcaactatgatttgtggcacatactgctcggactgtccggcgtgagggcaatcctccaaagcctgctgttgtttttctgccctgagtcccctcggtacctgtatataaaactcgacgaggaggttaaggcaaagcagagcctgaagagactgagaggatacgacgacgtgactaaggatattaacgaaatgagaaaagagagagaggaagcttcaagcgagcagaaggtcagcatcatccagctgttcacaaatagcagctatagacagccgatccttgtggcacttatgttacacgtggcacaacagtttagcggaataaacggaatattctactactccacctccatcttccagacagctggcatcagtaaaccggtctatgcaacaattggagtcggagccgtgaatatggtgtttacggccgtgtcagttttcctggttgaaaaggcaggtcgtaggagcttgtttctgattgggatgagtggcatgtttgtgtgcgctatcttcatgtctgtgggactggtcctgcttaacaaattttcttggatgagctacgtctctatgatcgctatctttcttttcgtgagtttctttgagatcggcccaggtcccatcccttggtttatggttgctgagttttttagtcaagggcctcgccctgccgctctggctatcgcagcttttagcaactggacctgtaatttcattgtggcactttgcttccagtatattgcagacttttgtggcccttacgttttctttctgtttgccggcgtgctcctggcttttactctgttcacatttttcaaggtcccggaaaccaaggggaagtccttcgaagaaattgccgctgaattccagaaaaaatccggaagcgcgcacaggcccaaggccgctgtcgagatgaagtttctgggcgcaactgagacggta

SEQ ID NO: 7296 - DNA, 1572 bp, Artificial Sequence
  derived and/or modified sequence
atgaccgaagacaaagtgaccgggactctcgtcttcactgttattaccgctgtcctcggctcctttcagttcggttacgacatcggggttatcaatgctccccagcaggttatcatctctcactaccgacatgtcctcggcgtccccctcgatgatcgaaaggcgatcaataactatgtgatcaactccaccgacgaactgcccaccatttcctacagtatgaatccaaagccaacaccgtgggctgaagaggaaaccgtggcggcagcacagctcataacgatgctatggtccctgtcggtaagcagcttcgcagtgggcggtatgacggcctccttctttggaggttggctgggcgataccttgggccggattaaggccatgctggttgctaacattctcagcctcgttggcgcccttctcatgggcttcagcaagctcgggccttcccacatccttattatcgcaggcaggtccatctctggcctgtactgcggcttgatttcgggcctcgtccctatgtacattggcgagattgcccctaccgcgctgcgcggtgccttgggcacctttcatcagctggcaatcgttactggcatcctcatctcccagataattggcttggagttcattctgggtaactacgatctatggcacatcttgctcgggctcagcggtgtgcgtgcgatcttgcagagtttgctgttgttcttctgccctgagagtccccggtacctgtacataaagctggacgaggaagttaaggcgaagcagagtctgaagcgtcttcgtggttacgacgatgtgactaaggacatcaatgagatgagaaaggagcgtgaggaggcctcgtcggaacaaaaggtctcaatcatccagctcttcacgaactcgtcataccgccaacccatcctggtggcgctgatgctccacgtcgcccaacaattcagcggcatcaacggcattttttactactccacctcgatctttcaaaccgcgggtatcagcaaacccgtgtatgccacaatcggagtcggcgctgtcaacatggtcttcactgcagtctctgtcttccttgttgagaaggccggtcgccgcagcctgtttttgattggcatgtccggcatgtttgtctgcgcgatcttcatgagtgtcggcttggtcctgctgaataagttctcttggatgtcttacgtctccatgatcgctatattcctgttcgtgtctttcttcgaaatcggccctgggccaatcccctggtttatggtcgctgagttcttctctcagggtcctcggccggctgccttggcgatcgccgccttctccaactggacttgcaacttcattgtcgctctgtgctttcagtacatcgccgatttctgcggcccgtacgtcttcttcctcttcgctggagttctgttggcctttacactgtttaccttctttaaagtgcctgagaccaagggaaagtcgtttgaagagattgccgctgaattccagaagaagagcggttcggcgcatcggcctaaagctgcggtcgagatgaagttcctaggcgctaccgagaccgtt

SEQ ID NO: 7297 - DNA, 1572 bp, Artificial Sequence
  derived and/or modified sequence
atgaccgaggataaggtgacagggaccttagtcttcactgtcatcaccgcagtgctgggcagcttccagtttggatatgatattggagtgatcaacgctccccaacaggtgatcataagccattaccgccacgtgctgggggtgccactggacgacagaaaggctatcaacaattacgtgatcaattccacagatgagttaccgactatcagctatagtatgaatcccaagcccaccccttgggcagaggaggaaaccgttgcggcggcacagcttatcactatgctgtggagcttatctgtgagctccttcgcagtgggtggcatgactgcatcctttttcggaggatggttaggcgacactctaggccggataaaagctatgctggtggccaacatcttgtccctggttggtgcgctcctgatgggctttagcaagctgggtcctagtcacatcctgatcatcgcagggcgtagcattagtgggctttattgcggcctaatatctggactcgtaccaatgtacatcggggagatcgcccccacagccctacggggagctttagggacgtttcaccaactggcaatcgtaaccggcatactgatttctcaaataatcggcctggagttcatcctaggtaattatgatctttggcacatcttgctcgggctgtccggcgtgagagcgatactccagtcactcctgctgttcttttgtcctgaatcacccaggtatctgtacattaaactggacgaggaggtgaaagccaaacagagtttaaaaaggctgcgggggtacgatgacgtaaccaaggacatcaacgagatgagaaaagagagagaggaagctagcagcgagcaaaaggtctctattatacagctgttcacaaactcttcctaccggcaacctatcctggtagccctgatgttacatgtcgctcagcagttctccggtatcaacggcattttttattattcgacctctatctttcaaactgccggcatttcaaagcccgtctatgcaactatcggcgtcggcgcagttaacatggttttcaccgccgtctccgtgtttctcgtggaaaaagctggacggcgctccctgttcctgatcggaatgagcggcatgttcgtgtgtgccatcttcatgagcgtgggtttggtcctgctgaataagttcagttggatgagttacgtcagcatgatagccatttttcttttcgtgagcttcttcgaaatcggaccaggccctattccttggttcatggtggcagagtttttttcccagggaccacgccccgccgcattggcaattgcagctttctccaattggacctgcaacttcatcgtcgcgctctgcttccagtatatcgccgatttctgcggtccatacgtattctttctgtttgcaggagttctgctagccttcacactcttcaccttcttcaaggtccccgagaccaagggtaagtccttcgaggagatagccgcagagttccagaagaagtctggcagcgcgcatcgacccaaagctgccgtggagatgaagttcctgggtgctaccgagacggtt

SEQ ID NO: 7298 - DNA, 1572 bp, Artificial Sequence
  derived and/or modified sequence
atgactgaggataaggtcaccgggacacttgtgttcactgtgattaccgccgtgctgggcagtttccaatttgggtacgatataggggtgataaatgcaccgcagcaagttattataagccactaccggcacgtgttgggcgtgcccctggatgatcgcaaggccatcaacaactacgtcattaactccaccgacgaattgcccactattagctacagcatgaatccgaagccaacgccgtgggccgaggaagagacagtggctgctgctcagctgattaccatgctgtggagtttgtcggtgtccagttttgccgtcggagggatgacagccagtttctttggcggttggctcggcgacactttaggacggatcaaagctatgcttgtggcgaatattttgtctctcgtgggcgccttactgatggggttctcgaagctggggccctcccatattctgatcatcgcaggccgaagcattagtggcctgtattgtggactcatctcaggcttagtccccatgtacatcggcgagatcgccccaactgcccttcggggcgctctaggcaccttccatcagttagccatcgttaccggcatactgatcagccagattattgggctggaattcatcctggggaactacgatttgtggcacattctgctcggcctgtcaggagttcgagctattcttcagagtctcctgttgtttttttgcccagagagcccgaggtacctctacataaaactggatgaggaagttaaggccaagcagtccttgaagaggctgagggggtatgatgacgttaccaaggacatcaacgaaatgagaaaagagagagaagaagcgtcctccgaacagaaggtgagtatcatccagctttttacgaatagctcctaccgacagcccatcctggtggctctgatgctgcatgtagcacagcagttttctggcattaacggaatattctactacagcaccagtatctttcagaccgcaggaataagcaagcctgtgtacgctactattggtgttggcgctgtgaatatggtgttcaccgcagttagcgtatttctcgttgagaaggctggacgaagaagcctgtttctgattgggatgtcaggaatgtttgtgtgcgctatattcatgagtgtgggcttagtgctgctgaataaattctcatggatgagctacgtgtccatgattgctatctttctattcgtgtcttttttcgaaattggtcctggccccataccttggtttatggtggcggaattcttttctcaagggccgagacccgccgctcttgctatcgcagccttctcgaactggacctgtaactttatcgtggccctgtgctttcagtatatcgcagacttctgtggaccgtacgtcttttttctctttgcaggcgtgctcctcgcattcaccttgttcactttctttaaggttccggagactaagggcaagtcgtttgaagaaattgccgccgaattccagaaaaagtctggttcagcccacaggcctaaggcagcagtagaaatgaaatttttaggagcaacagagaccgtg

SEQ ID NO: 7299 - DNA, 1572 bp, Artificial Sequence
  derived and/or modified sequence
atgaccgaggacaaagtgacgggaaccctagtgtttactgtgattaccgccgtcctaggtagtttccagttcggatacgatatcggggtgataaatgctccacagcaggtcatcatctctcattaccggcacgtcctgggcgtgccactggacgatagaaaagcaatcaataactacgtcatcaatagtacagacgaactgcctacaattagctactccatgaatcccaaacccaccccgtgggctgaggaggagaccgtcgctgccgctcaactgataaccatgctatggtctctatcagtcagctccttcgcggtgggagggatgacggcgtcttttttcggaggctggttaggggatactctgggcaggataaaggctatgttggtagcaaacattttgagtctggtgggcgcactcctcatgggcttttctaagctgggaccatctcacattctgattattgctggaaggtctatctcagggctttattgcggactaataagcggcctcgtacctatgtatattggcgagatagcccccaccgccctgaggggagcccttggtaccttccatcagttggctatagtcactgggatcctgatctcccaaattattggccttgagtttatcctggggaactacgacctctggcatatcctcctcgggcttagcggtgtgagagcaatcctgcaatccttgctcctattcttttgtccagagtcaccccgttatctgtacattaagctggacgaagaagtcaaggcaaagcaatctctgaagcggctgcgtggttacgacgatgtcaccaaggacataaacgaaatgcgcaaggaaagagaggaggcgtccagcgagcagaaggtgagcatcatccaactgtttactaatagctcgtacaggcagccaatcctggtggccctgatgctgcacgtggcacaacagttttcgggcatcaacggcattttctattacagtaccagtattttccagaccgctggtatatctaaacccgtttacgccactatcggcgtgggagcggtgaatatggtattcactgcagtgtccgtgttcctcgtagagaaagccggccgaagaagtctctttctcattggtatgtctggcatgtttgtgtgcgcgatttttatgtctgttggactggttctgctcaataaattctcctggatgtcttacgtttccatgatcgctattttcttatttgttagcttcttcgaaattggaccaggaccgatcccctggttcatggtcgcggagtttttctcccagggacccaggccagctgctctggcaatcgccgcattctcgaattggacctgtaatttcatcgtggcgctctgctttcagtatatagcggatttctgcggtccatatgtattcttcctgttcgccggggtccttctcgcattcaccctctttacgttctttaaagtgccggagaccaaggggaaatcatttgaagagatcgccgccgaattccagaaaaaatcaggaagcgcacaccggccaaaggcggccgtggagatgaagtttctaggcgcaaccgagactgtg

SEQ ID NO: 7300 - DNA, 1572 bp, Artificial Sequence
  derived and/or modified sequence
atgaccgaggataaagtcactggaaccctagtctttactgtgattacagccgtcctgggctctttccagttcggctacgatattggagtgattaatgctcctcaacaggtgatcatctctcattaccggcatgtcctaggagtgcctttagacgatcgaaaggccataaacaattatgtgattaactcaaccgacgagctccctacgatctcctactcaatgaatcccaaacccacgccttgggctgaagaggaaacagtggccgcagcccaacttatcaccatgctatggtcgttatcagtctcatcctttgccgtgggcggaatgaccgcatcattcttcggtggttggctcggggatacattgggtagaatcaaagcaatgttggttgccaatatcttgagcctggtgggagctctgctgatggggttctctaagctcggcccctcccacatattaatcattgctgggagatcaataagcggactctactgtgggttgatcagcggcctggtccctatgtatatcggcgaaatagccccaactgctctgcggggagccctggggacatttcaccagctcgccatagtaacaggcatccttatctctcagatcataggcttagagtttatactcggtaattatgatctttggcatatattattggggctgagtggcgtgcgggccattttgcagagcctgttgctcttcttttgccccgaatcaccacgctacctctatattaaactggacgaagaggtgaaggctaaacagtccctgaagcgactgcgcggatatgacgatgtcacaaaagatatcaatgaaatgcggaaggagagggaggaagcgtcctcagagcagaaagtctccattatacagctcttcaccaattcctcctacaggcaacctatactggtggccctaatgctgcatgtagcccagcagttctccggcattaatgggatcttttactacagcacaagcatctttcagacggccggcatctcaaagccggtttatgccacaattggggttggcgctgttaatatggtatttaccgctgtaagcgttttcctggttgagaaggctgggcggcgttccctctttctgatcgggatgtcggggatgtttgtgtgtgccatctttatgtccgtggggctcgttcttttaaacaaattcagctggatgagttacgtgagcatgatcgccatctttctgtttgtaagctttttcgagatcggaccgggaccaatcccctggtttatggtcgctgaattcttctcacaaggcccaaggcccgctgctttggctatcgctgccttctctaactggacctgtaacttcatcgtggcattatgctttcaatatatagcagacttctgtggcccgtatgtcttctttctgtttgcaggggtgttgcttgctttcacattgtttacgttttttaaggtgccagaaacaaaaggcaagtcattcgaagaaattgccgccgagttccagaaaaagtcgggctcagcccatcgtcccaaagcagcggtggagatgaagtttctcggtgccacagaaactgtg

SEQ ID NO: 7301 - DNA, 1572 bp, Artificial Sequence
  derived and/or modified sequence
atgaccgaggataaggtgacaggcaccctggtatttacggttatcactgctgtcctgggctccttccagtttggatatgacattggtgtgattaatgctccccagcaggtgattatttcacactaccgtcacgttctaggtgtgcccctggatgacaggaaagctatcaataattatgtcatcaacagtactgatgaactccctactatctcttacagtatgaatcctaagccaaccccctgggcagaagaggagacggttgccgccgctcagcttatcacaatgttatggagtctaagtgtgtcaagcttcgcagtcggggggatgaccgcatcattcttcggcgggtggcttggggataccttaggccgtattaaggctatgctggtagctaatatcttgagcctggtgggagcactgctgatggggttctccaagctcgggccatcgcacatactaatcattgctggtcggtcgatctcaggtttgtattgcggcttgatttcaggtttggtccccatgtatatcggcgagatagctcctaccgcgctgcggggcgccctcggtacctttcatcagctggccattgtgaccggtattttaatcagccagattataggcttagagtttattctaggcaactacgatctgtggcacatcctgctgggcttgagcggggtcagggccatattgcagtccctactgcttttcttttgtcctgaaagcccccgctacctttacatcaaacttgacgaagaagtgaaagcgaaacagtcacttaaaagactccgtggatacgacgacgtgacaaaggacatcaacgagatgagaaaggaacgagaggaggcatcctccgagcagaaggtcagcatcatccaactgtttacaaactcaagttaccgtcagcctatcctcgttgcacttatgctgcatgtcgcacagcagttttccggcatcaacggcattttctattactccacgtccatattccagacggctggcatcagcaagccagtatacgccaccatcggagttggtgctgtcaacatggtgttcaccgccgtgtcagtgtttctggttgagaaagcagggaggaggtccctttttctgataggtatgagtgggatgtttgtgtgcgccatatttatgtccgtgggcttggtgttgctaaataaattctcatggatgtcgtacgtttccatgattgcaatatttctgtttgtctccttctttgagattggaccaggccctatcccttggtttatggtggctgagtttttcagccagggacccagacctgcagccctggccatcgcggcgtttagcaattggacgtgtaatttcatcgtcgcgctgtgttttcagtacattgcagacttttgcggtccatacgttttcttcctcttcgccggggtgttgctggcattcaccttgttcaccttcttcaaagtgcccgagacaaaggggaaatccttcgaagagatcgcagctgaattccagaagaagagcggtagcgcgcatagacctaaggctgccgtcgagatgaagttcctcggggctacggagaccgta

SEQ ID NO: 7302 - DNA, 1572 bp, Artificial Sequence
  derived and/or modified sequence
atgaccgaggacaaggttacaggtaccctcgtgtttactgtgatcactgccgttttgggctcatttcagtttgggtacgacatcggagtcatcaacgcacctcagcaggtgattatatctcactatagacatgtgctaggcgtgccactggatgacagaaaagccattaataactacgtgatcaattcgacagacgagttgcctactatatcgtactcgatgaacccgaagcccaccccttgggctgaagaagagaccgtagcagccgctcagttaattaccatgttatggagcctgtccgtgtcctccttcgccgtgggaggcatgaccgcatccttcttcggaggctggctgggagataccctgggcagaattaaggccatgctggtcgccaatatcctcagcctggtgggcgccctgttgatggggtttagcaaactggggccctcccacatcttgattatcgccggaaggtcaattagcggcctgtactgtggtctgatcagcggacttgtacccatgtacataggcgaaattgcccctacagcactccgtggggcgctcgggaccttccaccaactggctatcgtgactggaatcctcattagccagatcattggattagagtttatccttgggaactacgacctttggcacatactgttgggcttgtcaggtgttagggccattttacagtcactgctgctttttttttgccctgagtccccacggtatctgtatataaagctcgacgaagaagttaaggccaaacagtcactgaaacgactgaggggctatgatgatgtgactaaagacattaatgagatgcgaaaagagagggaggaagcatccagcgagcagaaagtgtccataattcagttgtttacaaatagttcttatcgtcaacccatactcgtcgccttgatgctccacgtggctcagcagtttagcggcataaacgggatattttactatagcacatcaattttccaaactgctggaatctccaagcccgtctatgcaaccatcggagtgggggccgtgaacatggtcttcaccgcagtatctgtcttcctggtggagaaggccgggaggcgtagcttatttctgattggaatgtccggtatgtttgtttgcgcgatctttatgagcgttggtcttgtcctgctgaacaaattcagctggatgtcgtatgtgtccatgatcgccatctttttgttcgtctctttcttcgagataggcccgggacctattccctggttcatggtcgccgagttcttctctcaggggccccgtcccgcggctctagccatcgcagcattttcaaactggacttgcaatttcatcgtggcgctttgcttccagtatatcgcagacttctgcggaccctacgtgttttttcttttcgcaggcgtgctgctggctttcacactcttcacattctttaaggtgcctgaaactaaaggcaaaagttttgaggagatcgctgctgaatttcagaagaagtccgggagcgcccatagaccaaaggccgccgtggagatgaagtttctgggggctacagaaacagtg

SEQ ID NO: 7303 - DNA, 1572 bp, Artificial Sequence
  derived and/or modified sequence
atgacagaggacaaagtgacaggcactctggtttttaccgtgattaccgcagtactggggtcattccagttcggctatgatataggagtgattaatgctccacagcaagtcattatatcacattatcgccatgtgctgggggtgccgcttgacgaccgtaaagccatcaacaactatgtaatcaatagtacagatgaactgccaacaatctcgtacagcatgaatcccaagcccacaccatgggctgaagaggaaacagtagccgctgcgcaactaatcacaatgttatggagtctctccgtctcgtcattcgccgtgggtgggatgacagcgtcattttttggcggatggctgggagacacacttggtcggattaaagccatgctggtggcaaacattctgtcgctagttggtgccttgctcatggggttttcaaagctcggtcccagccacatcctgatcatcgcaggacggtctatctccggcctctactgcgggctgatatcaggacttgtccccatgtacattggcgaaattgcccctacagccctgcgcggggccctgggaacttttcaccagctcgcgatcgtgacagggattctgattagtcagatcatcggactcgaattcatcctgggcaattacgacctgtggcacattttactgggactcagcggtgtgcgcgccattctgcagagtctcctgcttttcttctgccccgaatccccgaggtacctgtatataaagctggatgaggaagtgaaggccaagcagagtctgaaacgcctgcgggggtatgatgacgtcacaaaggacattaacgagatgcgtaaggagagagaagaggctagtagcgagcagaaggtttctatcatccagctgttcacaaattcctcttaccggcagccaatactggtggcgttgatgctgcatgtggcccagcaatttagtggcatcaacggcattttctactactctaccagtattttccagacggctgggataagcaaaccagtctatgcgactatcggggtgggagcagtgaatatggtgttcactgccgtatctgtgttcctggtggaaaaggctggccgtcgttctttattccttatcgggatgtcaggaatgtttgtctgcgctatctttatgtccgttggactggttctgctgaacaagtttagttggatgagctatgtatctatgatagccatcttcctttttgtctccttctttgagataggaccagggcctatcccctggttcatggtagcagaatttttttcccaggggccacggccagcagcactcgctatcgctgctttctccaattggacatgcaattttatcgtggccttatgcttccaatatatcgccgacttttgcgggccctatgtattttttctgttcgcaggcgtgctcctcgcttttaccttatttacatttttcaaggtgccagagacaaagggcaagtcgttcgaggagattgccgccgagttccagaagaaaagtggatctgcacatcggcctaaggccgcggtagagatgaagtttctaggagccactgaaacagtt

SEQ ID NO: 7304 - DNA, 1572 bp, Artificial Sequence
  derived and/or modified sequence
atgactgaagataaggtcacgggcaccctcgttttcaccgtgatcactgccgtgctcggttcctttcagttcggatatgatatcggagtgatcaacgctccgcagcaagtcatcatctcacactaccgccatgtgctgggcgttccgctggacgatcgaaaggccatcaacaactacgtgatcaactccacggacgaactgcccactatctcgtacagcatgaacccaaaaccgaccccgtgggcggaagaagagactgtagcggccgcacagcttattaccatgctctggagcctgtcggtgagctcattcgcagtcggagggatgactgcgtcgtttttcggaggttggttgggagacactctcggacgcatcaaggctatgctggtcgcgaatatcctgtcactggtgggcgcgctcctgatgggcttctcgaagctcggaccatctcatatcctgatcattgctggcaggtcaataagcggattgtactgcgggttgatctctggccttgtgccgatgtacattggagagatcgccccgactgcgttgcgcggtgcgctcggaacttttcatcagctcgccatcgtgaccgggatcctgatctcgcaaatcatcggactggagtttatcctgggaaattacgacctgtggcacatcctccttgggctttcgggcgtgagggccatccttcagtcgctgctgctcttcttttgtcctgagtccccgcgctacctgtatatcaaactggacgaagaggtcaaggcaaagcagtcgctgaaacggctgagaggatacgatgatgtaacgaaagacatcaacgagatgagaaaggaacgggaagaagccagctcggagcaaaaggtgagcatcattcagttgtttaccaatagttcgtaccggcagcctatcctggtggctctgatgctccacgtggctcaacagttcagcggtatcaacgggattttctactactccacctccatcttccagactgcgggaatctcaaaacccgtgtacgcaaccattggagtcggagccgtgaatatggtgttcaccgccgtttcggtctttctggtcgaaaaggccggccggagatccctcttcctcatcggcatgtcagggatgtttgtctgcgcgatcttcatgagcgtgggcttggtgctgctgaacaaattctcatggatgtcctacgtgtccatgatcgccatcttccttttcgtgtcgttcttcgagatcggccccggaccaattccttggttcatggtggcagaattcttttcccaaggaccgcggccagctgccctggcaattgctgccttctcaaattggacctgcaacttcatcgtcgccctctgcttccagtacattgcagacttctgtggtccatacgtgttctttctgttcgccggagtgctcctggccttcaccctcttcaccttctttaaggtgccggaaactaagggaaaatcctttgaagagatcgcagcagaattccaaaagaagtccggaagcgctcaccgccctaaggcggccgtggagatgaagttcctgggggccaccgagactgtc

SEQ ID NO: 7305 - DNA, 1572 bp, Artificial Sequence
  derived and/or modified sequence
atgaccgaagacaaggtgaccggaacgttagtgtttacagtcatcacagccgtcctcggtagctttcaatttggctatgatatcggggtgattaacgcccctcagcaggtgataataagccattacaggcacgtcctgggtgtgccactcgatgaccgcaaggccataaacaactacgtcatcaacagcacggacgagctccccacgatcagttactctatgaatcccaaacccacaccctgggccgaggaggaaactgtcgcagccgcccagctcattacaatgctctggtccctcagtgtgagctcttttgcagtcggtgggatgactgcctctttttttggaggttggcttggcgacacactggggaggatcaaagccatgttagtggcaaatatcctgtccttggtaggggccctgctcatgggcttcagcaagctggggccctcccacatcttaattatcgccgggagaagcatcagcggcctttactgcgggctcatctccggacttgtgcccatgtatatcggtgagattgctcctactgctctgcgaggtgccctggggacatttcatcaactagcaatcgtaacaggcatactgatctctcagatcatcggcctggaatttatcctgggcaactacgatctgtggcatatcctgctcggtctcagcggcgtgagagctatccttcagtcattattgctgttcttctgtccggaaagtccgcgctatctttatatcaagcttgacgaagaggtgaaagccaaacaaagtctgaagagactgagaggctacgatgacgtgacgaaggatatcaatgaaatgagaaaggagagagaggaagcctctagcgaacaaaaggtcagtatcatccagctctttaccaattcaagttatcggcaacccattctggttgccttgatgctgcacgtggctcaacagttttccggcattaatggtatattctattatagcacaagtatatttcagacagctggcatttccaaacctgtgtatgctacaatcggcgtgggtgccgtgaatatggtcttcaccgcagtgtctgtatttctggtggagaaggccggacgtcgctcattgtttttaattggcatgtcagggatgtttgtgtgcgcgatattcatgtccgttggactggtgctgctcaacaaattcagttggatgtcctatgtgagtatgatcgcaatctttctgttcgtgtccttctttgaaataggacctggaccgattccttggttcatggtcgccgagtttttttcccaggggccaagacctgctgctttggctatagcagctttctccaactggacgtgtaatttcatcgtcgccctctgctttcagtacattgccgacttttgtggcccctatgtgtttttcctgttcgcaggggtcctcctcgcctttacactgtttacattttttaaagtgccagaaaccaagggtaagtcctttgaggaaatcgccgcagagttccagaagaagtctggaagtgcacacaggcccaaagcggccgttgaaatgaaattcctgggagctaccgaaactgtg

SEQ ID NO: 7306 - DNA, 1572 bp, Artificial Sequence
  derived and/or modified sequence
atgacagaggacaaagttaccggaaccttggtgtttacagtgattacagcagtgctcggctccttccaatttggatatgatataggggtgatcaacgcccctcagcaggtgatcattagccattaccgacacgtgttgggagtccctctggacgatcgcaaagcgatcaataactatgttattaacagtactgatgagttgccgaccatctcctactctatgaaccctaagccaaccccttgggccgaggaggagaccgtcgcagctgctcaactgattactatgctgtggagcctgagcgtgtctagctttgctgtgggcggaatgacagcgagctttttcgggggctggctgggcgacactttaggccgtataaaagctatgcttgtggctaatattctgagcctggttggagcactcctcatggggttcagcaagctcgggcccagccatatacttattattgcagggcgctctatcagtggcctgtactgtggtctgatttccgggttagtgcctatgtatatcggtgagatcgcgcccaccgcgttgagaggcgcgctgggaacattccatcagctggccatcgttaccggcatcctgatatcacagattattgggcttgaatttatcctaggaaattatgacctgtggcacatcctgttgggactctcaggtgtgcgtgcaatcctccagtctttattgctgttcttctgtcctgaatctcccagatatctctacatcaagctggatgaagaggtgaaagctaaacagtcactgaagcgcctgcggggttatgatgatgtaacgaaggacatcaatgagatgcggaaggagcgagaagaagcttcctcggagcagaaggtctccataattcagctcttcaccaactctagctaccgacagcctattttggtcgcattgatgttgcatgtagctcagcagttctccgggatcaacggtattttctactactctacatctatcttccagaccgccggaatcagtaaacctgtttatgctacaattggtgtcggcgccgttaatatggtgtttacagctgtctcggtcttcctggtcgaaaaggcaggacgacgttcgctattcctcatcggcatgagcggaatgttcgtctgcgctatattcatgtccgtgggactggtgctactaaacaagttctcatggatgtcgtacgtgtctatgattgccatcttcttgttcgtgtctttcttcgaaattggcccagggcctataccctggttcatggtggcagaatttttctcacagggtcccaggcccgcggctctggcaatcgccgcttttagcaactggacgtgcaactttatcgtggcactgtgtttccagtacatcgccgacttctgtggtccctacgtgttctttctgttcgcaggcgttctgctggcctttactttgttcacatttttcaaagttcctgagaccaaggggaagagctttgaggaaatcgccgccgaattccagaagaaatccgggtccgctcatcggcctaaagctgccgtggagatgaaattcctcggagctactgagactgtc

SEQ ID NO: 7307 - DNA, 1572 bp, Artificial Sequence
  derived and/or modified sequence
atgacggaagataaagtaacgggtacgttagtttttacggttataacggcggttctaggttcgtttcaatttggttatgatataggtgttataaatgcgccgcaacaagtaataatatcgcattatcgacatgtattaggtgtaccgctagatgatcgaaaagcgataaataattatgtaataaattcgacggatgaattaccgacgatatcgtattcgatgaatccgaaaccgacgccgtgggcggaagaagaaacggttgcggcggcgcaactaataacgatgttatggtcgttatcggtatcgtcgtttgcggttggtggtatgacggcgtcgttttttggtggttggttaggtgatacgctaggtcgtataaaagcgatgttagtagcgaatatattatcgttagtaggtgcgttattaatgggtttttcgaaattaggtccgtcgcatatactaataatagcgggtcgttcgatatcgggtttatattgtggtctaatatcgggtttagtaccgatgtatataggtgaaatagcgccgacggcgttacgtggtgcgttaggtacgtttcatcaattagcgatagtaacgggtatattaatatcgcaaataataggtctagaatttatactaggtaattatgatttatggcatatattattaggtctatcgggtgttcgtgcgatattacaatcgctactactatttttttgtccggaatcgccgcgttatctatatataaaactagatgaagaagttaaagcgaaacaatcgctaaaacgtttacgtggttatgatgatgttacgaaagatataaatgaaatgcgaaaagaacgtgaagaagcgtcgtcggaacaaaaagtatcgataatacaattatttacgaattcgtcgtatcgacaaccgatactagttgcgttaatgctacatgtagcgcaacaattttcgggtataaatggtatattttattattcgacgtcgatatttcaaacggcgggtatatcgaaaccggtatatgcgacgataggtgttggtgcggtaaatatggtttttacggcggtttcggtttttctagttgaaaaagcgggtcgacgttcgttatttctaataggtatgtcgggtatgtttgtatgtgcgatatttatgtcggttggtttagttttattaaataaattttcgtggatgtcgtatgtttcgatgatagcgatatttttatttgtttcgttttttgaaataggtccgggtccgataccgtggtttatggtagcggaatttttttcgcaaggtccgcgaccggcggcgctagcgatagcggcgttttcgaattggacgtgtaattttatagttgcgttatgttttcaatatatagcggatttttgtggtccgtatgttttttttctatttgcgggtgtattattagcgtttacgctatttacgttttttaaagtaccggaaacgaaaggtaaatcgtttgaagaaatagcggcggaatttcaaaaaaaatcgggttcggcgcatcgaccgaaagcggcggtagaaatgaaatttttaggtgcgacggaaacggta

SEQ ID NO: 7308 - DNA, 1572 bp, Artificial Sequence
  derived and/or modified sequence
atgactgaagataaagtcacaggcaccctggtgttcactgtgatcaccgcggttttgggttcctttcagttcggctacgatattggcgtgatcaacgcgccccagcaggtaattatttctcattaccgccacgtacttggcgtacccttggatgacagaaaggctatcaataattacgtcatcaattccaccgatgaactgcctactatctcatacagcatgaatccaaagccaacaccctgggctgaagaggagacagttgctgcagcccaactgatcacaatgctgtggagcctctccgtgtctagttttgctgttggtggaatgacagcgagcttcttcggaggttggttgggtgacactctgggtaggattaaggcgatgctggtggcgaatatcctgagcctggtgggtgcgctgttgatgggtttttcaaagctgggccctagtcacattctcatcatagccggaaggtctatcagcggactttactgtggactgatatctggtctggtgcccatgtacataggcgagatcgcgccgacagctctcagaggagcattgggaacattccaccagctggctattgttacaggaattctgatctcccagatcatcggactggagttcatcttgggcaactacgacctctggcacatcttgctcggactcagcggtgtcagagccattttgcagagtctgctcctctttttctgtcccgagtcccctagatacttgtacatcaaactggatgaggaagttaaagcaaagcaaagcctgaagagattgcgcggatacgatgatgtgacaaaggacattaacgaaatgcgcaaggaacgcgaagaggcatctagcgagcagaaggtctctatcatccaattgttcactaactcttcctaccgccagcctattttggtagccttgatgctgcacgtggcccagcaattttcaggaattaacggcattttttactactcaacctccatttttcagacggcgggaatctctaagcccgtctacgctacgatcggcgtcggtgcggtgaacatggtgttcactgctgttagtgtattcctggttgaaaaagccggcaggcgctcacttttcctcattggtatgtccggcatgttcgtttgcgcaattttcatgagcgtaggattggtgctgctcaataagttcagctggatgagctacgtcagtatgatcgcgatattcctgttcgtgagtttcttcgagatcggacccggcccgattccgtggttcatggtcgcagaatttttctcacagggcccccgcccggccgcattggcaattgccgctttctctaactggacctgcaatttcattgtagcactctgctttcagtacatcgccgacttttgcggcccttacgtgtttttcttgtttgcaggtgttcttctcgcattcaccttgtttaccttcttcaaagtgcctgagaccaaaggcaagtccttcgaagaaatcgcagctgaattccagaaaaagagcggctccgcccatcgccccaaggccgccgttgagatgaagtttctgggtgccaccgaaaccgtg

SEQ ID NO: 7309 - DNA, 1572 bp, Artificial Sequence
  derived and/or modified sequence
atgactgaagacaaagttaccggaactcttgtttttactgtgatcacggcagtgttaggatcttttcagttcggatacgatatcggagtaattaacgcgccacagcaggtcattatttcgcactacagacatgttctgggtgttcctttagatgataggaaggctattaataattacgttattaattcaaccgatgaattgcctactatcagctatagtatgaatcctaaacctaccccgtgggccgaagaagagaccgttgcagctgctcaactgattaccatgctttggagcctttcagtttctagtttcgcagtgggcggtatgactgcaagtttttttggcgggtggctgggtgatacgttggggagaattaaagcaatgttggttgccaacattctttcattggtcggagcccttctcatgggatttagtaagttgggaccctctcatatccttataatcgccggtcgtagtatcagcggactttattgcggtctcataagcgggcttgttcccatgtacattggagaaatcgcgccaacggcactaagaggtgctcttggaacctttcaccagctggcaattgtaactgggattttaatatcgcaaatcatcggacttgaattcattttgggtaattatgatctatggcacattcttcttgggctgtcaggtgttcgagccatactccagagtttgttgctttttttttgcccagagagtccgcgttacctttacatcaaactcgacgaagaggttaaggccaaacagtcattgaaacgattgcgcgggtatgacgacgtcactaaagacattaatgagatgcgtaaggagcgagaagaagcaagcagtgagcagaaggtttcaattatacagttatttacaaactcctcttatcgccaaccaattctagttgcccttatgctacatgttgcacagcagttcagcggtataaatggaattttctactattccacatctatatttcagacggctggtatatcaaaacctgtgtacgctacgataggcgttggtgcagtgaatatggtgtttacagccgtaagcgtttttctcgtggaaaaagcaggtcgccgaagtctgttccttattggaatgtccgggatgttcgtttgcgcaatattcatgagtgtcggcttggttcttcttaataagttctcctggatgagctacgtttccatgattgcgattttcttatttgttagctttttcgaaattgggcctggtccaatcccttggtttatggttgcagagttcttttcacagggaccgcgccccgctgctcttgctattgcagctttctcaaactggacttgcaacttcatcgtagccctttgcttccaatacatcgctgatttctgtggaccatacgtcttctttctctttgcgggagtgttgcttgcctttacattgtttactttttttaaagtccctgaaacaaagggaaaaagctttgaggagattgccgcggaattccaaaagaagtccggaagtgctcataggcccaaagcggcagtggagatgaagtttcttggggctacggaaactgtg

SEQ ID NO: 7310 - DNA, 1572 bp, Artificial Sequence
  derived and/or modified sequence
atgactgaggacaaagtgacagggacactggtatttacagtgataacagcggttttgggtagttttcaatttgggtatgacattggggttatcaacgcgccgcagcaggtgatcatttcgcactacagacacgtactcggggtgcccttggatgacaggaaggccataaataactacgtcatcaatagcaccgatgagctgcctacaatctcttacagtatgaaccctaaaccaacgccttgggctgaagaagaaacagtagcagccgcccagctcatcaccatgctctggtccctcagtgtgtcttccttcgcagtaggaggtatgactgccagctttttcggcggatggctgggagatacgcttggacgcatcaaggcgatgctggtggccaacatcctgtctcttgtcggcgccctccttatggggttctccaagctggggccatcccacatcctgataattgcaggacgaagcatttctggactatactgcggcctgatctccggactggtgcctatgtatatcggcgagattgcaccaaccgcccttcggggagcgctgggcaccttccatcagctagctattgtcacaggcatcctcataagtcaaatcatcggcctcgagttcatcttgggcaattatgatttgtggcatatattactgggactgagtggcgttcgagccatccttcagtcactcctgctctttttttgtccggagtcacccaggtatctgtacattaagttggatgaggaggttaaggccaaacagagcctgaaaaggcttaggggttacgacgacgtgacaaaggatattaacgagatgcgaaaggaaagggaagaagcttcttcagagcagaaggtgtcgatcattcaactgttcactaacagttcatatcgacagccaatcttggtggcgctgatgcttcatgtggctcagcagttttctggcataaacggtatcttctactacagcacatcgattttccaaacagccggtatctccaagccggtgtacgcaaccatcggcgtgggcgctgttaacatggtgttcactgctgtctccgtgttccttgtggaaaaggccggtcgcagatcattgtttctcattgggatgtctggcatgtttgtgtgcgctatctttatgtcagttgggctggtgttactgaataagttttcttggatgtcgtacgttagcatgatcgccatctttctgttcgtaagtttttttgaaatcggccctggcccaatcccttggtttatggtagcagaattctttagccagggaccccgacccgctgccttagcaatcgccgcgttcagtaattggacttgtaacttcattgtggcactgtgctttcagtatatcgcagacttttgtggcccctacgtgttcttcctctttgctggcgttctgctggccttcactctattcacatttttcaaggtgcccgagaccaagggcaaatctttcgaggaaatcgcagctgagtttcaaaagaaaagcgggagtgctcaccgcccaaaggccgcggttgaaatgaagttcctcggagccactgaaaccgtg

SEQ ID NO: 7311 - DNA, 1572 bp, Artificial Sequence
  derived and/or modified sequence
atgaccgaggataaagtcacaggaactttggttttcaccgtgataacagccgtactggggtctttccagtttgggtatgatatcggggtaattaatgcaccacaacaagtgatcatttcccattatcggcacgtgctcggcgtccccctggatgatagaaaagccatcaataattacgtgattaacagcactgacgagctgcccaccatctcatacagcatgaatccaaagcccactccatgggctgaggaggaaactgtggcagctgcccaactcatcaccatgttgtggtccctgagcgtgagcagcttcgctgttggggggatgaccgcctcttttttcggcggctggttaggagataccctcggccgaatcaaggcaatgcttgtagccaacattctctcgctcgttggtgcgctgctgatgggattcagcaagctgggcccctctcacatcctaatcatagcagggaggtcaatctctggcctgtactgtgggctcattagtggtctggtacctatgtatattggggaaattgctcctaccgcgctgaggggtgcgctgggtacctttcaccaacttgcaatagtgaccggaatcctaatttctcaaattattggcctggagttcatactgggcaattatgatctctggcatatcctgctggggttgtcgggcgttagggccattctacagagcctgttgttattcttctgtcccgagtctcctaggtacctgtacataaagttggacgaggaggttaaggcgaagcaatccctcaaacggctgagaggctatgacgacgtgacaaaggatattaacgaaatgcgaaaagaacgtgaggaggccagttctgagcagaaagtcagtatcatacagttgttcacaaattcttcttacagacaacctatcctcgtcgccctgatgcttcacgtggcacaacagttttccggaatcaatggcattttttactattcaacgtcaatatttcagaccgcaggaatctctaaacccgtgtatgctaccatcggagttggtgcagtgaatatggtttttacagcagtgtctgtattcctcgtcgaaaaagctggccggaggagcctgttcctaattggaatgtctgggatgtttgtctgtgccattttcatgtctgttggattggtcctccttaataagttctcatggatgtcttacgtgagtatgatcgcgatttttctgtttgtttcgtttttcgaaattggacccggtccaattccctggtttatggtggcagaattcttctcacaggggcctaggcccgcagccttagctattgccgctttctccaactggacatgcaactttattgttgccctttgcttccagtatattgccgacttctgcggaccctatgtattttttctttttgctggagtgttgttagcgttcacccttttcactttcttcaaagtgcctgagactaagggtaaatcattcgaggagattgccgctgagtttcagaaaaaaagcggcagcgcccataggccaaaggccgccgtggagatgaagtttctgggagcgacagaaactgtg

SEQ ID NO: 7312 - DNA, 1572 bp, Artificial Sequence
  derived and/or modified sequence
atgacagaggataaagtaacaggaacattggtcttcacagtaattaccgcagttcttggaagcttccaatttggctatgatattggcgtgatcaatgctccgcagcaggtaatcatctcccattaccgtcatgtgttgggcgtcccgcttgatgatagaaaagccatcaataattatgttatcaattccacagacgaattaccgacgatcagctattctatgaatccgaaacctactccatgggcagaggaagagacggtcgctgccgcccaattaattacaatgctttggtcccttagtgttagctcgttcgccgtggggggtatgacagcgtcgtttttcggaggatggcttggtgacacactcggacggataaaagcgatgcttgttgcaaatatactgtcattggtcggagccctcctgatggggttctctaaattgggcccatcacatattctgattatagccgggcgctctatctctggattatattgcggactgatttcaggcttagttcccatgtatattggtgaaattgcacctacagctctgagaggtgctctcgggacgtttcatcagttggcaatcgttacaggaatcctgatttcacaaatcattggcctggagtttattctgggaaactacgatctgtggcatattttgttgggcctgtccggagtcagggcgattctgcagtcattgcttttgtttttttgccctgagtctccgagatacttatatataaaacttgatgaggaggtcaaagcaaaacagagccttaaacgattacgaggttatgatgatgtcacaaaagacataaatgagatgagaaaagaaagagaagaagcttcgagtgaacaaaaggtgtcaatcatccaactcttcaccaactcttcttatcgtcagccgattttagttgcattgatgctgcacgttgcgcagcaattttctggtattaacggaatattttattattcaacttctatctttcagactgcagggataagcaaaccggtatatgcaacaattggagtcggcgcagtcaacatggtctttacagcggtctccgtttttcttgtagagaaagctggaagacgctctttatttcttatcggcatgagtggcatgtttgtctgcgccatcttcatgtccgtgggcttagtgttgctcaacaagttcagctggatgtcttatgtgtcaatgatcgctattttcctttttgtttcgttttttgaaatcggacctggtcctatcccatggttcatggtcgccgaatttttttcacaaggtccgcgacctgcggccttggcaatcgcggctttttctaactggacgtgcaactttattgtggcattgtgctttcagtatattgcggatttctgtggcccgtatgtctttttcctctttgcgggcgttctgctggcttttacattgtttacgttttttaaagttccggaaacaaaaggcaaatcttttgaagagattgccgctgaattccagaaaaaaagcggctctgcacatagacctaaagcagcagttgaaatgaagtttttaggcgccaccgagactgtt

SEQ ID NO: 7313 - DNA, 1572 bp, Artificial Sequence
  derived and/or modified sequence
atgaccgaagataaggtgacgggcacattggttttcacagtaattacagccgttcttggttcctttcaatttggctatgatataggggttatcaatgcaccccaacaggtgattattagtcactatagacatgtgctgggagttcccctggacgatcgaaaagcaataaacaattatgtgatcaattctaccgacgagttgccgactatttcctactccatgaaccctaaaccgactccgtgggccgaggaggagactgtcgcagccgcacagttgatcaccatgttgtggagtttgagcgtgagcagcttcgctgttggcggaatgactgcgtccttctttggtgggtggctgggagacaccctgggcagaatcaaagcgatgcttgtggcgaacatcttgagcttagtgggagctctcctgatgggattcagtaagttaggtcctagccatattctcatcattgccggccgctctatttccggtctgtactgtggcctgatatccggcctggttcccatgtacatcggcgagatcgctcctaccgctctaagaggtgcacttggtacgttccatcagctggccatcgtcactggcattctgatttcccaaattatcggcctagaattcattctgggcaattacgatctgtggcacatcctccttggtctctctggagttagggcgatcctgcagtcactcctgctgtttttttgtcccgagtcaccccgatatctgtatataaagctggacgaggaggtgaaagccaaacagtcactgaagaggctccgagggtatgacgacgtgacaaaggatattaatgaaatgaggaaggaaagggaagaagctagttctgaacagaaggtaagtatcatacagctcttcaccaactcctcgtacaggcagcccattctggttgctttgatgctgcacgtggcccagcagttcagcggcatcaatggcattttctattatagtacctcaatctttcaaactgcagggatctccaaaccagtatatgccacaattggagttggcgctgtgaacatggtcttcacagcagtatccgtctttttggtggaaaaggcagggagacgaagcctgttcctgatcggcatgtccggaatgttcgtgtgtgcaatattcatgagcgtgggactggtcctattgaacaagttttcttggatgagttacgtttcgatgatagctatcttcctcttcgtgagcttctttgagataggaccggggcccatcccatggttcatggtcgccgagttctttagccaggggcccagacctgccgcattagccatcgctgccttcagcaattggacttgtaacttcatcgttgcactttgtttccagtacattgccgacttttgtggtccctacgtattcttcctttttgcaggcgttctgctggccttcaccctgtttacttttttcaaggtcccggagactaagggcaagtcattcgaggagatcgccgctgaatttcaaaaaaaaagtggctcagctcacagacccaaggcagctgtcgaaatgaagttcctcggagctacagaaacagtg

SEQ ID NO: 7314 - DNA, 1572 bp, Artificial Sequence
  derived and/or modified sequence
atgactgaagataaagtaactggaacattagtatttactgttattacggcagtcttaggaagttttcaatttggatatgatattggagttataaatgcaccacaacaagttataatttcacattatagacatgttttaggagtaccattagatgacagaaaagcaatcaataattatgttattaattcaacagatgaacttcctactatatcatatagtatgaaccctaaaccaacaccttgggctgaagaagaaacagttgcagctgcacaacttattacaatgctttggagtttatcagtttctagttttgcagtaggaggaatgactgcatcattcttcggaggttggttaggtgatacacttggaagaataaaagcaatgttagttgctaatattcttagtctagttggtgctcttttaatgggattttcaaaattaggaccaagtcatattcttattattgccggacgttctatttctggattatattgtggtttaatttctggattagttccaatgtatattggagagattgctccaactgctcttagaggagcattaggaactttccatcaactagcaattgttacaggtattttaatttctcaaattattggattagagtttattttaggtaactatgatctttggcatattcttttaggattatcaggagttagagcaattcttcaatcattattattattcttctgtccagaatctccaaggtatttatatattaaacttgatgaagaagttaaagctaaacaaagtctaaaacgtctccgtggatatgacgatgttactaaagatattaatgaaatgagaaaagagagagaagaagcatcttcagaacaaaaagtttcaataattcaattatttacaaatagtagttatagacaaccaattcttgttgctttgatgttgcatgtggctcaacaattttcaggtattaatggaattttctattattcaacatctatttttcaaactgctggaatatcaaaacctgtttatgcaactattggagttggagccgtaaacatggtattcacagctgtatctgtttttttagttgaaaaagcaggaagaagatcattatttttaattggaatgtcaggaatgtttgtttgtgcaatctttatgagtgttggattagttttattaaataaatttagttggatgtcatacgtaagtatgattgctatttttttatttgtttcatttttcgaaattggaccaggtccaattccttggtttatggttgctgaatttttcagtcaaggaccaagaccagccgcacttgctatagcagcattttctaattggacttgtaatttcatagttgctttatgctttcaatatattgcagatttttgcggaccatatgttttttttttatttgctggagtactattagctttcactttgtttacattttttaaagtaccagaaacgaagggaaaatcattcgaagaaattgcagcagaattccaaaaaaaatcaggatcagcacatagacctaaagcagctgttgaaatgaaatttcttggagcaacagaaacagtt

SEQ ID NO: 7315 - DNA, 1572 bp, Artificial Sequence
  derived and/or modified sequence
atgactgaagataaagtaacaggaacacttgtgttcactgtcataacagccgtactgggatcctttcagtttggatatgatataggagtaattaacgctccacagcaggtgataatctcccactataggcacgtgctaggagtcccacttgatgatcgaaaagccataaataattatgtcatcaactccactgatgaactgcctactatttcttactcaatgaatcctaaacctacaccatgggccgaagaagaaactgttgctgcagctcagcttatcacaatgctatggtctctctccgtgtcctcttttgcggtgggagggatgactgcttccttttttggaggatggttaggggatactctcggacggatcaaagccatgctggttgctaatatattaagtctagtgggggccctcctcatggggttctccaagctggggccttcccatatactcataatcgcaggacggtccatatcaggactttattgcggactcatatcaggattggtacccatgtatataggagaaatagcccctacagccctccggggagcgcttgggacattccatcagctcgcgatcgttactgggattctaatatcccaaataatcgggcttgagttcatacttgggaactatgatctctggcacatcttactcggactttctggagtaagagcaatactgcagtccctactgctattcttttgtccagaatcaccaaggtatctttatatcaaattggatgaagaagttaaagcaaaacagagtttgaaacggttacgtgggtacgatgatgtaactaaagatattaacgagatgaggaaagaacgggaggaagcatcctctgaacagaaagtgagtataattcagttgtttacgaattcctcatacagacagcccatactggtagctctcatgctacatgttgctcagcagtttagtggaatcaacggaatcttctattattctactagtattttccagacagctgggatttccaaacctgtgtacgcaacaataggagttggagccgttaacatggtgtttactgctgtctctgtgttcctagttgagaaggcagggcggagaagtctgttcctcatcgggatgtctggaatgttcgtctgtgctatatttatgtctgtagggctcgtgctactcaataaattttcctggatgtcctacgtatccatgatagctatcttcctattcgtgtccttttttgaaatagggcctggacccataccttggttcatggtagctgaatttttttcccagggacctagacccgcagccctggcaatagccgcattctccaactggacttgtaactttatcgtggccctttgtttccaatatatagcagatttctgcggaccttatgtcttctttctcttcgccggggtactactagcttttacacttttcactttcttcaaagtccccgaaactaaagggaagagtttcgaggaaattgccgcagaattccagaaaaaaagtggatcagcccataggcccaaagccgcagtagaaatgaagttcttgggagcaacagaaacagta

SEQ ID NO: 7316 - DNA, 1572 bp, Artificial Sequence
  derived and/or modified sequence
atgactgaggataaagtgacagggacattggtgtttacggtgattacagccgtgttaggatcattccaattcgggtacgatataggcgttattaacgcacctcagcaagtgattatctcccattaccggcatgtgctgggcgtgcccctggatgacaggaaggccatcaacaactacgtgatcaattcaacagacgagctaccaacaatttcatatagtatgaacccaaagccgacgccatgggcagaggaagaaaccgtggcagctgcacagttgatcactatgctctggtcccttagtgtgagctcgttcgcggtaggtggcatgacagcgtccttctttggggggtggttaggggacaccttgggtcggatcaaggccatgctggtcgccaacattctttctctcgttggtgccctcctcatgggattttctaaactcggcccttcccacattttgataattgccggccgctcaattagcggactgtactgcgggctgataagcgggctggtgcccatgtatatcggcgagatcgccccaaccgcacttagaggggctctaggcacctttcaccagctcgcaattgtgacaggaattttgatctcacaaatcataggactggagttcatcctgggaaattatgacttatggcacatcctcctcggactctctggcgtgagagcgatcctgcagtcgctgctccttttcttttgccctgagagcccacgctacctttacatcaagctagatgaggaagtcaaggcgaagcagtctcttaagaggctgcgggggtatgatgacgtgactaaagacattaacgaaatgcggaaagagagggaagaggcgtctagtgaacagaaggtgagcataattcagctcttcacgaacagttcttacaggcagccaatcctagttgccctgatgctgcacgtggctcagcaatttagcggcataaacggtatcttttattactcaacttcgatattccagacggccggcatcagtaaaccggtatatgccacaattggggtgggcgcagtaaacatggtcttcactgctgtctctgtcttccttgtcgagaaggcgggacgtcgaagcctgtttctgatcggaatgtctgggatgtttgtatgcgccatttttatgtccgtggggctggtcctgctgaacaagttctcttggatgagttatgtcagcatgattgccatttttctctttgtgagctttttcgaaattggcccaggaccaatcccatggtttatggttgcagagttcttttcacagggcccccgccctgccgcactggccatcgcagccttttccaactggacctgtaattttatcgtagctctgtgcttccagtacattgcagatttctgtggcccctatgtgttctttctgttcgctggcgttctgctggccttcacactttttacattctttaaagtgcctgaaacaaagggcaagagctttgaagagatcgccgcagaattccagaagaaaagtggtagtgctcatcgccctaaggcggccgtggaaatgaaattcctcggggcaacagagactgtc

SEQ ID NO: 7317 - DNA, 1572 bp, Artificial Sequence
  derived and/or modified sequence
atgaccgaagacaaggtgaccggcactctggttttcacagttatcaccgccgtcctgggatctttccagttcggatatgatattggcgtgatcaacgcgccccagcaggtaatcataagccactatcgacacgtgctcggggtcccactagacgacagaaaggcaataaacaactacgtgattaactctactgacgagctgccaaccatctcgtattcaatgaatcccaagccgacaccctgggcggaggaggaaactgtggctgctgcccaactgataaccatgctctggagtctatctgtctccagctttgcagtagggggtatgacagcttccttctttggaggctggctgggggacactcttggccgcattaaggctatgttggtagcaaacatcttatcattggtcggggctctgctgatgggctttagtaagttaggtccttctcacattctgataattgcaggcagatcaatcagcggactgtattgtgggctgatcagcggtctggtgcctatgtacataggagagatcgcacctacagcactgcgcggggcacttggaacatttcatcagttggccatcgtgactggcattctgatttcccagatcattggccttgaattcatcctagggaactacgacctctggcacatcttgctgggactgtccggagttcgagctatcttgcagtcgctcttgctttttttttgccctgagtccccacgttacctgtatataaagttagacgaagaagttaaggccaagcaaagtttaaaacgattaaggggctatgacgatgtcaccaaggacattaacgagatgcgcaaggagcgggaggaggcaagtagcgagcagaaggtgtctatcatacagctatttacaaactccagttaccgacagcctattctggtggcgctgatgctgcacgtggcccaacaattttccggaattaacggaatattttattattctacctctatcttccagactgccggcattagtaaacccgtgtatgctaccatcggcgtgggagccgttaatatggtatttaccgcagtaagtgtgttcctcgtggagaaggcggggaggaggtcactatttctcattggtatgtctggcatgttcgtatgtgccatttttatgtccgtgggcctggtgctattgaacaagtttagttggatgtcttatgtttctatgattgcaatttttctgtttgtgtcgttctttgaaataggtcccggaccaataccgtggttcatggtggccgagtttttcagtcagggtccccgaccagccgctctggcaatcgcggccttctctaactggacatgcaatttcatagtggctctttgctttcagtatatcgcagatttttgcggcccgtatgtattcttcttattcgccggggtgttgctcgcttttaccctttttaccttcttcaaggtccctgagactaaggggaagagcttcgaggagattgccgcagaattccagaagaaatcagggtccgcccaccgaccaaaggccgcagtggaaatgaaattcttgggagccaccgagacagtt

SEQ ID NO: 7318 - DNA, 1572 bp, Artificial Sequence
  derived and/or modified sequence
atgacagaagataaagtgactggcacattggtgttcaccgtgattactgctgtgctcggttcatttcagttcggatacgacatcggcgtgattaatgcaccccagcaggtgattatcagtcattatagacacgtgttgggagtgccactcgatgataggaaggcaataaacaattatgtcattaactccacagatgaattacctacaataagctactctatgaaccctaagcctaccccatgggccgaggaagagaccgtggcagccgcccagctcattactatgctgtggtctctctcagtgtctagttttgcagtgggcgggatgactgcctcattttttggcggctggctgggggacaccctggggcggattaaggccatgctggtcgcaaacattctgtccctcgtgggtgccctcctcatgggctttagcaagctcggaccaagtcacatcctgatcattgccggaagaagtatcagcggtctatactgtggcctgatttcaggcctggtgcccatgtatatcggcgagatcgcacctacggcactacggggtgccctgggtacctttcaccagctcgccattgtgaccggaatactgatctcccaaattataggactggagttcatcctaggtaactacgacctgtggcatatcctgcttggcctttcaggtgtgcgtgccatcctgcaatcgcttcttctgtttttctgtcccgaaagtccccgctatttatacataaagttggatgaagaggtgaaagccaagcaatctctcaagagattacgcggctacgatgatgtcaccaaagacattaacgaaatgcggaaggagcgggaggaggcctccagtgagcagaaggtgtccatcattcagctgttcacaaactcttcctataggcagcccattcttgtcgctttaatgctccacgtcgctcagcagttctccggtataaacggtatcttctactacagcacatcgatcttccagactgccgggatcagcaagccagtctatgctacaatcggagttggcgcagtcaatatggtgttcaccgcagtcagcgtgttcttagtcgaaaaagcagggcgtaggtccctttttttgatcggaatgtcaggaatgtttgtgtgtgctatctttatgtctgtgggtttggtcctcctgaacaagtttagttggatgtcatacgtcagtatgattgcaatttttctatttgtaagcttctttgaaatcggacccggccctattccttggtttatggtcgctgaatttttttcgcagggacctagaccagccgctctagcaatcgcggcctttagcaactggacttgcaattttatcgtcgccttatgcttccagtacattgcagacttctgtggcccgtatgtgttttttctgtttgcaggcgtcttgcttgcgtttaccctcttcacatttttcaaagtcccagagaccaaagggaagtcatttgaagagatcgccgcagaatttcagaagaagtccggtagcgcccacaggccaaaggctgccgttgaaatgaagttcctcggggccaccgagacagtt

SEQ ID NO: 7319 - DNA, 1572 bp, Artificial Sequence
  derived and/or modified sequence
atgacagaggacaaggttacaggaaccctggtgttcaccgtaatcaccgcagtactgggcagttttcagttcgggtatgacatcggggtaatcaacgcccctcagcaggtgattatctcacactatcggcatgtgctcggggtcccccttgatgatcggaaggccataaacaactacgtcattaattctacagatgaactacctacaatttcttattctatgaatcccaaacctaccccatgggcggaggaagagacggtggccgccgcccaactgatcacaatgctctggtcactctcggtttcatcattcgccgtcggcggcatgaccgcttcctttttcggaggatggctgggcgatacactgggccgcataaaggcaatgctggtggcgaatatactctcattggtgggcgcactcctgatgggattcagtaagctgggaccctcccacattctcatcattgctgggagaagtatctctggactatattgcgggctgattagcggactagtgcctatgtatataggcgagatcgcaccaactgcactaagaggggccctcggaacctttcatcagctggccatagtaaccggtattctgatctctcagattatcggccttgagtttatcctgggcaactacgatctgtggcacatccttctgggcctgagtggcgtgcgggcaatactgcagagcttgctgctgtttttctgccctgaaagtccacggtatctgtatatcaagctggatgaggaggttaaggccaagcagagcttgaagagattgcgtggctatgatgacgtgaccaaggatattaatgaaatgagaaaggaacgagaggaggcctccagcgaacagaaggtatcaattattcaactctttacgaattcttcttatcggcagccgatcctggtggccttaatgcttcacgtggcacagcagttttccgggattaacggcatcttttattattctacttctattttccagactgccgggatcagcaaacctgtttacgctacaatcggcgtcggcgccgtgaatatggtctttacagccgtgtccgttttcttggtggagaaggctggacgtagaagtctctttctgatcggaatgtccggaatgtttgtttgcgcaatatttatgtctgtgggcctcgttcttctcaacaaattctcctggatgtcgtacgtatctatgatcgccattttcttatttgtttcctttttcgaaattggacctggaccaattccttggtttatggtggccgaatttttttctcaggggccccgcccagctgccctcgcaatagccgcgtttagcaactggacatgtaatttcatcgttgcgctctgtttccaatatattgctgatttctgcggtccgtacgtgtttttcctcttcgctggcgtgctgctagcttttaccctgttcactttttttaaggtgcccgaaacgaaggggaagagtttcgaagagattgctgctgaatttcagaagaaatccggatcggcacaccggccaaaagccgccgtcgagatgaagttcctcggagccaccgaaaccgtt

SEQ ID NO: 7320 - DNA, 1572 bp, Artificial Sequence
  derived and/or modified sequence
atgacagaggataaagtgaccggtaccctcgtttttactgtgatcacagccgtacttggctcctttcagtttggctacgacattggggtcattaatgctccccagcaggtcatcatttcacactacaggcacgtgctgggtgtacctctagacgatagaaaagcaattaacaattacgtcattaattcaaccgatgaactccccacaatatcatatagtatgaaccctaagccgacgccctgggcagaggaagaaactgtggccgccgcccagcttattaccatgttgtggagcctgtcagtgtcctccttcgctgttggcgggatgacggctagcttcttcggaggatggctaggggatacactcggacgcatcaaggcgatgcttgtcgcgaatattctgtcgctggtgggtgctctgcttatgggattttccaagctgggaccatctcacattttaataatcgccggaaggtccatttcgggcctttattgcggtctcatctcaggcctggttccaatgtacataggcgagattgcaccaaccgctttgcggggggcactggggacgttccatcagttagcaattgttacggggatcctcatcagccagattatcggtctggagtttatcctcggcaactatgatctgtggcacatcctgctgggattgtccggagtgcgcgccatcctgcagtcactactactcttcttctgcccagagagcccacgctacctgtatattaagttagacgaggaagtgaaggctaaacagtcattgaagcgactgcggggctatgatgatgtgactaaagatattaacgagatgcgcaaggagagagaggaggcttcctccgagcagaaagtctcgatcatacagctgttcacaaactcgagctaccggcagccaattcttgtggcgttgatgttgcatgtagcccaacagttcagcgggatcaatggtatcttctattactctacaagcatcttccaaactgctggaatttccaagccagtatacgccacaatcggagtgggagcagtcaatatggtgtttaccgcagttagtgtatttctggtcgaaaaagctggtcgtcgcagcctcttccttataggcatgtctggaatgtttgtgtgtgcaatattcatgagcgtcggcttggtcctcctgaacaagttcagttggatgtcttacgtcagcatgattgcgatatttttattcgtttctttcttcgagatagggcccggccctataccatggtttatggtggccgagttcttcagtcagggccctcgcccggccgccttagctattgcggcgttttctaactggacatgcaactttatcgttgcactgtgtttccagtatattgccgatttctgtggaccgtacgtctttttcctgtttgctggggtcctgctggcgttcaccttatttacatttttcaaggtaccagaaacgaagggaaaatcattcgaggagattgccgctgagttccaaaaaaagtccggatctgctcacagaccaaaagctgccgtcgagatgaagttcctgggggccactgagacagtg

SEQ ID NO: 7321 - DNA, 1572 bp, Artificial Sequence
  derived and/or modified sequence
atgacagaggacaaggtaaccggcactctggtgtttacagtaattaccgccgtccttggttccttccagttcggctatgacatcggcgtcattaacgcgccacagcaggtgatcatttcacattacagacacgtgctgggcgttcctttggatgacaggaaagctatcaataactacgtcatcaactccacggatgagctgcctactatctcctattccatgaatccaaagcccaccccatgggccgaagaagaaaccgtggcagccgcgcaactgattactatgctgtggagtctgagtgtgtcatcattcgccgtggggggaatgaccgcctccttcttcggcgggtggctcggagatacgctgggccgcatcaaggccatgctcgtggccaacatcttatctctggtcggcgctctactcatgggcttctcaaaactcgggccctcccatatacttatcatcgcgggcagatctataagcggactatactgtgggctcattagtggcctggtgccgatgtacatcggggaaatcgcgcccactgccctgaggggggcgctgggcacttttcaccagctggcaattgttaccggtattctcatctctcagattattggcctagaattcatacttgggaattatgacttgtggcacatacttctcggcttgtccggggtgagggcgatattgcaaagcctccttctttttttttgcccggagtcgccccgctacttgtacataaagctggacgaggaagtaaaggctaagcagagcttaaagcggctgagaggatacgatgatgtcaccaaagatatcaacgaaatgcgcaaggagcgggaggaggctagctcagaacagaaggtgagcatcattcagctgttcacaaacagcagttatagacaacctatccttgtagcactgatgctgcatgttgcccaacaattcagcgggatcaatggcattttctattattcaacttccattttccagacagcaggtatttccaagcctgtctacgcaacgatcggtgtgggagctgtaaacatggtgttcacagcagtctccgtattcctggtcgaaaaagctggcagaaggtccctgttccttatcggcatgtctggaatgttcgtgtgcgccatcttcatgtccgtggggctggtgctgctcaacaaattcagttggatgtcctacgtctccatgatagccatttttctgtttgtttctttctttgaaattggcccaggcccaattccctggtttatggtggctgagttcttttcccaggggccaagaccagccgcattggctattgcagcattctcaaattggacctgtaattttattgtcgctctctgttttcaatacattgccgatttctgcgggccctatgtcttcttcctcttcgccggcgtgctcctagcctttaccctcttcacattcttcaaggtaccagagaccaaggggaaatcattcgaggagattgccgcagagttccagaaaaagagcggatccgcgcacagacctaaggcagctgtcgagatgaaattcttgggcgccactgagaccgtc

SEQ ID NO: 7322 - DNA, 1572 bp, Artificial Sequence
  derived and/or modified sequence
atgactgaagacaaagtgacagggacattagtatttaccgtgataactgctgtgcttgggtcttttcagtttggctacgatatcggggtgattaatgctccgcagcaggtcatcatatcccattaccgacacgtccttggcgtgccactggatgataggaaggcaattaataactatgtaatcaacagtacagacgaactccctaccatatcctatagcatgaacccgaaacccacaccatgggccgaggaggagaccgtggcagcggctcagcttattacaatgttgtggtccctgtctgtgtcatctttcgcagttggtggtatgactgcttctttctttggcggctggctaggggacactctcggcagaataaaagcgatgttggtggcgaacattctaagtctcgtcggggcgcttctcatgggattctcaaagttggggccttcccacattctgataatcgctgggaggtccatctcagggctctactgtggccttattagcgggctggtgcccatgtatattggagagatcgcacccacagctctgcgtggagccttgggaacattccatcagttagctatcgtaacagggattttgatctcccagatcattgggctagaattcatcctcggcaattatgacctctggcacattctgttgggattgagcggggtgagggctatcctccagagcctgctcctgttcttctgtcccgagtcgcccagatacctctatatcaaacttgacgaggaagtgaaagctaaacagtccctgaagcgacttagaggctatgacgatgtgaccaaagatatcaacgagatgcgcaaagagcgagaagaggcttcttctgagcagaaggtgtcaatcattcagttgtttaccaactcctcttataggcagccaatccttgttgctttaatgctgcatgtggcccaacagttctcaggcattaacggaatcttctactattctaccagtatcttccagaccgccgggatctctaagcctgtgtatgccacaatcggcgtgggtgccgttaacatggtgttcacagctgtgtcagtcttcctggtcgaaaaggctggtcgccgtagcctcttcctgatcggtatgtctggaatgtttgtgtgcgctatttttatgagcgtggggctggtcctactgaacaagttttcctggatgagttacgtgagcatgatcgccattttcctttttgtgagtttttttgaaatagggccggggccaataccctggtttatggtggcagaatttttttctcaggggccccggccagcagccctcgctattgctgcgttttccaactggacgtgcaatttcatcgtggctctatgctttcagtacatcgctgatttctgtggaccgtatgttttctttctgtttgctggcgtgctcctcgccttcactttgttcacgttcttcaaggtgcccgagaccaagggcaagtcatttgaggaaatagccgccgagttccagaagaagtctggctccgcccatagacctaaggctgccgtggaaatgaagtttctcggagctacagagaccgtg

SEQ ID NO: 7323 - DNA, 1572 bp, Artificial Sequence
  derived and/or modified sequence
atgacagaggacaaggtgacggggacgctggtgtttaccgtgataactgcggtcctgggttcatttcaatttggctatgatattggtgtgattaatgcccctcagcaggtgattatcagccattatcgccatgttctcggcgtgccactggacgaccgtaaagctatcaataactatgtgatcaatagcaccgatgaactcccaaccatctcctactctatgaaccccaaaccgaccccctgggcagaggaggaaaccgttgccgcagcgcagttgattacgatgctctggtcattgtccgtatccagctttgcggtcggcggcatgacggctagctttttcggcggttggctgggcgataccctgggccgtattaaggcaatgttggtggcgaatatcctgagcttagtgggagcccttttaatggggtttagcaagcttggcccgtcccacatcctgatcatcgccggccgatcaatttctggactgtactgcggtctgatatcgggcttggttccaatgtacatcggcgaaattgccccaaccgcgctgcgtggtgcactgggtacattccaccaactggcaatcgtaactggtattctgatcagccaaataatcggtttggagttcatcttggggaactacgacctgtggcacatcttgctgggcctgagcggagtacgcgccattctgcagtctctgctactgtttttctgtccagaaagcccacgctatctgtacatcaagctcgacgaggaggttaaagccaagcagagcttgaaaagactgaggggatatgatgacgtgaccaaggacataaatgaaatgcgaaaggaacgcgaggaggcgagctccgaacagaaagtttccatcattcagctgttcactaatagctcttatcgtcagccaattctggtagctttgatgctacatgtcgcacagcaattcagcggcatcaatgggatcttctactactcaacctccatttttcagacagctggtatctcaaagccggtttacgcaaccatcggtgttggtgcagtcaatatggtgtttaccgcggtgagcgtcttcctggtagaaaaggctggtcgcagatcattgtttttaatcggaatgtctggcatgttcgtatgcgcaatttttatgagcgttgggctggtcttgttgaataaattcagctggatgagctacgtaagcatgattgctatttttctttttgtgtctttttttgaaatcggtcctggtcccattccctggtttatggttgctgagttttttagtcaaggtccacgcccggcggccctcgcaatcgccgcattcagcaactggacgtgcaactttatcgtagcgttgtgctttcagtatatagccgatttctgcggcccgtacgtcttctttttgttcgcgggtgtgctgttggcctttaccttgttcacgttttttaaggttcccgagacaaaaggaaagtctttcgaggaaatcgcggcggaattccagaagaaaagcggttccgctcaccgtcctaaggccgccgtggaaatgaaatttctcggcgcgacagaaaccgtg

SEQ ID NO: 7324 - DNA, 1572 bp, Artificial Sequence
  derived and/or modified sequence
atgacagaggacaaagtcacaggtacgctagtctttaccgtgattaccgcagtgctgggcagctttcagtttgggtatgacattggtgttattaacgcgcctcaacaggtgatcatcagccactatcgtcatgtgttaggagtcccactggacgaccgtaaggccataaacaactatgttatcaactccaccgatgagctgcccactatcagttactccatgaaccccaagcccacaccatgggctgaggaggagaccgtagccgccgcgcagctgattacaatgctctggtccctatctgtgtcttcattcgccgtggggggtatgacggccagcttcttcggcggctggcttggagataccctagggcggatcaaagctatgctggtcgcaaacatcctgtcactggtgggcgcactgctgatgggattttcaaaattgggaccgagtcatattttaatcatcgccggtaggagcatctctggactgtactgcggtctaattagcggtttggttcccatgtacatcggcgaaattgcccctacagcacttcggggtgccctgggtacctttcaccagctagcaattgtcaccggaatcctgatcagccagattatagggctggaattcatcctgggcaactacgacctctggcatattctcctcggcctcagcggagtgcgcgccatactgcagtctcttctgctgtttttctgtcctgaatcccctagatatctgtatatcaagctcgatgaagaggtcaaggcaaagcagtcgctaaagcgacttaggggatacgacgacgttaccaaggatatcaacgaaatgcgtaaggagcgggaagaggcctcgtccgaacaaaaggtctctatcattcagctgtttaccaattcttcatacagacaaccaatcctcgttgccctgatgctgcacgtcgcccaacagttctcagggataaacggcatcttttattactcaacgagcatttttcaaaccgcaggaatatccaagccggtgtatgcgaccatcggcgtgggcgcagttaacatggtctttaccgcagtttcagtgtttttagtagaaaaggctggccgtaggtctctattccttattggtatgtcgggaatgttcgtgtgcgcaatattcatgtctgtgggtttggttctactgaataaattttcctggatgtcctacgtttctatgatcgccatcttcctgtttgtgtccttttttgaaattggtcccggaccaattccctggtttatggtggccgagtttttctcacagggcccacggcctgccgccttggccatcgctgctttttctaattggacttgcaattttatcgtggctctgtgctttcaatatatagctgacttctgcggcccgtacgtcttcttcctcttcgccggcgtgctcctggcatttacactgttcaccttctttaaagtgccagaaacgaaagggaagtcgttcgaagagattgccgccgagttccaaaagaaatccggctctgctcaccggcctaaggctgccgtggagatgaagttcctcggggccactgagactgtc

SEQ ID NO: 7325 - DNA, 1572 bp, Artificial Sequence
  derived and/or modified sequence
atgaccgaggataaggttactgggactctcgtctttactgtgataactgccgtactcggatcttttcagtttgggtatgatataggtgtaatcaacgctccgcagcaggtcatcatctcccattataggcacgtgctcggggttcccctggacgataggaaggcaatcaacaattatgttattaactcgaccgatgagctccctaccatttcttactccatgaatcccaagcctacaccatgggccgaggaggaaaccgtggccgccgcccagttgatcacaatgctgtggtcgctgtccgtgtcgtcattcgccgtcggaggcatgacagcatcgtttttcggcggctggcttggcgataccttggggcgcattaaggccatgcttgtggctaacatactgtcactggttggtgcactgcttatgggcttttccaagctagggccaagccacattctaattatagctgggcgcagcatcagcgggctgtattgtggcctaatctctgggcttgtcccaatgtacattggagagatcgcccccactgcgctccgtggcgctctaggaacgttccaccagttggccattgttactggcattttaatcagtcagatcatcggcctggagtttattctcggcaactatgatctgtggcatatcctgctcggattgtccggagtacgcgcgattctgcaatctttgcttcttttcttttgtccagagtcccccaggtacctgtatatcaagctggacgaggaggtcaaggcaaaacagtctcttaagcggcttagggggtatgatgacgtgacaaaagatattaacgagatgcgcaaagagcgggaggaggcctccagcgagcaaaaagttagtataatccagctgttcaccaacagcagctatcgacagccaatactcgtggccctgatgctgcatgtggcacagcagttttcaggcatcaacgggatcttctattacagcacatcaatttttcagaccgctggcatctctaagccagtctatgccacgataggcgtgggtgccgttaatatggttttcactgctgtgtctgtgtttttggtcgagaaggccgggcggcggagtctcttccttatcggtatgtccggcatgttcgtgtgcgcaatattcatgtctgttggattggttctgttgaacaaatttagttggatgtcttacgtatctatgatagccatcttcttatttgtgtctttttttgagataggtccgggacctatcccctggttcatggtggccgagttcttttctcaggggccaaggcctgcggcgttggccattgccgctttcagtaactggacgtgcaatttcatagtcgcactgtgtttccagtatatcgccgatttctgtgggccctacgtgttctttctgtttgccggcgtcttattggcctttacactctttactttcttcaaggtaccagaaaccaagggcaaatcattcgaagagattgccgcagaattccagaagaagagcggctccgcacatcgaccgaaagcagccgtggagatgaaatttcttggtgccacagaaacagtt

SEQ ID NO: 7326 - DNA, 1572 bp, Artificial Sequence
  derived and/or modified sequence
atgacagaagacaaggtgacagggacccttgtcttcacagtgatcactgctgtgcttggttccttccagttcggatacgacatcggtgtgattaatgcccctcagcaagtcatcatttcccactatagacacgtacttggcgttccgctcgatgatcgcaaagccataaacaattatgtgattaacagtacggatgagcttcctactatctcttatagtatgaatccgaaacccacaccctgggctgaagaggagacagtggcagccgctcagttgatcaccatgttgtggtccttgagcgtctccagcttcgctgtgggcggaatgaccgcaagtttctttggcggttggctgggcgatacccttggtagaatcaaggccatgctcgtcgctaacatactctcactggtgggggctctcttgatgggatttagtaagctgggcccttctcacatcctcatcattgccggcagaagcattagtggcctttactgtgggcttatatcagggttggtcccaatgtatatcggggaaattgcgccaacagcactgagaggggctctgggcacatttcaccagttggctatagtcactggcattttgatttctcagatcattggactcgagtttatcctcggaaactacgatctctggcacatcctcttgggactttcaggagtgagggctatattgcaatctttgttgctgtttttctgccctgaatccccccggtacctgtatattaaacttgacgaagaggtgaaggccaagcagtctctcaagaggcttcggggctacgatgacgttaccaaggacatcaatgaaatgcggaaggaacgggaggaggcatccagtgaacagaaggtctcaatcatccaactttttactaacagttcctaccgacaacctatcttggtggctctgatgctccacgtggcacagcagttcagtgggataaatggaatcttctattatagtacctctatttttcagaccgctggcatcagcaagcctgtgtacgcgacgatcggtgtgggagcggtcaacatggtgtttacagcagtaagcgtgttcctggtggaaaaggctggccggagatctttgttcctgatcggaatgagcggcatgttcgtgtgcgctatcttcatgtccgttggcttggttctccttaacaagttttcctggatgtcatacgtatccatgattgctatcttcctcttcgttagtttcttcgaaatcggtcctggcccgattccgtggtttatggtggccgagtttttctcccaaggtccccgcccagccgcactggcaatagctgcctttagcaattggacctgcaattttatagtagccctttgtttccagtacattgccgacttctgtggtccgtacgtattttttctgttcgccggtgtactccttgctttcacgctgtttacgttctttaaagtgccggagacgaagggaaagtccttcgaggaaatcgccgctgagttccagaagaagtcaggcagcgcgcataggccaaaagccgccgtggagatgaaatttctcggtgcgacagaaactgta

SEQ ID NO: 7327 - DNA, 1572 bp, Artificial Sequence
  derived and/or modified sequence
atgacggaagacaaggttacgggaaccctggtattcacagtgatcacagcagtcctggggagcttccaatttgggtatgacatcggtgtcatcaacgcccctcagcaggtgatcatcagccactaccggcacgtgttgggcgtcccactcgatgacaggaaggctattaacaactacgttattaatagcaccgatgagctccccaccatcagttacagcatgaacccgaagccaacaccctgggccgaggaggaaaccgtggctgcagcacaactcatcacaatgctgtggagcctttccgtctctagcttcgcagtcggaggcatgaccgcatcattcttcggaggctggctgggggacactctgggccgcataaaggctatgctcgttgctaatatccttagtctggttggagcactcctgatgggatttagtaagctgggccccagtcatatcctgattatcgctggaagaagcatcagcgggctgtattgcgggttgatatcgggactggtaccaatgtatatcggagaaatcgccccaaccgcgcttcgcggagcacttggcaccttccaccagctggcaattgtgacaggaatactaatttcacagattatcggcctcgaatttatcctgggaaactacgatttgtggcacatcttgcttggcctttcgggagtccgggccatcctccagagcttactcctcttcttttgtccagaatccccgagatacctctacattaaattggatgaagaagttaaagccaaacagagtctgaaacgcttgcgtggctacgatgacgtgacaaaggacataaatgagatgcgcaaggagagagaagaggcctcaagcgaacagaaggtgagcatcatacagctttttactaatagctcatacagacagccaattcttgtggccctcatgctccatgttgcacaacagtttagtggcatcaacggtattttctactactcaacgagcatcttccaaacagcagggatcagcaagccagtgtacgctaccattggcgtgggcgctgtgaacatggtttttaccgcagtctctgtcttcctagtggaaaaggctgggagaaggagcctgtttctcattggcatgtccggtatgtttgtctgcgccatctttatgtctgtgggcctcgtcctgctcaataaattctcttggatgagctatgtgagcatgattgccatctttctgtttgtttcctttttcgaaatcggccccggtccgataccttggtttatggtggctgagttcttttcacaaggccctagaccagccgcactcgcaatcgctgctttttccaactggacatgtaacttcatcgtcgctctttgctttcagtacatagcagatttctgcggaccttacgtcttctttcttttcgccggagtcctgcttgcattcactctgtttaccttttttaaggtacccgaaacaaagggcaagtcttttgaagaaatcgcagctgagttccaaaagaaatcaggcagtgcccacaggcctaaggctgcggtggagatgaagtttctgggtgccaccgaaaccgta

SEQ ID NO: 7328 - DNA, 1572 bp, Artificial Sequence
  derived and/or modified sequence
atgactgaggataaggtcactggcaccctcgtattcaccgtaataacagccgtgttggggtctttccagtttggctatgatataggtgttatcaacgcacctcagcaggttattattagtcactataggcatgtgctaggcgtgcctctggatgataggaaggccatcaacaactatgtgataaattcaactgacgaactgcccacaatttcttactctatgaaccccaagcctaccccctgggctgaggaagagacggtcgccgctgcccaactcatcaccatgttatggtccctgtctgtgtccagcttcgcggttggcggcatgacagcaagttttttcggtggatggctgggcgacaccctgggtcgcattaaagcgatgctggttgcgaatatattgagcttggtcggagcactgttgatggggttcagcaagctgggcccttcacacatcctcatcatagcaggcagatctatttccggactgtactgtggcctgatttctggtctcgtgcccatgtacattggagagatcgcccccaccgcacttaggggcgcactggggacttttcatcagctggcaattgtgacaggaattttaattagccagattatcggcctagaattcattctcggcaattacgacctctggcatattctcctggggctgagcggagtccgcgccatattgcaatctctcctgcttttcttctgccccgaatccccgcggtatctgtatattaaattggatgaggaagtgaaggcgaagcagtccctcaagcggctaaggggttacgacgatgtgaccaaggatatcaacgaaatgcgcaaggaacgcgaggaagcttccagcgaacagaaggtgtccattatccagctcttcaccaactcctcgtataggcaaccaatccttgtggccctgatgctgcacgtggcacagcagttctctggaatcaacggcattttttattattctacatctatctttcaaactgccggaattagcaagccagtttacgccacaattggggtaggagcagtcaatatggtgtttaccgccgtgagcgttttcttggttgagaaggccggtcgacgctccctgtttctcattgggatgtcaggtatgttcgtgtgtgcgatctttatgtcagtggggctggttctactgaataagttctcctggatgtcatatgtgtccatgatcgctatatttctttttgtgagtttcttcgagatcggaccagggcctattccgtggtttatggtcgccgagttcttctcccaagggccaaggcccgccgcgctggcgatagccgcttttagcaactggacttgcaattttatagtggccctgtgctttcagtatatagcagacttttgcgggccctacgtgttttttcttttcgcaggtgtgctgctggcttttacactgttcactttctttaaggtgcccgaaactaaaggcaaatccttcgaggagattgcagccgagtttcaaaagaagtcgggaagcgctcaccgccctaaggctgcggtcgagatgaaatttcttggcgctacggagactgtc

SEQ ID NO: 7329 - DNA, 1572 bp, Artificial Sequence
  derived and/or modified sequence
atgactgaagataaggtgaccggcactttggtctttacagtgatcaccgcggtcttaggcagttttcaattcgggtatgatatcggcgtgattaatgctccccagcaggtgattatctcccattaccgtcatgttttgggggtgcctctggacgatcgaaaggctatcaataactacgtgatcaactctacagacgagttgccaacaatcagctacagtatgaaccccaagcctaccccctgggcggaagaggaaacagtggctgcagctcaattgataaccatgctctggtcactgagtgtttcatcctttgccgttggcgggatgacagccagcttttttggtggatggctgggggatacccttggcaggatcaaagccatgctggtggctaatatcttgtctctggtcggagctttattaatgggattctcgaagctgggtccctcccacattttgatcattgcaggcagaagcatctccggcctgtactgcggattgattagtggcctggtgcctatgtacatcggagaaatagcccctaccgccctgaggggcgctcttggcactttccaccagctcgcgattgtaaccgggatcttaatatcccagatcattggcctggagttcattttgggcaactacgacttgtggcacatcctgctcggcctatcaggcgttagggccatcctgcagagtctgctattgttcttctgtcccgagtccccaaggtatctctacataaagctggatgaggaggttaaggctaaacagagcctgaaaaggctcaggggatacgacgatgtaactaaagatattaatgaaatgcggaaggaacgggaagaagcttccagcgaacagaaagtgagtatcatccagctgttcaccaattcctcttataggcagccaattctcgtcgccctcatgctgcacgtggcccagcagttctctggcatcaatgggatcttttattattccactagcatcttccagacagccggcatcagtaaacctgtttacgcaacaatcggagttggcgcagtgaacatggtgttcactgccgtctccgtctttcttgtagagaaggcgggaagaaggtcactctttcttattggcatgagcggtatgttcgtgtgcgccatattcatgtctgttgggctcgtcttactgaacaagttctcttggatgtcctacgtgtcgatgatcgccatattcctcttcgtatcatttttcgaaataggacccggacccatcccgtggttcatggtggctgaattctttagccaagggcctcgacccgccgctctggcaattgccgccttctccaactggacttgtaattttatagtcgccctctgtttccagtatatcgcagacttctgtggtccatatgtatttttcttgtttgccggggtgctgctggcctttaccctcttcacgttctttaaagtaccggaaaccaaggggaaatccttcgaggagattgctgctgaatttcagaaaaagtcagggtccgctcacaggccaaaagccgccgtggagatgaagttcttgggtgctacagagacggtg

SEQ ID NO: 7330 - DNA, 1572 bp, Artificial Sequence
  derived and/or modified sequence
atgacagaagacaaggtgacaggtacactcgtgtttactgttattaccgcagtgctgggctcttttcaattcggatatgacatcggagtgataaacgccccacaacaggtcatcatctcccactaccgccacgtcctcggggtccctctggacgaccgtaaagcgatcaacaactatgtgatcaacagtaccgatgagcttcccactataagctacagcatgaaccccaagccaactccatgggccgaagaggagactgtggccgcagctcagcttattacgatgttgtggtccctgtccgtaagcagctttgctgtgggcggcatgaccgcctcattcttcggtggatggctcggggatacactggggcgaatcaaagccatgctggtcgctaacattctgtcactggtgggcgcgctgctaatgggattttcaaagctcggaccatcgcacatcttgattatagcaggcagatctatatccggcctttactgtgggctcatttctggtctcgtgcctatgtatatcggagagatcgcccccaccgcattgaggggtgctctgggcaccttccaccagctggccatcgtaaccggcatcttgataagccaaatcattgggcttgagtttattctcggaaattatgatctctggcacattctgctgggtttgtccggcgtaagggctatcttgcaaagcttgctattgttcttttgcccagagtcaccacggtatttgtacatcaaactggacgaggaggtcaaagcaaagcaatccttaaaacggctccgaggttacgacgatgtgaccaaggacattaatgaaatgcgcaaggagcgagaggaggctagttccgagcagaaggtctccatcatccagttatttacgaactcatcgtaccgccagcctatcctggtggccctgatgttgcacgtggcccagcagttcagtggcatcaacgggatcttctactattcaaccagcatctttcagactgccgggataagcaaacctgtgtacgccaccatcggcgtgggggctgtgaacatggtgttcacagccgtgtctgtttttctggtggagaaagcgggaaggcgctctcttttcctgatagggatgagtggaatgttcgtctgcgccatcttcatgagtgtgggcttagtgctactgaacaagtttagctggatgtcctacgttagtatgatcgccatttttttgtttgtcagtttttttgagattggccccggtccaattccgtggttcatggtggcagaattcttcagccaggggccccgcccagcagcgctggcgatagctgccttcagcaactggacatgcaactttattgtggccttgtgttttcagtatatcgctgacttctgcggcccctacgtctttttcctctttgctggagttctgctcgcttttaccctcttcaccttttttaaggttcctgagactaaaggaaagagctttgaagagatcgccgccgagttccagaagaaaagcgggagcgctcaccgtcctaaggccgcagtagaaatgaaattcctgggtgcaaccgagactgta

SEQ ID NO: 7331 - DNA, 1572 bp, Artificial Sequence
  derived and/or modified sequence
atgaccgaggataaagtgactggtaccctggtatttaccgtgattacagctgtcctgggcagcttccagttcggttatgacatcggggtaattaatgcccctcagcaggttatcataagtcattatcggcacgtgttgggtgtgccactcgatgatcgaaaggctattaataactatgtcattaattccactgacgagctgcctaccatttcatattctatgaaccctaagccaacaccctgggctgaggaggaaactgtagctgcagcccagctgattacgatgctgtggagcctgagtgttagctccttcgcggttggaggaatgacagcctcattcttcggcgggtggctgggggacacgctgggacgcatcaaggccatgctggttgcaaacatcctgagcttggtcggagcactcttgatgggctttagcaagctgggtcctagccacatactgatcatcgccggccggtctatatcagggctctactgtggcctgatttccgggcttgtgccaatgtacattggcgaaatcgccccgacagctctgagaggcgctctcggcacctttcatcagttggctattgtaactggaattctcatttcacagatcatcggactggagttcatcctgggaaactacgatctgtggcacattctgctcgggctgagcggtgtgcgggccattttgcaaagtctgcttctgtttttctgccctgagtcaccccggtacctgtatattaaactggacgaagaggttaaagccaagcagtccctgaagaggttgcgcggatatgacgatgtgaccaaggacattaacgaaatgagaaaggagcgggaagaagccagcagcgagcagaaggtatccattattcaactcttcactaactcttcatatcgccaacccatcctcgtcgccctgatgctgcatgttgcgcagcagttcagcggaatcaacgggattttctactattctacaagcatatttcagaccgcgggcataagcaaaccagtatacgctacgatcggcgtgggtgccgtcaacatggtcttcacagcagtgtccgttttcctcgtggagaaagctggacgacggtctcttttcctgatcgggatgagtggcatgtttgtgtgtgccatcttcatgagcgtgggacttgtcctcctcaataagttcagctggatgtcatatgtctccatgatcgctatcttcctgttcgtcagtttctttgagatcggccccggccctatcccctggtttatggtggctgagtttttttctcagggcccgcgacctgcggcattggcgattgccgcttttagtaattggacctgtaactttattgtggctctgtgtttccaatatatcgccgatttctgcggaccttatgtcttcttcctgtttgccggtgtcctgctggcattcactcttttcacattctttaaagtgcccgagactaaaggcaagtcttttgaggaaatcgccgccgagtttcagaaaaagagtggatcagcccatagacccaaggcagctgtggaaatgaaattcctcggcgccaccgagactgta

SEQ ID NO: 7332 - DNA, 1572 bp, Artificial Sequence
  derived and/or modified sequence
atgactgaggataaggtgaccggcacattggtgttcacagtgataacggccgtgctcggatctttccaattcggctatgatatcggagtgatcaacgctccccagcaggtaatcatctcccactacaggcatgttcttggcgtcccgctggacgacagaaaagctatcaacaactacgtgattaactccaccgatgaactgcccacaatcagctatagcatgaatcccaagcctacgccttgggcagaggaggagacggtggcggctgcgcagctcatcacgatgttatggtccctgtctgtgtcctcatttgccgtgggcggtatgaccgcatctttctttggcggttggttgggggatacactagggcgcatcaaagctatgctggtggcaaatatcctgagtctcgtgggggccctgctgatgggcttctcaaagctggggccatcccatatcctgatcatcgcgggcaggagtatcagtggactgtactgcgggctgatctcgggactcgtaccgatgtacatcggggaaatcgcgcccaccgccctgcggggcgcactaggaacctttcaccagctggctattgtaacgggcatcctcattagccagatcatcggcctggaattcatactgggtaattacgatttgtggcatattctgttgggactgagtggcgtgagagccattttacaatctctgttgctgttcttttgccctgaatctccgcggtacctgtatatcaagctggacgaggaggtcaaagcaaagcagtccctcaaacggttacggggatatgatgatgtcactaaggatatcaatgaaatgcgaaaagagcgcgaggaggcgagttctgagcagaaggtttcgattattcagctgtttaccaacagtagctacaggcaaccgatcctggtcgccctgatgctgcacgtggcacagcaattctcaggcattaacggaatcttctactatagtacaagtatctttcagaccgctggtatatccaagcccgtgtacgcgaccattggcgtgggtgcagtgaatatggtgttcaccgcagtgtccgtgttcttggtggagaaggctggtagacgtagcctctttctcatcggcatgagcggaatgttcgtgtgcgctatctttatgtccgtgggactggttctgctcaacaagttttcctggatgtcctacgtctcgatgatcgctatatttttattcgtgagcttttttgagataggacccgggcctatcccctggttcatggtagcagagttcttctctcaaggcccgcgcccagccgctctcgcaatagccgctttcagcaattggacctgtaacttcatcgtggccctgtgctttcagtatatagctgatttttgtggaccatacgtgttctttctgtttgcaggcgtgttgctcgccttcaccctgttcacgttcttcaaggttcccgaaacgaaggggaaatcattcgaggaaattgcagccgagttccagaaaaagagtggatcagcacatcgacctaaagccgcggtggaaatgaaattcttgggagccaccgagaccgtg

SEQ ID NO: 7333 - DNA, 1572 bp, Artificial Sequence
  derived and/or modified sequence
atgacagaagacaaagttactggaactctggtcttcaccgttatcactgcagtgctaggatcatttcagtttggatacgatatcggggtcatcaatgctccacagcaagtaatcattagtcactataggcatgtactaggagtaccactcgatgatcgaaaagctattaacaattatgttatcaattcgactgatgagctaccaacaatttcatattccatgaatccgaagcctacaccatgggcggaggaagaaacagtggcagcagctcaacttatcaccatgctctggtcactctctgtcagcagctttgctgtcggtgggatgactgcgagttttttcggaggttggcttggtgatacacttggaagaatcaaagctatgcttgtagcaaatattctatctttggttggagccctcctaatgggattctcaaaactgggaccttcgcatattttaattatagccggaagatcaatctcgggactctactgtggattgatctccggcttagtaccaatgtacattggagagattgcaccgactgcactccgtggcgctttagggacattccatcaattagcaattgttacgggaattttgatttcgcaaattattggtctcgagttcatcctgggaaattatgacctttggcatattttacttggattatctggagtccgagctattttgcaatcactgcttctgttcttttgtcctgaatcaccaagatatctctacattaaacttgatgaagaggttaaggcaaagcaaagtcttaagagacttagaggatatgatgatgtaactaaagatataaacgagatgcgtaaagagagagaggaagctagttcggagcaaaaagtatccatcatacagctgttcacaaattcctcatatcgtcaacctattctagtagcgttgatgcttcatgtggcccagcaattcagtggtattaatggaattttctactactctacttccattttccaaactgccggaatttctaaaccggtttatgccacgattggggttggcgcagtcaatatggttttcacggctgtttcggttttccttgtggaaaaggctggacgcagatcactttttttgattgggatgtctggaatgtttgtttgtgccatttttatgtcagtcggactggtcttgcttaacaagttcagttggatgagttacgtttctatgattgccattttcctttttgtttctttttttgaaattggcccagggccaatcccatggtttatggtggcagagtttttcagtcagggaccccgaccagctgccttagctattgcggctttcagtaactggacatgcaattttatagttgcactctgttttcaatatattgctgatttttgtggaccgtatgtgttcttccttttcgctggtgtgttgttagcattcactctattcaccttctttaaagtgccggaaacaaagggaaagtcgttcgaagagatcgctgctgagttccagaaaaagagcggatcggcacacaggcctaaagctgcggtggagatgaagtttcttggtgctactgaaacagta

SEQ ID NO: 7334 - DNA, 1572 bp, Artificial Sequence
  derived and/or modified sequence
atgaccgaggacaaggtcacggggaccttagtgttcaccgtaatcacggccgtgctcggcagctttcagtttgggtacgatattggtgtcatcaatgccccacaacaagtgataatatcacactatagacatgttctgggggtgcccttagacgacagaaaggcaatcaacaactacgttatcaactctaccgacgaactgcctaccatatcgtattccatgaatcctaagcctaccccatgggccgaggaggaaacggtggcagcggcgcaactcattacaatgctgtggagcttgtccgtgtcgagctttgccgttgggggtatgaccgcttcattctttggtggctggttgggtgacaccctcggccgcattaaagcgatgctcgttgctaatatactctcactggtgggagcattacttatgggcttcagcaagctgggcccatctcacatcttgattatcgctggacgttctataagcggactatattgcggactcatatccggccttgtgcccatgtacatcggcgaaatcgctccaactgccctgagaggagcactcgggacattccatcagcttgcaatagtgactggcatccttatctcccagatcattggcctcgagtttatcctgggcaattacgacttgtggcatatcctcctgggactgtcaggggtccgggccatcctgcaatctcttcttctgtttttctgcccagaaagccccaggtacctctacatcaagttggacgaagaggtaaaagcaaagcagagtcttaaacgcctccggggttatgatgatgtaacgaaagatatcaacgagatgcggaaggaacgggaggaggcatcatcagaacagaaagtcagtatcatacaactctttaccaattcatcgtaccgccaacccatactggtggccctgatgctccatgtggcgcagcagttttcagggatcaacggcatcttctattattccacttccatctttcagaccgctggcatttcaaagccagtttatgctaccattggagttggtgctgtcaacatggttttcactgctgtgtctgtctttctggtggagaaagccggcagacggtcgctatttctgatcggcatgtccggaatgtttgtgtgcgctatttttatgtctgtggggctagtgctgctgaataaattctcttggatgtcctacgtgtccatgatagccatttttttatttgtctctttcttcgagataggccctggtcctattccttggtttatggtcgccgagttcttttctcagggacctcggcccgccgctctagccattgcagccttctccaactggacctgcaactttattgtggctctgtgtttccagtacatcgccgacttttgtggcccctatgtgttctttctatttgcaggcgtcctgctggcatttacattattcacattcttcaaggtgcctgagacgaaggggaagagtttcgaggagattgccgctgagttccagaagaagtctggcagcgctcaccggccaaaagccgcggtggagatgaagttcctgggagcaacagagaccgtg

SEQ ID NO: 7335 - DNA, 1575 bp, Artificial Sequence
  derived and/or modified sequence
atgaccgaggacaaggtgaccggcaccctggtgttcaccgtgatcaccgccgtgctgggcagcttccagttcggctacgacatcggcgtgatcaacgccccccagcaggtgatcatcagccactacagacacgtgctgggcgtgcccctggacgacagaaaggccatcaacaactacgtgatcaacagcaccgacgagctgcccaccatcagctacagcatgaaccccaagcccaccccctgggccgaggaggagaccgtggccgccgcccagctgatcaccatgctgtggagcctgagcgtgagcagcttcgccgtgggcggcatgaccgccagcttcttcggcggctggctgggcgacaccctgggcagaatcaaggccatgctggtggccaacatcctgagcctggtgggcgccctgctgatgggcttcagcaagctgggccccagccacatcctgatcatcgccggcagaagcatcagcggcctgtactgcggcctgatcagcggcctggtgcccatgtacatcggcgagatcgcccccaccgccctgagaggcgccctgggcaccttccaccagctggccatcgtgaccggcatcctgatcagccagatcatcggcctggagttcatcctgggcaactacgacctgtggcacatcctgctgggcctgagcggcgtgagagccatcctgcagagcctgctgctgttcttctgccccgagagccccagatacctgtacatcaagctggacgaggaggtgaaggccaagcagagcctgaagagactgagaggctacgacgacgtgaccaaggacatcaacgagatgagaaaggagagagaggaggccagcagcgagcagaaggtgagcatcatccagctgttcaccaacagcagctacagacagcccatcctggtggccctgatgctgcacgtggcccagcagttcagcggcatcaacggcatcttctactacagcaccagcatcttccagaccgccggcatcagcaagcccgtgtacgccaccatcggcgtgggcgccgtgaacatggtgttcaccgccgtgagcgtgttcctggtggagaaggccggcagaagaagcctgttcctgatcggcatgagcggcatgttcgtgtgcgccatcttcatgagcgtgggcctggtgctgctgaacaagttcagctggatgagctacgtgagcatgatcgccatcttcctgttcgtgagcttcttcgagatcggccccggccccatcccctggttcatggtggccgagttcttcagccagggccccagacccgccgccctggccatcgccgccttcagcaactggacctgcaacttcatcgtggccctgtgcttccagtacatcgccgacttctgcggcccctacgtgttcttcctgttcgccggcgtgctgctggccttcaccctgttcaccttcttcaaggtgcccgagaccaagggcaagagcttcgaggagatcgccgccgagttccagaagaagagcggcagcgcccacagacccaaggccgccgtggagatgaagttcctgggcgccaccgagaccgtgtag

SEQ ID NO: 7336 - DNA, 1575 bp, Artificial Sequence
  derived and/or modified sequence
atgactgaggataaggtcactggaacactggtgttcaccgtgatcacagctgtgctgggaagtttccagttcggctacgacattggtgtcattaacgcccctcagcaggtgatcatttcccactaccgccatgtgctcggagtaccactggacgaccggaaagcaatcaacaactatgtcattaactctaccgacgagctaccgaccatctcttattctatgaatcccaaaccaacaccttgggctgaggaagagactgtggccgccgcacagttgattacaatgctctggagtttaagtgtgagcagcttcgctgtgggcggaatgacggcctcctttttcggcgggtggctgggcgatacacttggtcggattaaagccatgctggtcgccaacattttaagcctagtgggagctctgcttatggggttttctaagctgggaccctcccatatcctgatcattgcaggaaggtctatatccgggttgtattgcggcctgatttccggcctggttccaatgtacattggtgaaatagccccaactgctctgcgtggcgccttgggaaccttccaccagctggccattgtcaccggaatactcatttcccagattatcggtctggaattcatcctggggaattatgatctttggcacatcctactcggcttatccggagtcagagccattctgcagtccctgcttttgttcttctgtccagagtcccctcgctacttgtatatcaagcttgatgaggaggtcaaggccaaacaatctctaaagaggctgcgcggatatgatgatgtgacaaaagatatcaatgagatgcgaaaagagcgtgaggaagcctctagcgagcaaaaagtcagtattattcagctctttacgaactcctcataccgtcaacccattttagtcgccctaatgttacatgtcgcccagcagttttcaggcattaacgggattttttactattcaacgtccatcttccagactgcggggatctccaagcctgtttacgctaccatcggggtgggagcggtaaacatggtttttactgcggtctcagtgtttctcgtagaaaaggccggtcggcgttctctgttcctcattggaatgtccggcatgttcgtgtgtgctatcttcatgtcggtgggtctggttctgctgaataagtttagctggatgagctacgtctcaatgatagccatctttctgtttgtaagcttctttgagattggccccggtcctataccatggtttatggtggccgagttttttagccagggcccacggcctgcagccctggctattgccgccttctccaactggacatgcaacttcatagtggcattgtgttttcagtacatcgccgatttctgcggaccgtacgtcttcttcctgtttgctggcgtgctcttggccttcaccctgttcacgttcttcaaagtgcccgaaactaaaggtaagagcttcgaggagatcgctgctgagttccagaagaaatccggttcagctcataggccaaaggcagccgtggagatgaagtttctgggagctacagagactgtgtag

SEQ ID NO: 7337 - DNA, 1575 bp, Artificial Sequence
  derived and/or modified sequence
atgacagaggacaaggtgacaggcaccctggtgttcaccgtcatcacagctgtgctgggcagcttccagtttggctatgacatcggggtcatcaatgccccccagcaggtgatcatcagccactaccgccacgtgctgggcgtgcccctggatgacaggaaggccatcaacaactacgtgatcaacagcacagatgagctgcccaccatctcctacagcatgaaccccaagcccaccccctgggccgaggaggagaccgtggccgccgcccagctgatcaccatgctgtggagcctgtctgtgtcctcctttgctgtgggcggcatgacagccagcttcttcggcggctggctgggggacaccctgggccgcatcaaggccatgctggtggccaacatcctgagcctggtgggcgccctgctgatgggcttcagcaagctgggccccagccacatcctgatcatcgccggccgcagcatcagcggcctgtactgcggcctcatcagcggcctggtgcccatgtacatcggggagatcgcccccacagccctgcggggggccctgggcaccttccaccagctggccatcgtgacaggcatcctgatcagccagatcatcggcctggagttcatcctgggcaactatgacctgtggcacatcctgctgggcctgtctggagtgcgggccatcctgcagagcctgctgctcttcttctgcccagagagcccccgctacctgtacatcaagctggatgaggaggtgaaggccaagcagagcctgaagaggctgcggggctatgatgatgtgaccaaggacatcaatgagatgaggaaggagcgggaggaggccagcagcgagcagaaggtgtccatcatccagctgttcaccaacagcagctaccggcagcccatcctggtggccctgatgctgcacgtggcccagcagttcagcggcatcaatggcatcttctactacagcaccagcatcttccagacagctggcatcagcaagcctgtgtatgccaccatcggcgtgggcgctgtgaacatggtgttcaccgctgtgtctgtgttcctggtggagaaggccggcagaagaagcctcttcctgattggcatgagcggcatgtttgtgtgtgccatcttcatgtctgtgggcctggtgctgctgaacaagttctcctggatgtcctatgtgtccatgattgccatcttcctgtttgtgtccttctttgaaattggccctggccccatcccctggttcatggtggccgagttcttcagccagggccccaggcctgctgccctggccatcgccgccttcagcaactggacctgcaacttcatcgtggccctgtgcttccagtacatcgctgacttctgtggcccctacgtgttcttcctgtttgctggggtgctgctggccttcaccctcttcaccttcttcaaggtgcctgagaccaagggcaagagctttgaggagattgctgctgagttccagaagaagagcggcagcgcccaccggcccaaggctgctgtggagatgaagttcctgggcgccacagaaacagtgtag

SEQ ID NO: 7338 - DNA, 1575 bp, Artificial Sequence
  derived and/or modified sequence
atgaccgaggacaaggtgaccggcaccctggtgttcaccgtgatcacagctgtgttgggctctttccagttcggatacgatatcggggtgattaacgctccccagcaggtcatcattagtcattatcggcacgttcttggggtcccattggatgatcgcaaggccatcaacaattacgtcatcaactcaacagatgaactccctacaatcagttactccatgaatcccaaacccactccatgggccgaggaagagactgttgccgccgcgcagttgatcacaatgctttggagcctgagcgtttcaagtttcgccgttggtggtatgacagcttccttcttcggcggctggctcggggacactctgggtcgaattaaggcaatgctggtggccaatattcttagcctggtgggagccctgctgatgggatttagcaaattgggacccagtcacattctcatcatcgcaggtcggtccataagtggactgtactgtggcctgatcagtggtctggtccctatgtacatcggcgaaattgcccccaccgcgctgaggggagctctggggaccttccaccagctggccattgtcaccgggatcctcatttcccaaattattggattggagttcatcctcggcaactatgatctgtggcatattctgctgggcctgtcaggcgtccgcgctatcctgcagtcactgttacttttcttttgtcccgagagtccccgttacctttacataaagcttgatgaggaagttaaggccaagcagtcactcaagagactacgagggtacgatgacgtgactaaggacatcaacgagatgcgcaaggagcgcgaggaagcatcaagcgagcagaaagtaagtattatacagctcttcactaatagtagctacaggcaaccgatcctcgtcgcccttatgctccacgtggctcagcagttcagcggcattaatggcatattctattacagtacctccatcttccagaccgccggcatctccaagccagtctacgccacaatcggggtcggagccgtgaacatggtttttacagcggtgtctgtcttcctggtagagaaagcgggacgccgttcactgttcttgatcgggatgtccggtatgttcgtgtgcgcgatcttcatgagtgtaggcttggtgcttctcaataagtttagttggatgagctatgttagcatgatcgccatctttctgtttgtatcttttttcgagattggccctggaccaattccttggtttatggttgccgaattcttctcacaggggccgaggccagccgcactggctatcgctgcattctccaattggacctgcaattttattgtggccctatgcttccagtacattgccgatttctgcgggccgtatgtgttctttctcttcgcgggcgtccttctcgcatttacacttttcaccttctttaaggttcctgaaacaaaaggcaagtctttcgaagaaatcgcagccgagtttcagaaaaagagtgggagcgcccatagacccaaagcagctgtggaaatgaaattcctgggggcaacagaaactgtttag

SEQ ID NO: 7339 - DNA, 1575 bp, Artificial Sequence
  derived and/or modified sequence
atgactgaagataaggtgaccggaacgctggtattcaccgtgatcacagccgttctcggtagttttcagttcggatacgacatcggtgtaatcaacgctccgcagcaggttattatttcccactacagacacgtgttgggggtgccattggatgaccgcaaggctattaacaactacgtgattaacagtactgacgagcttcccactataagttatagcatgaatccaaaaccaaccccttgggcagaggaggagacagtggccgcagcacaactcatcaccatgctatggagcctgagcgtcagctcatttgcagttggtggaatgactgcctcatttttcggcggatggttaggtgatacactgggtcgtataaaggctatgttagtagccaatattttgtctctcgttggggcactgctgatgggtttcagcaaactaggaccatcccacatcctgattattgcagggaggagtatctctggcctgtattgtggcctgatttccggactggtgcccatgtatataggtgagatagccccaacagctctcagaggggctttggggacattccaccagttagcaattgtgactggcattttgattagccaaattattggcctggagttcattttaggcaattatgacttgtggcacattctcctgggattatctggtgtgagagccatcctccaatcgcttctcctgttcttctgcccggaatcgccaagatacttgtatatcaaactggacgaggaagtgaaagcaaagcagagtttgaaaagactgagaggctacgatgatgtaactaaagacatcaatgaaatgagaaaagagcgagaagaggcctctagcgaacagaaagtaagcattatccagctgtttaccaatagctcctacaggcaacctatccttgtggctcttatgctacacgtcgcccaacagttttcaggcataaatggaatcttctactacagcaccagcattttccagaccgctgggattagcaaacctgtttacgccacgattggcgtcggtgcagtcaacatggtttttaccgccgtctccgtctttcttgtggagaaggccggacgacgctccctgtttctgatagggatgtctggaatgtttgtgtgtgccatctttatgagtgtcggccttgtgctgttgaataagttcagttggatgagctatgtgtctatgatcgccatcttcctgttcgtgagtttttttgaaattggacctggtccaatcccttggttcatggtcgctgagttcttcagtcagggccctaggccggctgccctggcgattgcggcattttccaactggacttgtaatttcatagttgccctgtgctttcaatacattgctgacttctgcggcccttacgtgttcttcctttttgccggagtactgctggccttcaccctatttacattctttaaagtgcctgagaccaagggcaaaagcttcgaagaaatcgccgctgagtttcaaaaaaaatctggcagtgcccacaggcccaaggctgctgtggagatgaagttcctgggggcaacagagacagtgtag

SEQ ID NO: 7340 - DNA, 3210 bp, Artificial Sequence
  derived and/or modified sequence
aataaacaggcaggagctagtcaggtgcatgtgccacactcacacaagacctggaattgacaggactcccaactagtacaatgacagaagataaggtcactgggaccctggttttcactgtcatcactgctgtgctgggttccttccagtttggatatgacattggtgtgatcaatgcacctcaacaggtaataatatctcactatagacatgttttgggtgttccactggatgaccgaaaagctatcaacaactatgttatcaacagtacagatgaactgcccacaatctcatactcaatgaacccaaaaccaaccccttgggctgaggaagagactgtggcagctgctcaactaatcaccatgctctggtccctgtctgtatccagctttgcagttggtggaatgactgcatcattctttggtgggtggcttggggacacacttggaagaatcaaagccatgttagtagcaaacattctgtcattagttggagctctcttgatggggttttcaaaattgggaccatctcatatacttataattgctggaagaagcatatcaggactatattgtgggctaatttcaggcctggttcctatgtatatcggtgaaattgctccaaccgctctcaggggagcacttggcacttttcatcagctggccatcgtcacgggcattcttattagtcagattattggtcttgaatttatcttgggcaattatgatctgtggcacatcctgcttggcctgtctggtgtgcgagccatccttcagtctctgctactctttttctgtccagaaagccccagatacctttacatcaagttagatgaggaagtcaaagcaaaacaaagcttgaaaagactcagaggatatgatgatgtcaccaaagatattaatgaaatgagaaaagaaagagaagaagcatcgagtgagcagaaagtctctataattcagctcttcaccaattccagctaccgacagcctattctagtggcactgatgctgcatgtggctcagcaattttccggaatcaatggcattttttactactcaaccagcatttttcagacggctggtatcagcaaacctgtttatgcaaccattggagttggcgctgtaaacatggttttcactgctgtctctgtattccttgtggagaaggcagggcgacgttctctctttctaattggaatgagtgggatgtttgtttgtgccatcttcatgtcagtgggacttgtgctgctgaataagttctcttggatgagttatgtgagcatgatagccatcttcctctttgtcagcttctttgaaattgggccaggcccgatcccctggttcatggtggctgagtttttcagtcaaggaccacgtcctgctgctttagcaatagctgcattcagcaattggacctgcaatttcattgtagctctgtgtttccagtacattgcggacttctgtggaccttatgtgtttttcctctttgctggagtgctcctggcctttaccctgttcacattttttaaagttccagaaaccaaaggaaagtcttttgaggaaattgctgcagaattccaaaagaagagtggctcagcccacaggccaaaagctgctgtagaaatgaaattcctaggagctacagagactgtgtaaaaaaaaaaccctgctttttgacatgaacagaaacaataagggaaccgtctgtttttaaatgatgattccttgagcattttatatccacatctttaagtattgttttatttttatgtgctctcatcagaaatgtcatcaaatattaccaaaaaagtatttttttaagttagagaatatatttttgatggtaagactgtaattaagtaaaccaaaaaggctagtttattttgttacactaaagggcaggtggttctaatatttttagctctgttctttataacaaggttcttctaaaattgaagagatttcaacatatcatttttttaacacataactagaaacctgaggatgcaacaaatatttatatatttgaatatcattaaattggaattttcttacccatatatcttatgttaaaggagatatggctagtggcaataagttccatgttaaaatagacaactcttccatttattgcactcagcttttttcttgagtactagaatttgtattttgcttaaaattttacttttgttctgtattttcatgtggaatggattatagagtatactaaaaaatgtctatagagaaaaactttcatttttggtaggcttatcaaaatctttcagcactcagaaaagaaaaccattttagttcctttatttaatggccaaatggtttttgcaagatttaacactaaaaaggtttcacctgatcatatagcgtgggttatcagttaacattaacatctattataaaaccatgttgattcccttctggtacaatcctttgagttatagtttgctttgctttttaattgaggacagcctggttttcacatacactcaaacaatcatgagtcagacatttggtatattacctcaaattcctaataagtttgatcaaatctaatgtaagaaaatttgaagtaaaggattgatcactttgttaaaaatattttctgaattattatgtctcaaaataagttgaaaaggtagggtttgaggattcctgagtgtgggcttctgaaacttcataaatgttcagcttcagacttttatcaaaatccctatttaattttcctggaaagactgattgttttatggtgtgttcctaacataaaataatcgtctcctttgacatttccttctttgtcttagctgtatacagattctagccaaactattctatggccattactaacacgcattgtacactatctatctgcctttacctacataggcaaattggaaatacacagatgattaaacagactttagcttacagtcaattttacaattatggaaatatagttctgatgggtcccaaaagcttagcagggtgctaacgtatctctaggctgttttctccaccaactggagcactgatcaatccttcttatgtttgctttaatgtgtattgaagaaaagcactttttaaaaagtactctttaagagtgaaataattaaaaaccactgaacatttgctttgttttctaaagttgttcacatatatgtaatttagcagtccaaagaacaagaaattgtttcttttc

SEQ ID NO: 7341 - protein, 685 aa, Artificial Sequence
  derived and/or modified sequence
MAEDKSKRDSIEMSMKGCQTNNGFVHNEDILEQTPDPGSSTDNLKHSTRGILGSQEPDFKGVQPYAGMPKEVLFQFSGQARYRIPREILFWLTVASVLVLIAATIAIIALSPKCLDWWQEGPMYQIYPRSFKDSNKDGNGDLKGIQDKLDYITALNIKTVWITSFYKSSLKDFRYGVEDFREVDPIFGTMEDFENLVAAIHDKGLKLIIDFIPNHTSDKHIWFQLSRTRTGKYTDYYIWHDCTHENGKTIPPNNWLSVYGNSSWHFDEVRNQCYFHQFMKEQPDLNFRNPDVQEEIKEILRFWLTKGVDGFSLDAVKFLLEAKHLRDEIQVNKTQIPDTVTQYSELYHDFTTTQVGMHDIVRSFRQTMDQYSTEPGRYRFMGTEAYAESIDRTVMYYGLPFIQEADFPFNNYLSMLDTVSGNSVYEVITSWMENMPEGKWPNWMIGGPDSSRLTSRLGNQYVNVMNMLLFTLPGTPITYYGEEIGMGNIVAANLNESYDINTLRSKSPMQWDNSSNAGFSEASNTWLPTNSDYHTVNVDVQKTQPRSALKLYQDLSLLHANELLLNRGWFCHLRNDSHYVVYTRELDGIDRIFIVVLNFGESTLLNLHNMISGLPAKMRIRLSTNSADKGSKVDTSGIFLDKGEGLIFEHNTKNLLHRQTAFRDRCFVSNRACYSSVLNILYTSC

SEQ ID NO: 7342 - protein, 621 aa, Artificial Sequence
  derived and/or modified sequence
MKTFWSRPRIQFSGQARYRIPREILFWLTVASVLVLIAATIAIIALSPKCLDWWQEGPMYQIYPRSFKDSNKDGNGDLKGIQDKLDYITALNIKTVWITSFYKSSLKDFRYGVEDFREVDPIFGTMEDFENLVAAIHDKGLKLIIDFIPNHTSDKHIWFQLSRTRTGKYTDYYIWHDCTHENGKTIPPNNWLSVYGNSSWHFDEVRNQCYFHQFMKEQPDLNFRNPDVQEEIKEILRFWLTKGVDGFSLDAVKFLLEAKHLRDEIQVNKTQIPDTVTQYSELYHDFTTTQVGMHDIVRSFRQTMDQYSTEPGRYRFMGTEAYAESIDRTVMYYGLPFIQEADFPFNNYLSMLDTVSGNSVYEVITSWMENMPEGKWPNWMIGGPDSSRLTSRLGNQYVNVMNMLLFTLPGTPITYYGEEIGMGNIVAANLNESYDINTLRSKSPMQWDNSSNAGFSEASNTWLPTNSDYHTVNVDVQKTQPRSALKLYQDLSLLHANELLLNRGWFCHLRNDSHYVVYTRELDGIDRIFIVVLNFGESTLLNLHNMISGLPAKMRIRLSTNSADKGSKVDTSGIFLDKGEGLIFEHNTKNLLHRQTAFRDRCFVSNRACYSSVLNILYTSC

SEQ ID NO: 7343 - protein, 551 aa, Artificial Sequence
  derived and/or modified sequence
MAEDKSKRDSIEMSMKGCQTNNGFVHNEDILEQTPDPGSSTDNLKHSTRGILGSQEPDFKGVQPYAGMPKEVLFQFSGQARYRIPREILFWLTVASVLVLIAATIAIIALSPKCLDWWQEGPMYQIYPRSFKDSNKDGNGDLKGIQDKLDYITALNIKTVWITSFYKSSLKDFRYGVEDFREVDPIFGTMEDFENLVAAIHDKGLKLIIDFIPNHTSDKHIWFQLSRTRTGKYTDYYIWHDCTHENGKTIPPNNWLSVYGNSSWHFDEVRNQCYFHQFMKEQPDLNFRNPDVQEEIKEILRFWLTKGVDGFSLDAVKFLLEAKHLRDEIQVNKTQIPDTVTQYSELYHDFTTTQVGMHDIVRSFRQTMDQYSTEPGRYRFMGTEAYAESIDRTVMYYGLPFIQEADFPFNNYLSMLDTVSGNSVYEVITSWMENMPEGKWPNWMIGGPDSSRLTSRLGNQYVNVMNMLLFTLPGTPITYYGEEIGMGNIVAANLNESYDINTLRSKSPMQWDNSSNAGFSEASNTWLPTNSDYHTVNVDVLLRHPCSSAVA

SEQ ID NO: 7344 - DNA, 2058 bp, Artificial Sequence
  derived and/or modified sequence
atggccgaagataaatcgaagcgcgacagcatcgagatgtctatgaaagggtgccagaccaacaacggatttgtgcacaacgaggacatcctagagcaaacacccgatccagggtccagtacggataacctcaagcatagcacccgggggattctaggatcccaggagcctgatttcaagggcgttcagccttatgcaggcatgccgaaggaggtgttgtttcagttctccggccaggccagataccgcatcccccgagagatcctcttttggctgacagttgctagcgtgcttgttctcattgccgcgaccatagccatcatcgctctctctccaaagtgtcttgattggtggcaggagggacctatgtaccaaatctacccaagatcctttaaggactctaataaggatggtaacggcgacttaaaggggatccaggacaaactggattatattactgcactgaacattaagacagtgtggatcaccagcttttataaaagcagcctgaaagactttcgatatggagtggaagactttagggaagtggaccctatttttggcacaatggaggactttgagaatcttgttgccgcgatccacgataaggggcttaagctcattatcgacttcatcccaaatcatacctccgacaaacacatctggttccagctttccagaactaggactggcaaatatactgactactatatctggcacgattgtactcatgaaaatggcaagacgattcctccgaataattggctctccgtgtacgggaacagcagctggcactttgatgaagtgagaaaccagtgttatttccatcaattcatgaaggaacagcccgacctaaattttcgaaatccagacgtccaggaggagataaaagagatccttagattctggctgaccaaaggcgtggatgggttctcacttgacgccgtcaagtttttgctggaagctaagcacctgcgagacgagatccaggtgaacaagacccaaatcccggataccgttacccagtattcagagctgtatcatgatttcaccaccacccaggtgggcatgcacgacattgttcgctcctttcgccagactatggaccaatactcaactgaaccggggagatataggtttatgggaaccgaggcctatgccgagtccattgacagaaccgtcatgtactacggcttgcctttcattcaggaagccgattttcctttcaacaactacctgtctatgctagacactgtaagtggcaactccgtgtacgaggtgataacctcatggatggagaacatgcccgagggcaagtggcctaactggatgatcggcgggcctgattcctcccgcctgacaagtcggctaggcaaccagtatgtgaatgtgatgaatatgctcctgttcacccttccaggcactcctatcacatactacggcgaggagatcggcatgggaaacatcgtagcagccaacctaaacgagagttacgatattaacaccttaagatcgaaatcacctatgcagtgggataacagttctaacgcggggttttctgaagcctccaatacctggctgcccacaaatagcgactatcacacagttaacgtggacgtccagaaaacacagccacggtccgccttaaagctgtatcaggatttaagtttgttacatgcaaacgagctgttgctgaacagggggtggttttgccacttgcgcaatgactctcattatgtcgtctatacccgtgagttggatggaatcgaccgcattttcatcgtcgttctgaatttcggagaaagtaccctactgaacctccacaatatgattagtggccttccagctaagatgcggatcaggctgagcactaactcagcagacaaagggagtaaagtggatacgtctggcatcttccttgataagggcgagggcctgatttttgagcacaatactaaaaacctgctacacagacagaccgccttccgggacaggtgtttcgtttcgaatcgagcctgctatagcagcgtacttaacatactttatacctcctgttag

SEQ ID NO: 7345 - DNA, 1866 bp, Artificial Sequence
  derived and/or modified sequence
atgaaaaccttttggagtaggcctcggatccagttttcaggacaggcccgctatagaatacctagggaaatactgttctggctgactgtggcaagcgtgctggtgctcatagccgccaccatagcaatcatcgccctctctcctaaatgtctggattggtggcaggaaggtcctatgtatcagatctacccaaggtctttcaaggactctaataaggacggtaacggtgacctgaaaggcatacaggataagttggactacattacagcattgaatatcaagacagtctggatcacttccttttataaatccagtctgaaggacttccggtacggcgttgaagacttccgcgaagtggaccccatattcggcacgatggaggacttcgaaaatctcgtcgcagccatccacgataagggactgaagcttatcatcgacttcattcccaaccacaccagtgataagcacatctggttccaactgagtcggacacgcaccggtaagtacaccgattattacatctggcatgactgcacccacgaaaacgggaaaaccatcccacccaacaactggctctcagtgtatgggaattcttcttggcactttgacgaggtccggaaccagtgttattttcatcagttcatgaaggagcaacccgacctgaacttccgtaacccagacgtgcaggaagagatcaaggagatcttgcgtttctggttgaccaaaggagtggatggcttttccctggatgccgtcaaattcctgctggaagctaagcacctgagagacgaaatacaggtgaataaaacccagattccagatacagttacacagtacagtgagctctaccatgacttcacaacaacacaagtgggtatgcatgatatagttcgctcgttccggcagactatggaccagtactcaaccgagccagggcgctataggttcatgggcactgaagcttacgccgagtccatcgacagaacagttatgtattacggactgccgttcatccaggaagcagatttccctttcaataactaccttagcatgttagacacagtttcaggtaatagtgtgtacgaagttatcacctcatggatggagaacatgccagaagggaagtggcccaactggatgatcgggggccctgatagtagccgcctgacaagcaggctgggaaatcagtatgtcaatgtcatgaacatgctgctctttactctgccaggcacccccataacgtattacggagaggaaatcgggatgggaaatatagtggcagccaatctcaacgagtcctacgacatcaacaccctgagatcaaaaagtcctatgcagtgggataacagttctaatgcagggttctctgaagccagcaatacatggctccccaccaattcggactaccatacagtgaatgtcgatgtgcagaaaacgcagccccgaagcgcactgaaactgtatcaggacctctcacttttacatgcaaatgaactcttgctaaatagaggttggttctgccacttgcgtaacgatagtcactacgttgtctacacacgcgaactcgatggtattgacagaattttcatagtggtgctgaattttggcgagagcaccttactaaacctacataatatgatctccggactccctgcgaagatgcgcattcggctgagtacaaattccgcagacaaggggtcaaaagtcgatacaagtggcatttttctggataaaggagagggtctgatctttgagcacaatactaagaaccttttacaccgccagactgcttttcgagatcgctgctttgtttccaacagggcctgttacagcagtgttctcaacatcctgtatacatcttgttag

SEQ ID NO: 7346 - DNA, 1656 bp, Artificial Sequence
  derived and/or modified sequence
atggctgaagataagtctaagcgggattctatcgagatgtcgatgaagggttgtcagactaacaacggattcgttcataacgaggacattctcgaacagacaccagatccaggttcaagcactgacaatctgaaacattcaacgaggggaattttggggtctcaggagcccgatttcaagggagtccagccttatgccgggatgccaaaagaggtgctgtttcagttttccggccaggcacggtaccgaatccctagggagattctgttctggctgaccgtagccagcgtcctcgtcttaattgctgccacaattgcgattatcgcactgagtcccaaatgtttagactggtggcaggagggtcccatgtaccaaatctatcccagaagcttcaaggatagcaacaaagatggaaacggagacctgaagggaatccaggataagttagactatattacagcactgaacataaagacagtctggatcacctctttctataagtcctcactgaaagatttcaggtatggcgttgaagatttcagggaggtggatcccatttttgggaccatggaagacttcgaaaatctggtggccgccatccacgacaaaggattgaagttgattattgacttcatcccgaaccataccagcgataaacacatatggttccagcttagcaggactagaactggcaagtacactgattactatatttggcacgactgtacacacgaaaatggaaagactatccctcccaataactggctatcggtgtacggcaattccagttggcacttcgacgaagtcaggaaccagtgctatttccaccagtttatgaaggaacaaccagatcttaatttcagaaatccggacgttcaagaggaaattaaggagatcctgaggttttggctgactaagggcgtggatggcttctctctggacgctgttaagtttttgctagaggccaagcacctgcgagatgaaatccaggtgaacaagacccaaatccccgacactgtgacacagtacagcgagctgtatcacgactttaccactacacaggttggaatgcatgacatcgtaagaagctttcgacagaccatggatcaatatagcaccgagccaggaagataccgcttcatgggaactgaggcttacgcggaatcaattgacaggacagtgatgtactatggcctccctttcatccaagaagccgacttcccattcaataactatttgagcatgctggataccgtgagcggtaacagcgtatatgaggtgataacttcttggatggagaatatgcctgagggcaaatggcccaactggatgataggcggcccagatagctccaggcttacctctaggctcggtaaccaatatgtgaacgttatgaatatgctcctgttcacgcttcccggcaccccaatcacctactacggggaagagatcgggatggggaatatcgttgccgctaaccttaatgaatcctatgacataaatactcttaggtccaagtcacccatgcagtgggacaacagctctaatgctggctttagtgaagcgagcaacacctggctgccaactaattctgattatcacaccgtgaacgttgatgtgcttctgcgtcacccatgtagctctgcggtggcctag

SEQ ID NO: 7347 - DNA, 2058 bp, Artificial Sequence
  derived and/or modified sequence
atggccgaggacaagagcaagagggacagcattgagatgtccatgaagggctgccagaccaacaacggctttgtgcacaatgaagacatcctggagcagaccccagaccccggcagcagcacagacaacctgaagcacagcacccggggcatcctgggcagccaggagccagacttcaagggcgtgcagccctatgccggcatgcccaaggaggtgctcttccagttcagcggccaggcccgctaccgcatcccccgggagatcctcttctggctgactgtggcctctgtgctggtgctgattgctgccaccatcgccatcatcgccctgagccccaagtgcctggactggtggcaggagggccccatgtaccagatctaccccaggagcttcaaggacagcaacaaggatggaaatggagacctgaagggcatccaggacaagctggactacatcacagccctgaacatcaagacagtgtggatcaccagcttctacaagagcagcctgaaggacttccgctatggagtggaggacttccgggaggtggaccccatcttcggcaccatggaggactttgagaacctggtggccgccatccatgacaagggcctgaagctgatcatcgacttcatccccaaccacaccagtgacaagcacatctggttccagctgagcaggaccaggacaggcaagtacacagactactacatctggcatgactgcacccatgaaaatggcaagaccatcccccccaacaactggctgtctgtgtatggcaacagctcctggcactttgatgaggtgaggaaccagtgctacttccaccagttcatgaaggagcagcctgacctgaacttcaggaacccagatgtgcaggaggagatcaaggagatcctgcgcttctggctgaccaagggcgtggatggcttcagcctggatgctgtgaagttcctgctggaggccaagcacctgagagatgagatccaggtgaacaagacccagatcccagacacagtgacccagtacagcgagctgtaccatgacttcaccaccacccaggtgggcatgcatgacatcgtgcgctccttccggcagaccatggaccagtacagcacagagcccggccgctaccgcttcatgggcacagaggcctatgcagagagcattgacagaacagtgatgtactacggcctgcccttcatccaggaggccgacttccccttcaacaactacctgtccatgctggacacagtgtctggcaacagcgtgtatgaagtcatcacctcctggatggagaacatgcctgagggcaagtggcccaactggatgattggaggccctgacagcagccggctgaccagccggctgggcaaccagtatgtgaatgtgatgaacatgctgctcttcaccctgcccggcacccccatcacctactacggggaggagatcggcatgggcaacatcgtggccgccaacctgaatgaaagctatgacatcaacaccctgcggagcaagagccccatgcagtgggacaacagcagcaatgccggcttcagcgaggccagcaacacctggctgcccaccaacagcgactaccacacagtgaatgtggatgtgcagaagacccagcccaggtctgccctgaagctgtaccaggacctgagcctgctgcacgccaatgagctgctgctgaacagaggctggttctgccacctgagaaatgacagccactacgtggtgtacacccgggagctggatggcatcgaccgcatcttcatcgtggtgctgaactttggagagagcaccctgctgaacctgcacaacatgatcagcggcctgcctgccaagatgaggatccggctgagcaccaacagcgctgacaagggcagcaaggtggacaccagcggcatcttcctggacaagggggagggcctcatctttgagcacaacaccaagaacctgctgcaccggcagacagccttccgggaccgctgctttgtgagcaacagagcctgctacagctctgtgctgaacatcctgtacaccagctgctag

SEQ ID NO: 7348 - DNA, 1866 bp, Artificial Sequence
  derived and/or modified sequence
atgaagaccttctggagccggccccgcatccagttcagcggccaggcccgctaccgcatcccccgggagatcctcttctggctgactgtggcctctgtgctggtgctgattgctgccaccatcgccatcatcgccctgagccccaagtgcctggactggtggcaggagggccccatgtaccagatctaccccaggagcttcaaggacagcaacaaggatggaaatggagacctgaagggcatccaggacaagctggactacatcacagccctgaacatcaagacagtgtggatcaccagcttctacaagagcagcctgaaggacttccgctatggagtggaggacttccgggaggtggaccccatcttcggcaccatggaggactttgagaacctggtggccgccatccatgacaagggcctgaagctgatcatcgacttcatccccaaccacaccagtgacaagcacatctggttccagctgagcaggaccaggacaggcaagtacacagactactacatctggcatgactgcacccatgaaaatggcaagaccatcccccccaacaactggctgtctgtgtatggcaacagctcctggcactttgatgaggtgaggaaccagtgctacttccaccagttcatgaaggagcagcctgacctgaacttcaggaacccagatgtgcaggaggagatcaaggagatcctgcgcttctggctgaccaagggcgtggatggcttcagcctggatgctgtgaagttcctgctggaggccaagcacctgagagatgagatccaggtgaacaagacccagatcccagacacagtgacccagtacagcgagctgtaccatgacttcaccaccacccaggtgggcatgcatgacatcgtgcgctccttccggcagaccatggaccagtacagcacagagcccggccgctaccgcttcatgggcacagaggcctatgcagagagcattgacagaacagtgatgtactacggcctgcccttcatccaggaggccgacttccccttcaacaactacctgtccatgctggacacagtgtctggcaacagcgtgtatgaagtcatcacctcctggatggagaacatgcctgagggcaagtggcccaactggatgattggaggccctgacagcagccggctgaccagccggctgggcaaccagtatgtgaatgtgatgaacatgctgctcttcaccctgcccggcacccccatcacctactacggggaggagatcggcatgggcaacatcgtggccgccaacctgaatgaaagctatgacatcaacaccctgcggagcaagagccccatgcagtgggacaacagcagcaatgccggcttcagcgaggccagcaacacctggctgcccaccaacagcgactaccacacagtgaatgtggatgtgcagaagacccagcccaggtctgccctgaagctgtaccaggacctgagcctgctgcacgccaatgagctgctgctgaacagaggctggttctgccacctgagaaatgacagccactacgtggtgtacacccgggagctggatggcatcgaccgcatcttcatcgtggtgctgaactttggagagagcaccctgctgaacctgcacaacatgatcagcggcctgcctgccaagatgaggatccggctgagcaccaacagcgctgacaagggcagcaaggtggacaccagcggcatcttcctggacaagggggagggcctcatctttgagcacaacaccaagaacctgctgcaccggcagacagccttccgggaccgctgctttgtgagcaacagagcctgctacagctctgtgctgaacatcctgtacaccagctgctag

SEQ ID NO: 7349 - DNA, 1656 bp, Artificial Sequence
  derived and/or modified sequence
atggccgaggacaagagcaagagggacagcattgagatgtccatgaagggctgccagaccaacaacggctttgtgcacaatgaagacatcctggagcagaccccagaccccggcagcagcacagacaacctgaagcacagcacccggggcatcctgggcagccaggagccagacttcaagggcgtgcagccctatgccggcatgcccaaggaggtgctcttccagttcagcggccaggcccgctaccgcatcccccgggagatcctcttctggctgactgtggcctctgtgctggtgctgattgctgccaccatcgccatcatcgccctgagccccaagtgcctggactggtggcaggagggccccatgtaccagatctaccccaggagcttcaaggacagcaacaaggatggaaatggagacctgaagggcatccaggacaagctggactacatcacagccctgaacatcaagacagtgtggatcaccagcttctacaagagcagcctgaaggacttccgctatggagtggaggacttccgggaggtggaccccatcttcggcaccatggaggactttgagaacctggtggccgccatccatgacaagggcctgaagctgatcatcgacttcatccccaaccacaccagtgacaagcacatctggttccagctgagcaggaccaggacaggcaagtacacagactactacatctggcatgactgcacccatgaaaatggcaagaccatcccccccaacaactggctgtctgtgtatggcaacagctcctggcactttgatgaggtgaggaaccagtgctacttccaccagttcatgaaggagcagcctgacctgaacttcaggaacccagatgtgcaggaggagatcaaggagatcctgcgcttctggctgaccaagggcgtggatggcttcagcctggatgctgtgaagttcctgctggaggccaagcacctgagagatgagatccaggtgaacaagacccagatcccagacacagtgacccagtacagcgagctgtaccatgacttcaccaccacccaggtgggcatgcatgacatcgtgcgctccttccggcagaccatggaccagtacagcacagagcccggccgctaccgcttcatgggcacagaggcctatgcagagagcattgacagaacagtgatgtactacggcctgcccttcatccaggaggccgacttccccttcaacaactacctgtccatgctggacacagtgtctggcaacagcgtgtatgaagtcatcacctcctggatggagaacatgcctgagggcaagtggcccaactggatgattggaggccctgacagcagccggctgaccagccggctgggcaaccagtatgtgaatgtgatgaacatgctgctcttcaccctgcccggcacccccatcacctactacggggaggagatcggcatgggcaacatcgtggccgccaacctgaatgaaagctatgacatcaacaccctgcggagcaagagccccatgcagtgggacaacagcagcaatgccggcttcagcgaggccagcaacacctggctgcccaccaacagcgactaccacacagtgaatgtggatgtgctgctgcggcacccctgcagcagcgctgtggcctag

SEQ ID NO: 7350 - DNA, 2058 bp, Artificial Sequence
  derived and/or modified sequence
atggccgaggacaagagcaagcgggacagcatcgagatgagcatgaaggggtgccagacgaacaacggattcgtgcacaatgaagatatcttagaacagacccccgacccaggaagcagcacagataatctgaaacattcaactcgcggcatcctggggtcacaggagccggattttaagggtgtgcagccatatgcaggaatgcctaaggaggttttgtttcaattctctggtcaggcaagataccgcatcccgcgggaaatcctattttggcttaccgtcgcaagcgtcctcgtactgatcgcagccaccatcgcgattatcgcccttagtcctaagtgcctggattggtggcaggagggacctatgtaccaaatctatccccggagctttaaggattccaacaaagacggcaatggtgacctcaaaggaattcaggacaagctcgactacataaccgctctgaacataaagactgtttggatcacaagcttctacaagagctcactgaaggacttcaggtacggcgtggaagatttccgcgaagtagatccaatctttggcacaatggaggattttgaaaatctggtcgccgctatccatgacaagggactgaaactgatcatcgattttatccccaaccacaccagcgacaagcacatatggtttcagctgtctcggacacgaactgggaaatacacagactactacatatggcacgactgtacgcacgagaacgggaaaactattccgcccaacaattggttatcagtttacggaaattccagttggcacttcgacgaagtcagaaatcaatgctactttcaccagtttatgaaagagcagccagatctgaacttcaggaatccagatgtacaggaggagatcaaagaaattctgcgtttctggctcaccaagggcgtggatggcttctccttagatgccgtcaagtttttgttggaagcgaaacacctgcgggacgagattcaggtgaataaaacacagattccggatacagtgactcagtattccgaactgtatcacgactttacaacaacgcaggttggtatgcacgatattgtcaggtcttttagacagaccatggatcagtacagcactgaaccgggccggtaccggtttatggggaccgaggcctacgcagaatccattgatcgcacagtcatgtattacggactgcctttcattcaggaagctgattttccctttaataattatctgagcatgctcgatacagttagtggcaattcggtgtacgaagtcattaccagctggatggagaatatgccggagggcaagtggccaaactggatgatcggaggccccgacagcagcaggcttacaagccgcctgggaaatcagtatgtgaacgtgatgaatatgctgctctttacattaccaggaacccccattacatattacggagaggaaattgggatgggcaatatagtggctgctaatttaaacgagtcatatgacattaacacgctgagatccaagtctcctatgcagtgggacaacagcagcaatgccggtttcagcgaggccagtaacacctggttgccaaccaattccgactaccatacagtgaacgtggatgtacagaaaacccagccaaggtcggctctgaaactgtaccaggacctgtcgttactgcatgctaatgaacttctgctgaatagaggatggttctgccatcttaggaatgactcccattacgtcgtttatacccgcgagttggacggcatcgatagaatttttatagtcgtgctgaattttggcgagtctaccttgttaaatctgcataatatgatttccgggctcccggcaaagatgagaatcaggctctcaactaactccgcagacaaaggcagtaaagtcgatacctcaggaattttcctcgacaagggcgaaggactcatctttgagcacaatacaaaaaacttattacataggcagacagctttccgggacagatgctttgtttccaatcgtgcttgctacagctccgtgcttaacatactctatacgtcatgttag

SEQ ID NO: 7351 - DNA, 1866 bp, Artificial Sequence
  derived and/or modified sequence
atgaagaccttctggagccggccccggatccagttcagcggccaggcgcggtaccggatccctagggagatacttttttggctgaccgtggcgtctgtccttgtcttgattgctgcgaccattgctatcatagccttgtctccgaaatgcctcgactggtggcaggaaggtccaatgtatcagatttacccacgtagctttaaggactccaataaggacggcaatggggacctcaaggggattcaagataagctggattatatcactgcccttaacattaaaaccgtgtggatcacatctttttataaatctagccttaaggacttccgctacggcgtggaggattttcgcgaggtggacccaatcttcggaactatggaagactttgagaatctggtcgccgcaatccatgacaaggggctcaagctgattattgattttatccccaaccacaccagcgacaaacatatatggttccagctctctcgcaccagaacaggcaagtatactgactactatatttggcacgattgcacccacgaaaatgggaagactatcccgccaaataattggctatccgtctacgggaatagtagctggcacttcgatgaagtgcggaatcagtgttattttcatcagtttatgaaagaacaacccgacctgaatttccgcaatccagacgtgcaggaagaaatcaaagagatcctccggttctggctgacaaaaggagtcgacggtttttctttagacgccgtgaagtttctgttggaagcaaagcacctccgtgatgaaatccaagtcaataagactcagatccccgataccgtcacccagtactcagagttgtaccacgattttaccactacacaagtggggatgcacgacatcgtgcgcagttttcggcagactatggaccagtactccaccgagcctggcagataccgctttatgggcactgaggcgtatgcagagtctatcgatcgaacagtaatgtattacggtctccctttcatccaggaggcagatttccccttcaacaattacctcagtatgctcgacacagtttcgggcaacagcgtgtacgaggtgattacatcctggatggaaaacatgcctgagggcaagtggcccaactggatgatcggcggtcccgatagcagcagactgacctcgaggctgggcaaccagtatgtgaacgttatgaacatgctcctcttcactctgcccgggactccaatcacctactatggagaagaaatcggaatggggaacatcgttgctgctaatctgaatgaatcttatgatatcaataccctgcgctctaaatcccccatgcagtgggacaacagctccaacgcagggttttcagaagcctcaaatacatggcttccgacaaactctgactaccacaccgtcaacgtagacgtgcaaaaaacgcagccacgtagcgctctgaaactgtaccaggacctgagtctgctgcacgcgaatgaactcctgctgaatcgaggctggttctgtcatcttaggaacgattcccactacgtggtttacaccagagagctggatgggattgaccggatatttatagtcgtgctgaatttcggggagtccacactgttgaatctacacaacatgatttccgggctccctgccaagatgaggatacgcttgagcaccaattcagcagacaaagggagtaaggtagacacctcaggaatattcctggataagggcgaaggtctaattttcgagcataatactaaaaatctgctccaccgacagaccgcatttcgcgacagatgcttcgtgtccaacagagcatgctacagctccgtcctaaatatcttgtacacaagctgttag

SEQ ID NO: 7352 - DNA, 1656 bp, Artificial Sequence
  derived and/or modified sequence
atggccgaggacaagagcaagcgggacagcatcgagatgagcatgaagggatgccagaccaataatggatttgtgcacaacgaggacattctggaacaaacaccagaccccggttccagcacggataacctgaagcactctactcgggggatccttggatcccaggagccggattttaaaggtgtccagccatatgcaggcatgcctaaagaagtgctctttcagttcagcggccaagcgagatacagaatacctcgcgagatcctgttctggctgacagtcgcgagcgtgctcgtgctgatcgccgcgactatcgccatcattgccctaagtcctaagtgcttagactggtggcaggaaggccctatgtatcagatatatccacgatcatttaaggactccaacaaagatggcaacggggacctgaaggggattcaggacaagctggactatatcactgcactcaacatcaaaacagtgtggataacaagcttttacaagtcgtccttaaaggacttccggtacggcgtcgaggatttcagagaggtagatcctatatttgggactatggaggatttcgagaacctggtggctgccatccacgataagggtctcaaacttatcatcgatttcattcccaatcatacaagtgataaacacatctggtttcaactctcccgcactcgcacagggaaatacacagattattacatttggcatgactgtacccatgagaacgggaaaacgatccccccaaataattggctcagcgtgtacgggaactcctcctggcattttgacgaggtgagaaatcaatgttacttccatcaattcatgaaggagcaaccagacctgaactttagaaaccccgacgtccaggaagagataaaggagatcttgaggttttggctgactaagggagtggacgggttcagtctggatgccgtgaaatttctgttagaggcgaagcacttaagagacgagatccaggtcaacaaaacacaaataccagatacagtcacccagtacagcgagttgtaccacgatttcactaccacacaggtcggaatgcatgatatagtgcggtcctttcggcaaaccatggaccagtattctacagagcctgggcggtatcgtttcatgggaactgaagcctacgccgaatcaatcgaccggactgtgatgtattacggcctgcccttcatccaggaggccgactttccctttaacaattacctgtctatgctggatacagtgtcaggcaactctgtttacgaggtgatcacctcatggatggaaaacatgcccgaggggaaatggcccaactggatgatcgggggaccagattcttcacggctcacctctagattgggcaatcagtatgtgaacgtgatgaacatgctattgttcaccctcccaggcacaccgattacttactatggtgaagaaatcgggatgggaaacatcgttgccgcgaatctcaacgagtcgtacgatataaacactcttaggagcaagtcccccatgcagtgggacaatagctccaatgccggcttcagcgaagctagcaatacctggctgcctaccaacagcgattaccatacagtcaacgtggacgtgctgctcagacacccgtgctccagcgccgtagcctag

SEQ ID NO: 7353 - DNA, 2058 bp, Artificial Sequence
  derived and/or modified sequence
atggcggaagataaatcaaagagggattccatagagatgagcatgaagggatgccaaaccaataacgggttcgttcataacgaggatattctagagcagacccccgatccaggatccagcactgataacctcaagcatagcacaaggggcatactgggcagtcaggaacctgatttcaaaggcgtgcaaccttatgcaggaatgcccaaggaagtcctatttcagtttagcgggcaggcccgataccggatccctcgtgagatcctgttctggcttactgtggccagcgtcctcgttctgatcgctgccacgattgctatcattgcgctgagcccaaaatgtctggattggtggcaggaaggacccatgtaccaaatttatccaagaagcttcaaggactccaacaaggatggaaatggagatctgaaagggatccaggataaactggattatattaccgccctgaacatcaagactgtttggatcacttctttttacaaatcctcacttaaggacttccgctatggagtggaggacttccgtgaggtggatccaatatttggcactatggaagacttcgagaaccttgtcgccgcaatacacgacaagggattaaagttgataattgacttcatccccaaccacacttcggacaaacacatatggtttcagctgtcacgcactcggaccggtaagtacacggactattatatttggcatgattgcacacacgagaatggcaagaccattcctcccaacaattggctgtcagtgtacggtaatagcagttggcattttgacgaagtgaggaaccagtgctacttccatcaattcatgaaggagcagcccgaccttaattttagaaatcctgatgtacaggaagagattaaagagatcctccgattctggctgactaagggagtagatggattttctctggacgcagtcaaatttctcttggaggctaaacatctgagggacgaaatccaggttaataaaacgcagattcctgatactgttacgcaatacagtgaactctatcatgactttacaaccactcaggtgggtatgcatgatatcgtgcggtccttccgccagacaatggaccaatactcgacagagccaggcagatatcgctttatgggcactgaagcttatgccgaaagcatcgacagaaccgtgatgtactatggactccccttcatacaggaagcagattttcccttcaacaactatttgtccatgttagataccgtaagcggcaacagtgtgtacgaggtgattacatcatggatggagaacatgcctgaaggcaagtggcccaactggatgatcggaggcccagacagtagcagacttactagcaggctgggtaatcagtacgtaaatgtgatgaatatgctgcttttcactctgcccggtactcctatcacttattatggcgaagaaatcggtatggggaacatcgtggctgctaatctcaatgagagctatgatatcaatacacttaggtccaaaagtccaatgcagtgggacaactccagtaatgccggatttagcgaagcctccaatacctggctacccacaaattctgactaccatactgtgaacgtcgatgtccagaaaacacagccaagaagcgcgttgaagctgtatcaagacctgtccctgctgcacgccaacgaactgttactaaaccgcggttggttctgccatttgaggaacgattcccattatgttgtatacacacgcgagctggatggcatcgaccgaatcttcatcgtggtattaaacttcggggaatcaaccctgcttaacttgcataatatgatatcaggcctgcccgctaagatgaggattcgcctgtccactaactccgccgataaaggctctaaggttgatacttcgggtatctttctcgataaaggtgagggtttaatcttcgagcacaacaccaagaacctcttgcacaggcagacggccttcagggacaggtgcttcgtgtcaaacagggcgtgctactcgagtgttctgaacatcctatatacaagctgctag

SEQ ID NO: 7354 - DNA, 1866 bp, Artificial Sequence
  derived and/or modified sequence
atgaaaacattctggtctagacctagaatacagttctcaggccaagcaagatatcgcataccaagggaaatattattctggctgaccgtcgcaagcgtgctggttctgatcgccgctacaattgccatcattgccctgtctccgaaatgcctggactggtggcaggagggtcccatgtatcaaatttatccacgctcattcaaagactcgaataaggacgggaatggagatctgaaaggcatacaagataagcttgattatataactgctcttaacattaagacagtatggatcacctctttctataagtcgtcactgaaggacttccgctatggtgtcgaagacttccgcgaagtggacccaatctttgggacaatggaagacttcgaaaacctggtggctgctatccacgacaagggactgaagctcatcatcgatttcattccgaaccacacctccgacaagcatatatggttccagttatcccggactcgaactggtaaatacactgattactacatatggcacgattgtacccatgaaaacgggaaaacaatccccccaaataattggctcagtgtgtatggtaatagtagttggcacttcgacgaagtgcgaaatcagtgctacttccaccagttcatgaaggagcaaccggacctgaactttagaaaccctgacgtccaagaagagattaaagaaattctcaggttctggctgacaaagggcgtagacggctttagtctggacgccgtcaagtttctgctagaggctaaacacctgcgagacgagattcaggtcaacaagacacaaatacccgacaccgtgactcagtacagcgagctgtaccacgacttcacgacaacccaagtgggcatgcacgacatcgttcgcagtttcagacagacaatggaccagtactccactgagcccggacgctataggttcatgggtacggaagcttatgccgaatcaatcgacagaactgtcatgtactatggcctgccatttatccaagaggcagattttcctttcaacaattacctgtctatgctcgatacagtttcgggaaacagcgtttacgaagtaatcacttcatggatggagaatatgcctgaaggcaaatggcccaattggatgattggcggaccagatagtagtcgacttacatctagactggggaatcagtacgtgaacgttatgaatatgctgctcttcacccttccaggaacccccattacctattatggcgaagaaatcggtatggggaacattgtggctgctaatctgaatgagagctacgacatcaacactctgcgaagcaaaagcccgatgcaatgggacaacagctccaacgccggattcagtgaggcatccaacacgtggttacctactaattccgactaccacacggtcaatgtggatgtccaaaaaacccaaccacggtctgctttaaagctgtatcaagacctctctctcctacatgcaaacgaactgttattgaacagggggtggttttgtcacttgcgcaatgactctcactacgtggtctataccagagaattagacgggatcgatcgtattttcatcgtggttttaaactttggggagagcacgctgttaaaccttcataatatgatctccggactacccgctaagatgagaattcgcctttctacaaacagcgccgataaaggaagtaaggtggacacgtcggggatcttcctcgacaagggcgaggggcttatctttgagcacaacaccaaaaacctgctgcatagacagaccgcttttagggaccgttgtttcgtctcaaacagggcctgctactccagcgtgctgaacatcctatatacatcatgttag

SEQ ID NO: 7355 - DNA, 1656 bp, Artificial Sequence
  derived and/or modified sequence
atggccgaggataaatctaagagggatagtattgagatgtcaatgaaaggttgccagacaaacaacggcttcgtgcacaacgaagatatccttgagcagactcccgacccaggttcctctactgacaatttaaagcactcgacgcggggtatcctaggctcacaggagcctgacttcaagggcgtacagccgtatgctggcatgcctaaggaagtgttattccagttctccggtcaggcccgatatcggatcccacgggagattctcttttggctgactgtagcttcagttctggttctgattgccgcaacaatcgccattattgcattaagccccaaatgtctggattggtggcaggaggggcctatgtatcagatttatcctcgcagctttaaagacagcaacaaggacggaaacggagatttgaaaggcatccaggataagctggattacattaccgccctgaacatcaagacagtctggataacatccttctataagtcctctcttaaagattttcgctatggagtcgaagattttcgggaggtagatccaatattcggaaccatggaggacttcgagaacctggtggccgctatacacgacaagggcctgaaactcattatcgatttcattcccaaccacacaagcgacaaacatatttggttccagctttcacgtacccggaccggcaagtataccgattactacatatggcatgactgcacacatgagaatggcaaaacaatcccccctaacaactggcttagcgtgtatggaaatagctcttggcacttcgacgaggtgcgcaatcagtgttatttccaccaattcatgaaagaacagccagaccttaactttaggaatcccgacgtgcaggaggagattaaagagatactcagattttggctgaccaaaggcgtggatggttttagtctggacgctgtgaagttcttgctcgaagctaagcatcttagagacgaaatccaggtcaataagacgcagatccctgacactgtcacccaatactccgaactctaccacgactttacaaccacccaggtaggtatgcacgatatagtgcgatcgtttagacagactatggaccaatatagtacagagcctgggaggtaccggttcatggggaccgaggcctacgctgagagcatagacagaactgtgatgtattatggactgcctttcatccaagaggccgatttccctttcaataactatctgagtatgctggacaccgtaagcgggaactccgtgtacgaggttattaccagttggatggagaacatgcccgaaggaaaatggcctaattggatgatcgggggacctgacagttccaggcttacctcacggcttggaaaccagtatgtaaatgttatgaacatgctgctgtttacgctccctggtacaccaattacctactacggagaagagatcggcatgggcaatatagtggcagccaatctgaatgaaagctacgatataaacaccttgaggagtaagagtcccatgcagtgggacaacagctccaacgccggattctccgaagcatcaaacacttggctgcctaccaacagtgattaccacactgtcaatgtggatgtcctgctgagacatccttgttcttccgcagtggcatag

SEQ ID NO: 7356 - DNA, 2989 bp, Artificial Sequence
  derived and/or modified sequence
gaccaagcattcagcaagccactcttccacctcccttactgcaggaaggcactccgaagacataagtcggtgagacatggctgaagataaaagcaagagagactccatcgagatgagtatgaagggatgccagacaaacaacgggtttgtccataatgaagacattctggagcagaccccggatccaggaagctcaacagacaacctgaagcacagcaccaggggcatccttggctcccaggagcccgacttcaagggcgtccagccctatgcggggatgcccaaggaggtgctgttccagttctctggccaggcccgctaccgcatacctcgggagatcctcttctggctcacagtggcttctgtgctggtgctcatcgcggccaccatagccatcattgccctctctccaaagtgcctagactggtggcaggaggggcccatgtaccagatctacccaaggtctttcaaggacagtaacaaggatgggaacggagatctgaaaggtattcaagataaactggactacatcacagctttaaatataaaaactgtttggattacttcattttataaatcgtcccttaaagatttcagatatggtgttgaagatttccgggaagttgatcccatttttggaacgatggaagattttgagaatctggttgcagccatacatgataaaggtttaaaattaatcatcgatttcataccaaaccacacgagtgataaacatatttggtttcaattgagtcggacacggacaggaaaatatactgattattatatctggcatgactgtacccatgaaaatggcaaaaccattccacccaacaactggttaagtgtgtatggaaactccagttggcactttgacgaagtgcgaaaccaatgttattttcatcagtttatgaaagagcaacctgatttaaatttccgcaatcctgatgttcaagaagaaataaaagaaattttacggttctggctcacaaagggtgttgatggttttagtttggatgctgttaaattcctcctagaagcaaagcacctgagagatgagatccaagtaaataagacccaaatcccggacacggtcacacaatactcggagctgtaccatgacttcaccaccacgcaggtgggaatgcacgacattgtccgcagcttccggcagaccatggaccaatacagcacggagcccggcagatacaggttcatggggactgaagcctatgcagagagtattgacaggaccgtgatgtactatggattgccatttatccaagaagctgattttcccttcaacaattacctcagcatgctagacactgtttctgggaacagcgtgtatgaggttatcacatcctggatggaaaacatgccagaaggaaaatggcctaactggatgattggtggaccagacagttcacggctgacttcgcgtttggggaatcagtatgtcaacgtgatgaacatgcttcttttcacactccctggaactcctataacttactatggagaagaaattggaatgggaaatattgtagccgcaaatctcaatgaaagctatgatattaatacccttcgctcaaagtcaccaatgcagtgggacaatagttcaaatgctggtttttctgaagctagtaacacctggttacctaccaattcagattaccacactgtgaatgttgatgtccaaaagactcagcccagatcggctttgaagttatatcaagatttaagtctacttcatgccaatgagctactcctcaacaggggctggttttgccatttgaggaatgacagccactatgttgtgtacacaagagagctggatggcatcgacagaatctttatcgtggttctgaattttggagaatcaacactgttaaatctacataatatgatttcgggccttcccgctaaaatgagaataaggttaagtaccaattctgccgacaaaggcagtaaagttgatacaagtggcatttttctggacaagggagagggactcatctttgaacacaacacgaagaatctccttcatcgccaaacagctttcagagatagatgctttgtttccaatcgagcatgctattccagtgtactgaacatactgtatacctcgtgttaggcacctttatgaagagatgaagacactggcatttcagtgggattgtaagcatttgtaatagcttcatgtacagcatgctgcttggtgaacaatcattaattcttcgatatttctgtagcttgaatgtaactgctttaagaaaggttctcaaatgttttgaaaaaaataaaatgtttaaaagtaaattatggcttataggagcttataactttattcagatagcatcaatcagggatgaccagaacacattaggaccccagattattcaaaaactttaacgaattttaaggggaagaattttatcttttcccttaaaatgcagtcatagaaattagaggatgactcactgccacagtgtctaaaagcatttgctagcaaagaggcaggacactaatttgtaaactgctcaactgttctgactggaagggaggcctggagctctgctatcaccaatccttcccttccctctactccacatccttctaaggagcatgatttgaaaattactttcctaggttaatgggcatgtgcatcaatggagagaatagtataagcaagtgagatgtagactaagcaaaatttagatggagaagcacattttaaaaaattaataacttaaaagtctcaagttattaattttttttttgctaactcaattggaagtaagactatgaaatatttcagtgtgtttccaattcccagttgaatgcagtgtttcagaatttcaggtatttcttaagatcctcgaaaacactggtgctgtcaagtccaagttcctcgtacaggaatttaatttgggctgtaatctaaaagaaacacattaaaaaaattaaatagaaggcctttgtagtaaaa

SEQ ID NO: 7357 - DNA, 2184 bp, Artificial Sequence
  derived and/or modified sequence
cactcttccacctcccttactgcaggaaggcactccgaagacataagtcggtgagacatggctgaagataaaagcaagagagactccatcgagatgagtatgaagggatgccagacaaacaacgggtttgtccataatgaagacattctggagcagaccccggatccagttctctggccaggcccgctaccgcatacctcgggagatcctcttctggctcacagtggcttctgtgctggtgctcatcgcggccaccatagccatcattgccctctctccaaagtgcctagactggtggcaggaggggcccatgtaccagatctacccaaggtctttcaaggacagtaacaaggatgggaacggagatctgaaaggtattcaagataaactggactacatcacagctttaaatataaaaactgtttggattacttcattttataaatcgtcccttaaagatttcagatatggtgttgaagatttccgggaagttgatcccatttttggaacgatggaagattttgagaatctggttgcagccatacatgataaaggtttaaaattaatcatcgatttcataccaaaccacacgagtgataaacatatttggtttcaattgagtcggacacggacaggaaaatatactgattattatatctggcatgactgtacccatgaaaatggcaaaaccattccacccaacaactggttaagtgtgtatggaaactccagttggcactttgacgaagtgcgaaaccaatgttattttcatcagtttatgaaagagcaacctgatttaaatttccgcaatcctgatgttcaagaagaaataaaagaaattttacggttctggctcacaaagggtgttgatggttttagtttggatgctgttaaattcctcctagaagcaaagcacctgagagatgagatccaagtaaataagacccaaatcccggacacggtcacacaatactcggagctgtaccatgacttcaccaccacgcaggtgggaatgcacgacattgtccgcagcttccggcagaccatggaccaatacagcacggagcccggcagatacaggttcatggggactgaagcctatgcagagagtattgacaggaccgtgatgtactatggattgccatttatccaagaagctgattttcccttcaacaattacctcagcatgctagacactgtttctgggaacagcgtgtatgaggttatcacatcctggatggaaaacatgccagaaggaaaatggcctaactggatgattggtggaccagacagttcacggctgacttcgcgtttggggaatcagtatgtcaacgtgatgaacatgcttcttttcacactccctggaactcctataacttactatggagaagaaattggaatgggaaatattgtagccgcaaatctcaatgaaagctatgatattaatacccttcgctcaaagtcaccaatgcagtgggacaatagttcaaatgctggtttttctgaagctagtaacacctggttacctaccaattcagattaccacactgtgaatgttgatgtccaaaagactcagcccagatcggctttgaagttatatcaagatttaagtctacttcatgccaatgagctactcctcaacaggggctggttttgccatttgaggaatgacagccactatgttgtgtacacaagagagctggatggcatcgacagaatctttatcgtggttctgaattttggagaatcaacactgttaaatctacataatatgatttcgggccttcccgctaaaatgagaataaggttaagtaccaattctgccgacaaaggcagtaaagttgatacaagtggcatttttctggacaagggagagggactcatctttgaacacaacacgaagaatctccttcatcgccaaacagctttcagagatagatgctttgtttccaatcgagcatgctattccagtgtactgaacatactgtatacctcgtgttaggcacctttatgaagagatgaagacactggcatttcagtgggattgtaagcatttgtaatagcttcatgtacagcatgctgcttggtgaacaatcattaattcttcgatatttctgtagcttgaatgtaactgctttaagaaaggttctcaaatgttttgaaaaaaataaaatgtttaaaagt

SEQ ID NO: 7358 - DNA, 2240 bp, Artificial Sequence
  derived and/or modified sequence
atggctgaagataaaagcaagagagactccatcgagatgagtatgaagggatgccagacaaacaacgggtttgtccataatgaagacattctggagcagaccccggatccaggaagctcaacagacaacctgaagcacagcaccaggggcatccttggctcccaggagcccgacttcaagggcgtccagccctatgcggggatgcccaaggaggtgctgttccagttctctggccaggcccgctaccgcatacctcgggagatcctcttctggctcacagtggcttctgtgctggtgctcatcgcggccaccatagccatcattgccctctctccaaagtgcctagactggtggcaggaggggcccatgtaccagatctacccaaggtctttcaaggacagtaacaaggatgggaacggagatctgaaaggtattcaagataaactggactacatcacagctttaaatataaaaactgtttggattacttcattttataaatcgtcccttaaagatttcagatatggtgttgaagatttccgggaagttgatcccatttttggaacgatggaagattttgagaatctggttgcagccatacatgataaaggtttaaaattaatcatcgatttcataccaaaccacacgagtgataaacatatttggtttcaattgagtcggacacggacaggaaaatatactgattattatatctggcatgactgtacccatgaaaatggcaaaaccattccacccaacaactggttaagtgtgtatggaaactccagttggcactttgacgaagtgcgaaaccaatgttattttcatcagtttatgaaagagcaacctgatttaaatttccgcaatcctgatgttcaagaagaaataaaagaaattttacggttctggctcacaaagggtgttgatggttttagtttggatgctgttaaattcctcctagaagcaaagcacctgagagatgagatccaagtaaataagacccaaatcccggacacggtcacacaatactcggagctgtaccatgacttcaccaccacgcaggtgggaatgcacgacattgtccgcagcttccggcagaccatggaccaatacagcacggagcccggcagatacaggttcatggggactgaagcctatgcagagagtattgacaggaccgtgatgtactatggattgccatttatccaagaagctgattttcccttcaacaattacctcagcatgctagacactgtttctgggaacagcgtgtatgaggttatcacatcctggatggaaaacatgccagaaggaaaatggcctaactggatgattggtggaccagacagttcacggctgacttcgcgtttggggaatcagtatgtcaacgtgatgaacatgcttcttttcacactccctggaactcctataacttactatggagaagaaattggaatgggaaatattgtagccgcaaatctcaatgaaagctatgatattaatacccttcgctcaaagtcaccaatgcagtgggacaatagttcaaatgctggtttttctgaagctagtaacacctggttacctaccaattcagattaccacactgtgaatgttgatgtcttgctccgtcacccatgctcgagtgcagtggcgtgatctcggcacactgcagcctctgcttcctgggttcaagtgattctcctgctgcagcctcccaagtagctgggattacaggtgcacgtcattatgcccgggtaatttctgtattttttagtagagatggtgtttcaccatgttggccaggctggtcttgaactcctgacctctggtgatctgtctgccttgcctcccaaagtgctaggattacgggcctgagccaccttgcctggcctgcaaaatttgtttttaatagaagacacaagaaatgatttaaatattttatcaacagaaaaccagttctatcaactatgggcccagtatgcagcttttaaaaatgacagttctatatacattgatatgagaccatttcaaacaggtattcaataaagtatagaatggtaacatatcaccaactgtgtaaagaaaaatatataaacatatgaaatgatacattctgtgcctatgcaaacatatgatacattaaaaacaaaagaacatatagtgcctgtctctgaggggaactgtgaagctatggaaaggtgttgaagaaaacctttttatagtatgtattcttgtaattg

SEQ ID NO: 7359 - DNA, 2058 bp, Artificial Sequence
  derived and/or modified sequence
atggccgaggacaagagcaagagagacagcatcgagatgagcatgaagggctgccagaccaacaacggcttcgtgcacaacgaggacatcctggagcagacccccgaccccggcagcagcaccgacaacctgaagcacagcaccagaggcatcctgggcagccaggagcccgacttcaagggcgtgcagccctacgccggcatgcccaaggaggtgctgttccagttcagcggccaggccagatacagaatccccagagagatcctgttctggctgaccgtggccagcgtgctggtgctgatcgccgccaccatcgccatcatcgccctgagccccaagtgcctggactggtggcaggagggccccatgtaccagatctaccccagaagcttcaaggacagcaacaaggacggcaacggcgacctgaagggcatccaggacaagctggactacatcaccgccctgaacatcaagaccgtgtggatcaccagcttctacaagagcagcctgaaggacttcagatacggcgtggaggacttcagagaggtggaccccatcttcggcaccatggaggacttcgagaacctggtggccgccatccacgacaagggcctgaagctgatcatcgacttcatccccaaccacaccagcgacaagcacatctggttccagctgagcagaaccagaaccggcaagtacaccgactactacatctggcacgactgcacccacgagaacggcaagaccatcccccccaacaactggctgagcgtgtacggcaacagcagctggcacttcgacgaggtgagaaaccagtgctacttccaccagttcatgaaggagcagcccgacctgaacttcagaaaccccgacgtgcaggaggagatcaaggagatcctgagattctggctgaccaagggcgtggacggcttcagcctggacgccgtgaagttcctgctggaggccaagcacctgagagacgagatccaggtgaacaagacccagatccccgacaccgtgacccagtacagcgagctgtaccacgacttcaccaccacccaggtgggcatgcacgacatcgtgagaagcttcagacagaccatggaccagtacagcaccgagcccggcagatacagattcatgggcaccgaggcctacgccgagagcatcgacagaaccgtgatgtactacggcctgcccttcatccaggaggccgacttccccttcaacaactacctgagcatgctggacaccgtgagcggcaacagcgtgtacgaggtgatcaccagctggatggagaacatgcccgagggcaagtggcccaactggatgatcggcggccccgacagcagcagactgaccagcagactgggcaaccagtacgtgaacgtgatgaacatgctgctgttcaccctgcccggcacccccatcacctactacggcgaggagatcggcatgggcaacatcgtggccgccaacctgaacgagagctacgacatcaacaccctgagaagcaagagccccatgcagtgggacaacagcagcaacgccggcttcagcgaggccagcaacacctggctgcccaccaacagcgactaccacaccgtgaacgtggacgtgcagaagacccagcccagaagcgccctgaagctgtaccaggacctgagcctgctgcacgccaacgagctgctgctgaacagaggctggttctgccacctgagaaacgacagccactacgtggtgtacaccagagagctggacggcatcgacagaatcttcatcgtggtgctgaacttcggcgagagcaccctgctgaacctgcacaacatgatcagcggcctgcccgccaagatgagaatcagactgagcaccaacagcgccgacaagggcagcaaggtggacaccagcggcatcttcctggacaagggcgagggcctgatcttcgagcacaacaccaagaacctgctgcacagacagaccgccttcagagacagatgcttcgtgagcaacagagcctgctacagcagcgtgctgaacatcctgtacaccagctgctag

SEQ ID NO: 7360 - DNA, 1866 bp, Artificial Sequence
  derived and/or modified sequence
atgaagaccttctggagcagacccagaatccagttcagcggccaggccagatacagaatccccagagagatcctgttctggctgaccgtggccagcgtgctggtgctgatcgccgccaccatcgccatcatcgccctgagccccaagtgcctggactggtggcaggagggccccatgtaccagatctaccccagaagcttcaaggacagcaacaaggacggcaacggcgacctgaagggcatccaggacaagctggactacatcaccgccctgaacatcaagaccgtgtggatcaccagcttctacaagagcagcctgaaggacttcagatacggcgtggaggacttcagagaggtggaccccatcttcggcaccatggaggacttcgagaacctggtggccgccatccacgacaagggcctgaagctgatcatcgacttcatccccaaccacaccagcgacaagcacatctggttccagctgagcagaaccagaaccggcaagtacaccgactactacatctggcacgactgcacccacgagaacggcaagaccatcccccccaacaactggctgagcgtgtacggcaacagcagctggcacttcgacgaggtgagaaaccagtgctacttccaccagttcatgaaggagcagcccgacctgaacttcagaaaccccgacgtgcaggaggagatcaaggagatcctgagattctggctgaccaagggcgtggacggcttcagcctggacgccgtgaagttcctgctggaggccaagcacctgagagacgagatccaggtgaacaagacccagatccccgacaccgtgacccagtacagcgagctgtaccacgacttcaccaccacccaggtgggcatgcacgacatcgtgagaagcttcagacagaccatggaccagtacagcaccgagcccggcagatacagattcatgggcaccgaggcctacgccgagagcatcgacagaaccgtgatgtactacggcctgcccttcatccaggaggccgacttccccttcaacaactacctgagcatgctggacaccgtgagcggcaacagcgtgtacgaggtgatcaccagctggatggagaacatgcccgagggcaagtggcccaactggatgatcggcggccccgacagcagcagactgaccagcagactgggcaaccagtacgtgaacgtgatgaacatgctgctgttcaccctgcccggcacccccatcacctactacggcgaggagatcggcatgggcaacatcgtggccgccaacctgaacgagagctacgacatcaacaccctgagaagcaagagccccatgcagtgggacaacagcagcaacgccggcttcagcgaggccagcaacacctggctgcccaccaacagcgactaccacaccgtgaacgtggacgtgcagaagacccagcccagaagcgccctgaagctgtaccaggacctgagcctgctgcacgccaacgagctgctgctgaacagaggctggttctgccacctgagaaacgacagccactacgtggtgtacaccagagagctggacggcatcgacagaatcttcatcgtggtgctgaacttcggcgagagcaccctgctgaacctgcacaacatgatcagcggcctgcccgccaagatgagaatcagactgagcaccaacagcgccgacaagggcagcaaggtggacaccagcggcatcttcctggacaagggcgagggcctgatcttcgagcacaacaccaagaacctgctgcacagacagaccgccttcagagacagatgcttcgtgagcaacagagcctgctacagcagcgtgctgaacatcctgtacaccagctgctag

SEQ ID NO: 7361 - DNA, 1656 bp, Artificial Sequence
  derived and/or modified sequence
atggccgaggacaagagcaagagagacagcatcgagatgagcatgaagggctgccagaccaacaacggcttcgtgcacaacgaggacatcctggagcagacccccgaccccggcagcagcaccgacaacctgaagcacagcaccagaggcatcctgggcagccaggagcccgacttcaagggcgtgcagccctacgccggcatgcccaaggaggtgctgttccagttcagcggccaggccagatacagaatccccagagagatcctgttctggctgaccgtggccagcgtgctggtgctgatcgccgccaccatcgccatcatcgccctgagccccaagtgcctggactggtggcaggagggccccatgtaccagatctaccccagaagcttcaaggacagcaacaaggacggcaacggcgacctgaagggcatccaggacaagctggactacatcaccgccctgaacatcaagaccgtgtggatcaccagcttctacaagagcagcctgaaggacttcagatacggcgtggaggacttcagagaggtggaccccatcttcggcaccatggaggacttcgagaacctggtggccgccatccacgacaagggcctgaagctgatcatcgacttcatccccaaccacaccagcgacaagcacatctggttccagctgagcagaaccagaaccggcaagtacaccgactactacatctggcacgactgcacccacgagaacggcaagaccatcccccccaacaactggctgagcgtgtacggcaacagcagctggcacttcgacgaggtgagaaaccagtgctacttccaccagttcatgaaggagcagcccgacctgaacttcagaaaccccgacgtgcaggaggagatcaaggagatcctgagattctggctgaccaagggcgtggacggcttcagcctggacgccgtgaagttcctgctggaggccaagcacctgagagacgagatccaggtgaacaagacccagatccccgacaccgtgacccagtacagcgagctgtaccacgacttcaccaccacccaggtgggcatgcacgacatcgtgagaagcttcagacagaccatggaccagtacagcaccgagcccggcagatacagattcatgggcaccgaggcctacgccgagagcatcgacagaaccgtgatgtactacggcctgcccttcatccaggaggccgacttccccttcaacaactacctgagcatgctggacaccgtgagcggcaacagcgtgtacgaggtgatcaccagctggatggagaacatgcccgagggcaagtggcccaactggatgatcggcggccccgacagcagcagactgaccagcagactgggcaaccagtacgtgaacgtgatgaacatgctgctgttcaccctgcccggcacccccatcacctactacggcgaggagatcggcatgggcaacatcgtggccgccaacctgaacgagagctacgacatcaacaccctgagaagcaagagccccatgcagtgggacaacagcagcaacgccggcttcagcgaggccagcaacacctggctgcccaccaacagcgactaccacaccgtgaacgtggacgtgctgctgagacacccctgcagcagcgccgtggcctag

SEQ ID NO: 7362 - protein, 911 aa, Artificial Sequence
  derived and/or modified sequence
MEELQDDYEDMMEENLEQEEYEDPDIPESQMEEPAAHDTEATATDYHTTSHPGTHKVYVELQELVMDEKNQELRWMEAARWVQLEENLGENGAWGRPHLSHLTFWSLLELRRVFTKGTVLLDLQETSLAGVANQLLDRFIFEDQIRPQDREELLRALLLKHSHAGELEALGGVKPAVLTRSGDPSQPLLPQHSSLETQLFCEQGDGGTEGHSPSGILEKIPPDSEATLVLVGRADFLEQPVLGFVRLQEAAELEAVELPVPIRFLFVLLGPEAPHIDYTQLGRAAATLMSERVFRIDAYMAQSRGELLHSLEGFLDCSLVLPPTDAPSEQALLSLVPVQRELLRRRYQSSPAKPDSSFYKGLDLNGGPDDPLQQTGQLFGGLVRDIRRRYPYYLSDITDAFSPQVLAAVIFIYFAALSPAITFGGLLGEKTRNQMGVSELLISTAVQGILFALLGAQPLLVVGFSGPLLVFEEAFFSFCETNGLEYIVGRVWIGFWLILLVVLVVAFEGSFLVRFISRYTQEIFSFLISLIFIYETFSKLIKIFQDHPLQKTYNYNVLMVPKPQGPLPNTALLSLVLMAGTFFFAMMLRKFKNSSYFPGKLRRVIGDFGVPISILIMVLVDFFIQDTYTQKLSVPDGFKVSNSSARGWVIHPLGLRSEFPIWMMFASALPALLVFILIFLESQITTLIVSKPERKMVKGSGFHLDLLLVVGMGGVAALFGMPWLSATTVRSVTHANALTVMGKASTPGAAAQIQEVKEQRISGLLVAVLVGLSILMEPILSRIPLAVLFGIFLYMGVTSLSGIQLFDRILLLFKPPKYHPDVPYVKRVKTWRMHLFTGIQIICLAVLWVVKSTPASLALPFVLILTVPLRRVLLPLIFRNVELQCLDADDAKATFDEEEGRDEYDEVAMPV

SEQ ID NO: 7363 - DNA, 2736 bp, Artificial Sequence
  derived and/or modified sequence
atggaagaactccaggatgactacgaagatatgatggaggagaatctggaacaagaggagtatgaagaccctgacattccagaatcacagatggaggagccagctgctcacgatacagaggccacagccaccgattatcacacaacctcccatccagggactcataaggtgtacgtggaactccaggaactcgtgatggacgagaagaatcaggagctccggtggatggaagccgcgagatgggtccagttggaggaaaatctgggggagaatggggcatggggacgaccccatctctcccacttaactttttggtcactcctggaacttcggcgggtctttacaaagggaaccgtactcttggacctgcaagagactagtctggctggggtggcaaatcaacttctcgaccgttttatcttcgaggaccagatccgaccacaagacagggaagagctgctgcgagcgttgcttctgaagcactcgcacgctggagagctggaggcactgggtggcgttaagcctgcagttttaacgcggtccggagacccctcgcagccactgctgccccagcatagttcgcttgaaacgcaactgttctgtgaacaaggcgacgggggaacggaaggccactccccatcaggtattctcgagaagattccacctgactccgaagcaacactggtcctcgtcggccgtgcagattttcttgagcagcctgtgctaggcttcgtgaggctacaggaagctgccgagttagaagctgtcgagctgcctgttcccatcagatttctcttcgttctactagggcccgaggctcctcatatcgactacactcagcttggaagagccgccgcaaccttaatgtccgagagagtattccgaattgatgcctacatggcccagtctaggggggaactgcttcatagcctggagggttttctggactgctccctcgtattacccccaacagacgccccatcagagcaagctttactgagtctcgtccctgtgcagcgggagctactccggaggcgttatcagagttctccagcgaaacccgactcttcattttataagggcctggatctcaatggagggcccgacgaccccctgcagcagacgggacaattgttcgggggtcttgtgagggacataagacgccgatatccttactatctcagtgacataactgacgctttttcaccccaagtgctcgccgccgtcatcttcatttatttcgctgccctgtctcccgccatcacttttggaggcctgcttggcgaaaaaactcggaaccaaatgggcgtctcggagctgcttatatctacagccgtgcaggggattctatttgccctattgggggcgcaaccactgctggtagttggattctccgggcccctactcgtgttcgaagaggcctttttttcattctgcgaaaccaatggcctcgagtatatcgtgggccgagtgtggattggcttctggctcattttactggtcgtcctcgtcgtggccttcgaaggctcttttctggtgcgcttcataagtcgctatacacaggagattttcagcttcctaatcagcctgattttcatctacgagacgttcagcaagcttatcaagatctttcaggatcacccattgcagaagacttacaactataacgttctcatggtgccgaagccccagggtcccctcccgaacaccgcacttctatccctggtactgatggcaggcaccttctttttcgcaatgatgctaaggaagttcaagaactctagctatttccccggcaagctgagaagggtcattggcgacttcggtgtccccatctctatcctcattatggtcctggtggacttcttcatccaggatacttatacccaaaagctctcggtccctgacggttttaaagtttctaactcttccgctcgagggtgggtgattcatcccctcggactgcgcagtgaattccctatctggatgatgttcgcctcagcattgcctgctctcctggtattcatactgatctttctcgaaagtcagattactactctgatcgtctctaagcccgaacgaaagatggtaaaagggtcggggttccacctcgacttgcttctggttgttgggatggggggtgtcgccgctctgttcgggatgccatggctcagcgcaactaccgttcggtcagtgacacatgcaaacgcgctcactgtgatggggaaggcatcgacacccggcgctgctgcacagattcaggaggttaaagagcagcgtatttccggcttgcttgtggccgtccttgtagggcttagtattttgatggagccaattctgagcagaatccccctggcagttctgttcgggattttcctgtacatgggcgtcacatctctgtccgggatacaactgtttgaccggattctgcttctgtttaagccccccaagtaccaccccgacgtgccctacgtcaagcgggtgaaaacctggagaatgcatttgttcacaggaatccagattatatgcctagctgtgctgtgggttgtgaaatctacgcccgccagcctggcactgccctttgtcttaattttaaccgtcccactgagaagagttctgctgccgctcatcttccgaaacgtggaactgcagtgtctggatgcagacgatgcaaaagctactttcgatgaagaggaaggacgcgacgagtacgacgaggtggcaatgccggtttag

SEQ ID NO: 7364 - DNA, 2736 bp, Artificial Sequence
  derived and/or modified sequence
atggaggagctgcaggatgattatgaggacatgatggaggagaacctggagcaggaggagtatgaggaccctgacatccctgagagccagatggaggagcctgctgcccatgacacagaggccacagccacagactaccacaccaccagccaccctggcacccacaaggtgtatgtggagctgcaggagctggtgatggatgagaagaaccaggagctgcgctggatggaggccgcccgctgggtgcagctggaggagaacctgggggagaatggagcctggggccggccccacctgagccacctgaccttctggagcctgctggagctgcggcgggtcttcaccaagggcaccgtgctgctggacctgcaggagaccagcctggccggcgtggccaaccagctgctggaccgcttcatctttgaggaccagatccggccccaggaccgggaggagctgctgcgggccctgctgctgaagcacagccacgccggggagctggaggccctgggcggcgtgaagccagctgtgctgaccaggtctggggaccccagccagcccctgctgccccagcacagcagcctggagacccagctgttctgtgagcagggagatggcggcacagagggccacagccccagcggcatcctggagaagatccccccagacagcgaggccaccctggtgctggtgggccgggctgacttcctggagcagcctgtgctgggctttgtgcggctgcaggaggccgctgagctggaggccgtggagctgcctgtgcccatccgcttcctgtttgtgctgctgggccctgaggccccccacatcgactacacccagctgggccgggctgctgccaccctgatgtctgagagggtcttcagaattgatgcctacatggcccagagcagaggagagctgctgcacagcctggagggcttcctggactgcagcctggtgctgcccccaacagatgcccccagcgagcaggccctgctgagcctggtgcctgtgcagcgggagctgctgcggcggcgctaccagagcagccctgccaagccagacagcagcttctacaagggcctggacctgaatggaggcccagatgaccccctgcagcagacaggccagctgtttggaggcctggtgcgggacatcagaagacgctacccctactacctgagtgacatcacagatgccttcagcccccaggtgctggccgccgtcatcttcatctactttgctgccctgagccctgccatcacctttggaggcctgctgggggagaagaccaggaaccagatgggcgtgtctgagctgctgatcagcacagctgtgcagggcatcctgtttgccctgctgggcgcccagcccctgctggtggtgggcttcagcggccccctgctggtgtttgaggaggccttcttctccttctgtgagaccaacggcctggagtacatcgtgggccgggtgtggattggcttctggctgatcctgctggtggtgctggtggtggcctttgagggcagcttcctggtgcgcttcatcagccgctacacccaggagatcttctccttcctgatcagcctcatcttcatctatgagaccttcagcaagctgatcaagatcttccaggaccaccccctgcagaagacctacaactacaacgtgctgatggtgcccaagccccagggccccctgcccaacacagccctgctgagcctggtgctgatggccggcaccttcttctttgccatgatgctgaggaagttcaagaacagcagctacttccctgggaagctgcggcgggtgattggagactttggagtgcccatcagcatcctgatcatggtgctggtggacttcttcatccaggacacctacacccagaagctgtctgtgcctgatggcttcaaggtgagcaacagcagcgcccggggctgggtgatccaccccctgggcctgcggtctgagttccccatctggatgatgtttgccagcgccctgcctgccctgctggtgttcatcctgatcttcctggagagccagatcaccaccctcatcgtgtccaagccagagaggaagatggtgaagggcagcggcttccacctggacctgctgctggtggtgggcatgggcggcgtggccgccctgtttggcatgccctggctgagcgccaccaccgtgcgctctgtgacccacgccaatgccctgactgtgatgggcaaggccagcaccccaggagctgctgcccagatccaggaggtgaaggagcagaggatcagcggcctgctggtggccgtgctggtgggcctgagcatcctgatggagcccatcctgagccgcatccccctggccgtgctgtttggcatcttcctgtacatgggcgtgaccagcctgagcggcatccagctgtttgaccgcatcctgctgctcttcaagccacccaagtaccacccagatgtgccctacgtgaagagggtgaagacctggaggatgcacctgttcaccggcatccagatcatctgcctggccgtgctgtgggtggtgaagagcaccccagccagcctggccctgccctttgtgctgatcctgactgtgcccctgcggcgggtgctgctgcccctcatcttcagaaatgtggagctgcagtgcctggatgctgatgatgccaaggccacctttgatgaggaggagggcagagatgaatatgatgaggtggccatgcctgtgtag

SEQ ID NO: 7365 - DNA, 2736 bp, Artificial Sequence
  derived and/or modified sequence
atggaggagctgcaggacgactacgaggacatgatggaggagaacctggaacaggaggaatatgaggatccagatataccagagtctcaaatggaggagcctgcagctcacgacaccgaagcaactgctacggattatcatacaaccagccatcctggcacacacaaagtgtatgtcgagttgcaggagctggttatggatgagaagaaccaggagctgagatggatggaagctgcgcggtgggtacagctcgaggagaatctgggcgagaacggcgcctgggggaggcctcatttgagtcatctcaccttttggtcactgttagaactccgcagagtgttcaccaagggcacagtcctcctcgacctgcaggagacgtctttagcaggcgttgctaatcaactcctggataggttcattttcgaggaccagattcggccccaggatcgcgaagagcttctgagagcactcctgcttaagcactcacatgccggagagctggaagccctcgggggggtgaaaccagccgtgttgactcgaagcggggacccgtctcagcctctgctcccacagcacagcagcctggagacgcaactgttctgcgagcagggcgatggcggtacagaagggcacagtccttccgggatcttagaaaagattcctcccgattccgaggcaaccctggtcttagtgggtcgggcagatttccttgagcaaccagtgctaggtttcgtgcggctccaggaagccgccgagctggaggcagtcgagctaccagtgcctatccgcttcttatttgttctgctcggccccgaagcgcctcatattgattacacgcagttgggacgcgcagcagcaactctgatgtccgaacgcgtgtttagaatcgacgcatatatggcacagagcagaggggagttgctacactcgctggagggatttctcgattgctcactagtgctccctcccacagacgccccatctgagcaggcactgctgtctttggtgcctgtccagcgggaactgctgcgtcgaagataccaatcttcaccggcaaaacctgattcttctttttacaagggtctagacttgaacggaggacccgacgatccgctgcagcagacgggtcagttgtttggcggcctggtgcgggacatcagaaggagatacccctactatctcagcgacattaccgacgcttttagtccgcaagtcctggcagccgtaattttcatttattttgccgccctgtcccccgcaattacctttgggggccttctgggggagaagaccagaaaccagatgggagtgagtgaactgctgatttccaccgccgtgcagggaatcttatttgctctactgggagcccagcccctgctggtggtgggattctctgggccactgctggtgttcgaggaggctttcttttcattctgcgagaccaacgggcttgagtacatcgtgggtagagtctggatcggattctggctgatactactggtggtattagtcgtggcctttgagggctcctttttggtcagattcataagcagatatacccaggaaattttcagctttttgatcagcctcatctttatatacgagaccttcagtaaattgatcaagatttttcaagaccatcctctccagaaaacatacaattacaatgtcctgatggtgccaaaacctcaaggtccccttccaaacacagcccttctgtcgctggtgcttatggccgggaccttcttctttgccatgatgctgcggaagtttaagaattccagctacttccccgggaagctccgccgggtaattggcgatttcggagtcccaatttctattctaatcatggtgcttgtcgacttcttcatccaggatacatatacgcaaaaactgagcgtccctgacgggtttaaggtctcaaacagctctgcacgcggttgggtcattcacccactcgggctcagaagtgagttcccaatttggatgatgttcgcaagtgcgctccctgccctcttagttttcattctcatcttcctcgagagccagattacaactttgatcgtgtcaaaacctgaaaggaaaatggtgaaaggtagcggatttcatctggacctgctactggtggtgggtatggggggcgttgcagcgcttttcggcatgccctggctctccgccaccactgtcagaagcgtcacccatgccaacgcactcacagtcatgggcaaagcgtccactccaggagctgctgctcagattcaggaggttaaggaacaacggatatctggcttgctcgttgccgtgttggtagggttgtctatcctcatggaacccatcctctcccggattccacttgcggtcctgtttggtatatttttgtacatgggcgtgacaagcctgtccggcatccagttatttgaccgcatcctattactgtttaagccccctaagtaccaccccgatgtgccatatgtgaagcgtgtgaagacatggcgcatgcatttatttacggggatccagattatctgtcttgcagtactctgggtggtgaaaagcactcccgcatcactggccttacctttcgtgctcatcctgacagtgcccttgcgacgggtgctcttgccacttatttttagaaacgtcgaactgcagtgccttgatgcagatgacgccaaggcaacttttgacgaagaggagggaagggatgagtatgatgaggtggccatgcccgtttag

SEQ ID NO: 7366 - DNA, 2736 bp, Artificial Sequence
  derived and/or modified sequence
atggaggagctgcaggatgactatgaggatatgatggaggagaacctggaacaggaggagtacgaggaccctgacatcccagaatctcagatggaggaacccgcagctcacgatacagaggctacagccacagactatcatacaacctctcacccgggaacgcataaggtgtacgtggagctacaggaactcgtgatggacgaaaagaatcaggagttgcggtggatggaagctgctcgctgggtccaactggaagagaacttgggagaaaatggggcttgggggaggcctcacctcagccacctgactttttggagtctgttggagctgcgccgagtgtttaccaaagggaccgttctgctggaccttcaggagacatcactggctggagtggccaatcagttgttggaccggtttatctttgaagatcagatcagacctcaggatagagaggagttgctccgtgctttgcttctgaagcattcccatgccggagaactagaggcccttgggggagtcaaacccgctgtcctgaccaggtccggcgatccatcacaaccgttgctgccccagcactcaagcttggagacccagctcttctgtgagcagggcgatggaggcacggagggtcactccccaagcgggatcttagagaaaattcccccagactcagaggcaaccctggtgttggttgggagggccgattttctggaacagccagtcctgggattcgtccggttacaggaagctgctgaactcgaggcagtggagctgccagtgcctataaggttcctctttgtgcttctcggaccggaagctccacacatcgactacacccaacttggaagggcagccgctacactgatgagcgaacgcgtgtttcggattgacgcctatatggcgcagtctagaggtgagttgttgcattccctcgagggattcctcgattgcagtttagtgctgcctcctactgatgcgccaagcgaacaggccctattaagtttggtgcctgttcagagggaactcctccgcaggagataccaaagcagtcctgccaaaccagattcttccttctacaagggcctggatttgaatggtgggccagatgacccccttcaacagactggccagttgttcgggggattagttcgagatatcagaagaagatatccctattatctctcagacatcaccgatgcgttctccccgcaggtcttggcagctgtcatttttatttatttcgctgccttgtctccagccatcaccttcggagggttgttgggggagaagacacgaaaccagatgggcgtctccgaattgctgatcagcaccgccgtgcagggaatcctgttcgcgctgctcggcgctcagccactactggtagttggcttcagcggtcctcttttggtgtttgaagaagcattcttctccttctgcgagaccaacggcctagaatatatcgtgggcagagtgtggatcgggttttggctgattctgctcgtagtgctcgtcgtggcgtttgaggggagtttcctggtacggttcatctcccgatatacccaggagattttctcttttcttataagcctgatcttcatctacgagaccttctccaaactgatcaagatcttccaggatcatcctcttcagaaaacctacaactacaatgtgttaatggtgccgaaacctcaggggcctctgccaaatacagcacttctgtccctggtgctaatggccggtacctttttctttgctatgatgcttcgaaaatttaagaatagtagctattttcccggaaagctaagaagagtgatcggtgacttcggagtccctatctctattttgatcatggtactcgtcgacttttttattcaggacacctacacacaaaaactttctgtgcctgacgggttcaaagttagcaactcttccgccaggggatgggtgatccatccactgggcctgagatcggagttccccatttggatgatgttcgctagcgctctcccggcactgctggtgtttatcctgatcttcctggagagccagatcaccacgctgatcgtttctaagccagagcggaagatggtaaaaggctctgggttccatttagacctcctcctcgtggttgggatgggcggtgtggcagccctgttcgggatgccctggctgagcgccactacagtacggagtgtcacgcatgcgaatgctttaactgtaatggggaaggcgagcacccctggagccgctgcccagatccaggaagttaaggagcagcgcatttccggattgctggtggccgtcctggtggggctcagcatcctgatggagcccatcctgtctcggatccccctcgcagtgctgtttggaatctttctgtacatgggcgttacatccctgtccggcatccagttattcgatcgcattctcctgttatttaaacccccaaagtatcaccctgatgtgccttatgtgaaaagggtaaagacctggagaatgcaccttttcacaggcatacagataatttgtctggctgtactatgggtagtcaaaagtacccctgcctcattggcgctgccctttgtattaatcttgactgttcctctgcggagggtgttactcccccttatctttaggaatgtggagctgcagtgccttgatgccgacgacgcaaaggccaccttcgatgaggaggagggcagagacgaatacgacgaggttgccatgcccgtgtag

SEQ ID NO: 7367 - DNA, 4965 bp, Artificial Sequence
  derived and/or modified sequence
gctgtcagaacgagtgggaacgtagctggtcgcagagggcaccagcggctgcaggacttcaccaagggaccctgaggctcgtgagcagggacccgcggtgcgggttatgctgggggctcagatcaccgtagacaactggacactcaggaccacgccatggaggagctgcaggatgattatgaagacatgatggaggagaatctggagcaggaggaatatgaagacccagacatccccgagtcccagatggaggagccggcagctcacgacaccgaggcaacagccacagactaccacaccacatcacacccgggtacccacaaggtctatgtggagctgcaggagctggtgatggacgaaaagaaccaggagctgagatggatggaggcggcgcgctgggtgcaactggaggagaacctgggggagaatggggcctggggccgcccgcacctctctcacctcaccttctggagcctcctagagctgcgtagagtcttcaccaagggtactgtcctcctagacctgcaagagacctccctggctggagtggccaaccaactgctagacaggtttatctttgaagaccagatccggcctcaggaccgagaggagctgctccgggccctgctgcttaaacacagccacgctggagagctggaggccctggggggtgtgaagcctgcagtcctgacacgctctggggatccttcacagcctctgctcccccaacactcctcactggagacacagctcttctgtgagcagggagatgggggcacagaagggcactcaccatctggaattctggaaaagattcccccggattcagaggccacgttggtgctagtgggccgcgccgacttcctggagcagccggtgctgggcttcgtgaggctgcaggaggcagcggagctggaggcggtggagctgccggtgcctatacgcttcctctttgtgttgctgggacctgaggccccccacatcgattacacccagcttggccgggctgctgccaccctcatgtcagagagggtgttccgcatagatgcctacatggctcagagccgaggggagctgctgcactccctagagggcttcctggactgcagcctagtgctgcctcccaccgatgccccctccgagcaggcactgctcagtctggtgcctgtgcagagggagctacttcgaaggcgctatcagtccagccctgccaagccagactccagcttctacaagggcctagacttaaatgggggcccagatgaccctctgcagcagacaggccagctcttcgggggcctggtgcgtgatatccggcgccgctacccctattacctgagtgacatcacagatgcattcagcccccaggtcctggctgccgtcatcttcatctactttgctgcactgtcacccgccatcaccttcggcggcctcctgggagaaaagacccggaaccagatgggagtgtcggagctgctgatctccactgcagtgcagggcattctcttcgccctgctgggggctcagcccctgcttgtggtcggcttctcaggacccctgctggtgtttgaggaagccttcttctcgttctgcgagaccaacggtctagagtacatcgtgggccgcgtgtggatcggcttctggctcatcctgctggtggtgttggtggtggccttcgagggtagcttcctggtccgcttcatctcccgctatacccaggagatcttctccttcctcatttccctcatcttcatctatgagactttctccaagctgatcaagatcttccaggaccacccactacagaagacttataactacaacgtgttgatggtgcccaaacctcagggccccctgcccaacacagccctcctctcccttgtgctcatggccggtaccttcttctttgccatgatgctgcgcaagttcaagaacagctcctatttccctggcaagctgcgtcgggtcatcggggacttcggggtccccatctccatcctgatcatggtcctggtggatttcttcattcaggatacctacacccagaaactctcggtgcctgatggcttcaaggtgtccaactcctcagcccggggctgggtcatccacccactgggcttgcgttccgagtttcccatctggatgatgtttgcctccgccctgcctgctctgctggtcttcatcctcatattcctggagtctcagatcaccacgctgattgtcagcaaacctgagcgcaagatggtcaagggctccggcttccacctggacctgctgctggtagtaggcatgggtggggtggccgccctctttgggatgccctggctcagtgccaccaccgtgcgttccgtcacccatgccaacgccctcactgtcatgggcaaagccagcaccccaggggctgcagcccagatccaggaggtcaaagagcagcggatcagtggactcctggtcgctgtgcttgtgggcctgtccatcctcatggagcccatcctgtcccgcatccccctggctgtactgtttggcatcttcctctacatgggggtcacgtcgctcagcggcatccagctctttgaccgcatcttgcttctgttcaagccacccaagtatcacccagatgtgccctacgtcaagcgggtgaagacctggcgcatgcacttattcacgggcatccagatcatctgcctggcagtgctgtgggtggtgaagtccacgccggcctccctggccctgcccttcgtcctcatcctcactgtgccgctgcggcgcgtcctgctgccgctcatcttcaggaacgtggagcttcagtgtctggatgctgatgatgccaaggcaacctttgatgaggaggaaggtcgggatgaatacgacgaagtggccatgcctgtgtgaggggcgggcccaggccctagaccctcccccaccattccacatccccaccttccaaggaaaagcagaagttcatgggcacctcatggactccaggatcctcctggagcagcagctgaggccccagggctgtgggtggggaaggaaggcgtgtccaggagaccttccacaaagggtagcctggcttttctggctggggatggccgatggggcccacattagggggtttgttgcacagtccctcctgttgccacactttcactggggatcccgtgctggaagacttagatctgagccctccctcttcccagcacaggcaggggtagaagcaaaggcaggaggtgggtgagcgggtggggtgcttgctgtgtgaccttgggcaagtcccttgacctttccagcctatatttcctcttctgtaaaatgggtatattgatgataatacccacattacaggatggttactgaggaccaaagatacatgtaaaatagggctttgtaaactccacagggactgttctatagcagtcatcatttgtctttgaacgtacccaaggtcacatagctgggatttgaactgagccgtgcagctgggatttgaaccaggccttctgatttcaaggtccgagctctgtcctctgtcagtcatgcgtccactttcccttcccctgtgactcctcccttccccactctgctcccagcccctaccttgagaccctcttctctgggcccagagagaggcgtcctggtgaggacaaggtacaggcaaggatgatccagggattgggcctgggactcaggcctcctaagtgtttggttcctccctccaaacactcattagttcactcattcattcattccacaaacatttactgagggccccggaatcagtggactccgaggggactgagacaagccctgccctggggtgggggtggggggcaaggtacagttgattctacatttggatagggagtgggggagggtgggaaggtaggggcgggagagtgagggggtttgtaatttattaattgcgtattttctaagagttttcaacatagtttggcttcacacacaacttcaggcccctcatttgagagccattatcctcaactccatctaaactgaatcttggggagaacccagatctgaccaattggggtaggagacagcaggctctccaagaacatgggcaaatttatttttttataaaacaaaaagataaaaagagttgaaagacgtgaaagtggtgagagatggaggaaacagaatcaggaagtggtagaaaagagaggaggtggctgggcgcagtggctcacgtttgtaatcccagcactttgggaggccaagttgggcggatcatttgaggtcaggagtttgagaccagcctggccaacatggtgaaaccccgttactactaaaaatacaaaaattagctgggtgtctcgtggcaggcacctgtaatcccagctacttagaaggctgaggcaagagaatcacctgaacccaggaggtggaggttgcagtgagccaagattgcaccactgcactccagcctgggcaacagagcgagaccctgtctcaaaaaaaaaaaaaaaaaaaaaaaaaaaacggaaggaaacatcagccttgggggccacagactcaacatgtgtgtgtggtggggttccagcccaacatagagtaacattatttgtacctcccaggctagctcagtccatgggaggctctcctgtccctgaaagctgacacccacctttcaccacttcgcccatgctacagttcagtttcctcgtctgtaaaatggggatgataatggtacctaccttgcagtgttgttataaggattaaaggagacagtgcaagaaaaggccttggttggtgaagagcccaacctcggaggggagctgctgggatcctccttatcttgactgggatgtccctgtctccccctccccttgctccttgaacatggccaaggaaagtgaaaaacaaaaattattcactctgctagcacccttccccttgatgcctgggaataggttttgccaataaacgtatctgtgttggagtggc

SEQ ID NO: 7368 - DNA, 2736 bp, Artificial Sequence
  derived and/or modified sequence
atggaggagctgcaggacgactacgaggacatgatggaggagaacctggagcaggaggagtacgaggaccccgacatccccgagagccagatggaggagcccgccgcccacgacaccgaggccaccgccaccgactaccacaccaccagccaccccggcacccacaaggtgtacgtggagctgcaggagctggtgatggacgagaagaaccaggagctgagatggatggaggccgccagatgggtgcagctggaggagaacctgggcgagaacggcgcctggggcagaccccacctgagccacctgaccttctggagcctgctggagctgagaagagtgttcaccaagggcaccgtgctgctggacctgcaggagaccagcctggccggcgtggccaaccagctgctggacagattcatcttcgaggaccagatcagaccccaggacagagaggagctgctgagagccctgctgctgaagcacagccacgccggcgagctggaggccctgggcggcgtgaagcccgccgtgctgaccagaagcggcgaccccagccagcccctgctgccccagcacagcagcctggagacccagctgttctgcgagcagggcgacggcggcaccgagggccacagccccagcggcatcctggagaagatcccccccgacagcgaggccaccctggtgctggtgggcagagccgacttcctggagcagcccgtgctgggcttcgtgagactgcaggaggccgccgagctggaggccgtggagctgcccgtgcccatcagattcctgttcgtgctgctgggccccgaggccccccacatcgactacacccagctgggcagagccgccgccaccctgatgagcgagagagtgttcagaatcgacgcctacatggcccagagcagaggcgagctgctgcacagcctggagggcttcctggactgcagcctggtgctgccccccaccgacgcccccagcgagcaggccctgctgagcctggtgcccgtgcagagagagctgctgagaagaagataccagagcagccccgccaagcccgacagcagcttctacaagggcctggacctgaacggcggccccgacgaccccctgcagcagaccggccagctgttcggcggcctggtgagagacatcagaagaagatacccctactacctgagcgacatcaccgacgccttcagcccccaggtgctggccgccgtgatcttcatctacttcgccgccctgagccccgccatcaccttcggcggcctgctgggcgagaagaccagaaaccagatgggcgtgagcgagctgctgatcagcaccgccgtgcagggcatcctgttcgccctgctgggcgcccagcccctgctggtggtgggcttcagcggccccctgctggtgttcgaggaggccttcttcagcttctgcgagaccaacggcctggagtacatcgtgggcagagtgtggatcggcttctggctgatcctgctggtggtgctggtggtggccttcgagggcagcttcctggtgagattcatcagcagatacacccaggagatcttcagcttcctgatcagcctgatcttcatctacgagaccttcagcaagctgatcaagatcttccaggaccaccccctgcagaagacctacaactacaacgtgctgatggtgcccaagccccagggccccctgcccaacaccgccctgctgagcctggtgctgatggccggcaccttcttcttcgccatgatgctgagaaagttcaagaacagcagctacttccccggcaagctgagaagagtgatcggcgacttcggcgtgcccatcagcatcctgatcatggtgctggtggacttcttcatccaggacacctacacccagaagctgagcgtgcccgacggcttcaaggtgagcaacagcagcgccagaggctgggtgatccaccccctgggcctgagaagcgagttccccatctggatgatgttcgccagcgccctgcccgccctgctggtgttcatcctgatcttcctggagagccagatcaccaccctgatcgtgagcaagcccgagagaaagatggtgaagggcagcggcttccacctggacctgctgctggtggtgggcatgggcggcgtggccgccctgttcggcatgccctggctgagcgccaccaccgtgagaagcgtgacccacgccaacgccctgaccgtgatgggcaaggccagcacccccggcgccgccgcccagatccaggaggtgaaggagcagagaatcagcggcctgctggtggccgtgctggtgggcctgagcatcctgatggagcccatcctgagcagaatccccctggccgtgctgttcggcatcttcctgtacatgggcgtgaccagcctgagcggcatccagctgttcgacagaatcctgctgctgttcaagccccccaagtaccaccccgacgtgccctacgtgaagagagtgaagacctggagaatgcacctgttcaccggcatccagatcatctgcctggccgtgctgtgggtggtgaagagcacccccgccagcctggccctgcccttcgtgctgatcctgaccgtgcccctgagaagagtgctgctgcccctgatcttcagaaacgtggagctgcagtgcctggacgccgacgacgccaaggccaccttcgacgaggaggagggcagagacgagtacgacgaggtggccatgcccgtgtag

SEQ ID NO: 7369 - protein, 664 aa, Artificial Sequence
  derived and/or modified sequence
MDSSTWSPKTTAVTRPVETHELIRNAADISIIVIYFVVVMAVGLWAMFSTNRGTVGGFFLAGRSMVWWPIGASLFASNIGSGHFVGLAGTGAASGIAIGGFEWNALVLVVVLGWLFVPIYIKAGVVTMPEYLRKRFGGQRIQVYLSLLSLLLYIFTKISADIFSGAIFINLALGLNLYLAIFLLLAITALYTITGGLAAVIYTDTLQTVIMLVGSLILTGFAFHEVGGYDAFMEKYMKAIPTIVSDGNTTFQEKCYTPRADSFHIFRDPLTGDLPWPGFIFGMSILTLWYWCTDQVIVQRCLSAKNMSHVKGGCILCGYLKLMPMFIMVMPGMISRILYTEKIACVVPSECEKYCGTKVGCTNIAYPTLVVELMPNGLRGLMLSVMLASLMSSLTSIFNSASTLFTMDIYAKVRKRASEKELMIAGRLFILVLIGISIAWVPIVQSAQSGQLFDYIQSITSYLGPPIAAVFLLAIFWKRVNEPGAFWGLILGLLIGISRMITEFAYGTGSCMEPSNCPTIICGVHYLYFAIILFAISFITIVVISLLTKPIPDVHLYRLCWSLRNSKEERIDLDAEEENIQEGPKETIEIETQVPEKKKGIFRRAYDLFCGLEQHGAPKMTEEEEKAMKMKMTDTSEKPLWRTVLNVNGIILVTVAVFCHAYFA

SEQ ID NO: 7370 - protein, 537 aa, Artificial Sequence
  derived and/or modified sequence
MPEYLRKRFGGQRIQVYLSLLSLLLYIFTKISADIFSGAIFINLALGLNLYLAIFLLLAITALYTITGGLAAVIYTDTLQTVIMLVGSLILTGFAFHEVGGYDAFMEKYMKAIPTIVSDGNTTFQEKCYTPRADSFHIFRDPLTGDLPWPGFIFGMSILTLWYWCTDQVIVQRCLSAKNMSHVKGGCILCGYLKLMPMFIMVMPGMISRILYTEKIACVVPSECEKYCGTKVGCTNIAYPTLVVELMPNGLRGLMLSVMLASLMSSLTSIFNSASTLFTMDIYAKVRKRASEKELMIAGRLFILVLIGISIAWVPIVQSAQSGQLFDYIQSITSYLGPPIAAVFLLAIFWKRVNEPGAFWGLILGLLIGISRMITEFAYGTGSCMEPSNCPTIICGVHYLYFAIILFAISFITIVVISLLTKPIPDVHLYRLCWSLRNSKEERIDLDAEEENIQEGPKETIEIETQVPEKKKGIFRRAYDLFCGLEQHGAPKMTEEEEKAMKMKMTDTSEKPLWRTVLNVNGIILVTVAVFCHAYFA

SEQ ID NO: 7371 - DNA, 1995 bp, Artificial Sequence
  derived and/or modified sequence
atggacagcagcacctggagccccaagaccaccgccgtgaccagacccgtggagacccacgagctgatcagaaacgccgccgacatcagcatcatcgtgatctacttcgtggtggtgatggccgtgggcctgtgggccatgttcagcaccaacagaggcaccgtgggcggcttcttcctggccggcagaagcatggtgtggtggcccatcggcgccagcctgttcgccagcaacatcggcagcggccacttcgtgggcctggccggcaccggcgccgccagcggcatcgccatcggcggcttcgagtggaacgccctggtgctggtggtggtgctgggctggctgttcgtgcccatctacatcaaggccggcgtggtgaccatgcccgagtacctgagaaagagattcggcggccagagaatccaggtgtacctgagcctgctgagcctgctgctgtacatcttcaccaagatcagcgccgacatcttcagcggcgccatcttcatcaacctggccctgggcctgaacctgtacctggccatcttcctgctgctggccatcaccgccctgtacaccatcaccggcggcctggccgccgtgatctacaccgacaccctgcagaccgtgatcatgctggtgggcagcctgatcctgaccggcttcgccttccacgaggtgggcggctacgacgccttcatggagaagtacatgaaggccatccccaccatcgtgagcgacggcaacaccaccttccaggagaagtgctacacccccagagccgacagcttccacatcttcagagaccccctgaccggcgacctgccctggcccggcttcatcttcggcatgagcatcctgaccctgtggtactggtgcaccgaccaggtgatcgtgcagagatgcctgagcgccaagaacatgagccacgtgaagggcggctgcatcctgtgcggctacctgaagctgatgcccatgttcatcatggtgatgcccggcatgatcagcagaatcctgtacaccgagaagatcgcctgcgtggtgcccagcgagtgcgagaagtactgcggcaccaaggtgggctgcaccaacatcgcctaccccaccctggtggtggagctgatgcccaacggcctgagaggcctgatgctgagcgtgatgctggccagcctgatgagcagcctgaccagcatcttcaacagcgccagcaccctgttcaccatggacatctacgccaaggtgagaaagagagccagcgagaaggagctgatgatcgccggcagactgttcatcctggtgctgatcggcatcagcatcgcctgggtgcccatcgtgcagagcgcccagagcggccagctgttcgactacatccagagcatcaccagctacctgggcccccccatcgccgccgtgttcctgctggccatcttctggaagagagtgaacgagcccggcgccttctggggcctgatcctgggcctgctgatcggcatcagcagaatgatcaccgagttcgcctacggcaccggcagctgcatggagcccagcaactgccccaccatcatctgcggcgtgcactacctgtacttcgccatcatcctgttcgccatcagcttcatcaccatcgtggtgatcagcctgctgaccaagcccatccccgacgtgcacctgtacagactgtgctggagcctgagaaacagcaaggaggagagaatcgacctggacgccgaggaggagaacatccaggagggccccaaggagaccatcgagatcgagacccaggtgcccgagaagaagaagggcatcttcagaagagcctacgacctgttctgcggcctggagcagcacggcgcccccaagatgaccgaggaggaggagaaggccatgaagatgaagatgaccgacaccagcgagaagcccctgtggagaaccgtgctgaacgtgaacggcatcatcctggtgaccgtggccgtgttctgccacgcctacttcgcctag

SEQ ID NO: 7372 - DNA, 1614 bp, Artificial Sequence
  derived and/or modified sequence
atgcccgagtacctgagaaagagattcggcggccagagaatccaggtgtacctgagcctgctgagcctgctgctgtacatcttcaccaagatcagcgccgacatcttcagcggcgccatcttcatcaacctggccctgggcctgaacctgtacctggccatcttcctgctgctggccatcaccgccctgtacaccatcaccggcggcctggccgccgtgatctacaccgacaccctgcagaccgtgatcatgctggtgggcagcctgatcctgaccggcttcgccttccacgaggtgggcggctacgacgccttcatggagaagtacatgaaggccatccccaccatcgtgagcgacggcaacaccaccttccaggagaagtgctacacccccagagccgacagcttccacatcttcagagaccccctgaccggcgacctgccctggcccggcttcatcttcggcatgagcatcctgaccctgtggtactggtgcaccgaccaggtgatcgtgcagagatgcctgagcgccaagaacatgagccacgtgaagggcggctgcatcctgtgcggctacctgaagctgatgcccatgttcatcatggtgatgcccggcatgatcagcagaatcctgtacaccgagaagatcgcctgcgtggtgcccagcgagtgcgagaagtactgcggcaccaaggtgggctgcaccaacatcgcctaccccaccctggtggtggagctgatgcccaacggcctgagaggcctgatgctgagcgtgatgctggccagcctgatgagcagcctgaccagcatcttcaacagcgccagcaccctgttcaccatggacatctacgccaaggtgagaaagagagccagcgagaaggagctgatgatcgccggcagactgttcatcctggtgctgatcggcatcagcatcgcctgggtgcccatcgtgcagagcgcccagagcggccagctgttcgactacatccagagcatcaccagctacctgggcccccccatcgccgccgtgttcctgctggccatcttctggaagagagtgaacgagcccggcgccttctggggcctgatcctgggcctgctgatcggcatcagcagaatgatcaccgagttcgcctacggcaccggcagctgcatggagcccagcaactgccccaccatcatctgcggcgtgcactacctgtacttcgccatcatcctgttcgccatcagcttcatcaccatcgtggtgatcagcctgctgaccaagcccatccccgacgtgcacctgtacagactgtgctggagcctgagaaacagcaaggaggagagaatcgacctggacgccgaggaggagaacatccaggagggccccaaggagaccatcgagatcgagacccaggtgcccgagaagaagaagggcatcttcagaagagcctacgacctgttctgcggcctggagcagcacggcgcccccaagatgaccgaggaggaggagaaggccatgaagatgaagatgaccgacaccagcgagaagcccctgtggagaaccgtgctgaacgtgaacggcatcatcctggtgaccgtggccgtgttctgccacgcctacttcgcctag

SEQ ID NO: 7373 - DNA, 1995 bp, Artificial Sequence
  derived and/or modified sequence
atggactcatccacgtggagtccaaaaacgaccgcagtgacccgtccagttgaaacacacgaactaattcggaacgccgcagatattagtattattgtgatttattttgtcgtggtgatggccgtgggtctatgggccatgttctcaacgaaccggggaactgtaggcggattttttctagccggacgctccatggtatggtggccaatcggggccagtctgttcgcgagcaatattggcagcggccattttgtcggccttgccggcactggcgctgcatcaggtatagctatcggcggattcgagtggaacgctctcgtgttggtggtggtgctggggtggctcttcgttcccatctatatcaaagcaggcgtcgtgaccatgcctgagtatctccggaagaggttcggaggacaacgtatccaagtttatctgtcccttttaagtctactgctctacatttttactaaaatctctgcagacatattttcaggcgccatttttataaacttggcactgggtttaaacctttatctggcgatatttctgctgctggctattaccgcactctacacgatcaccggcggtctcgctgccgttatttacacagacacactccaaaccgtgatcatgctcgtgggttccctcatactgacaggctttgcgtttcatgaggtggggggttacgatgcctttatggagaagtacatgaaagctattcccacaattgttagtgacggtaacacgacatttcaagaaaaatgttatactccacgggccgacagcttccatatatttagagatcccctcactggcgacttgccctggcccggctttatatttgggatgtcaatcctcactctgtggtactggtgtacagaccaggtgatcgtgcaacgctgcctttcagccaaaaatatgagccacgtcaaaggtggatgcatcttgtgcggatacctcaaattgatgccaatgttcattatggtgatgccgggcatgatcagccgaatcctgtacacagaaaagatcgcgtgcgtagtgccatctgagtgcgagaaatattgcgggacaaaagtgggatgcactaacatagcctaccccacactggtggtggaacttatgcctaatggactgagggggctgatgctttcggtgatgcttgcaagcctgatgagctctcttacttcgatttttaattccgcctcgaccctgttcaccatggacatatacgccaaagtgcggaagcgtgcctccgagaaggagctcatgattgctggcagactgttcatcctcgtgttgatcggcatatctatcgcttgggtgcctattgtccagtctgctcagtcgggtcagctgttcgattatatacaatctattacatcttacctgggacccccgatcgccgccgtttttttactcgccatattttggaagagagtgaatgaacctggagccttttggggactgattttaggactcctcatcgggatatcccgtatgatcactgaatttgcgtacggaactggctcatgtatggaaccaagcaactgtccaacgattatctgcggtgtgcactatttgtattttgccattatcctgttcgccatcagcttcatcactattgttgttatctcactactaaccaagccaattcccgacgtgcacctctacaggttgtgctggagccttcggaatagcaaggaagaaaggattgatcttgacgccgaggaggagaacatacaggaaggcccaaaagagactatcgagatagagacacaggtcccagagaaaaagaaaggcatttttagacgggcgtatgatcttttttgtgggctggaacagcatggggccccaaagatgacagaggaggaggaaaaagcaatgaaaatgaagatgaccgatacatctgaaaagccgctttggaggaccgtcctcaacgtgaacggaatcatcttggtgacagtcgctgtgttttgccatgcatattttgcttag

SEQ ID NO: 7374 - DNA, 1614 bp, Artificial Sequence
  derived and/or modified sequence
atgccggagtacctgcgcaaacgtttcgggggccagcgcattcaagtatatctctcactgctcagcctattgctctacatatttacaaagatctccgctgatatatttagtggtgccatcttcattaacctggctttgggtctcaacctttacctggcaatttttctgctgttggcgattaccgccctgtacactattactggaggcttggccgccgtaatctacacagacactttgcagacagttattatgttagtcggttccctgattttgacaggttttgccttccatgaggttggaggatatgacgcttttatggagaagtacatgaaggcaattccaactatagtatctgacggtaacaccactttccaggaaaagtgctatacccctcgtgctgattcctttcatatttttagggaccctctcacaggtgacctgccttggcccggctttatcttcggaatgtcaatcctgacactgtggtactggtgtacagaccaagttatcgtgcaacgatgcctgtccgccaagaatatgtcccacgttaaaggagggtgtatcctttgcggctacctgaaactgatgccaatgttcattatggtgatgccgggcatgatctcccggatcctgtacacagaaaaaattgcctgcgtggtcccatctgagtgcgaaaagtactgcggaaccaaggtaggctgtactaacatcgcctaccctaccctcgtggttgaacttatgcctaacggtttacgcggacttatgctgagtgtaatgctcgcttccttaatgagttcgcttacatcaatctttaattccgcttctaccctgtttaccatggacatctacgccaaggtgagaaagcgcgctagtgagaaggagctgatgatcgccggtaggctctttatcctcgtgctaataggcatctccattgcctgggtgcctattgtgcagtctgcccaatctggccagctgttcgattatatacagagtattacttcttaccttgggcctccaatagcagccgtgtttctcctcgcaatattttggaagagagtcaacgaaccaggggccttttggggccttatcctgggcctactgattgggatatccagaatgataacagaatttgcctatggcaccggatcctgcatggaaccaagcaattgtccgactataatctgtggcgtgcactatctgtacttcgcaattatccttttcgcgatatcattcatcacaattgtggtgattagcctgctaaccaagcccatacccgacgtgcacctctacaggctttgctggtcccttcgaaactcaaaagaagaaaggatcgatctggacgcagaggaggagaatattcaggaaggaccaaaggagaccattgaaatcgagactcaggtgccagaaaaaaaaaaagggatcttccgcagggcttacgacctgttttgcggcctggagcagcacggcgcaccaaagatgactgaggaggaggagaaggctatgaagatgaaaatgactgatacctctgagaagcctctctggcgcaccgtactgaatgtgaacggaatcattctggtgacggtcgcagtgttctgtcatgcttattttgcatag

SEQ ID NO: 7375 - DNA, 1995 bp, Artificial Sequence
  derived and/or modified sequence
atggacagcagcacctggagccccaagaccacagctgtgaccaggcctgtggagacccatgagctgatcagaaatgctgctgacatcagcatcatcgtcatctactttgtggtggtgatggctgtgggcctgtgggccatgttcagcaccaacagaggcaccgtgggcggcttcttcctggccggccgctccatggtgtggtggcccatcggggccagcctgtttgccagcaacatcggcagcggccactttgtgggcctggccggcaccggggccgccagcggcatcgccatcggcggctttgagtggaatgccctggtgctggtggtggtgctgggctggctgtttgtgcccatctacatcaaggccggcgtggtgaccatgcctgagtacctgaggaagagatttggaggccagaggatccaggtgtacctgagcctgctgagcctgctgctgtacatcttcaccaagatctctgctgacatcttcagcggggccatcttcatcaacctggccctgggcctgaacctgtacctggccatcttcctgctgctggccatcacagccctgtacaccatcaccggcggcctggccgctgtgatctacacagacaccctgcagaccgtcatcatgctggtgggcagcctcatcctgactggatttgccttccacgaggtgggcggctatgatgccttcatggagaagtacatgaaggccatccccaccatcgtgtctgatggcaacaccaccttccaggagaagtgctacacccccagggctgacagcttccacatcttccgggaccccctgactggagacctgccctggccaggcttcatcttcggcatgagcatcctgaccctgtggtactggtgcacagaccaggtgattgtgcagcgctgcctgagcgccaagaacatgagccacgtgaagggcggctgcatcctgtgtggctacctgaagctgatgcccatgttcatcatggtgatgcctggcatgatcagccgcatcctgtacacagagaagatcgcctgtgtggtgcccagtgaatgtgagaagtactgcggcaccaaggtgggctgcaccaacatcgcctaccccaccctggtggtggagctgatgcccaacggcctgcggggcctgatgctgtctgtgatgctggccagcctgatgagcagcctgaccagcatcttcaacagcgccagcaccctcttcaccatggacatctatgccaaggtgaggaagagggccagcgagaaggagctgatgattgctggccgcctcttcatcctggtgctgattggcatcagcatcgcctgggtgcccatcgtgcagagcgcccagagcggccagctgtttgactacatccagagcatcaccagctacctgggcccccccatcgctgctgtgttcctgctggccatcttctggaagagggtgaatgaacctggggccttctggggcctcatcctgggcctgctgattggcatcagcaggatgatcacagaatttgcctacggcaccggcagctgcatggagcccagcaactgccccaccatcatctgtggggtgcactacctgtactttgccatcatcctgtttgccatctccttcatcaccatcgtggtgatcagcctgctgaccaagcccatcccagatgtgcacctgtaccgcctgtgctggagcctgaggaacagcaaggaggagagaattgacctggatgctgaggaggagaacatccaggagggccccaaggagaccatcgagattgagacccaggtgcctgagaagaagaagggcatcttcagaagagcctatgacctcttctgtggcctggagcagcacggggcccccaagatgacagaggaggaggagaaggccatgaagatgaagatgacagacaccagcgagaagcccctgtggaggacagtgctgaatgtgaatggcatcatcctggtgacagtggccgtgttctgccacgcctactttgcctag

SEQ ID NO: 7376 - DNA, 1614 bp, Artificial Sequence
  derived and/or modified sequence
atgcctgagtacctgaggaagagatttggaggccagaggatccaggtgtacctgagcctgctgagcctgctgctgtacatcttcaccaagatctctgctgacatcttcagcggggccatcttcatcaacctggccctgggcctgaacctgtacctggccatcttcctgctgctggccatcacagccctgtacaccatcactggaggcctggccgccgtcatctacacagacaccctgcagaccgtcatcatgctggtgggcagcctcatcctgaccggctttgccttccacgaggtgggcggctatgatgccttcatggagaagtacatgaaggccatccccaccatcgtgtctgatggcaacaccaccttccaggagaagtgctacacccccagggctgacagcttccacatcttccgggaccccctgaccggggacctgccctggccaggcttcatcttcggcatgagcatcctgaccctgtggtactggtgcacagaccaggtgattgtgcagcgctgcctgagcgccaagaacatgagccacgtgaagggcggctgcatcctgtgtggctacctgaagctgatgcccatgttcatcatggtgatgcctggcatgatcagccgcatcctgtacacagagaagatcgcctgtgtggtgcccagtgaatgtgagaagtactgcggcaccaaggtgggctgcaccaacatcgcctaccccaccctggtggtggagctgatgcccaacggcctgcggggcctgatgctgtctgtgatgctggccagcctgatgagcagcctgaccagcatcttcaacagcgccagcaccctcttcaccatggacatctatgccaaggtgaggaagagggccagcgagaaggagctgatgattgctggccgcctcttcatcctggtgctgattggcatcagcatcgcctgggtgcccatcgtgcagagcgcccagagcggccagctgtttgactacatccagagcatcaccagctacctgggcccccccatcgctgctgtgttcctgctggccatcttctggaagagggtgaatgagcccggggccttctggggcctcatcctgggcctgctgattggcatcagcaggatgatcacagaatttgcctatggaacaggcagctgcatggagcccagcaactgccccaccatcatctgtggggtgcactacctgtactttgccatcatcctgtttgccatctccttcatcaccatcgtggtgatcagcctgctgaccaagcccatcccagatgtgcacctgtaccgcctgtgctggagcctgaggaacagcaaggaggagagaattgacctggatgctgaggaggagaacatccaggagggccccaaggagaccattgaaattgagacccaggtgcctgagaagaagaagggcatcttccggcgggcctatgacctcttctgtggcctggagcagcacggggcccccaagatgacagaggaggaggagaaggccatgaagatgaagatgacagacaccagcgagaagcccctgtggaggacagtgctgaatgtgaatggcatcatcctggtgacagtggccgtgttctgccacgcctactttgcctag

SEQ ID NO: 7377 - DNA, 1995 bp, Artificial Sequence
  derived and/or modified sequence
atggacagcagcacctggagccccaagaccaccgccgtgacccggcctgtggaaactcacgaattgattaggaacgccgcagacatctcaatcattgtgatctacttcgtcgtggtgatggccgtgggcctctgggcaatgttttctacaaatagaggcactgtaggaggtttttttcttgccgggagatctatggtttggtggccaattggggccagcttgttcgcctccaatattgggtccggtcacttcgtgggactagccggtaccggtgcggcatcaggaattgccattggcggcttcgagtggaatgccctcgtcctagttgtagtgctcgggtggttgttcgtccccatatacattaaggctggggtcgttaccatgcctgagtaccttcggaagcgatttgggggtcagagaattcaagtctatctgtccttgctgagcctgttactgtatattttcacaaagatctcagccgacattttctccggcgctatttttatcaatctagccctggggcttaacttgtacctagcgatttttctgctgctcgccatcaccgcactctatactataacaggcggactcgcagccgtgatctatacagatacactgcagacggtaataatgttggtgggaagccttatacttaccggattcgccttccacgaagtaggtggttacgatgccttcatggagaagtatatgaaagccattcccaccattgtgagtgatggcaacaccacattccaggagaagtgttacactcctcgcgctgactcttttcacatctttagggaccctctcacaggggacctgccttggccggggttcatcttcggcatgagcatcctcactttgtggtattggtgtactgaccaggtgattgtgcagagatgcctttctgcgaaaaacatgtcccacgttaaaggcgggtgtattctgtgcggctatttgaagctcatgccaatgttcattatggtgatgccaggaatgatttcacggattttatatacagaaaaaattgcatgcgtggtcccatctgagtgcgaaaagtattgtggcaccaaagtaggatgtaccaatatagcctaccctacactggttgtggagttaatgcccaatgggttgcgaggcctgatgctgtcggtgatgcttgctagtctgatgtccagcctgactagcatcttcaattctgcctcaacactgtttactatggacatatacgccaaggtgcgcaaaagagcctcggagaaggagctgatgatcgctgggcgattgtttattctcgtgcttattgggatcagtattgcgtgggtgcccattgtccagagcgcgcagagtggacagttatttgattatatccagagcatcactagctatctgggtccccccatcgcagctgtgtttctgctcgccatattttggaagagagtcaacgagcccggggctttttggggtctgattttaggcctcctgatagggatatctcgcatgatcacagagttcgcctacggcacaggaagctgcatggaacccagcaactgtcccaccataatttgtggggtgcactatctttattttgccatcatccttttcgcaattagcttcattactatcgtggtgatctcactactaacaaagccaattcctgacgtgcatctctaccgactgtgctggagcctgcgtaactccaaggaagaacgtatcgaccttgacgccgaggaggagaatatacaggagggcccaaaggaaacaatcgagattgagacccaagtcccagagaagaagaagggtatcttccggagagcttatgacttgttctgcggcctggaacagcatggtgcacccaagatgacagaagaagaggaaaaagctatgaaaatgaagatgaccgacaccagtgagaagccgctgtggcggacagttctgaacgtgaacggcatcatacttgtaaccgttgcagttttttgtcatgcatatttcgcttag

SEQ ID NO: 7378 - DNA, 1614 bp, Artificial Sequence
  derived and/or modified sequence
atgcccgagtacctgcggaagcggttcggcggccagcggatccaggtgtacctttccctcctaagcctccttctgtacatctttacaaagatctctgctgacatcttttcaggcgccatcttcatcaacttggctttgggcctcaacttgtatttagcaatattcctgctcctggcaattacggcattgtataccattacaggaggactggccgccgtgatctacaccgatacacttcagaccgtgatcatgctggtgggaagccttatcttaaccggcttcgctttccacgaggttggtggttacgacgcctttatggaaaagtacatgaaggcgatccccactatcgtttcagatgggaacaccacgtttcaggagaagtgctatacaccccgagctgatagctttcacatctttcgagacccactcacaggcgacctcccatggccggggtttatcttcggcatgtcaatccttactctgtggtactggtgcaccgaccaagtgatagtacagagatgcttaagtgcaaaaaacatgtcacatgtcaaaggcggttgcattctgtgcggatatttgaaactgatgcccatgtttatcatggtgatgccaggcatgatatccaggatcctgtatacggaaaaaatagcatgcgttgtgccatcggagtgcgagaaatattgcggcaccaaagttggctgcacgaacattgcctatcctactctggtagttgagctgatgccgaacggccttcgagggctgatgttaagcgtgatgctcgctagcctaatgtcttccctgacctccatctttaattcagcttccacgctctttacaatggacatctacgccaaagtcaggaagagagcttccgagaaagaacttatgatagcggggcgactgttcatactggtactcatcggaataagcatagcctgggtgccgattgttcagagtgcccaatctggtcagctgtttgattacattcagagtattaccagctatctggggccccctattgcggccgtgtttctattagcaattttctggaagcgcgttaatgagcctggagccttctggggtcttatacttgggctccttattgggatttcccgtatgattacagaattcgcctacggcacgggtagttgcatggaacccagcaactgtcccacaatcatctgcggagtgcactacctgtatttcgcaattatcctctttgcaatcagtttcatcacgatcgtggtcatcagtctgctcacaaagccaattcctgatgtgcacctctaccggctgtgctggagcctgagaaacagcaaggaagagcgcatagacttggatgccgaagaagagaacattcaggaaggtcccaaggaaacaatcgaaattgagactcaagttcccgagaagaaaaaaggaatttttcgcagagcttatgacctgttttgtgggctagagcagcatggagccccaaagatgacagaagaggaggagaaggccatgaaaatgaagatgacggatacgtctgaaaaacccctatggcggactgtattaaatgtaaacggcatcatcttagttaccgttgccgtcttttgtcacgcgtattttgcttag

SEQ ID NO: 7379 - DNA, 1995 bp, Artificial Sequence
  derived and/or modified sequence
atggactcatcaacttggagccctaagacgacagcagtgacccgccctgtggaaacgcatgaactcattcgcaatgcggcagacatctctattattgtgatttactttgtggtagtcatggcggtaggcctgtgggccatgtttagcactaaccgcggaacagtcggaggattctttctggccggaaggagtatggtgtggtggcctataggcgcaagtctgtttgcttcaaacataggtagcggccatttcgtgggactagccggaaccggggctgcaagcggaattgctataggagggttcgaatggaacgccctcgtgttagttgtggttctcgggtggctgttcgttcctatttacatcaaagccggagtcgttaccatgcccgaatacctgcgcaaacggtttggcggtcagcggattcaggtgtatctgtctcttctcagcttgttgttatacatttttaccaaaatctctgctgatatctttagtggggctatctttattaatctggccctgggacttaatctttatttagcaatctttctgttgcttgccattacagctctttataccatcacaggcggactggctgcggtaatctacaccgatacgctacagaccgtgataatgctggtagggagcctaatcctcactggcttcgctttccacgaggttggaggatacgacgcctttatggagaagtatatgaaggctatacctacaatcgttagcgacggcaacacaacatttcaggagaaatgttatactccaagagccgatagctttcacatttttagagacccactgacgggggatctcccctggcctggcttcatatttggtatgtccatcctaactttatggtattggtgtaccgaccaggtcatcgtgcagcgttgtctgtccgctaagaacatgtctcacgtgaagggcggttgcattctatgtggctaccttaaattgatgccgatgttcattatggttatgcctggcatgatctcccgcatcctctacactgagaagattgcctgcgttgttccatctgaatgtgagaagtactgcggaaccaaagtcggctgcaccaatattgcctacccaacgcttgttgtcgaactgatgcccaatgggctgcgaggactgatgcttagcgtgatgctggcgagcctgatgtcgtctctgacttccatcttcaattcagcatctaccctctttactatggatatatacgccaaggtgcggaaaagggcttccgaaaaggagcttatgatagccggaaggctgttcatcctagtcctgatcggaatcagtatcgcctgggtcccaattgtgcagagtgcccagtccggtcaactgtttgattacatccagtcgataacttcatacctgggccctcccattgccgcagtcttcctgttagccattttctggaagagagtgaatgaacccggtgccttttggggactgatcctcgggttgctgattgggatcagccggatgatcactgagttcgcttacggcactggatcctgcatggagccctcaaattgtcccactattatctgtggagtgcattatctgtactttgctattatccttttcgcgatcagcttcataaccatagtggtgatctccctcctgaccaaaccaatccccgatgtgcatctttatagattgtgctggagtctgaggaacagtaaagaggagaggatcgacctggacgcggaagaagaaaatattcaagagggcccaaaagagactatcgaaattgagacccaggtcccagaaaagaagaaaggcatcttccgcagagcttacgacttgttttgtggtttggagcagcacggggctcctaagatgaccgaggaggaggaaaaggctatgaaaatgaagatgactgataccagtgaaaagccactgtggcgcacagtgctcaatgtgaacgggattatactcgttactgttgccgtattctgccatgcctacttcgcgtag

SEQ ID NO: 7380 - DNA, 1614 bp, Artificial Sequence
  derived and/or modified sequence
atgcctgagtaccttcggaagagattcggaggccaacgcattcaggtttacctctccctgttgtccctgctcctctatatttttactaaaatttctgccgatattttcagcggcgctatatttattaacctcgccctgggcctgaatttatacctcgctatttttctgttgctagccataacagctctgtatactatcactggcggattagcagctgtaatttatactgacactctccaaaccgtgattatgttagtgggaagcctcattctaaccggatttgctttccacgaagtcgggggatatgacgccttcatggagaagtatatgaaggccattccaaccattgtttctgacggcaataccacgttccaggagaaatgctacacgccccgagctgactcttttcatatattccgggatccattgacaggcgatctgccatggcccggtttcatcttcggcatgtctatcctcaccctctggtattggtgtactgaccaagtgatagttcagcgctgcctgagtgctaagaatatgagtcacgtgaagggcggttgcattctgtgcggataccttaagctgatgcccatgttcatcatggttatgccaggaatgatatcccgcattctatacaccgaaaagatcgcttgtgttgtacccagtgagtgcgagaagtactgcgggaccaaagtggggtgtactaatatcgcctaccccacactcgtagtcgaactgatgcctaatgggttacggggactcatgctgtctgtgatgttggcgtcactgatgagcagtctgactagcattttcaactccgctagcaccttgttcactatggacatctatgcgaaagtcaggaagcgggcaagtgagaaagagcttatgatcgctggcagactcttcatcctggtccttatcgggatatccatcgcctgggtgcccatagtgcaatctgctcagtcaggacagctatttgactacattcagagtattaccagctatctgggaccccctatagcagctgtgttcctgcttgccatcttttggaagagggttaacgagcccggtgccttctggggactgatcctcggcctgctcatcggcatttcccgcatgatcacagagttcgcttatggcacggggtcctgtatggagccttctaattgtcctaccatcatttgtggagtgcattatctttattttgccattattttattcgccatctcattcattaccattgtcgtgatcagcctcctcaccaaacctatccccgatgtacatctgtaccgattgtgctggagcctccgtaattctaaggaggagcgcatcgaccttgatgccgaggaggaaaatatccaggaaggaccgaaggaaacaattgagattgagacccaagtgccagaaaagaaaaagggaatcttcaggcgggcatatgacctcttctgcgggctcgagcagcacggtgcaccaaaaatgaccgaagaagaggagaaagctatgaaaatgaagatgacggatacctcggagaagcccctttggcggacagtcttgaatgtgaatgggataatcctggtgaccgtcgctgtattttgccatgcctacttcgcatag

SEQ ID NO: 7381 - DNA, 5061 bp, Artificial Sequence
  derived and/or modified sequence
ccccattcgcaggacagctcttacctgccgggccgccgccccagccaacagctcagccgggtgctccttcctgggctccacgcccggagctgcttcctgacggtgcagccgcaaggcatcgcaggggccccgcgctactgccctgctccctcaaagtcccaggtcccctcccctggtgctgatcattaaccaggaggccgtataaggagctagcggccctggcgagagggaaggacgcaacgctgccaccatggacagtagcacctggagccccaagaccaccgcggtcacccggcctgttgagacccacgagctcattcgcaatgcagccgatatctccatcatcgttatctacttcgtggtagtgatggccgtcggactgtgggctatgttttccaccaatcgtgggactgttggaggcttcttcctggcaggccgaagtatggtgtggtggccgattggagcctccctctttgctagtaacattggaagtggccactttgtggggctggccgggactggggcagcttcaggcatcgccattggaggctttgaatggaatgccctggttttggtggttgtgctgggctggctgtttgtccccatctatattaaggctggggtggtgacaatgccagagtacctgaggaagcggtttggaggccagcggatccaggtctacctttcccttctgtccctgctgctctacattttcaccaagatctcggcagacatcttctcgggggccatattcatcaatctggccttaggcctgaatctgtatttagccatctttctcttattggcaatcactgccctttacacaattacagggggcctggcggcggtgatttacacggacaccttgcagacggtgatcatgctggtggggtctttaatcctgactgggtttgcttttcacgaagtgggaggctatgacgccttcatggaaaagtacatgaaagccattccaaccatagtgtctgatggcaacaccacctttcaggaaaaatgctacactccaagggccgactccttccacatcttccgagatcccctcacgggagacctcccatggcctgggttcatctttgggatgtccatccttaccttgtggtactggtgcacagatcaggtcattgtgcagcgctgcctctcagccaagaatatgtctcacgtgaagggtggctgcatcctgtgtgggtatctaaagctgatgcccatgttcatcatggtgatgccaggaatgatcagccgcattctgtacacagaaaaaattgcctgtgtcgtcccttcagaatgtgagaaatattgcggtaccaaggttggctgtaccaacatcgcctatccaaccttagtggtggagctcatgcccaatggactgcgaggcctgatgctatcagtcatgctggcctccctcatgagctccctgacctccatcttcaacagcgccagcaccctcttcaccatggacatctacgccaaggtccgcaagagagcatctgagaaagagctcatgattgccggaaggttgtttatcctggtgctgattggcatcagcatcgcctgggtgcccattgtgcagtcagcacaaagtgggcaactcttcgattacatccagtccatcaccagttacttgggaccacccattgcggctgtcttcctgcttgctattttctggaagagagtcaatgagccaggagccttttggggactgatcctaggacttctgattgggatttcacgtatgattactgagtttgcttatggaaccgggagctgcatggagcccagcaactgtcccacgattatctgtggggtgcactacttgtactttgccattatcctcttcgccatttctttcatcaccatcgtggtcatctccctcctcaccaaacccattccggatgtgcatctctaccgtctgtgttggagcctgcgcaacagcaaagaggagcgtattgacctggatgcggaagaggagaacatccaagaaggccctaaggagaccattgaaatagaaacacaagttcctgagaagaaaaaaggaatcttcaggagagcctatgacctattttgtgggctagagcagcacggtgcacccaagatgactgaggaagaggagaaagccatgaagatgaagatgacggacacctctgagaagcctttgtggaggacagtgttgaacgtcaatggcatcatcctggtgaccgtggctgtcttttgccatgcatattttgcctgagtcctaccttttgctgtagatttaccatggctggactcttactcaccttcctttagtctcgtcctgtggtgttgaagggaaatcagccagttgtaaattttgcccaggtggataaatgtgtacatgtgtaattataggctagctggaagaaaaccattagtttgctgttaatttatgcatttgaagccagtgtgatacagccatctgtacctactggagctgcagaagggaagtccactcagtcacatccagaaaaaggcagactaagaatcagaagccatgtgattgatgtctgacgtgagtctgtctcaggtagattccgggtgtcagtgtggtttataatccttgaatattgttttagaaactttggtctccctggttcctgccacttttcctgtccgtcctcctccccattttttttttaaaagaaagctgttttcccctcatcatatccctcttgagttttgcctggactttccctctcaagtgtgtcaatcaggtaaactgaggaatgcatggaagctgaggatggagcttgatgggctccctgtcctgggtgtttgctctctgaagtggaggcctgaggaaggtagtacttccacaaaagggagggacccgggccccagcctcaagctagtgggggaggcagatagcctgaatccaggggattttctgggcttcttaaaatgtccattgtgagttccccgtgtttgggattccactcattttggcattcacagtgcctggaatgtcttagattttcagcaatgcgtgttgaataaatgaatgacataggcatttatttttaaatctttgcttgctttttacatgagcctggcccttagttaaccttttcttgtggctacacaaagtatgctcactggttactaatgacttgggatgcatttgtcaaactgattatattagttttctagggatgccataacaaagtagcacagaccagatggctcaagcagcagacatttattttctcacagttctagaggctagaagttggaggccaagatgtcagcagggttggtttcttctgaggcctctctccttggttgcagatggtcatatctcactctgtcttccgtggccttccttttgtctgtgtcctaaatctactcttctgataaggacatcagtcatattggaataggacccaccctaatgtcttcattttaatcacctctttaaagcccctacctccaaatacagtcacactgtgagaaactgagggttaggaagtcagcaagtgagtcttgaagagatactaaacaaacccacaacacagataaagtatgcattttggagatttccaagccagagtctcccgtgaaaaaggtaaacggaagcagttattgtgcagcaaaaggaaaaagaattacaaactgaacgtatgtaggtgaggcaaggcagggtagggcagggcctttgggtaggctgatcagagggtttttcaacaataaatcaatgggaatgcatttgttgctcccaggaccctggcaccttgactctggtactatagcatgtcagcaaatacaagcaaagcccaacactctgatttgcatttatgccaatctaaactatccggtgtttagtttgattttttgagtgcaggttcattcaaggaccaggttcccttgtgctcagggtgaagtagaaccagaaaacatcgttatccattcccagaagttttggaagagccttggtagaaaagcagaagctgctttgaccgtgaaaatatttgactcctatcagtttttggtcaggagaagatatccacctagaccaacctgaggagaaggctcagagtacagatataccccgagcaacgtgatcaatgtccttgaaccttcatttttcatctgaaaacagagacataaatgcctggctcacagatttaaatgttatacattgacagcatttatcagtataacatttatttaaataagtaggtgctcaataggtgttggtcttctaacttgtctacatcccatccccattccagggtcttcagaattgaaggagagatgttgtatcactgttagaaggctgctttgggacattctgcagcagggaggagggactgtcaacccctacaccatgaccaccaagttcctcaccttggctgagtccctaaaactctctgaacctcaggttcctccaagcataatgcagacttcacagagctgttgtaaagattaggtgaggtcaattgatactgcttaaaaggcccggtccgtagaaaatgcccaataaacattactgctttccccctcaccctactgcctgaaaaaatattacacctgtgagactgactttgagaaccagtgtgggtggggagttgtgcatataaactatttaatgagtaccaaacacaaaagtcaagcttgtaaaatatcaggccttgccccagaaagacaaataccacatgatctcactgatatgtagaatcttaaaaagtcaaactcagaagcagagagtagaatgatggttatcaagggctgggggagggagggactggggagatgttggtcaaatgatacaaaggtttagttaggtggaataagttcagaaaatcaattgtacaatgtatcaattatagttaatagcaatataacatatacttgaaaattgctgagagtagtgtgagtgttctaccacaaaaaaatatgtgcagtaatagatgttaattaccttaatttagtcatttcacaatatgtacatatataaaaatatgttgtatgccatgagtatatataattattatttgtgaatttaaaaaataaaaataatttccaaaaaaa

SEQ ID NO: 7382 - DNA, 2088 bp, Artificial Sequence
  derived and/or modified sequence
actgcactcctgcctgggcgacagaaaaagactctgtcccaaaagtgggctctttgaaggctagaaggtatttggggcagcagacttgtgtggaagcagttatcaaagtggggatgtgacacgcaccaggagaggggaacagacaacacatgagattggagcctccctctttgctagtaacattggaagtggccactttgtggggctggccgggactggggcagcttcaggcatcgccattggaggctttgaatggaatgccctggttttggtggttgtgctgggctggctgtttgtccccatctatattaaggctggggtggtgacaatgccagagtacctgaggaagcggtttggaggccagcggatccaggtctacctttcccttctgtccctgctgctctacattttcaccaagatctcggcagacatcttctcgggggccatattcatcaatctggccttaggcctgaatctgtatttagccatctttctcttattggcaatcactgccctttacacaattacagggggcctggcggcggtgatttacacggacaccttgcagacggtgatcatgctggtggggtctttaatcctgactgggtttgcttttcacgaagtgggaggctatgacgccttcatggaaaagtacatgaaagccattccaaccatagtgtctgatggcaacaccacctttcaggaaaaatgctacactccaagggccgactccttccacatcttccgagatcccctcacgggagacctcccatggcctgggttcatctttgggatgtccatccttaccttgtggtactggtgcacagatcaggtcattgtgcagcgctgcctctcagccaagaatatgtctcacgtgaagggtggctgcatcctgtgtgggtatctaaagctgatgcccatgttcatcatggtgatgccaggaatgatcagccgcattctgtacacagaaaaaattgcctgtgtcgtcccttcagaatgtgagaaatattgcggtaccaaggttggctgtaccaacatcgcctatccaaccttagtggtggagctcatgcccaatggactgcgaggcctgatgctatcagtcatgctggcctccctcatgagctccctgacctccatcttcaacagcgccagcaccctcttcaccatggacatctacgccaaggtccgcaagagagcatctgagaaagagctcatgattgccggaaggttgtttatcctggtgctgattggcatcagcatcgcctgggtgcccattgtgcagtcagcacaaagtgggcaactcttcgattacatccagtccatcaccagttacttgggaccacccattgcggctgtcttcctgcttgctattttctggaagagagtcaatgagccaggagccttttggggactgatcctaggacttctgattgggatttcacgtatgattactgagtttgcttatggaaccgggagctgcatggagcccagcaactgtcccacgattatctgtggggtgcactacttgtactttgccattatcctcttcgccatttctttcatcaccatcgtggtcatctccctcctcaccaaacccattccggatgtgcatctctaccgtctgtgttggagcctgcgcaacagcaaagaggagcgtattgacctggatgcggaagaggagaacatccaagaaggccctaaggagaccattgaaatagaaacacaagttcctgagaagaaaaaaggaatcttcaggagagcctatgacctattttgtgggctagagcagcacggtgcacccaagatgactgaggaagaggagaaagccatgaagatgaagatgacggacacctctgagaagcctttgtggaggacagtgttgaacgtcaatggcatcatcctggtgaccgtggctgtcttttgccatgcatattttgcctgagtcctaccttttgctgtagatttaccatggctggactcttactcaccttcctttagtctcgtcctgtggtgttgaagggaaatcagccagttgtaaattttgcccaggtggataaatgtgtacatgtgtaattataggctagctgg

SEQ ID NO: 7383 - protein, 509 aa, Artificial Sequence
  derived and/or modified sequence
MNLLDPFMKMTDEQEKGLSGAPSPTMSEDSAGSPCPSGSGSDTENTRPQENTFPKGEPDLKKESEEDKFPVCIREAVSQVLKGYDWTLVPMPVRVNGSSKNKPHVKRPMNAFMVWAQAARRKLADQYPHLHNAELSKTLGKLWRLLNESEKRPFVEEAERLRVQHKKDHPDYKYQPRRRKSVKNGQAEAEEATEQTHISPNAIFKALQADSPHSSSGMSEVHSPGEHSGQSQGPPTPPTTPKTDVQPGKADLKREGRPLPEGGRQPPIDFRDVDIGELSSDVISNIETFDVNEFDQYLPPNGHPGVPATHGQVTYTGSYGISSTAATPASAGHVWMSKQQAPPPPPQQPPQAPPAPQAPPQPQAAPPQQPAAPPQQPQAHTLTTLSSEPGQSQRTHIKTEQLSPSHYSEQQQHSPQQIAYSPFNLPHYSPSYPPITRSQYDYTDHQNSSSYYSHAAGQGTGLYSTFTYMNPAQRPMYTPIADTSGVPSIPQTHSPQHWEQPVYTQLTRP

SEQ ID NO: 7384 - protein, 445 aa, Artificial Sequence
  derived and/or modified sequence
MNLLDPFMKMTDEQEKGLSGAPSPTMSEDSAGSPCPSGSGSDTENTRPQENTFPKGEPDLKKESEEDKFPVCIREAVSQVLKGYDWTLVPMPVRVNGSSKNKPHVKRPMNAFMVWAQAARRKLADQYPHLHNAELSKTLGKLWRLLNESEKRPFVEEAERLRVQHKKDHPDYKYQPRRRKSVKNGQAEAEEATEQTHISPNAIFKALQADSPHSSSGMSEVHSPGEHSGQSQGPPTPPTTPKTDVQPGKADLKREGRPLPEGGRQPPIDFRDVDIGELSSDVISNIETFDVNEFDQYLPPNGHPGVPATHGQVTYTGSYGISSTAATPASAGHVWMSKQQAPPPPPQQHSPQQIAYSPFNLPHYSPSYPPITRSQYDYTDHQNSSSYYSHAAGQGTGLYSTFTYMNPAQRPMYTPIADTSGVPSIPQTHSPQHWEQPVYTQLTRP

SEQ ID NO: 7385 - DNA, 3963 bp, Artificial Sequence
  derived and/or modified sequence
ggagagccgaaagcggagctcgaaactgactggaaacttcagtggcgcggagactcgccagtttcaaccccggaaacttttctttgcaggaggagaagagaaggggtgcaagcgcccccacttttgctctttttcctcccctcctcctcctctccaattcgcctccccccacttggagcgggcagctgtgaactggccaccccgcgccttcctaagtgctcgccgcggtagccggccgacgcgccagcttccccgggagccgcttgctccgcatccgggcagccgaggggagaggagcccgcgcctcgagtccccgagccgccgcggcttctcgcctttcccggccaccagccccctgccccgggcccgcgtatgaatctcctggaccccttcatgaagatgaccgacgagcaggagaagggcctgtccggcgcccccagccccaccatgtccgaggactccgcgggctcgccctgcccgtcgggctccggctcggacaccgagaacacgcggccccaggagaacacgttccccaagggcgagcccgatctgaagaaggagagcgaggaggacaagttccccgtgtgcatccgcgaggcggtcagccaggtgctcaaaggctacgactggacgctggtgcccatgccggtgcgcgtcaacggctccagcaagaacaagccgcacgtcaagcggcccatgaacgccttcatggtgtgggcgcaggcggcgcgcaggaagctcgcggaccagtacccgcacttgcacaacgccgagctcagcaagacgctgggcaagctctggagacttctgaacgagagcgagaagcggcccttcgtggaggaggcggagcggctgcgcgtgcagcacaagaaggaccacccggattacaagtaccagccgcggcggaggaagtcggtgaagaacgggcaggcggaggcagaggaggccacggagcagacgcacatctcccccaacgccatcttcaaggcgctgcaggccgactcgccacactcctcctccggcatgagcgaggtgcactcccccggcgagcactcggggcaatcccagggcccaccgaccccacccaccacccccaaaaccgacgtgcagccgggcaaggctgacctgaagcgagaggggcgccccttgccagaggggggcagacagccccctatcgacttccgcgacgtggacatcggcgagctgagcagcgacgtcatctccaacatcgagaccttcgatgtcaacgagtttgaccagtacctgccgcccaacggccacccgggggtgccggccacgcacggccaggtcacctacacgggcagctacggcatcagcagcaccgcggccaccccggcgagcgcgggccacgtgtggatgtccaagcagcaggcgccgccgccacccccgcagcagcccccacaggccccgccggccccgcaggcgcccccgcagccgcaggcggcgcccccacagcagccggcggcacccccgcagcagccacaggcgcacacgctgaccacgctgagcagcgagccgggccagtcccagcgaacgcacatcaagacggagcagctgagccccagccactacagcgagcagcagcagcactcgccccaacagatcgcctacagccccttcaacctcccacactacagcccctcctacccgcccatcacccgctcacagtacgactacaccgaccaccagaactccagctcctactacagccacgcggcaggccagggcaccggcctctactccaccttcacctacatgaaccccgctcagcgccccatgtacacccccatcgccgacacctctggggtcccttccatcccgcagacccacagcccccagcactgggaacaacccgtctacacacagctcactcgaccttgaggaggcctcccacgaagggcgaagatggccgagatgatcctaaaaataaccgaagaaagagaggaccaaccagaattccctttggacatttgtgtttttttgtttttttattttgttttgttttttcttcttcttcttcttccttaaagacatttaagctaaaggcaactcgtacccaaatttccaagacacaaacatgacctatccaagcgcattacccacttgtggccaatcagtggccaggccaaccttggctaaatggagcagcgaaatcaacgagaaactggactttttaaaccctcttcagagcaagcgtggaggatgatggagaatcgtgtgatcagtgtgctaaatctctctgcctgtttggactttgtaattatttttttagcagtaattaaagaaaaaagtcctctgtgaggaatattctctattttaaatatttttagtatgtactgtgtatgattcattaccattttgaggggatttatacatatttttagataaaattaaatgctcttatttttccaacagctaaactactcttagttgaacagtgtgccctagcttttcttgcaaccagagtatttttgtacagatttgctttctcttacaaaaagaaaaaaaaaatcctgttgtattaacatttaaaaacagaattgtgttatgtgatcagttttgggggttaactttgcttaattcctcaggctttgcgatttaaggaggagctgccttaaaaaaaaataaaggccttattttgcaattatgggagtaaacaatagtctagagaagcatttggtaagctttatcatatatatattttttaaagaagagaaaaacaccttgagccttaaaacggtgctgctgggaaacatttgcactcttttagtgcatttcctcctgcctttgcttgttcactgcagtcttaagaaagaggtaaaaggcaagcaaaggagatgaaatctgttctgggaatgtttcagcagccaataagtgcccgagcacactgcccccggttgcctgcctgggccccatgtggaaggcagatgcctgctcgctctgtcacctgtgcctctcagaacaccagcagttaaccttcaagacattccacttgctaaaattatttattttgtaaggagaggttttaattaaaacaaaaaaaaattcttttttttttttttttccaattttaccttctttaaaataggttgttggagctttcctcaaagggtatggtcatctgttgttaaattatgttcttaactgtaaccagtttttttttatttatctctttaatctttttttattattaaaagcaagtttctttgtattcctcaccctagatttgtataaatgcctttttgtccatcccttttttctttgttgtttttgttgaaaacaaactggaaacttgtttctttttttgtataaatgagagattgcaaatgtagtgtatcactgagtcatttgcagtgttttctgccacagacctttgggctgccttatattgtgtgtgtgtgtgggtgtgtgtgtgttttgacacaaaaacaatgcaagcatgtgtcatccatatttctctgcatcttctcttggagtgagggaggctacctggaggggatcagcccactgacagaccttaatcttaattactgctgtggctagagagtttgaggattgctttttaaaaaagacagcaaacttttttttttatttaaaaaaagatatattaacagttttagaagtcagtagaataaaatcttaaagcactcataatatggcatccttcaatttctgtataaaagcagatctttttaaaaagatacttctgtaacttaagaaacctggcatttaaatcatattttgtctttaggtaaaagctttggtttgtgttcgtgttttgtttgtttcacttgtttccctcccagccccaaaccttttgttctctccgtgaaacttacctttccctttttctttctcttttttttttttgtatattattgtttacaataaatatacattgcattaaaaagaaaaaaaaaaaaaaaaaaaaaaaaaaaaaaa

SEQ ID NO: 7386 - DNA, 1530 bp, Artificial Sequence
  derived and/or modified sequence
atgaacctgctggaccccttcatgaagatgaccgacgagcaggagaagggcctgagcggcgcccccagccccaccatgagcgaggacagcgccggcagcccctgccccagcggcagcggcagcgacaccgagaacaccagaccccaggagaacaccttccccaagggcgagcccgacctgaagaaggagagcgaggaggacaagttccccgtgtgcatcagagaggccgtgagccaggtgctgaagggctacgactggaccctggtgcccatgcccgtgagagtgaacggcagcagcaagaacaagccccacgtgaagagacccatgaacgccttcatggtgtgggcccaggccgccagaagaaagctggccgaccagtacccccacctgcacaacgccgagctgagcaagaccctgggcaagctgtggagactgctgaacgagagcgagaagagacccttcgtggaggaggccgagagactgagagtgcagcacaagaaggaccaccccgactacaagtaccagcccagaagaagaaagagcgtgaagaacggccaggccgaggccgaggaggccaccgagcagacccacatcagccccaacgccatcttcaaggccctgcaggccgacagcccccacagcagcagcggcatgagcgaggtgcacagccccggcgagcacagcggccagagccagggcccccccaccccccccaccacccccaagaccgacgtgcagcccggcaaggccgacctgaagagagagggcagacccctgcccgagggcggcagacagccccccatcgacttcagagacgtggacatcggcgagctgagcagcgacgtgatcagcaacatcgagaccttcgacgtgaacgagttcgaccagtacctgccccccaacggccaccccggcgtgcccgccacccacggccaggtgacctacaccggcagctacggcatcagcagcaccgccgccacccccgccagcgccggccacgtgtggatgagcaagcagcaggccccccccccccccccccagcagcccccccaggccccccccgccccccaggcccccccccagccccaggccgcccccccccagcagcccgccgcccccccccagcagccccaggcccacaccctgaccaccctgagcagcgagcccggccagagccagagaacccacatcaagaccgagcagctgagccccagccactacagcgagcagcagcagcacagcccccagcagatcgcctacagccccttcaacctgccccactacagccccagctacccccccatcaccagaagccagtacgactacaccgaccaccagaacagcagcagctactacagccacgccgccggccagggcaccggcctgtacagcaccttcacctacatgaaccccgcccagagacccatgtacacccccatcgccgacaccagcggcgtgcccagcatcccccagacccacagcccccagcactgggagcagcccgtgtacacccagctgaccagaccctag

SEQ ID NO: 7387 - DNA, 1338 bp, Artificial Sequence
  derived and/or modified sequence
atgaacctgctggaccccttcatgaagatgaccgacgagcaggagaagggcctgagcggcgcccccagccccaccatgagcgaggacagcgccggcagcccctgccccagcggcagcggcagcgacaccgagaacaccagaccccaggagaacaccttccccaagggcgagcccgacctgaagaaggagagcgaggaggacaagttccccgtgtgcatcagagaggccgtgagccaggtgctgaagggctacgactggaccctggtgcccatgcccgtgagagtgaacggcagcagcaagaacaagccccacgtgaagagacccatgaacgccttcatggtgtgggcccaggccgccagaagaaagctggccgaccagtacccccacctgcacaacgccgagctgagcaagaccctgggcaagctgtggagactgctgaacgagagcgagaagagacccttcgtggaggaggccgagagactgagagtgcagcacaagaaggaccaccccgactacaagtaccagcccagaagaagaaagagcgtgaagaacggccaggccgaggccgaggaggccaccgagcagacccacatcagccccaacgccatcttcaaggccctgcaggccgacagcccccacagcagcagcggcatgagcgaggtgcacagccccggcgagcacagcggccagagccagggcccccccaccccccccaccacccccaagaccgacgtgcagcccggcaaggccgacctgaagagagagggcagacccctgcccgagggcggcagacagccccccatcgacttcagagacgtggacatcggcgagctgagcagcgacgtgatcagcaacatcgagaccttcgacgtgaacgagttcgaccagtacctgccccccaacggccaccccggcgtgcccgccacccacggccaggtgacctacaccggcagctacggcatcagcagcaccgccgccacccccgccagcgccggccacgtgtggatgagcaagcagcaggccccccccccccccccccagcagcacagcccccagcagatcgcctacagccccttcaacctgccccactacagccccagctacccccccatcaccagaagccagtacgactacaccgaccaccagaacagcagcagctactacagccacgccgccggccagggcaccggcctgtacagcaccttcacctacatgaaccccgcccagagacccatgtacacccccatcgccgacaccagcggcgtgcccagcatcccccagacccacagcccccagcactgggagcagcccgtgtacacccagctgaccagaccctag

SEQ ID NO: 7388 - DNA, 1530 bp, Artificial Sequence
  derived and/or modified sequence
atgaacttgttggatccttttatgaaaatgacagacgaacaggagaaagggctgtctggggctccgagccctaccatgagcgaggactccgcgggaagcccttgtccatccggatccggctccgacaccgaaaatactagaccacaggagaatacatttcccaagggtgagcctgatcttaaaaaggagtcggaggaagacaagttccccgtctgcatacgggaggccgtctcgcaggtcctaaagggatacgactggactctggtccctatgcccgtcagagtcaatggatcatccaaaaataaacctcatgtaaaacgacctatgaacgccttcatggtgtgggcccaggcagctagacggaaactcgccgatcaatatccacacctccataacgcagaactgagcaagacgctggggaagctttggaggttgctaaatgaaagtgaaaaaagaccatttgtggaagaggctgagaggttacgggtgcagcacaagaaggaccatcctgactataagtatcagcctcggcgacggaaatccgtgaagaatggacaagccgaggctgaagaggcgactgaacaaactcacatttcccctaacgctatcttcaaggctctgcaggcagatagtcctcacagctcttccgggatgtccgaagttcactcccccggcgagcacagcggccagtcccagggccctccaacacctccaacgactcccaagactgatgtgcagccagggaaggccgacctaaagcgcgagggcaggcctctgcctgagggagggagacagccgcccattgattttcgggatgttgatattggagaacttagctccgacgtcatcagcaacattgaaactttcgacgttaacgagttcgatcagtacttgccaccaaacggacaccccggagtccctgctacccatggccaagtgacatacaccggttcatacggtattagctctaccgcagccaccccagccagtgcaggccatgtgtggatgtcaaagcaacaggcgcctccaccaccgccacagcagccaccccaggcgccccctgcaccacaggcccctcctcaaccccaagctgctcctccccagcaacctgcagccccaccgcagcaaccacaagcacataccctgacaacactgtccagcgaaccaggacaatcacagagaacccacatcaagactgaacaactcagcccttcccattacagcgaacagcagcagcacagtccacagcagattgcatactcacccttcaacctaccacattactctccttcctaccccccaatcacaaggtcacagtacgactatactgatcaccaaaacagtagtagctactattctcacgccgctggccaagggactggattatatagcacgttcacctacatgaatccagcccaacggcctatgtacacacccatcgcagacacctcaggggtgcctagcatcccacagacgcacagtcctcaacactgggagcagcccgtatacacccaactgacacgaccttag

SEQ ID NO: 7389 - DNA, 1338 bp, Artificial Sequence
  derived and/or modified sequence
atgaacctcctcgaccctttcatgaagatgaccgatgagcaggaaaaggggctgtccggcgcaccttccccgacaatgagcgaggacagtgcaggcagcccttgtccttctgggtctggctcagatacagagaatactagaccgcaggagaacacattccccaagggcgagccagacctgaagaaggaaagcgaggaggataagttccctgtttgcatacgggaggctgtctcccaggttcttaagggctatgattggactctggtacccatgcctgtgcgggtaaacggttcaagcaagaataagccacatgtgaagaggcccatgaacgcctttatggtgtgggcccaggccgcccgccgcaagctggccgaccaatatccacaccttcacaacgcagagctctcgaagaccctgggaaagttgtggcgactcctcaatgaaagcgagaagcgaccttttgtggaggaggcggaacgcctgcgagtccagcataaaaaggaccacccagactataaataccagcccaggcggcgcaagtccgtcaaaaatgggcaggctgaagctgaagaagctacagaacaaacccacatctcccctaacgcaatcttcaaggctctgcaggctgacagccctcactcctcaagtggtatgtccgaggttcactccccaggtgagcacagtggccaatcacaagggccacctacccctcccactactccaaaaacagacgtgcagcctggcaaggccgatctgaagcgtgaaggcagacctttgcctgagggggggcggcagccgccaatcgacttccgcgacgtcgacattggggaactgagtagcgacgtgatttccaatatcgaaacgttcgacgtgaacgaattcgatcagtacctaccacccaacggacacccaggggtcccagctacgcatggtcaggtgacctataccggctcgtatggcatcagttccacagcagccactccagcctcagctggccatgtgtggatgagcaagcagcaggcaccgccaccaccaccacaacagcactcgccgcaacagatcgcatacagtccgtttaatcttccacattacagcccatcatacccgcccattacacgaagtcaatacgactacacagatcatcagaattctagctcatattactctcatgcggctgggcaggggacagggctgtacagcacgtttacctatatgaaccccgcccagaggcctatgtatactccaatcgccgatactagcggcgttccttctatacctcagactcattcccctcagcactgggaacagccagtttacacgcaactgacccgcccgtag

SEQ ID NO: 7390 - DNA, 1530 bp, Artificial Sequence
  derived and/or modified sequence
atgaacctgctggaccccttcatgaagatgacagatgagcaggagaagggcctgagcggggcccccagccccaccatgtctgaggacagcgctggcagcccctgccccagcggcagcggcagtgacacagagaacacccggccccaggagaacaccttccccaagggggagccagacctgaagaaggagagcgaggaggacaagtttcctgtgtgcatccgggaggccgtgtcccaggtgctgaagggctatgactggaccctggtgcccatgcctgtgcgggtgaatggcagcagcaagaacaagccccacgtgaagaggcccatgaatgccttcatggtgtgggcccaggccgcccggaggaagctggccgaccagtacccccacctgcacaatgctgagctgagcaagaccctgggcaagctgtggaggctgctgaatgaaagtgagaagaggccctttgtggaggaggccgagcggctgcgggtgcagcacaagaaggaccacccagactacaagtaccagcccaggaggaggaagtctgtgaagaatggccaggccgaggccgaggaggccacagagcagacccacatcagccccaatgccatcttcaaggccctgcaggccgacagcccccacagcagcagcggcatgtctgaggtgcacagccctggagagcacagcggccagagccagggcccccccaccccacccaccacccccaagacagatgtgcagcccgggaaggctgacctgaagcgggagggccggcccctgcctgagggcggccggcagccccccatcgacttcagagatgtggacattggagagctgagcagtgatgtgatcagcaacatcgagacctttgatgtgaatgaatttgaccagtacctgcccccaaatggccaccctggggtgcctgccacccacggccaggtgacctacacaggcagctatggcatcagcagcacagctgccaccccagccagcgctggccacgtgtggatgagcaagcagcaggcccctcctcctccaccccagcagcccccccaggcccccccagccccccaggccccaccccagccccaggccgccccaccccagcagcctgctgccccaccccagcagccccaggcccacaccctgaccaccctgagcagcgagcccggccagagccagaggacccacatcaagacagagcagctgagccccagccactacagcgagcagcagcagcacagcccccagcagatcgcctacagccccttcaacctgccccactacagccccagctacccacccatcaccaggagccagtatgactacacagaccaccagaacagcagcagctactacagccatgctgctggccagggcaccggcctgtacagcaccttcacctacatgaacccagcccagaggcccatgtacacccccatcgctgacaccagcggcgtgcccagcatcccccagacccacagcccccagcactgggagcagcctgtgtacacccagctgacccggccctag

SEQ ID NO: 7391 - DNA, 1338 bp, Artificial Sequence
  derived and/or modified sequence
atgaacctgctggaccccttcatgaagatgacagatgagcaggagaagggcctgagcggggcccccagccccaccatgtctgaggacagcgctggcagcccctgccccagcggcagcggcagtgacacagagaacacccggccccaggagaacaccttccccaagggggagccagacctgaagaaggagagcgaggaggacaagtttcctgtgtgcatccgggaggccgtgtcccaggtgctgaagggctatgactggaccctggtgcccatgcctgtgcgggtgaatggcagcagcaagaacaagccccacgtgaagaggcccatgaatgccttcatggtgtgggcccaggccgcccggaggaagctggccgaccagtacccccacctgcacaatgctgagctgagcaagaccctgggcaagctgtggaggctgctgaatgaaagtgagaagaggccctttgtggaggaggccgagcggctgcgggtgcagcacaagaaggaccacccagactacaagtaccagcccaggaggaggaagtctgtgaagaatggccaggccgaggccgaggaggccacagagcagacccacatcagccccaatgccatcttcaaggccctgcaggccgacagcccccacagcagcagcggcatgtctgaggtgcacagccctggagagcacagcggccagagccagggcccccccaccccacccaccacccccaagacagatgtgcagcccgggaaggctgacctgaagcgggagggccggcccctgcctgagggcggccggcagccccccatcgacttcagagatgtggacattggagagctgagcagtgatgtgatcagcaacatcgagacctttgatgtgaatgaatttgaccagtacctgcccccaaatggccaccctggggtgcctgccacccacggccaggtgacctacacaggcagctatggcatcagcagcacagctgccaccccagccagcgctggccacgtgtggatgagcaagcagcaggcccctcctcctccaccccagcagcacagcccccagcagatcgcctacagccccttcaacctgccccactacagccccagctacccacccatcaccaggagccagtatgactacacagaccaccagaacagcagcagctactacagccatgctgctggccagggcaccggcctgtacagcaccttcacctacatgaacccagcccagaggcccatgtacacccccatcgctgacaccagcggcgtgcccagcatcccccagacccacagcccccagcactgggagcagcctgtgtacacccagctgacccggccctag

SEQ ID NO: 7392 - DNA, 1530 bp, Artificial Sequence
  derived and/or modified sequence
atgaacctgctggaccccttcatgaagatgaccgacgagcaggagaagggactctctggcgcaccctccccaaccatgagcgaagactccgcgggaagcccctgccccagcggctcgggttctgacacggagaatacccgacctcaggagaataccttcccaaagggtgagcccgacctgaaaaaagagagtgaagaagataagttcccagtgtgcattagggaggcggttagccaggtgctgaaggggtacgattggacactcgtaccaatgccggtgcgggtgaatgggtcctcgaaaaacaaacctcatgtgaaaaggccgatgaacgccttcatggtatgggcccaggctgcccgccgcaaactggcagatcagtatccacaccttcataatgccgagctgagtaaaactttgggaaaactatggcggcttcttaatgagtctgagaagcggccttttgttgaagaggcagagagactccgagtgcagcataagaaggatcatcccgactacaagtaccagccccggcgccgcaaatccgtgaagaacggccaagccgaggccgaagaggccacagagcaaactcacatatcacccaacgcaatatttaaggccttgcaggccgattctccacacagctcctcaggcatgtctgaggtccactcccccggagaacattctggccagtcacagggcccaccgaccccgccaacaactcctaaaactgatgtgcagcccggcaaggctgatctgaagagagaaggaaggccactgcccgaaggtggcagacagccccctatagactttcgggatgtggacatcggtgaactgtcttccgacgttatcagcaatatagagacttttgacgtgaacgaattcgatcaatatttgcctcccaatggccatcccggagtgcccgcaacccacggacaggtgacctacaccggctcttatggcattagtagcactgcagctacacccgcctcagctggtcacgtctggatgtctaagcaacaagcccctccccctccccctcagcagcccccccaagccccccccgcaccccaggcccccccgcagccacaggccgcacctccccaacaacccgctgcaccgccccagcaacctcaggcccatactctgacgacattgtcttctgaacccggacagtcccaaaggacccacattaaaactgaacagctgtccccatcacattactctgagcagcagcagcacagccctcagcagatcgcttattccccgtttaacctgccacactacagtccttcatatccaccgattacccggtctcagtacgactacacagaccaccagaattcaagtagttattacagtcacgcagctggccagggcactggcctgtatagcacattcacatacatgaaccccgcccagcggccaatgtacacccctattgcggacacttctggcgtgccctcaatccctcagacacacagcccacagcattgggaacagcctgtgtacacccagttgaccaggccatag

SEQ ID NO: 7393 - DNA, 1338 bp, Artificial Sequence
  derived and/or modified sequence
atgaacctgctggaccccttcatgaagatgaccgacgagcaggagaagggcctgtcaggtgcacccagtccaactatgtctgaggattccgcaggctccccctgcccctccggatctggttctgatacagagaacacccgcccacaagaaaatacatttcccaaaggtgaacctgatctgaaaaaagaatccgaggaggataaattcccagtgtgtatcagagaagccgtgtctcaagtgcttaaggggtatgactggacacttgtgccaatgccagtgcgcgtgaacggatcctcgaaaaataagccccatgtgaagcggcccatgaacgcttttatggtatgggctcaggctgcccgcaggaaactcgccgaccaatacccacatttacacaacgctgaactaagcaagacactcggaaagctttggcgcttgctgaatgagtcagagaagcgcccatttgtcgaggaggcggagcgtctgcgtgtccagcataagaaagatcatccggattacaagtaccagcctaggcgccggaaatctgttaaaaatgggcaggccgaggccgaggaagccaccgagcagactcacatatccccaaacgctatttttaaggcactgcaggctgatagcccccacagctcctctggtatgagtgaagtgcatagccccggcgaacacagcggccagtctcaggggccacccaccccccccactacacccaagaccgacgtgcaacctggaaaagcggacctcaaaagagaaggtagacctctgccagaaggggggcgccagcctcccattgacttcagagacgttgatattggcgaactttcttctgacgtgatatcaaatatcgagacgtttgatgttaacgaatttgaccaatatctccctccaaatggtcacccaggagttccggcaacccacggacaagtcacatacactggctcctacgggatcagctccaccgccgccaccccagcttcggccgggcacgtgtggatgagcaaacagcaggcccccccccccccaccacagcaacatagtcctcaacagattgcatactcgcctttcaatctcccccactacagcccgagctaccctcccatcactcggagccagtatgattatacggaccatcaaaattcttccagttactactcacacgccgcaggccagggcaccggtctgtactctactttcacctacatgaatcccgctcagcggcccatgtatactccaatagccgacacttcaggcgtcccgtctattcctcaaacccacagtccccaacattgggagcagcctgtgtatacacaattgacaagaccatag

SEQ ID NO: 7394 - DNA, 1530 bp, Artificial Sequence
  derived and/or modified sequence
atgaatctactcgaccctttcatgaaaatgacagatgagcaggaaaaaggactttccggcgctcctagtcccaccatgagcgaagatagtgccggatcgccatgtccgtccgggtctggaagcgataccgaaaacacccgccctcaggagaacacgttcccgaagggggagccggatctcaagaaggaaagcgaggaagacaaatttccagtatgtattagggaggccgtgtcgcaggttctgaaaggttacgattggaccctcgtaccaatgccggttagggtgaatggatcgtctaaaaataaaccccacgtcaaaaggcctatgaatgcgtttatggtgtgggcacaagctgctcggcgtaaactggcagatcagtatccgcacttgcataacgccgaactgagcaagaccctcgggaagctgtggagactgctgaacgaatccgaaaagaggccatttgtggaggaggctgagcgtctgagagtacaacacaagaaagatcaccccgattacaagtatcagccaaggcgtcgcaaaagtgtcaagaacggacaggctgaagctgaggaagccacagagcaaacccacatttcacccaatgccatctttaaagctcttcaggccgattctcctcatagtagttccggcatgtccgaggttcattctccgggtgagcacagcggccaatcccaaggtccgcctaccccaccaactacaccaaagaccgatgtccagcccggaaaggctgacctgaagcgggagggcagaccattgcctgaaggcggtcgccagcccccaattgattttcgtgacgttgatatcggcgagctctctagtgatgtaatcagcaatatcgaaacctttgatgtgaacgaattcgatcaatacctgccacccaatggtcaccctggcgttccagctacccacggacaggttacctacacagggtcttacggcatcagctctaccgctgcaacaccagcaagtgcaggacatgtctggatgtccaaacaacaagcccctccccctcccccacagcagcccccacaagcaccgcctgcccctcaagcgcctccacagccacaggccgcaccaccacagcagcccgcagcaccacctcagcagccgcaggcgcacacgctgactacgctgtcttccgagccaggccagagccagcgtacacatatcaagaccgaacagctaagcccttcacactatagtgagcagcagcagcattcccctcagcagatcgcgtattcaccattcaatttacctcattatagccccagctaccccccaatcacacgctctcagtacgactatactgaccaccagaatagctcctcctactattctcatgccgctggccagggcacagggctctactccacattcacctacatgaacccagcacagagacctatgtacaccccaattgctgacacgtcaggcgtgcctagcatccctcagacccattctccccagcattgggagcagcccgtatatacacagttaacccggccttag

SEQ ID NO: 7395 - DNA, 1338 bp, Artificial Sequence
  derived and/or modified sequence
atgaatctgcttgacccatttatgaagatgactgatgagcaggaaaaggggctgagtggggcaccctctcccaccatgtccgaggactccgctggctccccttgtccttcaggatccggctcggataccgaaaacacccggccacaagagaataccttcccgaagggagaacctgatctgaagaaggagagtgaggaggacaagtttcccgtgtgtatccgagaagccgtttctcaggtcttaaagggctacgattggactctcgtgcccatgcctgtgcgcgttaatggatccagcaagaacaagcctcatgttaagcgtccaatgaacgctttcatggtgtgggcacaggcagcacggaggaagctggccgaccagtatcctcatttacacaacgccgaactgtctaaaactctgggcaagctatggcgtctgctgaatgagtccgaaaagcggccttttgtggaggaagctgagagactgagggtgcagcacaagaaggaccacccagattacaaatatcaacccagacgtagaaagtcggtcaaaaacggccaagccgaggctgaggaagcaacagaacagacccacattagccctaacgccatctttaaggccctgcaggcagattccccccacagtagttcggggatgtccgaggtgcacagtcccggagagcacagtgggcagagtcaaggtccacccactcctcccaccactcctaagaccgatgtccaacccggtaaggccgatcttaaacgggaagggaggcctctgccagaaggaggtcggcaacctcccatagactttcgtgacgttgacattggagagttgtcaagtgacgtaattagcaatatcgaaacatttgacgtgaacgagtttgatcagtacttgccacccaacggccacccaggagtgccagctacccacggtcaagtgacctatacaggctcatacgggatcagctcaacagccgctacccccgcatcagcagggcatgtgtggatgagcaaacagcaggcccctccacctccaccccagcagcattctccacagcagattgcatactctccattcaacctcccccattactccccctcctaccctcctataactcgttctcagtatgattataccgaccatcagaactctagttcttattactcccatgcggctggtcagggcacaggcctctattctactttcacctacatgaaccccgcacagcgcccaatgtatacccctatcgcagacaccagcggcgtgcccagtatccctcaaacccacagcccgcagcactgggagcagcctgtgtacacccagttgaccaggccatag

SEQ ID NO: 7396 - DNA, 3935 bp, Artificial Sequence
  derived and/or modified sequence
ggagagccgaaagcggagctcgaaactgactggaaacttcagtggcgcggagactcgccagtttcaaccccggaaacttttctttgcaggaggagaagagaaggggtgcaagcgcccccacttttgctctttttcctcccctcctcctcctctccaattcgcctccccccacttggagcgggcagctgtgaactggccaccccgcgccttcctaagtgctcgccgcggtagccggccgacgcgccagcttccccgggagccgcttgctccgcatccgggcagccgaggggagaggagcccgcgcctcgagtccccgagccgccgcggcttctcgcctttcccggccaccagccccctgccccgggcccgcgtatgaatctcctggaccccttcatgaagatgaccgacgagcaggagaagggcctgtccggcgcccccagccccaccatgtccgaggactccgcgggctcgccctgcccgtcgggctccggctcggacaccgagaacacgcggccccaggagaacacgttccccaagggcgagcccgatctgaagaaggagagcgaggaggacaagttccccgtgtgcatccgcgaggcggtcagccaggtgctcaaaggctacgactggacgctggtgcccatgccggtgcgcgtcaacggctccagcaagaacaagccgcacgtcaagcggcccatgaacgccttcatggtgtgggcgcaggcggcgcgcaggaagctcgcggaccagtacccgcacttgcacaacgccgagctcagcaagacgctgggcaagctctggagacttctgaacgagagcgagaagcggcccttcgtggaggaggcggagcggctgcgcgtgcagcacaagaaggaccacccggattacaagtaccagccgcggcggaggaagtcggtgaagaacgggcaggcggaggcagaggaggccacggagcagacgcacatctcccccaacgccatcttcaaggcgctgcaggccgactcgccacactcctcctccggcatgagcgaggtgcactcccccggcgagcactcggggcaatcccagggcccaccgaccccacccaccacccccaaaaccgacgtgcagccgggcaaggctgacctgaagcgagaggggcgccccttgccagaggggggcagacagccccctatcgacttccgcgacgtggacatcggcgagctgagcagcgacgtcatctccaacatcgagaccttcgatgtcaacgagtttgaccagtacctgccgcccaacggccacccgggggtgccggccacgcacggccaggtcacctacacgggcagctacggcatcagcagcaccgcggccaccccggcgagcgcgggccacgtgtggatgtccaagcagcaggcgccgccgccacccccgcagcagcccccacaggccccgccggccccgcaggcgcccccgcagccgcaggcggcgcccccacagcagccggcggcacccccgcagcagccacaggcgcacacgctgaccacgctgagcagcgagccgggccagtcccagcgaacgcacatcaagacggagcagctgagccccagccactacagcgagcagcagcagcactcgccccaacagatcgcctacagccccttcaacctcccacactacagcccctcctacccgcccatcacccgctcacagtacgactacaccgaccaccagaactccagctcctactacagccacgcggcaggccagggcaccggcctctactccaccttcacctacatgaaccccgctcagcgccccatgtacacccccatcgccgacacctctggggtcccttccatcccgcagacccacagcccccagcactgggaacaacccgtctacacacagctcactcgaccttgaggaggcctcccacgaagggcgaagatggccgagatgatcctaaaaataaccgaagaaagagaggaccaaccagaattccctttggacatttgtgtttttttgtttttttattttgttttgttttttcttcttcttcttcttccttaaagacatttaagctaaaggcaactcgtacccaaatttccaagacacaaacatgacctatccaagcgcattacccacttgtggccaatcagtggccaggccaaccttggctaaatggagcagcgaaatcaacgagaaactggactttttaaaccctcttcagagcaagcgtggaggatgatggagaatcgtgtgatcagtgtgctaaatctctctgcctgtttggactttgtaattatttttttagcagtaattaaagaaaaaagtcctctgtgaggaatattctctattttaaatatttttagtatgtactgtgtatgattcattaccattttgaggggatttatacatatttttagataaaattaaatgctcttatttttccaacagctaaactactcttagttgaacagtgtgccctagcttttcttgcaaccagagtatttttgtacagatttgctttctcttacaaaaagaaaaaaaaaatcctgttgtattaacatttaaaaacagaattgtgttatgtgatcagttttgggggttaactttgcttaattcctcaggctttgcgatttaaggaggagctgccttaaaaaaaaataaaggccttattttgcaattatgggagtaaacaatagtctagagaagcatttggtaagctttatcatatatatattttttaaagaagagaaaaacaccttgagccttaaaacggtgctgctgggaaacatttgcactcttttagtgcatttcctcctgcctttgcttgttcactgcagtcttaagaaagaggtaaaaggcaagcaaaggagatgaaatctgttctgggaatgtttcagcagccaataagtgcccgagcacactgcccccggttgcctgcctgggccccatgtggaaggcagatgcctgctcgctctgtcacctgtgcctctcagaacaccagcagttaaccttcaagacattccacttgctaaaattatttattttgtaaggagaggttttaattaaaacaaaaaaaaattcttttttttttttttttccaattttaccttctttaaaataggttgttggagctttcctcaaagggtatggtcatctgttgttaaattatgttcttaactgtaaccagtttttttttatttatctctttaatctttttttattattaaaagcaagtttctttgtattcctcaccctagatttgtataaatgcctttttgtccatcccttttttctttgttgtttttgttgaaaacaaactggaaacttgtttctttttttgtataaatgagagattgcaaatgtagtgtatcactgagtcatttgcagtgttttctgccacagacctttgggctgccttatattgtgtgtgtgtgtgggtgtgtgtgtgttttgacacaaaaacaatgcaagcatgtgtcatccatatttctctgcatcttctcttggagtgagggaggctacctggaggggatcagcccactgacagaccttaatcttaattactgctgtggctagagagtttgaggattgctttttaaaaaagacagcaaacttttttttttatttaaaaaaagatatattaacagttttagaagtcagtagaataaaatcttaaagcactcataatatggcatccttcaatttctgtataaaagcagatctttttaaaaagatacttctgtaacttaagaaacctggcatttaaatcatattttgtctttaggtaaaagctttggtttgtgttcgtgttttgtttgtttcacttgtttccctcccagccccaaaccttttgttctctccgtgaaacttacctttccctttttctttctcttttttttttttgtatattattgtttacaataaatatacattgcattaaaaagaaa

SEQ ID NO: 7397 - DNA, 1906 bp, Artificial Sequence
  derived and/or modified sequence
gagccgaaagcggagctcgaaactgactggaaacttcagtggcgcggagactcgccagtttcaaccccggaaacttttctttgcaggaggagaagagaaggggtgcaagcgcccccacttttgctctttttcctcccctcctcctcctctccaattcgcctccccccacttggagcgggcagctgtgaactggccaccccgcgccttcctaagtgctcgccgcggtagccggccgacgcgccagcttccccgggagccgcttgctccgcatccgggcagccgaggggagaggagcccgcgcctcgagtccccgagccgccgcggcttctcgcctttcccggccaccagccccctgccccgggcccgcgtatgaatctcctggaccccttcatgaagatgaccgacgagcaggagaagggcctgtccggcgcccccagccccaccatgtccgaggactccgcgggctcgccctgcccgtcgggctccggctcggacaccgagaacacgcggccccaggagaacacgttccccaagggcgagcccgatctgaagaaggagagcgaggaggacaagttccccgtgtgcatccgcgaggcggtcagccaggtgctcaaaggctacgactggacgctggtgcccatgccggtgcgcgtcaacggctccagcaagaacaagccgcacgtcaagcggcccatgaacgccttcatggtgtgggcgcaggcggcgcgcaggaagctcgcggaccagtacccgcacttgcacaacgccgagctcagcaagacgctgggcaagctctggagacttctgaacgagagcgagaagcggcccttcgtggaggaggcggagcggctgcgcgtgcagcacaagaaggaccacccggattacaagtaccagccgcggcggaggaagtcggtgaagaacgggcaggcggaggcagaggaggccacggagcagacgcacatctcccccaacgccatcttcaaggcgctgcaggccgactcgccacactcctcctccggcatgagcgaggtgcactcccccggcgagcactcggggcaatcccagggcccaccgaccccacccaccacccccaaaaccgacgtgcagccgggcaaggctgacctgaagcgagaggggcgccccttgccagaggggggcagacagccccctatcgacttccgcgacgtggacatcggcgagctgagcagcgacgtcatctccaacatcgagaccttcgatgtcaacgagtttgaccagtacctgccgcccaacggccacccgggggtgccggccacgcacggccaggtcacctacacgggcagctacggcatcagcagcaccgcggccaccccggcgagcgcgggccacgtgtggatgtccaagcagcaggcgccgccgccacccccgcagcagcactcgccccaacagatcgcctacagccccttcaacctcccacactacagcccctcctacccgcccatcacccgctcacagtacgactacaccgaccaccagaactccagctcctactacagccacgcggcaggccagggcaccggcctctactccaccttcacctacatgaaccccgctcagcgccccatgtacacccccatcgccgacacctctggggtcccttccatcccgcagacccacagcccccagcactgggaacaacccgtctacacacagctcactcgaccttgaggaggcctcccacgaagggcgaagatggccgagatgatcctaaaaataaccgaagaaagagaggaccaaccagaattccctttggacatttgtgtttttttgtttttttattttgttttgttttttcttcttcttcttcttccttaaagacatttaagctaaaggcaactcgtacccaaatttccaagacacaaacatg

SEQ ID NO: 7398 - protein, 2106 aa, Artificial Sequence
  derived and/or modified sequence
MTSATEFENVGNQPPYSRINARWDAPDDELDNDNSSARLFERSRIKALADEREVVQKKTFTKWVNSHLARVSCRITDLYKDLRDGRMLIKLLEVLSGEMLPKPTKGKMRIHCLENVDKALQFLKEQRVHLENMGSHDIVDGNHRLVLGLIWTIILRFQIQDIVVQTQEGRETRSAKDALLLWCQMKTAGYPHVNVTNFTSSWKDGLAFNALIHKHRPDLIDFDKLKDSNARHNLEHAFNVAERQLGIIPLLDPEDVFTENPDEKSIITYVVAFYHYFSKMKVLAVEGKRVGKVIDHAIETEKMIEKYSGLASDLLTWIEQTITVLNSRKFANSLTGVQQQLQAFSTYRTVEKPPKFQEKGNLEVLLFTIQSRMRANNQKVYTPHDGKLVSDINRAWESLEEAEYRRELALRNELIRQEKLEQLARRFDRKAAMRETWLSENQRLVAQDNFGYDLAAVEAAKKKHEAIETDTAAYEERVRALEDLAQELEKENYHDQKRITARKDNILRLWSYLQELLQSRRQRLETTLALQKLFQDMLHSIDWMDEIKAHLLSAEFGKHLLEVEDLLQKHKLMEADIAIQGDKVKAITAATLKFTEGKGYQPCDPQVIQDRISHLEQCFEELSNMAAGRKAQLEQSKRLWKFFWEMDEAESWIKEKEQIYSSLDYGKDLTSVLILQRKHKAFEDELRGLDAHLEQIFQEAHGMVARKQFGHPQIEARIKEVSAQWDQLKDLAAFCKKNLQDAENFFQFQGDADDLKAWLQDAHRLLSGEDVGQDEGATRALGKKHKDFLEELEESRGVMEHLEQQAQGFPEEFRDSPDVTHRLQALRELYQQVVAQADLRQQRLQEALDLYTVFGETDACELWMGEKEKWLAEMEMPDTLEDLEVVQHRFDILDQEMKTLMTQIDGVNLAANSLVESGHPRSREVKQYQDHLNTRWQAFQTLVSERREAVDSALRVHNYCVDCEETSKWITDKTKVVESTKDLGRDLAGIIAIQRKLSGLERDVAAIQARVDALERESQQLMDSHPEQKEDIGQRQKHLEELWQGLQQSLQGQEDLLGEVSQLQAFLQDLDDFQAWLSITQKAVASEDMPESLPEAEQLLQQHAGIKDEIDGHQDSYQRVKESGEKVIQGQTDPEYLLLGQRLEGLDTGWNALGRMWESRSHTLAQCLGFQEFQKDAKQAEAILSNQEYTLAHLEPPDSLEAAEAGIRKFEDFLGSMENNRDKVLSPVDSGNKLVAEGNLYSDKIKEKVQLIEDRHRKNNEKAQEASVLLRDNLELQNFLQNCQELTLWINDKLLTSQDVSYDEARNLHNKWLKHQAFVAELASHEGWLENIDAEGKQLMDEKPQFTALVSQKLEALHRLWDELQATTKEKTQHLSAARSSDLRLQTHADLNKWISAMEDQLRSDDPGKDLTSVNRMLAKLKRVEDQVNVRKEELGELFAQVPSMGEEGGDADLSIEKRFLDLLEPLGRRKKQLESSRAKLQISRDLEDETLWVEERLPLAQSADYGTNLQTVQLFMKKNQTLQNEILGHTPRVEDVLQRGQQLVEAAEIDCQDLEERLGHLQSSWDRLREAAAGRLQRLRDANEAQQYYLDADEAEAWIGEQELYVISDEIPKDEEGAIVMLKRHLRQQRAVEDYGRNIKQLASRAQGLLSAGHPEGEQIIRLQGQVDKHYAGLKDVAEERKRKLENMYHLFQLKRETDDLEQWISEKELVASSPEMGQDFDHVTLLRDKFRDFARETGAIGQERVDNVNAFIERLIDAGHSEAATIAEWKDGLNEMWADLLELIDTRMQLLAASYDLHRYFYTGAEILGLIDEKHRELPEDVGLDASTAESFHRVHTAFERELHLLGVQVQQFQDVATRLQTAYAGEKAEAIQNKEQEVSAAWQALLDACAGRRTQLVDTADKFRFFSMARDLLSWMESIIRQIETQERPRDVSSVELLMKYHQGINAEIETRSKNFSACLELGESLLQRQHQASEEIREKLQQVMSRRKEMNEKWEARWERLRMLLEVCQFSRDASVAEAWLIAQEPYLASGDFGHTVDSVEKLIKRHEAFEKSTASWAERFAALEKPTTASRGGRRDSRGGSSFPPCGHRENVPGQSLVSFV

SEQ ID NO: 7399 - protein, 2137 aa, Artificial Sequence
  derived and/or modified sequence
MTSATEFENVGNQPPYSRINARWDAPDDELDNDNSSARLFERSRIKALADEREVVQKKTFTKWVNSHLARVSCRITDLYKDLRDGRMLIKLLEVLSGEMLPKPTKGKMRIHCLENVDKALQFLKEQRVHLENMGSHDIVDGNHRLVLGLIWTIILRFQIQDIVVQTQEGRETRSAKDALLLWCQMKTAGYPHVNVTNFTSSWKDGLAFNALIHKHRPDLIDFDKLKDSNARHNLEHAFNVAERQLGIIPLLDPEDVFTENPDEKSIITYVVAFYHYFSKMKVLAVEGKRVGKVIDHAIETEKMIEKYSGLASDLLTWIEQTITVLNSRKFANSLTGVQQQLQAFSTYRTVEKPPKFQEKGNLEVLLFTIQSRMRANNQKVYTPHDGKLVSDINRAWESLEEAEYRRELALRNELIRQEKLEQLARRFDRKAAMRETWLSENQRLVAQDNFGYDLAAVEAAKKKHEAIETDTAAYEERVRALEDLAQELEKENYHDQKRITARKDNILRLWSYLQELLQSRRQRLETTLALQKLFQDMLHSIDWMDEIKAHLLSAEFGKHLLEVEDLLQKHKLMEADIAIQGDKVKAITAATLKFTEGKGYQPCDPQVIQDRISHLEQCFEELSNMAAGRKAQLEQSKRLWKFFWEMDEAESWIKEKEQIYSSLDYGKDLTSVLILQRKHKAFEDELRGLDAHLEQIFQEAHGMVARKQFGHPQIEARIKEVSAQWDQLKDLAAFCKKNLQDAENFFQFQGDADDLKAWLQDAHRLLSGEDVGQDEGATRALGKKHKDFLEELEESRGVMEHLEQQAQGFPEEFRDSPDVTHRLQALRELYQQVVAQADLRQQRLQEALDLYTVFGETDACELWMGEKEKWLAEMEMPDTLEDLEVVQHRFDILDQEMKTLMTQIDGVNLAANSLVESGHPRSREVKQYQDHLNTRWQAFQTLVSERREAVDSALRVHNYCVDCEETSKWITDKTKVVESTKDLGRDLAGIIAIQRKLSGLERDVAAIQARVDALERESQQLMDSHPEQKEDIGQRQKHLEELWQGLQQSLQGQEDLLGEVSQLQAFLQDLDDFQAWLSITQKAVASEDMPESLPEAEQLLQQHAGIKDEIDGHQDSYQRVKESGEKVIQGQTDPEYLLLGQRLEGLDTGWNALGRMWESRSHTLAQCLGFQEFQKDAKQAEAILSNQEYTLAHLEPPDSLEAAEAGIRKFEDFLGSMENNRDKVLSPVDSGNKLVAEGNLYSDKIKEKVQLIEDRHRKNNEKAQEASVLLRDNLELQNFLQNCQELTLWINDKLLTSQDVSYDEARNLHNKWLKHQAFVAELASHEGWLENIDAEGKQLMDEKPQFTALVSQKLEALHRLWDELQATTKEKTQHLSAARSSDLRLQTHADLNKWISAMEDQLRSDDPGKDLTSVNRMLAKLKRVEDQVNVRKEELGELFAQVPSMGEEGGDADLSIEKRFLDLLEPLGRRKKQLESSRAKLQISRDLEDETLWVEERLPLAQSADYGTNLQTVQLFMKKNQTLQNEILGHTPRVEDVLQRGQQLVEAAEIDCQDLEERLGHLQSSWDRLREAAAGRLQRLRDANEAQQYYLDADEAEAWIGEQELYVISDEIPKDEEGAIVMLKRHLRQQRAVEDYGRNIKQLASRAQGLLSAGHPEGEQIIRLQGQVDKHYAGLKDVAEERKRKLENMYHLFQLKRETDDLEQWISEKELVASSPEMGQDFDHVTLLRDKFRDFARETGAIGQERVDNVNAFIERLIDAGHSEAATIAEWKDGLNEMWADLLELIDTRMQLLAASYDLHRYFYTGAEILGLIDEKHRELPEDVGLDASTAESFHRVHTAFERELHLLGVQVQQFQDVATRLQTAYAGEKAEAIQNKEQEVSAAWQALLDACAGRRTQLVDTADKFRFFSMARDLLSWMESIIRQIETQERPRDVSSVELLMKYHQGINAEIETRSKNFSACLELGESLLQRQHQASEEIREKLQQVMSRRKEMNEKWEARWERLRMLLEVCQFSRDASVAEAWLIAQEPYLASGDFGHTVDSVEKLIKRHEAFEKSTASWAERFAALEKPTTLELKERQIAERPAEETGPQEEEGETAGEAPVSHHAATERTSPVSLWSRLSSSWESLQPEPSHPY

SEQ ID NO: 7400 - DNA, 6414 bp, Artificial Sequence
  derived and/or modified sequence
atgaccagcgccaccgagttcgagaacgtgggcaaccagcccccctacagcagaatcaacgccagatgggacgcccccgacgacgagctggacaacgacaacagcagcgccagactgttcgagagaagcagaatcaaggccctggccgacgagagagaggtggtgcagaagaagaccttcaccaagtgggtgaacagccacctggccagagtgagctgcagaatcaccgacctgtacaaggacctgagagacggcagaatgctgatcaagctgctggaggtgctgagcggcgagatgctgcccaagcccaccaagggcaagatgagaatccactgcctggagaacgtggacaaggccctgcagttcctgaaggagcagagagtgcacctggagaacatgggcagccacgacatcgtggacggcaaccacagactggtgctgggcctgatctggaccatcatcctgagattccagatccaggacatcgtggtgcagacccaggagggcagagagaccagaagcgccaaggacgccctgctgctgtggtgccagatgaagaccgccggctacccccacgtgaacgtgaccaacttcaccagcagctggaaggacggcctggccttcaacgccctgatccacaagcacagacccgacctgatcgacttcgacaagctgaaggacagcaacgccagacacaacctggagcacgccttcaacgtggccgagagacagctgggcatcatccccctgctggaccccgaggacgtgttcaccgagaaccccgacgagaagagcatcatcacctacgtggtggccttctaccactacttcagcaagatgaaggtgctggccgtggagggcaagagagtgggcaaggtgatcgaccacgccatcgagaccgagaagatgatcgagaagtacagcggcctggccagcgacctgctgacctggatcgagcagaccatcaccgtgctgaacagcagaaagttcgccaacagcctgaccggcgtgcagcagcagctgcaggccttcagcacctacagaaccgtggagaagccccccaagttccaggagaagggcaacctggaggtgctgctgttcaccatccagagcagaatgagagccaacaaccagaaggtgtacaccccccacgacggcaagctggtgagcgacatcaacagagcctgggagagcctggaggaggccgagtacagaagagagctggccctgagaaacgagctgatcagacaggagaagctggagcagctggccagaagattcgacagaaaggccgccatgagagagacctggctgagcgagaaccagagactggtggcccaggacaacttcggctacgacctggccgccgtggaggccgccaagaagaagcacgaggccatcgagaccgacaccgccgcctacgaggagagagtgagagccctggaggacctggcccaggagctggagaaggagaactaccacgaccagaagagaatcaccgccagaaaggacaacatcctgagactgtggagctacctgcaggagctgctgcagagcagaagacagagactggagaccaccctggccctgcagaagctgttccaggacatgctgcacagcatcgactggatggacgagatcaaggcccacctgctgagcgccgagttcggcaagcacctgctggaggtggaggacctgctgcagaagcacaagctgatggaggccgacatcgccatccagggcgacaaggtgaaggccatcaccgccgccaccctgaagttcaccgagggcaagggctaccagccctgcgacccccaggtgatccaggacagaatcagccacctggagcagtgcttcgaggagctgagcaacatggccgccggcagaaaggcccagctggagcagagcaagagactgtggaagttcttctgggagatggacgaggccgagagctggatcaaggagaaggagcagatctacagcagcctggactacggcaaggacctgaccagcgtgctgatcctgcagagaaagcacaaggccttcgaggacgagctgagaggcctggacgcccacctggagcagatcttccaggaggcccacggcatggtggccagaaagcagttcggccacccccagatcgaggccagaatcaaggaggtgagcgcccagtgggaccagctgaaggacctggccgccttctgcaagaagaacctgcaggacgccgagaacttcttccagttccagggcgacgccgacgacctgaaggcctggctgcaggacgcccacagactgctgagcggcgaggacgtgggccaggacgagggcgccaccagagccctgggcaagaagcacaaggacttcctggaggagctggaggagagcagaggcgtgatggagcacctggagcagcaggcccagggcttccccgaggagttcagagacagccccgacgtgacccacagactgcaggccctgagagagctgtaccagcaggtggtggcccaggccgacctgagacagcagagactgcaggaggccctggacctgtacaccgtgttcggcgagaccgacgcctgcgagctgtggatgggcgagaaggagaagtggctggccgagatggagatgcccgacaccctggaggacctggaggtggtgcagcacagattcgacatcctggaccaggagatgaagaccctgatgacccagatcgacggcgtgaacctggccgccaacagcctggtggagagcggccaccccagaagcagagaggtgaagcagtaccaggaccacctgaacaccagatggcaggccttccagaccctggtgagcgagagaagagaggccgtggacagcgccctgagagtgcacaactactgcgtggactgcgaggagaccagcaagtggatcaccgacaagaccaaggtggtggagagcaccaaggacctgggcagagacctggccggcatcatcgccatccagagaaagctgagcggcctggagagagacgtggccgccatccaggccagagtggacgccctggagagagagagccagcagctgatggacagccaccccgagcagaaggaggacatcggccagagacagaagcacctggaggagctgtggcagggcctgcagcagagcctgcagggccaggaggacctgctgggcgaggtgagccagctgcaggccttcctgcaggacctggacgacttccaggcctggctgagcatcacccagaaggccgtggccagcgaggacatgcccgagagcctgcccgaggccgagcagctgctgcagcagcacgccggcatcaaggacgagatcgacggccaccaggacagctaccagagagtgaaggagagcggcgagaaggtgatccagggccagaccgaccccgagtacctgctgctgggccagagactggagggcctggacaccggctggaacgccctgggcagaatgtgggagagcagaagccacaccctggcccagtgcctgggcttccaggagttccagaaggacgccaagcaggccgaggccatcctgagcaaccaggagtacaccctggcccacctggagccccccgacagcctggaggccgccgaggccggcatcagaaagttcgaggacttcctgggcagcatggagaacaacagagacaaggtgctgagccccgtggacagcggcaacaagctggtggccgagggcaacctgtacagcgacaagatcaaggagaaggtgcagctgatcgaggacagacacagaaagaacaacgagaaggcccaggaggccagcgtgctgctgagagacaacctggagctgcagaacttcctgcagaactgccaggagctgaccctgtggatcaacgacaagctgctgaccagccaggacgtgagctacgacgaggccagaaacctgcacaacaagtggctgaagcaccaggccttcgtggccgagctggccagccacgagggctggctggagaacatcgacgccgagggcaagcagctgatggacgagaagccccagttcaccgccctggtgagccagaagctggaggccctgcacagactgtgggacgagctgcaggccaccaccaaggagaagacccagcacctgagcgccgccagaagcagcgacctgagactgcagacccacgccgacctgaacaagtggatcagcgccatggaggaccagctgagaagcgacgaccccggcaaggacctgaccagcgtgaacagaatgctggccaagctgaagagagtggaggaccaggtgaacgtgagaaaggaggagctgggcgagctgttcgcccaggtgcccagcatgggcgaggagggcggcgacgccgacctgagcatcgagaagagattcctggacctgctggagcccctgggcagaagaaagaagcagctggagagcagcagagccaagctgcagatcagcagagacctggaggacgagaccctgtgggtggaggagagactgcccctggcccagagcgccgactacggcaccaacctgcagaccgtgcagctgttcatgaagaagaaccagaccctgcagaacgagatcctgggccacacccccagagtggaggacgtgctgcagagaggccagcagctggtggaggccgccgagatcgactgccaggacctggaggagagactgggccacctgcagagcagctgggacagactgagagaggccgccgccggcagactgcagagactgagagacgccaacgaggcccagcagtactacctggacgccgacgaggccgaggcctggatcggcgagcaggagctgtacgtgatcagcgacgagatccccaaggacgaggagggcgccatcgtgatgctgaagagacacctgagacagcagagagccgtggaggactacggcagaaacatcaagcagctggccagcagagcccagggcctgctgagcgccggccaccccgagggcgagcagatcatcagactgcagggccaggtggacaagcactacgccggcctgaaggacgtggccgaggagagaaagagaaagctggagaacatgtaccacctgttccagctgaagagagagaccgacgacctggagcagtggatcagcgagaaggagctggtggccagcagccccgagatgggccaggacttcgaccacgtgaccctgctgagagacaagttcagagacttcgccagagagaccggcgccatcggccaggagagagtggacaacgtgaacgccttcatcgagagactgatcgacgccggccacagcgaggccgccaccatcgccgagtggaaggacggcctgaacgagatgtgggccgacctgctggagctgatcgacaccagaatgcagctgctggccgccagctacgacctgcacagatacttctacaccggcgccgagatcctgggcctgatcgacgagaagcacagagagctgcccgaggacgtgggcctggacgccagcaccgccgagagcttccacagagtgcacaccgccttcgagagagagctgcacctgctgggcgtgcaggtgcagcagttccaggacgtggccaccagactgcagaccgcctacgccggcgagaaggccgaggccatccagaacaaggagcaggaggtgagcgccgcctggcaggccctgctggacgcctgcgccggcagaagaacccagctggtggacaccgccgacaagttcagattcttcagcatggccagagacctgctgagctggatggagagcatcatcagacagatcgagacccaggagagacccagagacgtgagcagcgtggagctgctgatgaagtaccaccagggcatcaacgccgagatcgagaccagaagcaagaacttcagcgcctgcctggagctgggcgagagcctgctgcagagacagcaccaggccagcgaggagatcagagagaagctgcagcaggtgatgagcagaagaaaggagatgaacgagaagtgggaggccagatgggagagactgagaatgctgctggaggtgtgccagttcagcagagacgccagcgtggccgaggcctggctgatcgcccaggagccctacctggccagcggcgacttcggccacaccgtggacagcgtggagaagctgatcaagagacacgaggccttcgagaagagcaccgccagctgggccgagagattcgccgccctggagaagcccaccaccctggagctgaaggagagacagatcgccgagagacccgccgaggagaccggcccccaggaggaggagggcgagaccgccggcgaggcccccgtgagccaccacgccgccaccgagagaaccagccccgtgagcctgtggagcagactgagcagcagctgggagagcctgcagcccgagcccagccacccctactag

SEQ ID NO: 7401 - DNA, 6414 bp, Artificial Sequence
  derived and/or modified sequence
atgacgagcgccacagagttcgagaatgtggggaatcagccgccatactctagaattaatgcgcggtgggatgctcccgatgacgagctagacaacgacaatagtagcgcacggctgttcgaaagaagccgaataaaggctctcgcagatgaacgcgaagttgtccaaaagaaaaccttcaccaagtgggtgaactcgcatctggctcgcgtatcatgtcgcattacagatctctacaaggatttacgcgatggaaggatgctgattaagctacttgaagtactctccggtgaaatgttacccaagccgactaagggaaaaatgaggatccattgcttagagaacgtagataaagctctgcagtttctgaaggagcagagggtgcatcttgaaaatatggggtctcatgacattgtagatggaaaccatcgcctggtcctgggattgatctggaccatcatattacgattccaaattcaggacatcgtggttcagacacaggaggggcgagagacgaggtccgccaaagatgctcttttactttggtgtcagatgaagaccgccggatacccacacgtgaatgtgacgaattttacctcttcctggaaggacggcctcgcgttcaatgcgttgatccataagcaccgccccgacctcatagacttcgacaaattaaaggattcaaacgcccgccataatctagaacatgcgtttaacgtcgccgagcgccagttgggcattatccccttattggatcccgaagacgtgtttaccgagaaccctgatgaaaagagcatcattacttacgtggtcgctttctaccactacttcagtaaaatgaaagtgctcgctgtagagggaaaacgggtgggcaaggtgatcgatcacgctattgaaacagagaaaatgatcgagaagtactcaggccttgctagcgatctgctcacgtggatcgaacaaaccattaccgttctcaacagcagaaaatttgcaaacagcttgactggagtgcagcagcaactgcaggctttctcaacctaccggacagttgaaaagcccccaaagttccaggagaagggcaacttagaggtgctactcttcactattcagtcacggatgagagccaataaccaaaaggtgtacaccccacacgacgggaaactcgttagcgatataaatagagcgtgggagagtttggaagaggccgagtacagacgcgaactggccctgcggaacgagctgattcgacaggagaaactggaacagctcgctcggcggtttgaccgcaaggcggctatgagggagacttggctcagcgagaaccagagactcgttgcccaggacaactttggctatgacttagccgccgtggaggccgcaaagaagaaacacgaagctatcgagacggacaccgccgcctatgaagaacgggttcgtgccttggaagatctcgctcaggaattggaaaaggaaaactaccacgatcagaagcgcatcaccgctcgcaaggataatattctcaggctatggagttacctgcaggaattgcttcagtcaaggaggcaaaggcttgagaccaccttggcgctgcagaagctgttccaagatatgctgcactcaatcgactggatggacgagataaaggcccatcttttatccgccgagtttggcaagcatcttctagaagttgaggaccttctacagaaacataaacttatggaggcggacatagccatccagggggataaagttaaggccatcacggccgctactcttaaatttactgaggggaagggctatcaaccttgtgacccacaggtaatccaggaccggatcagccatctggagcaatgctttgaggagttatcaaacatggcagccggaagaaaagcccagcttgaacagagcaaacgcttgtggaaatttttctgggagatggacgaagccgaatcttggattaaggaaaaggaacaaatctatagcagcttggattacggcaaagacctgacatcagtgcttattctgcagagaaaacataaggcatttgaggacgagctgagaggattggacgctcaccttgaacaaatcttccaggaggcacatgggatggtggctaggaagcaattcggccaccctcaaatcgaagctcgcattaaggaagtgtccgcccagtgggatcagctgaaggatctggcggcattctgtaaaaaaaatctgcaggatgcggagaatttttttcagtttcagggcgatgctgacgatctaaaagcatggcttcaagatgcccacaggcttctctccggcgaggacgtaggacaggatgagggcgctactagggcactcgggaaaaaacacaaggactttctggaagagttggaagaatccagaggagttatggaacatctggagcaacaagcccaggggttccctgaagaatttcgcgactcgccagacgtgacacacagactgcaggccctacgggagctctaccaacaagtagtcgcacaagccgacctccggcagcagcggctgcaggaagcgctggacctttacaccgtttttggtgaaaccgatgcctgcgagctttggatgggcgaaaaagaaaagtggctagctgaaatggagatgcctgacacactcgaagatctggaagtggtgcagcaccgctttgatatcctcgatcaggagatgaaaaccctgatgacccagattgatggtgtgaatcttgcagctaacagtctcgttgagtcgggtcatccaaggagccgagaggttaagcagtatcaagaccacctgaataccagatggcaggcattccagactttggttagcgagcggcgggaggccgtggacagcgcactcagagtacacaactattgcgtggattgcgaggagacatccaaatggatcaccgacaaaaccaaagtggtcgagtctactaaagacctcggtagagacttggccggcattatcgccatacagcgcaagctcagtggtttggaaagggacgtggccgctatacaagcccgtgtcgatgcacttgagcgggagagccagcaattaatggattctcaccctgagcagaaggaagacattggtcagaggcaaaaacatctcgaggagctgtggcaaggtctccagcagtctttacaaggacaggaggacttactgggggaagtctctcaactccaggcatttctccaggacttagatgatttccaggcttggctgtcaattacacaaaaggctgtagcttcagaggatatgcctgagtccctcccagaagctgagcagctcttgcaacaacacgcagggataaaagacgagattgatgggcaccaagacagttaccagagagtaaaggagagcggagaaaaagtgatccaggggcagacagacccagagtacctcttgttaggccagagattagagggcttggatacaggctggaacgccctgggccgcatgtgggagagccggtctcacacactcgcacagtgtctgggtttccaggagtttcaaaaggatgccaaacaagcagaggccatcctgtctaaccaagagtatacactggctcatctggaaccccccgactcactagaggcagccgaggcgggtatcaggaagttcgaggattttctgggctctatggagaacaatagggacaaagttctgagcccagtagattcgggaaataagctcgtggccgagggtaacctgtacagtgataaaattaaggagaaggtgcaactaattgaggatcgacaccgaaagaataacgaaaaggcgcaggaggcatctgtgctcctgcgcgacaacttggaactacagaatttcttgcaaaactgccaggagctgacactctggataaacgacaagcttctcacaagccaggatgtctcctatgacgaagctagaaatctgcacaataaatggctaaaacaccaggctttcgtcgctgagctagcttctcacgaaggatggctggagaacatagatgccgagggcaagcagctgatggatgaaaaaccccagttcaccgccctcgtgtcccagaagttggaggcactgcatcgtctgtgggatgaactacaagcgacaacaaaagagaagacacaacacctgtcagcagctcggagttccgatttgagattgcagactcatgcagatttaaacaagtggattagcgcgatggaagaccagctgaggtcagacgatcccgggaaagatctcaccagcgtgaatcggatgctggccaagttgaagcgagttgaagatcaggtaaatgtgaggaaggaggaactcggagaattattcgcccaggttccatctatgggtgaagagggcggggacgctgatctgtcaattgagaagcgctttctggatcttctcgagccccttgggaggcggaaaaagcaactggagtcctcccgggcaaagctgcagatcagccgagacctggaggacgagaccctgtgggtagaagagcgattaccactggcccagagcgccgactacggaacaaatcttcaaactgtgcaactgttcatgaagaaaaatcagacactgcaaaacgagatcctcggacatacacctagggtggaagacgtgcttcaacgcgggcagcagctcgtcgaagccgctgaaatcgactgtcaagatcttgaggagcgattggggcacttgcagtcttcatgggacagattgcgggaggcagcagccgggcggttacagcggctccgggacgcaaacgaggctcagcagtactatctggacgctgacgaagccgaagcgtggatcggagagcaggaattgtacgtgatctcagacgagatccctaaagatgaggagggcgctattgtgatgctgaagcggcacttacgccaacagagggctgtggaggactacggtcgtaacattaagcagctggcctctagagcccaaggcctgctgagcgccggtcacccggagggcgagcagatcatccgcttgcagggacaggtagacaaacattacgccggcttaaaggacgtggcagaggaaaggaaaagaaaactcgaaaacatgtaccacctcttccaactcaagagggagacagacgatcttgagcagtggatttctgagaaagagctcgtggcttctagccccgagatgggtcaggatttcgatcatgtgactttattgagggacaaattccgcgacttcgccagagaaaccggagctatcggacaggagagggttgacaacgtcaatgccttcatagagcgcctaatcgacgcgggccacagtgaagccgcaacaattgccgagtggaaagacggcttaaacgagatgtgggctgacctactagaactgattgatacacgaatgcagctgctggcagcaagctacgacctgcatcgctatttttatactggcgcagagatactggggctgatcgatgagaagcatagggagctgccagaggatgtcggcctggacgcatccactgctgagtcattccatcgcgttcatacagctttcgagagggagttgcacctgctgggggtacaggtgcaacagttccaggatgtagctacccgacttcagaccgcttacgccggcgaaaaggccgaggcaatccagaacaaggaacaggaggtgtcagcagcctggcaggcattgctggatgcatgtgctggtaggcgaacccagctggtggatactgctgataagtttcggttcttcagcatggctcgggacttgctttcatggatggagagcatcatccggcaaatcgagacacaagagcgaccacgcgacgtgagctcagtggagctgttaatgaagtatcatcagggaataaatgccgagattgagacccgatcaaagaatttttctgcctgcctcgagctgggtgagtcactgctgcagcgccaacaccaagccagcgaagaaatccgggagaaactgcagcaggtgatgtctcgccggaaggaaatgaacgaaaaatgggaagcccgatgggaaaggcttagaatgttgctagaggtgtgtcagttttccagggatgccagcgttgccgaggcatggctgattgcacaagaaccatatttagcaagcggcgattttgggcatacagtcgactctgtggagaagctgatcaagcgtcatgaggctttcgagaagtctaccgccagctgggccgagcgttttgctgctcttgaaaagcctacgactctggaactgaaagagcgccagattgcagaacggccagctgaagagactggtccccaggaggaagagggagaaactgctggcgaggcaccagtctcacatcatgcagcaactgagaggacctctccagtttcactttggagtagactctcatcttcatgggaatctttacaaccagagccatctcatccctattag

SEQ ID NO: 7402 - DNA, 6414 bp, Artificial Sequence
  derived and/or modified sequence
atgacatctgctacagagttcgagaatgttggaaaccagcccccttattcccgcatcaatgcacggtgggacgcgcccgacgacgaattggataatgataactccagtgctagattatttgaaagaagccggattaaggctctggcggacgagcgcgaagtggtgcagaagaaaaccttcaccaaatgggtcaacagccacctcgcccgcgtttcttgccggattactgacctttacaaggatttgagggatggcaggatgctgatcaaattactggaggtgctgtccggcgaaatgctccccaagcccaccaagggaaagatgaggatccattgcctagagaacgttgacaaggccctgcagttccttaaggagcagcgcgtccaccttgagaatatggggtcacatgacatcgttgacggcaatcaccgactggtgctgggcctaatctggacaatcatcttgcgcttccaaatccaagatatagtcgttcaaactcaggaggggagggagacgcgatcagccaaggatgcactgctgctgtggtgccaaatgaagacggcaggctatccccacgtcaacgtgaccaacttcacatcctcttggaaggacgggctcgctttcaacgcccttattcacaagcaccggccggatctcattgattttgataaattaaaggactcaaacgctcgccataatcttgaacatgcttttaacgtcgccgaaaggcaacttggtataatcccacttctggatccggaagatgtgtttacagagaaccctgatgaaaagagcatcataacctatgttgttgccttttaccattacttcagcaaaatgaaggttctcgcggttgagggcaaaagagttgggaaggtaatcgatcatgcaattgagacagaaaagatgatcgaaaagtactccggcttggcatctgacctcctgacctggatcgaacaaacaattacagtcctcaactcacgcaagtttgctaatagcctaactggtgttcagcagcagctgcaggcgttctctacctaccgaactgtagaaaagccgcctaaattccaagagaagggaaacctggaagtactcctgttcaccattcaatcaaggatgcgagcaaataatcagaaggtttataccccacacgacggcaagctagtttccgacatcaatcgagcgtgggaatctcttgaggaagctgagtatcgcagggagctggccctccggaatgagttaattcggcaggagaaactggagcagctggcacggcgcttcgatagaaaagctgcgatgagggagacttggctgtcagaaaaccagcgattggtagcccaggacaacttcgggtacgatctggccgctgttgaggccgccaagaaaaaacatgaagccattgaaactgacacagcagcctacgaagagagagtaagagctctggaggatctcgcccaagaactagaaaaggaaaattaccacgatcagaaacgcataaccgcacggaaagataatattctgcgcctttggtcgtacctgcaggagctgcttcaatctcgtaggcagagactggagaccacactcgctctgcagaagctgtttcaagacatgctccattctatcgattggatggacgaaattaaagcccatctgctttccgccgagtttgggaaacatctcctggaggtggaggatctgctgcagaagcacaaattgatggaagcagacattgctatccagggagacaaagtcaaggctattacagctgccacactgaaatttacagaaggcaagggctatcaaccatgcgatcctcaggtaattcaggatcgtatctcacacctcgaacagtgtttcgaagagctttccaatatggctgcagggaggaaggcacagttggaacagtccaagcggctctggaaatttttctgggaaatggacgaagctgagagttggatcaaagagaaggagcagatatatagctctcttgattacggcaaagatctgacaagtgttctgatcctccagcgcaaacacaaggccttcgaagatgagctgcggggtctcgacgctcacctggagcagatttttcaggaggcacacggtatggttgcccgcaaacagtttggccaccctcagatcgaggcccgtataaaagaggtgtccgctcagtgggaccagttaaaggaccttgctgcattctgtaaaaaaaatttgcaagatgctgagaatttcttccagtttcagggcgacgctgatgatcttaaagcctggctgcaggacgcccatagattgttgagtggtgaagacgtgggacaggatgaaggtgccacaagagccctcggtaagaagcacaaggacttcctggaagaactggaggagtcccggggtgtgatggagcatctagaacagcaggcgcagggttttccagaagaatttagggattcaccagacgtgacccacaggctccaggctttacgcgagttgtaccaacaggtcgtcgcacaagcagatctgcgtcagcagcgcctccaagaagcactggacctgtatactgtctttggtgaaacggatgcctgcgagctttggatgggggagaaggaaaagtggctggccgaaatggagatgccagatacacttgaggatttggaagtagtgcaacacagattcgacatcctagaccaggaaatgaaaaccctcatgacacagatcgacggagtgaacctggctgcaaattccctggtggaaagtggtcaccctaggtcccgcgaagttaagcagtaccaggaccacctgaacacaagatggcaggctttccagactcttgtctccgagaggcgggaggccgtggatagcgccctgcgagtgcataattactgcgtggattgcgaggaaactagcaagtggatcacggacaaaactaaagtggtggaaagcacaaaagatctgggaagagaccttgcaggaattatagctatccagaggaaactcagtggactggaacgagatgtggctgctattcaagcacgggtggatgctctagaacgcgagagccagcaactcatggatagccatcctgaacagaaagaagatatcgggcagcggcagaagcacctggaagaactctggcagggcctacagcagtctttacagggacaagaggacctcctgggcgaggtgtctcagctccaagcatttttacaggacctagatgatttccaagcctggttgagcataacacagaaggctgtcgcaagcgaggacatgccggaatcactgccggaggcagagcagctcctgcagcaacatgctggaattaaggacgaaatcgatggtcaccaggactcctaccagcgggtcaaggaaagcggtgaaaaagtgatccaaggccagaccgaccctgagtatctccttctgggacagagactggaggggctggatacgggttggaatgcactgggacgtatgtgggagagcagatctcacacactcgcccagtgtctgggattccaggagtttcagaaagatgctaagcaggcagaggcaattttaagcaaccaagagtataccctcgcacatcttgagccacccgattcattggaggccgctgaggcaggaattagaaagtttgaagattttttagggtcgatggaaaacaacagagacaaagtgctctcacctgttgattcgggcaacaagcttgtcgccgaaggaaatctgtattcggataaaataaaagaaaaagtccagctaattgaggatcgacataggaagaacaacgaaaaggcgcaggaggcgtccgtgctattaagggacaatctcgagctgcagaacttcctgcagaactgccaagaacttaccctgtggatcaatgacaagctgctgacaagtcaggatgtaagctacgatgaggctcgaaacctgcacaacaaatggctgaaacaccaggcctttgtggccgagctggcctcacacgagggctggttggaaaatattgacgctgagggcaaacagttgatggatgaaaagccacaattcaccgctcttgtctctcagaagttagaagccttgcatcggctgtgggatgagctacaggctacaacaaaggaaaagacccagcacttaagcgctgcgcggtcttccgacctacgcttgcagacccatgccgacctgaacaagtggatttccgccatggaggaccagctccgcagtgacgacccagggaaagacttgacgagcgtcaatcgaatgctggccaagctaaagcgcgtggaggaccaagtgaacgtgagaaaagaagagctcggcgaattgttcgcccaggtccccagtatgggcgaggagggcggagacgcggatttatcaatcgaaaaaagatttctcgatctcctggagcctcttggccgcagaaaaaagcagttggaaagcagccgggcaaagctccagatcagtcgtgacctggaggacgagaccttatgggtggaagaacgtttacccttagcacagtcagcagactatggaaccaaccttcaaactgtacaactgtttatgaaaaagaatcagacgctgcagaacgagatccttgggcacacaccacgtgttgaagacgtacttcaacgcggccagcagctggttgaagctgccgaaattgactgccaagacctggaagagaggctgggccaccttcagtcaagttgggaccggttgcgggaggccgccgccggcagacttcagcggttgcgcgacgcaaacgaggctcagcagtattatctagacgccgacgaggccgaagcatggattggagaacaggagctctacgttatatccgatgagatcccaaaagatgaggaaggagcgatcgtcatgctgaagcggcacttaagacaacaacgcgcagttgaagactacggacgcaatattaagcagttagcttcgcgcgcacaggggctcctcagcgctggacacccagagggagaacaaatcattcgcctccagggccaggtcgataaacattatgcagggctcaaggatgttgcggaggagagaaagagaaagctagaaaacatgtaccatttgttccagctcaaacgagagacggatgacttggagcagtggattagtgaaaaagagctggtagcttctagcccggagatggggcaggactttgaccatgttaccctgcttcgagacaagtttagggacttcgcgagggaaaccggggcgattggccaggagcgcgtggataatgtgaatgcatttattgaacggcttattgatgccgggcattccgaagccgctaccattgccgagtggaaggatggacttaatgagatgtgggccgatctgctggaactcattgacacgagaatgcagctgctggctgcatcctacgatctccaccgttatttttataccggtgccgagatcttggggctaatcgatgaaaaacaccgcgaactgcccgaagacgtagggctcgatgcctctacggccgaaagctttcatagagtccataccgcgttcgaacgggaactccatctactgggagtgcaggtgcagcagttccaggacgtcgcgacaagactccagacggcatacgcaggtgaaaaagcagaggcaattcagaataaggagcaggaggtgtctgctgcttggcaagcgctgcttgatgcctgtgccggccgcaggacacagctggtggacacagccgacaagtttagatttttctctatggcaagagacctgcttagttggatggagtcaataatcagacagatcgaaacccaggagaggcccagagacgtcagcagcgttgagctcctgatgaagtatcaccaaggcatcaacgcagaaatcgagacgcgcagcaagaacttctccgcatgtttagagctgggcgagagtttgcttcagaggcagcaccaagcatccgaggagataagagaaaagctgcagcaagtgatgagccggcgcaaagaaatgaatgaaaaatgggaggctcggtgggagcgactgcgaatgttgctagaagtctgtcaattctctcgcgacgcaagcgtggctgaggcgtggctgatcgcccaggaaccctacctggctagcggcgactttggtcacactgtggactcagtggaaaagctgattaaacggcatgaagccttcgaaaagtccaccgccagttgggccgagagatttgccgcactggaaaagcctactacactggagttgaaagagagacagattgctgagcggcctgcagaagaaacaggacctcaggaggaggagggagaaactgcaggggaggcccccgtgagccaccacgctgccacagagcgtacatcaccagtctcactgtggtcaagactctcctcttcgtgggaaagcctgcaaccagagccctctcacccatactag

SEQ ID NO: 7403 - DNA, 6414 bp, Artificial Sequence
  derived and/or modified sequence
atgaccagcgccacagaatttgaaaatgtgggcaaccagcccccctacagccgcatcaatgcccgctgggatgccccagatgatgagctggacaatgacaacagcagcgcccggctgtttgagaggagccgcatcaaggccctggctgatgagcgggaggtggtgcagaagaagaccttcaccaagtgggtgaacagccacctggcccgggtgtcctgccgcatcacagacctgtacaaggacctgagagatggccgcatgctgatcaagctgctggaggtgctgagcggggagatgctgcccaagcccaccaagggcaagatgaggatccactgcctggagaatgtggacaaggccctgcagttcctgaaggagcagagggtgcacctggagaacatgggcagccatgacatcgtggatggcaaccaccggctggtgctgggcctcatctggaccatcatcctgcgcttccagatccaggacatcgtggtgcagacccaggagggccgggagaccaggtctgccaaggatgccctgctgctgtggtgccagatgaagacagctggctacccccacgtgaatgtgaccaacttcaccagctcctggaaggatggcctggccttcaatgccctgatccacaagcacaggccagacctgattgactttgacaagctgaaggacagcaatgcccggcacaacctggagcacgccttcaacgtggccgagcggcagctgggcatcatccccctgctggaccctgaagatgtgttcacagaaaatccagatgagaagagcatcatcacctacgtggtggccttctaccactacttcagcaagatgaaggtgctggccgtggagggcaagagggtgggcaaggtgattgaccacgccatcgagacagagaagatgattgagaagtacagcggcctggccagtgacctgctgacctggattgagcagaccatcaccgtgctgaacagcaggaagtttgccaacagcctgactggagtgcagcagcagctgcaggccttcagcacctacagaacagtggagaagccacccaagttccaggagaagggcaacctggaggtgctgctcttcaccatccagagcaggatgagggccaacaaccagaaggtgtacacccctcatgatggcaagctggtgtctgacatcaacagagcctgggagagcctggaggaggccgagtacagaagagagctggccctgagaaatgagctgatccggcaggagaagctggagcagctggccaggagatttgacaggaaggccgccatgagggagacctggctgtctgagaaccagaggctggtggcccaggacaactttggctatgacctggccgctgtggaggccgccaagaagaagcatgaggccattgaaacagacacagctgcctatgaggagcgggtgcgggccctggaggacctggcccaggagctggagaaggagaactaccatgaccagaagaggatcacagccaggaaggacaacatcctgcggctgtggagctacctgcaggagctgctgcagagccggcggcagaggctggagaccaccctggccctgcagaagctgttccaggacatgctgcacagcattgactggatggatgagatcaaggcccacctgctgtctgctgagtttgggaagcacctgctggaggtggaggacctgctgcagaagcacaagctgatggaggccgacatcgccatccagggcgacaaggtgaaggccatcacagctgccaccctgaagttcacagagggcaagggctaccagccctgtgacccccaggtgatccaggaccgcatcagccacctggagcagtgctttgaggagctgagcaacatggctgctggcaggaaggcccagctggagcagagcaagaggctgtggaagttcttctgggagatggatgaagctgagagctggatcaaggagaaggagcagatctacagcagcctggactatggcaaggacctgacctctgtgctgatcctgcagaggaagcacaaggcctttgaagatgagctgcggggcctggatgcccacctggagcagatcttccaggaggcccacggcatggtggccaggaagcagtttggccacccccagatcgaggcccgcatcaaggaggtgtctgcccagtgggaccagctgaaggacctggccgccttctgcaagaagaacctgcaggatgctgagaacttcttccagttccagggagatgctgatgacctgaaggcctggctgcaggatgcccaccggctgctgtctggagaagatgtgggccaggatgagggcgccacccgggccctgggcaagaagcacaaggacttcctggaggagctggaggagagcagaggagtgatggagcacctggagcagcaggcccagggcttccctgaggagttccgggacagcccagatgtgacccaccggctgcaggccctgcgggagctgtaccagcaggtggtggcccaggccgacctgcggcagcagaggctgcaggaggccctggacctgtacacagtgtttggagaaacagatgcctgtgagctgtggatgggagagaaggagaagtggctggccgagatggagatgccagacaccctggaggacctggaggtggtgcagcacagatttgacatcctggaccaggagatgaagaccctgatgacccagattgatggagtgaacctggccgccaacagcctggtggagagcggccaccccaggagccgggaggtgaagcagtaccaggaccacctgaacacccgctggcaggccttccagaccctggtgtctgagcggcgggaggccgtggacagcgccctgcgggtgcacaactactgtgtggactgtgaggagaccagcaagtggatcacagacaagaccaaggtggtggagagcaccaaggacctgggccgggacctggccggcatcatcgccatccagaggaagctgagcggcctggagagagatgtggccgccatccaggcccgggtggatgccctggagcgggagagccagcagctgatggacagccaccctgagcagaaggaggacatcggccagaggcagaagcacctggaggagctgtggcagggcctgcagcagagcctgcagggccaggaggacctgctgggggaggtgtcccagctgcaggccttcctgcaggacctggatgacttccaggcctggctgagcatcacccagaaggctgtggccagcgaggacatgcctgagagcctgcctgaggccgagcagctgctgcagcagcacgccggcatcaaggatgaaattgatggccaccaggacagctaccagagggtgaaggagagcggggagaaggtgatccagggccagacagatcctgagtacctgctgctgggccagaggctggagggcctggacaccggctggaatgccctgggccgcatgtgggagagccgcagccacaccctggcccagtgcctgggcttccaggagttccagaaggatgccaagcaggccgaggccatcctgagcaaccaggagtacaccctggcccacctggagcccccagacagcctggaggccgctgaggccggcatcaggaagtttgaggacttcctgggctccatggagaacaacagagacaaggtgctgagccctgtggacagcggcaacaagctggtggccgagggcaacctgtacagcgacaagatcaaggagaaggtgcagctgattgaagatagacacaggaagaacaatgagaaggcccaggaggcctctgtgctgctgcgggacaacctggagctgcagaacttcctgcagaactgccaggagctgaccctgtggatcaatgacaagctgctgaccagccaggatgtgtcctatgatgaggccaggaacctgcacaacaagtggctgaagcaccaggcctttgtggccgagctggccagccatgagggctggctggagaacattgatgctgagggcaagcagctgatggatgagaagccccagttcaccgccctggtgtcccagaagctggaggccctgcaccggctgtgggatgagctgcaggccaccaccaaggagaagacccagcacctgtctgctgcccggagcagtgacctgcggctgcagacccatgctgacctgaacaagtggatcagcgccatggaggaccagctgcggagtgatgatcctgggaaggacctgacctctgtgaacaggatgctggccaagctgaagagggtggaggaccaggtgaatgtgaggaaggaggagctgggggagctgtttgcccaggtgcccagcatgggagaggagggcggagatgctgacctgagcattgagaagcgcttcctggacctgctggagcccctgggccgcaggaagaagcagctggagagcagccgggccaagctgcagatcagccgggacctggaggatgagaccctgtgggtggaggagcggctgcccctggcccagagcgctgactatggcaccaacctgcagacagtgcagctgttcatgaagaagaaccagaccctgcagaatgagatcctgggccacaccccccgggtggaggatgtgctgcagaggggccagcagctggtggaggccgctgagattgactgccaggacctggaggagcggctgggccacctgcagagctcctgggaccggctgcgggaggccgccgccggccgcctgcagaggctgagagatgccaatgaggcccagcagtactacctggatgctgatgaggccgaggcctggattggagagcaggagctgtatgtgatcagtgatgagatccccaaggatgaggagggcgccatcgtgatgctgaagaggcacctgcggcagcagagagctgtggaggactatggcaggaacatcaagcagctggccagccgggcccagggcctgctgtctgctggccaccctgagggggagcagatcatccggctgcagggccaggtggacaagcactacgccggcctgaaggatgtggccgaggagaggaagaggaagctggagaacatgtaccacctgttccagctgaagcgggagacagatgacctggagcagtggatcagcgagaaggagctggtggccagcagccctgagatgggccaggactttgaccacgtgaccctgctgcgggacaagttccgggactttgcccgggagactggagccatcggccaggagcgggtggacaacgtgaatgccttcatcgagcggctgattgatgctggccacagcgaggccgccaccatcgccgagtggaaggatggcctgaatgagatgtgggccgacctgctggagctgattgacaccaggatgcagctgctggccgccagctatgacctgcaccgctacttctacacaggagctgagatcctgggcctgattgatgagaagcaccgggagctgcctgaagatgtgggcctggatgccagcacagctgagagcttccaccgggtgcacacagcctttgagcgggagctgcacctgctgggcgtgcaggtgcagcagttccaggatgtggccacccggctgcagacagcctatgctggggagaaggccgaggccatccagaacaaggagcaggaggtgtctgctgcctggcaggccctgctggatgcctgtgccggccgccgcacccagctggtggacacagctgacaagttccgcttcttctccatggcccgggacctgctgtcctggatggagagcatcatccggcagatcgagacccaggagcggcccagagatgtgtcctctgtggagctgctgatgaagtaccaccagggcatcaatgctgagattgagaccaggagcaagaacttcagcgcctgcctggagctgggggagagcctgctgcagaggcagcaccaggccagcgaggagatccgggagaagctgcagcaggtgatgagcaggaggaaggagatgaatgagaagtgggaggcccgctgggagcggctgaggatgctgctggaggtgtgccagttcagcagagatgcctctgtggccgaggcctggctgattgcccaggagccctacctggccagcggggactttggccacacagtggacagcgtggagaagctgatcaagagacatgaggcctttgagaagagcacagcctcctgggccgagagatttgctgccctggagaagcccaccaccctggagctgaaggagcggcagattgctgagaggcctgctgaggagaccggcccccaggaggaggagggggagacagctggggaggcccctgtgagccaccacgccgccacagagaggaccagccctgtgtccctgtggagccggctgagcagctcctgggagagcctgcagcctgagcccagccacccctactag

SEQ ID NO: 7404 - DNA, 6414 bp, Artificial Sequence
  derived and/or modified sequence
atgaccagcgccaccgagttcgagaacgtgggcaaccagcccccctacagccgtattaatgcacgatgggacgcacccgatgatgagcttgacaatgataactcttctgcccgcctgtttgagcggtcacgcattaaagcacttgctgacgaaagagaggtggttcagaagaaaacgttcactaaatgggtcaactctcaccttgcgcgggtatcatgtaggatcaccgatctgtataaagatttacgggatggcagaatgcttattaaacttctggaagtgctgagcggggagatgctgccgaagccaacaaaggggaaaatgcggatacactgcctggagaatgtcgacaaagccctgcagttccttaaggaacagagagtgcacctggagaatatgggtagtcacgacattgtggacgggaaccacaggttggttctgggcctgatttggaccattattctgagatttcagattcaggatatagtggtacagacccaggagggacgggagaccagaagtgctaaagatgcactcctgctgtggtgccaaatgaagaccgcaggctatccccacgtaaatgtcacaaatttcacctcctcctggaaggacggtctggcttttaacgccctgatccacaagcatcgacccgatctgatcgattttgataaactgaaagacagcaatgctaggcataacctggagcatgcgtttaacgtggcggagaggcagcttggaatcattcctctgctggatcccgaggatgtctttaccgagaatcctgatgagaaaagcattattacttacgtcgtggcattttaccactacttttccaagatgaaggtgctcgccgttgagggcaagagagtcgggaaagtcatcgatcacgcgatagaaacggagaagatgatagaaaagtattcagggttggcctccgatttactcacctggatagagcaaactattaccgttcttaatagccgaaaatttgctaattctctaacgggggtgcagcagcaattgcaggcattttccacataccggacagtggaaaagcctccaaaattccaggagaagggcaaccttgaagtgttactgtttaccattcaatctcgaatgagagcgaataatcagaaggtttacaccccccacgacggcaagctcgtgtcagatatcaacagagcttgggagagtctggaagaagccgaataccgaagggagctggctctccgaaatgaactgattagacaggagaagctagaacagctggccagacgattcgaccggaaagccgccatgagagagacatggctgagcgagaaccagcgactggtggctcaagacaactttggatatgatctggcagcagtcgaggcggccaaaaagaaacacgaggccatcgaaactgacactgccgcctacgaagagagagttcgcgctctggaggacctggcccaggaactggagaaagaaaactatcacgaccagaaacgcattaccgccaggaaggacaatatcctcaggctgtggagctacctgcaggaactcctgcagagtcgacgacaacgtctggaaactacacttgccctgcaaaagttattccaggatatgctccactcgattgactggatggacgaaataaaagctcaccttctctctgcagagtttgggaaacaccttcttgaggtcgaagatctactgcagaagcacaaacttatggaggccgatatcgccatacagggtgataaggtgaaggcaattacagcagcgaccctcaaattcactgagggcaaaggataccagccatgcgaccctcaagtcatccaggaccgcataagccatctcgagcagtgttttgaggaattgagcaatatggccgccggcaggaaggctcagctggagcagtcaaagagactatggaagttcttttgggagatggatgaagccgaaagctggataaaagagaaagagcagatctattcgtccctagactatgggaaagatctgacgagtgtgctgatattgcagagaaaacataaagcttttgaggacgagcttagaggattggacgcacacctggagcaaatcttccaagaggcccatggcatggtcgcgcggaaacagttcggccatcctcaaattgaggccagaattaaagaagtgtccgcccagtgggatcagctcaaagatttagctgctttttgtaagaaaaatctgcaggacgccgagaattttttccagtttcagggcgacgccgatgatttgaaagcttggctgcaggatgcgcaccgattgctaagtggagaggacgtaggccaagacgagggggccactagagcattaggcaagaagcacaaggatttcctcgaagaacttgaagaatctcggggggttatggagcacctggagcagcaggcccagggctttccggaagagtttagagactccccggacgtaacacaccggcttcaggccttgagagaactctatcagcaggttgtggcacaagcagatctgcgccagcagcggcttcaagaagccctggatttgtatacagtgttcggggaaaccgacgcctgtgagctgtggatgggggagaaagagaagtggcttgccgagatggaaatgcctgataccttggaggacctagaggtggtccagcaccggttcgatatcctggatcaggagatgaagaccctgatgactcaaatcgacggagtgaatctcgctgcaaactcactggtcgagagtggccatccaaggtctagggaagtaaagcagtaccaagaccatcttaatacgagatggcaggccttccaaactctggtgtctgagcgtagggaagccgtcgatagcgctctgagagtccataattactgtgtggattgtgaggagacctctaaatggatcaccgacaagaccaaggtcgtcgaaagcaccaaagacctgggtcgcgacctcgcaggcataatcgcaatccagcgtaagttgtcaggcttagagagagacgttgcagccatacaggctcgagtggatgctcttgagagggaaagccagcagttaatggatagccaccctgaacagaaggaggatatcggacagaggcagaagcaccttgaggagctgtggcaagggcttcagcagagcctgcagggtcaggaggacctcttgggggaggtctctcagctccaggctttcctccaggacctagacgattttcaggcttggctgagtattacacagaaggctgtagcctccgaggatatgccggaatctttgcctgaggccgaacagctgctacaacagcacgccgggattaaagacgagatcgatggccaccaagatagttatcagcgggtaaaagagtcgggcgagaaggtgattcaaggtcagactgatcccgagtatttactcttgggacagcggctggaggggctggacactggctggaacgccctgggaaggatgtgggaatcacggtctcatacgctggcccagtgtctcggattccaggagttccaaaaggatgctaaacaggccgaggcaatcctgagcaatcaagaatacacattggcgcacctagaacccccagatagcctggaggccgcagaggcaggaatccggaaatttgaagattttctgggtagcatggagaataatagggataaagtcttgagtccagtggactctggcaacaaacttgtggcagagggaaatctctattctgacaagatcaaggagaaagtgcagctaatcgaggaccgccaccgcaagaataacgaaaaggcacaggaggcctccgtcctgctccgagataatctggagctgcagaacttcctgcagaactgtcaagagctgaccctgtggataaatgataaactcttgacctcgcaggatgtttcttacgacgaggcccggaacctgcacaataagtggctgaaacatcaggcctttgtcgccgaactagcttcccatgaaggatggctggagaacatcgatgccgaaggcaagcagctgatggatgagaagcctcagttcactgccttagtgtctcagaagctagaggcactgcacagattgtgggatgaactgcaggcaactactaaagagaaaacccaacatctgagcgctgcgcgcagttccgatcttcgacttcagacccatgccgacctgaacaagtggatctcggccatggaggaccagctccgctctgatgaccctggcaaagaccttacatccgtgaacaggatgctggcgaagctcaaacgcgtggaggaccaggttaatgttagaaaggaggagctcggcgagctttttgctcaggttccctcaatgggtgaagagggaggtgacgcggatctttccatcgagaagagattcttggacctcttggagcctctcggaaggcggaaaaagcagctagaaagctcgagggccaaactgcagatttccagagacctggaagatgagactctgtgggtcgaggaacgcttgccattggctcagagcgccgactacgggaccaatttgcaaacagtgcagttgtttatgaagaaaaaccaaaccttgcagaacgagatcttgggccatacacctcgtgtagaagatgtgttacaaagaggtcaacagctagtggaagccgctgagattgattgtcaggacctcgaagaacggttaggccatctgcaaagcagttgggatagacttcgagaggctgcagctggaaggttgcaacgcttacgagacgccaatgaggcccagcagtactatctggatgcggacgaggctgaagcttggattggggagcaggagttatatgtgatatctgacgagatacccaaagatgaggagggggcgattgtgatgctgaaaaggcatctaaggcagcagcgcgccgtggaggattatggcagaaatattaagcaattggccagccgtgctcaaggtctgttatctgcagggcatcccgaaggcgagcagatcataaggctgcaaggacaggtggacaaacactatgcaggtctaaaagatgtcgctgaggaaagaaaaagaaagctcgagaacatgtaccacctctttcagctcaaaagagagaccgacgatctggagcaatggataagcgaaaaggaactggtggccagttcacctgaaatgggccaggattttgaccacgttacactcctacgcgacaaatttcgggacttcgcaagggaaaccggtgcaatcgggcaggagagagtcgataacgtaaacgctttcatagagcggctcatcgatgcagggcacagcgaagcagcaacaatcgcagagtggaaagacggactcaacgagatgtgggcagatctgctggaactgattgacacgaggatgcagctcttggccgcaagttacgacctgcatcgctatttttacaccggtgcagaaatcttggggcttattgatgagaagcacagagagttacccgaagatgtgggtctggacgcttccaccgcagagagttttcatagggtacacacggctttcgaacgcgagttacacctgctgggtgttcaggtccaacaattccaagatgtggccacacgcttgcagaccgcctatgccggagagaaggctgaggctatccagaacaaggagcaggaggtgagtgcggcctggcaggccttgctcgacgcctgcgccgggagacgcacgcagctggtagatacggccgacaagttccgcttcttctcaatggccagagacctgctgtcgtggatggagtctattattcggcagatagagacccaggagcgcccccgagatgtctcatccgtggagctgctcatgaagtaccatcaaggtataaacgcagagatagaaaccagaagcaaaaatttttctgcttgtcttgagctgggcgaatctctccttcagcgccagcaccaggctagcgaagagatcagagaaaagctgcaacaggtgatgtcccggcggaaagaaatgaatgaaaaatgggaggctcgatgggagaggctccgcatgctgctggaggtttgtcagttcagccgcgatgcctccgtcgctgaagcgtggctgattgcccaagaaccttatctggcctctggcgactttgggcacactgtggacagcgtggagaaactgattaagaggcacgaggctttcgaaaagagcacagcttcctgggccgaacggttcgccgcattggagaaacccacaactctggagctgaaagagcgccagattgctgagcggccagccgaagaaacgggacctcaagaagaggaaggcgagacagcaggcgaggcccccgtgagtcatcatgcagccacggagcgaacgtctcccgtgagtctgtggagtcggctgtcctcctcctgggagtctctccagcccgagccatctcacccatactag

SEQ ID NO: 7405 - DNA, 6414 bp, Artificial Sequence
  derived and/or modified sequence
atgaccagcgccaccgagttcgagaacgtgggcaaccagcccccctacagccgtatcaatgcaaggtgggacgcccctgacgacgaacttgacaacgacaactcgagcgctaggctattcgagcgcagcaggataaaagccttagccgacgaacgggaggtcgttcagaagaagacatttaccaagtgggtgaattcacatctcgccagagttagttgcaggatcacggacctttataaggatctaagagacggtcgcatgttgattaaactgcttgaagtgttgtctggcgagatgctgccgaagcccacaaagggaaaaatgagaattcattgtttggagaacgtcgacaaggcccttcagttcctcaaggaacaacgtgttcatctggagaatatgggctcgcatgatattgtggatgggaaccatcgcctcgtgctaggcctgatttggacaatcatcctgcgatttcagattcaggacattgttgtgcagacccaggaagggcgtgagaccagatctgcaaaggacgcgctgctgctgtggtgccagatgaagaccgccgggtacccccatgtcaacgttactaacttcacctcatcatggaaagatggcctagcgttcaacgccctgattcacaagcaccgccccgatctgatcgattttgataagttgaaagactctaatgcacgccataacttggagcacgcgtttaatgttgcagaacgacagcttggaatcatcccactgctggatccagaggatgtgtttaccgagaatccagatgaaaagagtattattacctatgtagtggcattctaccattacttctcaaagatgaaagtattggccgtagagggcaaacgtgtgggtaaagtaattgaccatgctatcgaaaccgagaagatgattgagaaatatagcggtctggcaagcgatctgctgacctggattgagcagaccatcactgttttgaactctcgcaaatttgctaactccctgaccggggtgcagcagcagcttcaggcattctctacctatcgaacagtggaaaaaccaccgaagtttcaggagaaagggaacctggaggtccttctcttcacaatccaatcccgtatgagggcaaataaccagaaagtttacactcctcatgatggcaaactggtgtccgatataaatagggcctgggagagcctggaggaagcagaatatcgccgagagctggccctccgaaatgagctgatccgccaggaaaagctggagcagctagcacggaggtttgacaggaaggccgccatgcgggaaacctggctttcggagaatcagaggcttgtcgcccaggacaactttgggtatgacttggcagccgtggaggccgcaaagaaaaagcacgaagcaattgagaccgacaccgctgcatacgaggagagagtgcgggctctggaagacttggcccaagagttggaaaaggagaactaccatgatcagaaaaggatcacagctcgaaaggacaacatcctacgtctttggagttacctccaagagctgcttcagtcccggcggcagagactcgaaactacccttgcccttcaaaaactgttccaagacatgctgcacagcattgactggatggacgaaattaaagcccacctgctctctgcagagtttggaaaacacttactcgaggttgaagatctgctgcagaagcacaagcttatggaagcagacatagcaattcagggggacaaagtgaaagccatcacggcagccaccctgaaattcacggaagggaaagggtatcagccttgcgaccctcaggtgatccaggacaggatctcccatctggaacaatgctttgaagaactaagtaatatggcagcaggccgtaaagcacagcttgagcagtctaagcgactttggaaattcttctgggagatggacgaggccgaaagctggataaaggaaaaagaacaaatctattcgtctctcgattatggtaaggatctaacctcggtgctgatcctgcagcgaaagcacaaagcctttgaagacgaactgagagggctcgacgcccatttggaacagatttttcaggaagctcacggcatggtggctcgcaagcagtttgggcacccccaaatcgaggcacgtatcaaagaggttagcgcccagtgggatcagctcaaggatttggccgcgttttgtaaaaagaatctgcaggacgcagagaacttcttccagttccagggcgatgccgacgacctcaaggcttggttgcaagatgcacaccggctactgagtggggaagacgtcggtcaggacgagggagcaacccgggccctaggaaaaaagcacaaagacttcctagaagagcttgaggaatcccgcggggtgatggaacacctcgagcagcaagcacagggtttccctgaggaattcagggacagccccgatgtaacccatcgattgcaagcattgagagagttataccaacaggtcgttgcgcaagctgacctgcggcaacagagattacaagaagcattggacttatacaccgtgtttggcgagaccgacgcctgtgagctctggatgggagaaaaggagaagtggctggccgaaatggaaatgcccgacacgctcgaggacctcgaagtggtccagcaccggttcgatattttagatcaggaaatgaaaaccctgatgactcaaatcgacggagttaatttggcagctaactcacttgtcgagtcgggtcaccctagatcacgcgaggtgaaacagtaccaagatcacctgaacacaagatggcaggcatttcaaaccttagtcagcgagaggcgtgaagctgtcgactcagcactccgggtccataactactgtgtagattgcgaagaaacatccaagtggatcactgacaagacgaaagtggtcgagagcacgaaggatctcggacgggatctggctggaatcattgctatacagcgaaaattgagcggactcgagcgagatgttgctgcgatccaggcacgggtcgacgcactggaaagggagtcccaacagttaatggacagtcacccagaacagaaagaggatatcgggcaacgacaaaaacacctcgaggaactgtggcaaggacttcagcagtccctgcagggacaggaagatctgctcggagaagtgagccaactgcaggcctttctccaggatctggatgattttcaggcgtggctgtctatcacacagaaggctgtcgctagtgaggacatgcctgaaagcctgcctgaagctgaacagctgcttcagcagcatgccggaattaaggatgagatcgatggccaccaggactcataccaacgtgtgaaggaaagcggggaaaaggtgatccaaggacagaccgatccagagtacctattgttgggtcagaggctggagggtctagataccggttggaacgccctagggcggatgtgggaatcccgctcccacacccttgcacaatgtctcggattccaggagttccaaaaagatgcaaaacaggcagaggccatattatcaaatcaagagtacactctagctcatctggagccccctgattccctggaggccgcagaagccggaatccggaaatttgaagatttcctaggaagcatggagaacaaccgcgataaggttttgtcacccgtcgatagcggtaacaagttggtcgccgaaggcaacttgtactcagataagattaaagagaaagtccagttgatcgaggaccgacatagaaagaacaatgaaaaagcccaggaagccagtgtgcttcttcgggataacttagagctgcagaattttctgcagaactgccaggaactaaccctgtggattaacgataaactattgacttcccaggatgtcagctacgacgaggcaaggaacctccacaataaatggcttaaacaccaagccttcgtcgctgagctggcatcacacgaaggctggctcgagaacatcgacgcagagggaaaacaacttatggatgaaaaaccacaatttactgctctcgtgagccagaagcttgaagcgttacatcgcctgtgggacgagcttcaggccacgactaaggagaaaacacaacacctgagtgcggcaaggtcatcagacctgagactgcaaacacatgctgatttgaacaaatggatctccgccatggaagaccagctgcgcagcgacgacccggggaaagatctcacatccgtgaacagaatgctcgccaagctgaaacgtgtggaagaccaggtgaacgtgaggaaggaggaactcggggaattattcgctcaggtgccatcaatgggggaggaagggggcgacgcggacctgtccattgaaaagaggttcttagaccttcttgaacctcttgggcggcgtaaaaagcaattagagtccagcagagccaaactccagatttccagagacctggaagacgaaaccctgtgggtggaagagcggctgcctctggcgcagtctgcagactatggcaccaatctacagactgtacagctctttatgaagaagaatcagaccctccagaacgagatcttggggcacacccccagggtggaagatgtccttcagaggggccagcaacttgtcgaggcagctgagatagactgtcaggacctggaggagagactgggtcacctccaatccagctgggatagactgagggaggcggccgctggaaggctccagaggcttcgcgacgctaacgaagcccagcaatattacctggatgctgacgaagccgaagcttggataggtgagcaggagctttatgtcatctctgacgagatcccaaaagatgaggaaggcgcgattgtgatgcttaagcggcacttgcggcagcagcgcgcggtggaggactatggccgaaacattaagcagctggcctctagggcacagggattgctgagtgctggccacccagagggcgaacaaattattcgactgcaaggccaggtagataaacactacgccggactgaaagacgtggctgaggaacgtaagaggaagctggagaatatgtatcatctttttcagcttaagagggaaaccgacgacctcgagcagtggatctctgaaaaagagctagtggcctcatctccagaaatgggccaggattttgatcacgtgaccctcctgagagacaaattccgcgattttgccagagaaaccggggccattggccaggaaagagtcgacaatgtgaacgcattcatcgaaagattaatcgacgctggtcactcagaggccgcaactatagctgaatggaaggatggcttgaacgaaatgtgggcggatctgttggaactaatcgacaccaggatgcagctgttggctgcctcctacgatcttcacagatacttttacaccggggcggagattcttggtcttatcgatgagaagcatcgggaattacccgaagatgtaggcctcgacgctagcaccgcagagagcttccaccgcgtacataccgcattcgagcgggagttgcatctgttgggcgttcaagtgcagcagttccaagatgtggcaacaaggcttcagactgcctacgctggggaaaaagcagaagcaattcagaataaggagcaggaggtgagcgccgcctggcaggccctgctcgacgcatgcgccggccgccggacacagttggtagacactgcagataaatttagatttttttccatggcccgggacctcttgtcatggatggagtcaattattcggcaaattgagactcaggagcggccacgtgatgtgtcctccgtggaattgctcatgaaatatcaccaaggcatcaacgcggagatcgagacacggtccaaaaacttcagcgcctgtctggaactcggcgaatcactgctccagaggcagcaccaggcctccgaggaaattcgtgagaagctccagcaggtgatgtcacggcggaaagaaatgaatgagaagtgggaggcacgctgggaaaggttgcgcatgcttctggaggtttgtcagttctcacgtgacgctagcgtggcggaagcatggttaatcgcacaagagccctacctggcttccggtgatttcgggcacacagtggacagcgtggagaaacttataaagcggcatgaggcttttgagaaaagtaccgctagctgggcagagcgattcgctgcactcgaaaagccaacaacactcgagttgaaggaacgccagatcgccgagaggccggcagaggagaccggaccacaggaagaggaaggcgaaacggcgggggaggcccctgtctctcatcacgcagcgaccgaacggaccagtcccgtcagcctttggtcccggctgagctccagctgggaaagtctgcagcccgagccatcgcacccctactag

SEQ ID NO: 7406 - DNA, 6413 bp, Artificial Sequence
  derived and/or modified sequence
atgaccagcgcaacggaattcgaaaacgttgggaaccagcctccctatagtagaatcaatgcgcgatgggacgcccctgacgatgaattagacaatgataactcctcagccaggctctttgagcggagcaggattaaagccctggccgacgaacgcgaagtagtgcagaagaaaacctttactaagtgggtcaattctcatctggcacgcgtcagctgtagaattactgatttatacaaggacctcagagatgggcgaatgcttatcaaactgttagaggtgttaagcggtgagatgctccctaaacctacaaaaggtaaaatgaggatccactgcttagagaacgtggataaagccttgcagttcttgaaagaacagcgagtccacctggaaaatatgggaagccatgacatcgtcgacgggaaccatagactcgttctgggcctgatttggacaataattctgaggtttcagatccaggacatcgtagtacagacccaagagggacgggagacgaggtccgcgaaagatgccctgttgctgtggtgtcagatgaaaacagccggatacccacatgtgaacgtgactaactttacctccagttggaaggatgggctggctttcaacgctttaatccataagcacagacctgatttgatcgattttgacaagctgaaggattcaaacgcccgtcacaaccttgaacatgctttcaatgtggcggagagacagcttgggatcatacccctgcttgaccctgaagacgtgttcactgaaaatcccgacgagaagtccatcattacgtacgttgtagctttttaccactacttctcaaagatgaaagtgctggctgtggaaggtaagagggtggggaaggtcatcgaccacgcgattgaaaccgagaaaatgatcgagaagtactctggcctcgcctccgatctccttacttggattgagcagaccattacagtcctgaactctagaaagttcgcaaattccctcactggagtccagcagcagttacaagctttcagcacatatcggaccgtggaaaagcctccgaaatttcaggagaaaggcaacctggaggttctattatttaccattcagtctaggatgagagcgaacaaccagaaggtgtacactccgcacgacgggaagcttgtgtccgacattaacagggcatgggagagcctcgaagaagcagagtacagaagagaactcgccctccgcaacgaactgataagacaagaaaaactggaacagctcgctcgacgctttgataggaaggcagcgatgcgggagacttggctcagcgagaaccagcgcctcgttgcccaggataatttcggttacgatctggcagctgtcgaggctgctaagaagaaacatgaggccatcgagactgacactgctgcctatgaggaacgcgtgcgtgcactcgaggacctggcccaagaattagagaaagaaaattatcatgatcagaaacgtattaccgcccgaaaagacaacattcttcgcctctggtcttatctccaggagcttctgcagagtagacgccagcggctcgaaacaactctggccctccagaagctcttccaagatatgttacacagtatcgactggatggacgaaattaaggcccacctgctgtcggcagaatttggcaagcacctactggaggtcgaagacttgctgcagaaacacaaacttatggaggcggatatagccattcagggtgataaagtgaaggccattacagctgcaacattgaagttcaccgaaggcaagggctatcagccttgtgatcctcaagtcatccaggatcgcattagtcacctggaacagtgcttcgaggagctatctaatatggcggcaggtaggaaggctcagctggagcagtctaaacgactttggaaatttttctgggaaatggatgaggctgaatcctggataaaggaaaaggaacagatttactcatcccttgattacggcaaagatctgacttcggtactgatactgcagcgcaagcacaaagcatttgaggacgaattgaggggcctcgacgcgcacttagaacaaatctttcaggaggcccatggaatggtcgccagaaaacaattcggccatccacagatagaagcacggatcaaggaggtatccgctcagtgggaccaacttaaagatctggcagctttttgtaagaagaatctccaggacgccgagaatttctttcaattccagggagatgccgacgatttgaaggcttggcttcaggacgcccataggctgctgagcggcgaagacgtaggacaagatgagggggcaacccgggctcttgggaagaagcataaggactttctcgaagaactggaagagtctagaggtgttatggagcacttagagcagcaagcccaagggttccccgaggagttcagagactctccggatgttacacataggctgcaggcactgcgcgaattgtatcagcaggtggtggcccaagccgacctccggcagcagagactccaggaggcccttgacctatataccgtgttcggcgagacagatgcctgtgaactgtggatgggagagaaagaaaaatggttagcagagatggagatgccagacaccctcgaagacctcgaggtcgtgcagcacaggttcgacatccttgaccaggaaatgaagactcttatgactcaaatcgatggggtaaacctagcagcgaatagcctcgtggagagcggccacccacgaagtagagaagtcaaacagtatcaggaccacttgaatactcgttggcaggccttccagacactcgtctcagagagacgcgaagccgtggactctgctctccgggtgcataactactgtgtggattgcgaagagacatcaaagtggatcacagacaaaaccaaggtggtggaatctaccaaggacctgggacgcgatcttgccggaataattgcaatccagagaaaattgagcgggcttgaaagagatgttgccgcaatacaggccagggttgacgcactggagcgggagtctcagcagctgatggactcccacccagaacagaaagaggacatcggacagcgccagaaacatctagaggaactgtggcaaggcttgcagcagtcactgcagggccaggaagacctgcttggcgaagtgagtcaattgcaggcattccttcaagatctagacgactttcaggcttggctgtcaattacgcagaaagcagtggcatcagaggatatgccggaatctttgcctgaagcagaacaattgctgcagcagcacgccggaatcaaggacgagattgacggtcaccaggatagctatcagcgggttaaagagagcggagagaaggttattcagggacagacagaccccgagtatctgctgcttgggcaaaggctggaggggctcgatacaggctggaacgcactaggtaggatgtgggagagcaggtcccatacactcgcccagtgcctggggttccaggagtttcaaaaggatgctaaacaggcggaagcaatcctgagtaaccaggaatacacactagcccaccttgagcctccggatagcctggaggccgcagaagctggcataaggaaatttgaggattttctcggcagcatggagaataacagagacaaggtcctgtctccagtggattccggcaacaagctggttgccgagggtaatctgtactctgacaagattaaggagaaagtccaattgattgaggatagacacaggaaaaacaatgagaaggcccaggaggcgtctgtgctccttagggacaacttggagctgcagaatttcctgcagaattgtcaggaacttactctgtggatcaatgataaactcttaacaagtcaagatgtgtcttatgatgaggcgcgaaacctgcacaacaagtggctgaaacaccaggccttcgttgccgaattggccagccacgagggctggttggaaaacatagacgctgagggtaagcagctgatggacgagaagccacaattcactgccctggtaagccagaagttggaggctttgcatagattatgggacgaactccaagctacaacaaaggagaagacacagcacctgtctgccgcacgatcatcagacctgagattgcagacccacgccgacttgaacaagtggatctccgcaatggaggaccagctccgctctgatgacccgggtaaggacttgacctccgttaaccgtatgctcgccaagctcaagcgggtcgaggatcaggtgaacgtcaggaaggaggagctgggtgaactcttcgcccaggtacccagcatgggagaggaaggcggtgacgctgacctgtcaattgaaaaaaggttcctcgatctcctggaaccactgggcagaaggaaaaaacagctcgagtcttcacgggcaaagttacaaatttctagggatctggaggatgagaccctgtgggtcgaggagagactgcccttagcccagtccgccgattatgggaccaacctgcagaccgtccagctgtttatgaagaaaaaccaaaccctccagaacgagatcctgggccacacaccacgggttgaagacgttctccaacggggacagcagctcgtcgaagcagccgaaatagattgtcaggatcttgaagaaaggctgggacaccttcagtcctcttgggaccgactccgggaggcggctgccggaaggctgcagagactaagagatgccaacgaggcccagcagtactatttggatgctgatgaggcagaagcatggattggcgagcaggagttgtatgtgattagcgacgagatccccaaggatgaggagggcgcaatcgtgatgctgaaacgccacctgaggcaacagcgcgctgtggaagactatgggagaaatatcaagcagcttgcgtctagggcccaggggctgctctccgccggtcaccccgaaggcgagcagatcatccgcctgcaaggacaggtggataagcactatgccggactgaaagacgtggctgaggaaagaaaaaggaaactggaaaatatgtatcatctgtttcagctgaagcgtgagaccgatgatttggagcagtggattagtgagaaggaactggtagcttcttcacctgaaatgggtcaggacttcgaccatgtgacattgcttagagacaaattccgagacttcgcacgggagacaggcgctatcggacaggaaagggtggataatgtgaatgcgttcattgaaagactcatcgatgcaggccacagcgaggccgcaaccatcgcagaatggaaagacggactcaacgaaatgtgggccgacctcctggaactgattgatacaaggatgcaactcctcgccgcatcctacgacttgcatcgctacttttatacaggtgccgagattctgggactgattgatgagaagcacagagaactgcccgaagacgtggggttagacgcatccacagctgagtccttccatcgcgtgcacaccgctttcgaacgggaactccatcttctgggggtgcaagtgcagcagtttcaagacgtggccacaagactccagaccgcctatgctggagaaaaggcagaggccattcaaaataaggagcaggaggtcagcgcggcatggcaggctctactcgacgcttgtgctgggaggcggactcagctggtcgatactgctgacaaatttcgatttttttccatggcgagagatctcctttcctggatggaatcgatcattagacagatagagacacaggaacgtccgagggatgtttcgagcgtcgaactgctcatgaaatatcaccagggcatcaatgcagagattgagaccagatccaaaaatttctccgcttgcctcgagctcggggagtcgctcctgcaaagacagcatcaggcctcagaagaaatcagggaaaaattgcaacaggtgatgagtcgcaggaaggagatgaacgagaagtgggaagcccgttgggagagactgagaatgttgttggaagtttgccagttttcccgagatgctagtgtggctgaagcttggctgatcgcccaggaaccctacttggcttctggagactttggccatacggtagatagcgtggagaaactgatcaaaagacacgaagcatttgagaagtcaactgcttcgtgggcagagcggttcgccgctctggagaagcctactactctcgagcttaaagagcgccaaatcgccgagcgccctgctgaggagacagggcctcaggaggaggaaggcgaaactgctggcgaggcaccagtgagtcaccacgccgcaacagagaggacaagtccagtgtccctgtggtctcgtctctcaagctcatgggaaagcctccaacctgagccctcccacccgtacta

SEQ ID NO: 7407 - DNA, 6413 bp, Artificial Sequence
  derived and/or modified sequence
atgacatctgcgacggagttcgaaaatgtaggaaaccagccaccatactccaggatcaatgccagatgggacgcccctgacgatgagctggataacgacaatagctccgccagattatttgagcgaagtagaattaaagcacttgcagacgaacgagaggtcgtgcaaaagaaaaccttcacaaagtgggtgaactcacacctcgcaagggtgagctgtcgtataactgacttgtataaggatctgagggatggtaggatgctgatcaagttgctcgaggttctgagcggcgaaatgctccctaagcctacaaaaggcaaaatgcgtatccattgtctggagaacgtggacaaggctctgcagtttttgaaagagcagagagtacaccttgaaaacatgggctcgcatgacattgttgatgggaatcacagactcgtcctggggctaatttggacaatcatactgaggtttcaaatccaggatattgtggtgcaaacacaggaggggagggaaacacggtctgcaaaagacgccctgctgctgtggtgccagatgaaaactgctggctaccctcacgtcaatgtcactaacttcacttcatcctggaaggatggactcgcattcaatgccctgatccacaaacataggcccgacctgattgattttgacaaactgaaagacagcaatgctagacacaatctggaacacgcctttaatgtggccgagcgtcagctggggatcatcccgctgctggaccccgaggatgttttcactgagaatcccgatgagaagagtattataacgtacgttgtcgcattctaccactacttttctaagatgaaagttctcgcagtggaaggaaaaagagtcggtaaggtgatagatcacgcgattgagacagaaaaaatgatcgagaagtacagcggcctagcttccgatcttctgacgtggatcgagcaaactattaccgtcctgaattctaggaagttcgccaacagcctcacaggggtgcaacagcagctccaggctttctccacttaccgcactgtcgaaaagccgcctaagttccaggagaaaggcaacctggaagtccttctgttcacaattcaaagccggatgagagccaataaccaaaaggtttataccccgcacgacggcaaactggtcagcgatattaaccgggcatgggagtcattggaggaggcggaataccgacgcgaactggcactcagaaacgaacttataaggcaggagaagcttgaacagcttgcaagaaggttcgacaggaaggcggctatgcgcgagacttggctgtctgaaaatcagaggctagtggcccaagacaacttcgggtacgaccttgcagcagtagaggcagcaaagaaaaagcatgaggctattgagacggacactgccgcttatgaagagcgcgttagagccctggaagacttggctcaagagttggaaaaggaaaattaccacgaccagaaacgcatcactgcaaggaaggacaacatcctccggctgtggtcatacctgcaggagctgctgcagagccgcaggcaacggctggagactacactggcccttcagaagctattccaagatatgctgcacagtatcgattggatggatgagattaaggctcacctcctgtcggcggagtttggcaagcatctgcttgaggtggaggacttgttacagaagcacaagcttatggaagcggacattgcgattcaaggcgataaagtaaaggcaatcactgctgccacactgaagttcaccgagggcaaagggtaccagccctgtgacccccaggtaatacaagaccgaatttcgcacctggaacaatgcttcgaagagcttagtaacatggcagccggacgaaaagcccagctggaacagtccaagcgcctatggaaatttttctgggaaatggatgaagccgaaagttggatcaaagagaaagagcagatttactcctccctagactatggaaaagacttaacgtcagtgctgattctgcagcgcaagcacaaggcatttgaggatgagctgcgtggactggatgcccatttggagcagattttccaggaagctcacggtatggtggcaagaaaacagttcgggcaccctcagatcgaggccaggatcaaagaggtttcagcccagtgggatcagttgaaggatttggcagcattctgtaagaagaacttgcaggatgccgagaacttctttcagttccagggggatgccgacgatctgaaggcatggttgcaggacgctcacaggcttctcagtggagaagatgtgggccaggacgaaggggcaacacgcgcactggggaagaagcacaaggactttctggaagagttagaggagtccagaggagtcatggagcacctggagcagcaagcccagggattcccggaagaatttcgcgacagtcccgacgtcactcaccgtctgcaggcactgagggagctctaccaacaggtcgtggctcaggccgacctgcgacagcagcggcttcaggaggcacttgatctgtataccgtattcggagagacagatgcttgcgaactatggatgggcgaaaaggaaaagtggctggcggaaatggagatgcctgacaccctggaggacctggaggtcgttcagcaccggtttgacatattggaccaggagatgaagactcttatgactcagatcgatggggtgaatctagccgctaactcccttgtggagtcgggacaccctaggtccagggaagtcaaacaataccaagatcacctgaacactcgctggcaggccttccagaccctcgtgagtgagcgcagggaagccgtcgattcagccttgcgcgtccataattactgcgtggactgtgaggagactagcaagtggattaccgacaagacaaaagtggtggagagcacaaaagatctcgggagggatctggcaggaataatcgccatccagcgcaaactctcaggactggaacgtgacgtagctgctatccaggcccgagtcgacgcgctggagagggaatctcagcaactgatggatagccatcccgagcaaaaggaggacattgggcagagacaaaagcatcttgaggaattatggcagggcctgcagcagtctctgcaaggccaggaagatctactgggggaggtgtcccagctccaggctttcctccaagatcttgacgattttcaggcttggctcagcataacacagaaggcggtcgcttcagaggacatgcctgaatccctgcccgaggcagaacagctgctgcagcagcatgcgggaataaaagatgaaattgatggtcatcaggactcataccagagagtgaaggagtccggagagaaagttatacaggggcagacggatccagagtatctactcctgggtcagagactggaaggtctagacactggttggaacgctttaggtcgcatgtgggaatcaagatcacatacactggcacaatgcctcggattccaagagtttcaaaaggacgccaagcaagccgaggccattctctccaatcaagaatatacactggctcatttggaacctccagatagcctggaggctgccgaagctggtatacgcaaatttgaggactttctaggtagtatggaaaataatcgggacaaagtgctgagtccagtggactctggcaataagctggttgccgaagggaatctctatagcgacaaaataaaagagaaggtgcagttgatcgaggatcgtcacaggaaaaataacgagaaggctcaggaggcctctgtactcctacgagacaacctggagctccagaatttcctgcagaattgccaggagctcaccctgtggattaatgacaagttgttgacctcccaagatgtgtcttacgacgaggccagaaacctgcataataaatggcttaagcaccaggcgtttgtggcggagctggcatctcacgaaggatggctggagaacatagacgctgagggaaagcagctgatggacgagaaaccacaatttacagccctcgtctcacaaaaactggaggccttgcaccgtctgtgggacgagctgcaagccactacaaaagagaaaactcagcatcttagcgctgcaaggtcttctgatctccgcctacaaacacatgccgatcttaataaatggatatcagccatggaggaccagttgcgatctgatgacccagggaaggatctgacttcagtgaataggatgttagccaaactcaagcgggtcgaggaccaggtgaacgtgcggaaggaagaacttggagaactgttcgcgcaggtgccatcaatgggcgaagaaggcggtgatgcggatctgtctattgagaagaggttcctggacttgcttgagcctctgggccgacgaaaaaagcagcttgaaagctcacgggctaaactgcagattagcagagatctcgaagatgaaactctgtgggtggaggagaggctgcctcttgctcagtccgccgactatgggacgaatctgcaaacagtacagctgttcatgaagaagaatcagaccctccaaaacgagattttagggcatacaccgagggtagaagacgtccttcagcggggtcagcagctggtggaggcggcagaaatcgactgccaggatctcgaggaaaggctggggcatctgcagtcttcgtgggacaggctccgcgaagccgcagctggcagattacagcggctccgcgacgcaaatgaggcccagcagtactatctggacgcagatgaggccgaagcatggatcggagagcaggagttgtatgtgatctcagacgagattcccaaggatgaggaaggcgctatcgtgatgcttaaacgacatctaagacagcagcgcgcagtggaggactatggcagaaatattaagcaactggcttctcgggctcagggactactaagcgctggccatccggaaggcgaacagatcattaggctacagggccaagttgacaaacactatgccggattgaaagatgtcgccgaggagagaaagcggaagctagagaacatgtatcacctgtttcaattgaagcgagagacagacgaccttgagcagtggataagcgagaaggaactcgttgcaagctccccagagatgggacaggactttgatcatgtgactttattgagggataagttccgagacttcgcacgagagactggcgcaatcggtcaagagagggtcgataacgtaaatgcttttattgaaagacttatagatgccggacattccgaggctgccaccatcgctgagtggaaagacggcctaaacgaaatgtgggctgatctactcgaactgattgacacgcggatgcagctcctggctgccagctacgacctccaccgatacttctacaccggagcggagattttgggcctgattgacgaaaaacatcgcgaactccccgaggatgtcgggctcgatgcatcaacagctgaaagctttcatagagtgcataccgctttcgagagagagttacatttgctgggggtgcaagtgcagcagttccaggacgtcgccactcggttgcagaccgcttacgctggggaaaaagccgaagccatccaaaataaggagcaagaggtttcggctgcctggcaggcgttacttgatgcctgtgcaggaagacgaacacagttggtcgatactgcagacaagttccggttcttcagcatggctagagatttactcagctggatggaatcaataattaggcagattgagactcaggaacggcctcgggacgtgagcagtgtcgaactgctgatgaagtatcaccagggcatcaacgccgagatagagactagatccaagaattttagtgcctgtttggagctaggagaatccctgctgcagcgtcagcatcaggccagcgaagaaattcgcgaaaaattgcagcaagtcatgtcccgcaggaaagagatgaatgagaagtgggaagcaaggtgggagaggctgaggatgctgctcgaggtgtgtcagtttagtagggacgcctcggtcgcagaggcatggctgatcgcccaggaaccatatctggcatctggcgactttgggcacacggtggactccgtcgaaaaactcattaagagacacgaggccttcgaaaagagcacagcctcgtgggcagagcgattcgcagctctggagaagcctactacgttagaactaaaggaacggcagatcgccgagaggccagcggaagagacaggcccacaagaagaagagggcgagacggcaggagaagcacctgtttcccatcatgccgctacggagcgcactagcccggtgagcctgtggtcccgtctgtcttcctcttgggagtccttgcagcccgagccctcccacccctacta

SEQ ID NO: 7408 - DNA, 6705 bp, Artificial Sequence
  derived and/or modified sequence
tgaggcaggcggagctgctaagagcctgctgacatgacatcggccacagagtttgaaaatgtgggcaaccagccaccttacagcaggatcaatgcccgctgggacgccccagacgacgagctggataatgacaacagctcagccaggctctttgagaggtcccggataaaggccttggcagatgagcgggaagttgttcagaaaaagaccttcacgaaatgggtgaactcgcacctggctcgagtgtcctgccgcatcaccgatctctacaaggacctgcgggatgggcgcatgctcatcaagctgctggaggtgctctctggagagatgctgccaaagcccaccaaggggaagatgcgcatccactgcctggagaatgtggacaaggctctccagttcctcaaggagcagcgtgtacacctggagaacatgggctcccacgacattgtagatggcaaccaccgcctggtcctgggcctcatctggaccatcatcctccgcttccagattcaggacattgtggtccaaactcaggaaggtcgtgaaacacgctcagccaaggatgcgttgctgttgtggtgtcagatgaagacggcaggctaccctcatgttaatgtcaccaactttacctccagctggaaggatggcttggcctttaatgccctgatacacaagcaccggcccgacctgatcgactttgataagctgaaggactccaatgcccggcacaacctggagcacgcattcaatgtggctgagcgccagctgggcatcatcccgctcctcgaccccgaagatgtctttacggaaaaccctgatgagaaatccatcatcacctatgtggtggccttttaccactacttctccaagatgaaggtgctggcagtggagggcaagcgtgtcggcaaggttattgaccatgccattgagactgagaagatgattgaaaagtacagcgggctagcctcggacctgctcacctggatcgagcagaccatcactgtcctgaacagccgcaagtttgccaactcgctgacgggcgtccagcagcagctgcaggccttcagcacctaccgcaccgtggagaagccgcccaagtttcaagagaaggggaatctggaagttctactttttaccatccagtcccggatgagagccaacaatcagaaagtgtacacaccccacgatgggaaactagtgtctgacatcaacagggcctgggaaagcctggaggaagctgagtatcggcgggagctggccctgagaaatgagctcattcggcaggagaagctagagcaactggcccggcgctttgaccggaaggccgcaatgagagagacctggctcagtgaaaaccagcgcctcgtggcccaggataactttgggtatgacctggcagctgtggaggccgccaagaagaagcatgaggccatcgagaccgacacggctgcctacgaggagcgggtgagagccctggaggacctggctcaggagctggagaaagagaactaccatgaccagaagcgcatcacggcccgcaaggacaatatactgcgcctatggagctacctgcaggagctgctgcagtcccggcgccagaggctcgagaccaccctggcactgcagaagctcttccaggacatgctgcacagcatcgactggatggatgagatcaaggctcacctcttgtctgccgagtttgggaagcacttgttggaggttgaagacctgctacagaagcacaagttgatggaagctgacatcgccatccaaggggacaaagtgaaggccatcaccgcagccaccctgaagttcaccgaggggaaagggtaccagccttgtgacccccaggtcatccaggaccgcatcagccacttggagcagtgctttgaggagctgagcaacatggcagctgggcggaaggcccaactggagcagtccaaacgactctggaagttcttctgggagatggatgaggctgagagctggatcaaggagaaggagcagatctattcttccctggactatggcaaagacctgaccagtgtgctcatcttacagcgcaagcacaaggcctttgaggatgagctccgtgggctggatgctcacctggagcagatcttccaggaggctcatggcatggttgcgcgcaagcagtttgggcacccgcagatcgaggcccgcataaaggaggtgtcggcacagtgggaccagctgaaggacctggctgccttctgcaagaagaacctccaggatgctgagaactttttccagttccagggcgatgcggatgacctgaaggcttggctgcaagacgcccaccggctgctctctggtgaagatgtggggcaggacgaaggggccacgcgggccctggggaaaaagcacaaggacttcctggaggagctggaggagagccgtggggtgatggagcacctggagcagcaggcccagggattccccgaagagtttcgggattccccagatgtgacccatcggctgcaggccctgcgggagctctaccaacaggtggtggcccaggcggacctgcgtcagcagaggctgcaggaagccctggacctgtacacggtgttcggggagacagacgcctgtgagctgtggatgggagagaaggagaagtggctggccgagatggaaatgccagacaccctggaggacctggaggtcgtgcagcacaggttcgacatcctggaccaggagatgaagaccttgatgactcagattgatggtgtgaacctcgctgccaacagcttggtagagagtggccacccacgcagcagggaggtgaagcagtaccaggaccatctgaacaccaggtggcaggcatttcagaccctggtgtcggagcggcgggaggctgtggactcagccctccgagtgcacaactactgcgtagattgcgaggagaccagcaagtggatcacggacaagacaaaggtagtggagtccacaaaagacctggggcgggacctggcaggtatcatcgccatccagaggaagttgtcagggctggagcgtgacgtggccgccatccaggcccgtgtggatgccctggagcgtgagtcccagcagctgatggactcgcaccctgagcagaaggaggatattggtcagcggcaaaaacacttggaggagctgtggcagggcctgcagcaatccctgcagggccaggaggacttgctgggggaagtcagccagctgcaggccttcctgcaggatctggatgacttccaggcctggctctccatcacccagaaggctgtggcctctgaggacatgcccgaatccctcccagaggctgagcagctcctgcagcagcatgcaggtatcaaggatgagattgacgggcaccaagacagctaccagcgtgttaaggagtctggggagaaagtgatccaaggccagacggacccagagtatctgcttctgggccagcggctggagggcctggatactggctggaatgccctgggcaggatgtgggagagccgcagccacaccctcgctcagtgccttggcttccaggagttccagaaagatgccaagcaggctgaagccatcctcagcaaccaggaatacactctggctcacttggagcccccagactccctggaagctgcagaggctgggatccggaagtttgaggatttcttggggtctatggagaacaaccgggataaggtcttgagtcctgtggactctggaaacaagctggtagctgagggaaacctatactcagacaagatcaaggagaaggtgcagctgattgaggacaggcacaggaagaacaacgagaaggcccaggaggcctctgtcctactgagagacaacctggagctacagaacttcctccagaactgccaggagctcactctctggatcaacgacaagctgctgacatctcaggatgtctcctatgatgaagcacgaaaccttcacaataaatggctaaagcaccaggcgtttgtggcagagctggcttcccatgaagggtggctagagaacatcgatgcggaaggaaagcagctgatggatgagaagccccagtttacagccctggtgtcccaaaagctggaagccctgcaccggctctgggacgagctgcaggccaccacaaaggagaagacccagcacctctcggctgccaggagctccgacctgcgcttgcagacccatgctgacctcaacaagtggatcagcgccatggaggaccagctgcggtcagacgacccgggcaaggacctgaccagtgtcaatcggatgttggctaagctgaagcgagtggaggaccaagtgaatgtgcgaaaagaggagctgggggagctgtttgcccaggtgccttcaatgggagaggagggaggagatgcagacttgagcatcgagaagcggttcctggacctcctggaacccctaggaaggaggaagaagcagctggaatcatccagagccaagctgcagatcagccgggacttagaggatgagacgctttgggtggaggagaggctgcctctggcccagtcagccgactatggcactaatctgcaaactgtgcaactgttcatgaagaagaaccagacactgcagaatgagattctgggccatacgccgcgggttgaggatgtgctgcagagagggcagcagctggtggaggcggcggagatcgactgccaggaccttgaggagcgcctggggcacctgcagagctcctgggacaggctgcgggaggcagcggccgggaggctgcagcgactgagggacgccaacgaggcacagcagtactacctggatgcagacgaggctgaggcctggattggcgagcaggagctctacgtcatctccgatgagatccccaaggatgaagagggcgccattgtgatgctgaagcgacatttgcggcagcagcgtgcggtggaggactacggccggaacatcaagcagctggccagccgggcccagggcctgctgtctgcaggccaccctgagggggaacagatcatcagacttcaggggcaagtggacaagcactacgcagggctgaaggacgtggcggaagagcgcaagcgcaagctggagaacatgtaccacctgttccagctcaagcgggagaccgacgacctggagcagtggatttcagaaaaggagctagtggcctcttccccggaaatggggcaagactttgaccacgtgactcttctgcgggacaagttccgggactttgcccgggagaccggggcgattgggcaggagcgggtggacaatgtgaatgccttcatcgagcgactcatcgacgcgggccacagcgaggcggccaccatcgccgagtggaaggacgggctgaacgagatgtgggcagacctcctggagctcattgacacgcgcatgcagctgctggccgcctcctatgacctgcaccgctacttctacacgggtgccgagatcctgggcctcatcgacgagaagcaccgcgagctgcccgaggacgtggggctggacgccagcacggccgagtccttccaccgggtgcacacagccttcgagcgggagctccacctgctgggtgtccaggtgcagcagttccaggacgtggccacccgtctgcagacagcatatgctggggagaaggcagaggccatccagaacaaggagcaggaggtgtctgccgcgtggcaggcgctgctcgatgcctgtgccgggcgccggacccagctagtggacacggcggataaattccgcttcttcagcatggcccgtgacctcctctcctggatggagagcatcatccggcagatcgagacccaggagaggcccagggatgtctcctctgtggaactgctcatgaagtatcaccagggcatcaatgcagagattgaaacccggagcaagaacttcagtgcctgcctggagcttggcgagtccctgctgcagcggcagcaccaggcctcagaggagatccgcgagaaactgcagcaggtgatgtccaggaggaaagagatgaatgagaagtgggaagcccgctgggagcggctccgcatgttgctggaggtgtgccagttctcgagggatgcctctgtggctgaggcgtggctgattgcccaggagccctacctggccagcggggactttggacacacagtggacagtgtggagaagctcatcaagaggcatgaggcttttgagaagtccacggccagctgggcagagcgctttgctgccctggagaagcccaccacgcttgagctgaaagaacgccagattgcagagagacccgcagaggagactgggcctcaagaggaggaaggcgagacagcaggggaggctccagtttcccaccatgcggccaccgagagaacgtccccggtcagtctctggtctcgtttgtctagttcctgggagtcactgcagccagagccctctcacccctactaggctcagcccaggtggaggcgagatgagctggcgcagccccgccctccatcctccccacatccctgcagccacctcccagcagagcaggctacgtcctcactgaggtgttcttcatgagagtactagcctcctccactcctccccacagcgcagaggaaacaggccagcccagtgacatgacgttattagttttgttttacctaatgtaataaattttattgtataaatatatcaccatttacatgaggggaaacacta

SEQ ID NO: 7409 - DNA, 6768 bp, Artificial Sequence
  derived and/or modified sequence
cgccacccccgggctcggggtggcccccgcttcagtcccagggcagggatccttccatgaagactgaggcaggcggagctgctaagagcctgctgacatgacatcggccacagagtttgaaaatgtgggcaaccagccaccttacagcaggatcaatgcccgctgggacgccccagacgacgagctggataatgacaacagctcagccaggctctttgagaggtcccggataaaggccttggcagatgagcgggaagttgttcagaaaaagaccttcacgaaatgggtgaactcgcacctggctcgagtgtcctgccgcatcaccgatctctacaaggacctgcgggatgggcgcatgctcatcaagctgctggaggtgctctctggagagatgctgccaaagcccaccaaggggaagatgcgcatccactgcctggagaatgtggacaaggctctccagttcctcaaggagcagcgtgtacacctggagaacatgggctcccacgacattgtagatggcaaccaccgcctggtcctgggcctcatctggaccatcatcctccgcttccagattcaggacattgtggtccaaactcaggaaggtcgtgaaacacgctcagccaaggatgcgttgctgttgtggtgtcagatgaagacggcaggctaccctcatgttaatgtcaccaactttacctccagctggaaggatggcttggcctttaatgccctgatacacaagcaccggcccgacctgatcgactttgataagctgaaggactccaatgcccggcacaacctggagcacgcattcaatgtggctgagcgccagctgggcatcatcccgctcctcgaccccgaagatgtctttacggaaaaccctgatgagaaatccatcatcacctatgtggtggccttttaccactacttctccaagatgaaggtgctggcagtggagggcaagcgtgtcggcaaggttattgaccatgccattgagactgagaagatgattgaaaagtacagcgggctagcctcggacctgctcacctggatcgagcagaccatcactgtcctgaacagccgcaagtttgccaactcgctgacgggcgtccagcagcagctgcaggccttcagcacctaccgcaccgtggagaagccgcccaagtttcaagagaaggggaatctggaagttctactttttaccatccagtcccggatgagagccaacaatcagaaagtgtacacaccccacgatgggaaactagtgtctgacatcaacagggcctgggaaagcctggaggaagctgagtatcggcgggagctggccctgagaaatgagctcattcggcaggagaagctagagcaactggcccggcgctttgaccggaaggccgcaatgagagagacctggctcagtgaaaaccagcgcctcgtggcccaggataactttgggtatgacctggcagctgtggaggccgccaagaagaagcatgaggccatcgagaccgacacggctgcctacgaggagcgggtgagagccctggaggacctggctcaggagctggagaaagagaactaccatgaccagaagcgcatcacggcccgcaaggacaatatactgcgcctatggagctacctgcaggagctgctgcagtcccggcgccagaggctcgagaccaccctggcactgcagaagctcttccaggacatgctgcacagcatcgactggatggatgagatcaaggctcacctcttgtctgccgagtttgggaagcacttgttggaggttgaagacctgctacagaagcacaagttgatggaagctgacatcgccatccaaggggacaaagtgaaggccatcaccgcagccaccctgaagttcaccgaggggaaagggtaccagccttgtgacccccaggtcatccaggaccgcatcagccacttggagcagtgctttgaggagctgagcaacatggcagctgggcggaaggcccaactggagcagtccaaacgactctggaagttcttctgggagatggatgaggctgagagctggatcaaggagaaggagcagatctattcttccctggactatggcaaagacctgaccagtgtgctcatcttacagcgcaagcacaaggcctttgaggatgagctccgtgggctggatgctcacctggagcagatcttccaggaggctcatggcatggttgcgcgcaagcagtttgggcacccgcagatcgaggcccgcataaaggaggtgtcggcacagtgggaccagctgaaggacctggctgccttctgcaagaagaacctccaggatgctgagaactttttccagttccagggcgatgcggatgacctgaaggcttggctgcaagacgcccaccggctgctctctggtgaagatgtggggcaggacgaaggggccacgcgggccctggggaaaaagcacaaggacttcctggaggagctggaggagagccgtggggtgatggagcacctggagcagcaggcccagggattccccgaagagtttcgggattccccagatgtgacccatcggctgcaggccctgcgggagctctaccaacaggtggtggcccaggcggacctgcgtcagcagaggctgcaggaagccctggacctgtacacggtgttcggggagacagacgcctgtgagctgtggatgggagagaaggagaagtggctggccgagatggaaatgccagacaccctggaggacctggaggtcgtgcagcacaggttcgacatcctggaccaggagatgaagaccttgatgactcagattgatggtgtgaacctcgctgccaacagcttggtagagagtggccacccacgcagcagggaggtgaagcagtaccaggaccatctgaacaccaggtggcaggcatttcagaccctggtgtcggagcggcgggaggctgtggactcagccctccgagtgcacaactactgcgtagattgcgaggagaccagcaagtggatcacggacaagacaaaggtagtggagtccacaaaagacctggggcgggacctggcaggtatcatcgccatccagaggaagttgtcagggctggagcgtgacgtggccgccatccaggcccgtgtggatgccctggagcgtgagtcccagcagctgatggactcgcaccctgagcagaaggaggatattggtcagcggcaaaaacacttggaggagctgtggcagggcctgcagcaatccctgcagggccaggaggacttgctgggggaagtcagccagctgcaggccttcctgcaggatctggatgacttccaggcctggctctccatcacccagaaggctgtggcctctgaggacatgcccgaatccctcccagaggctgagcagctcctgcagcagcatgcaggtatcaaggatgagattgacgggcaccaagacagctaccagcgtgttaaggagtctggggagaaagtgatccaaggccagacggacccagagtatctgcttctgggccagcggctggagggcctggatactggctggaatgccctgggcaggatgtgggagagccgcagccacaccctcgctcagtgccttggcttccaggagttccagaaagatgccaagcaggctgaagccatcctcagcaaccaggaatacactctggctcacttggagcccccagactccctggaagctgcagaggctgggatccggaagtttgaggatttcttggggtctatggagaacaaccgggataaggtcttgagtcctgtggactctggaaacaagctggtagctgagggaaacctatactcagacaagatcaaggagaaggtgcagctgattgaggacaggcacaggaagaacaacgagaaggcccaggaggcctctgtcctactgagagacaacctggagctacagaacttcctccagaactgccaggagctcactctctggatcaacgacaagctgctgacatctcaggatgtctcctatgatgaagcacgaaaccttcacaataaatggctaaagcaccaggcgtttgtggcagagctggcttcccatgaagggtggctagagaacatcgatgcggaaggaaagcagctgatggatgagaagccccagtttacagccctggtgtcccaaaagctggaagccctgcaccggctctgggacgagctgcaggccaccacaaaggagaagacccagcacctctcggctgccaggagctccgacctgcgcttgcagacccatgctgacctcaacaagtggatcagcgccatggaggaccagctgcggtcagacgacccgggcaaggacctgaccagtgtcaatcggatgttggctaagctgaagcgagtggaggaccaagtgaatgtgcgaaaagaggagctgggggagctgtttgcccaggtgccttcaatgggagaggagggaggagatgcagacttgagcatcgagaagcggttcctggacctcctggaacccctaggaaggaggaagaagcagctggaatcatccagagccaagctgcagatcagccgggacttagaggatgagacgctttgggtggaggagaggctgcctctggcccagtcagccgactatggcactaatctgcaaactgtgcaactgttcatgaagaagaaccagacactgcagaatgagattctgggccatacgccgcgggttgaggatgtgctgcagagagggcagcagctggtggaggcggcggagatcgactgccaggaccttgaggagcgcctggggcacctgcagagctcctgggacaggctgcgggaggcagcggccgggaggctgcagcgactgagggacgccaacgaggcacagcagtactacctggatgcagacgaggctgaggcctggattggcgagcaggagctctacgtcatctccgatgagatccccaaggatgaagagggcgccattgtgatgctgaagcgacatttgcggcagcagcgtgcggtggaggactacggccggaacatcaagcagctggccagccgggcccagggcctgctgtctgcaggccaccctgagggggaacagatcatcagacttcaggggcaagtggacaagcactacgcagggctgaaggacgtggcggaagagcgcaagcgcaagctggagaacatgtaccacctgttccagctcaagcgggagaccgacgacctggagcagtggatttcagaaaaggagctagtggcctcttccccggaaatggggcaagactttgaccacgtgactcttctgcgggacaagttccgggactttgcccgggagaccggggcgattgggcaggagcgggtggacaatgtgaatgccttcatcgagcgactcatcgacgcgggccacagcgaggcggccaccatcgccgagtggaaggacgggctgaacgagatgtgggcagacctcctggagctcattgacacgcgcatgcagctgctggccgcctcctatgacctgcaccgctacttctacacgggtgccgagatcctgggcctcatcgacgagaagcaccgcgagctgcccgaggacgtggggctggacgccagcacggccgagtccttccaccgggtgcacacagccttcgagcgggagctccacctgctgggtgtccaggtgcagcagttccaggacgtggccacccgtctgcagacagcatatgctggggagaaggcagaggccatccagaacaaggagcaggaggtgtctgccgcgtggcaggcgctgctcgatgcctgtgccgggcgccggacccagctagtggacacggcggataaattccgcttcttcagcatggcccgtgacctcctctcctggatggagagcatcatccggcagatcgagacccaggagaggcccagggatgtctcctctgtggaactgctcatgaagtatcaccagggcatcaatgcagagattgaaacccggagcaagaacttcagtgcctgcctggagcttggcgagtccctgctgcagcggcagcaccaggcctcagaggagatccgcgagaaactgcagcaggtgatgtccaggaggaaagagatgaatgagaagtgggaagcccgctgggagcggctccgcatgttgctggaggtgtgccagttctcgagggatgcctctgtggctgaggcgtggctgattgcccaggagccctacctggccagcggggactttggacacacagtggacagtgtggagaagctcatcaagaggcatgaggcttttgagaagtccacggccagctgggcagagcgctttgctgccctggagaagcccaccacgcttgagctgaaagaacgccagattgcagagagacccgcagaggagactgggcctcaagaggaggaaggcgagacagcaggggaggctccagtttcccaccatgcggccaccgagagaacgtccccggtcagtctctggtctcgtttgtctagttcctgggagtcactgcagccagagccctctcacccctactaggctcagcccaggtggaggcgagatgagctggcgcagccccgccctccatcctccccacatccctgcagccacctcccagcagagcaggctacgtcctcactgaggtgttcttcatgagagtactagcctcctccactcctccccacagcgcagaggaaacaggccagcccagtgacatgacgttattagttttgttttacctaatgtaataaattttattgtataaatatatcaccatttacatgaggggaaacact

SEQ ID NO: 7410 - protein, 285 aa, Artificial Sequence
  derived and/or modified sequence
MLLATFKLCAGSSYRHMRNMKGLRQQAVMAISQELNRRALGGPTPSTWINQVRRRSSLLGSRLEETLYSDQELAYLQQGEEAMQKALGILSNQEGWKKESQQDNGDKVMSKVVPDVGKVFRLEVVVDQPMERLYEELVERMEAMGEWNPNVKEIKVLQKIGKDTFITHELAAEAAGNLVGPRDFVSVRCAKRRGSTCVLAGMATDFGNMPEQKGVIRAEHGPTCMVLHPLAGSPSKTKLTWLLSIDLKGWLPKSIINQVLSQTQVDFANHLRKRLESHPASEARC

SEQ ID NO: 7411 - protein, 247 aa, Artificial Sequence
  derived and/or modified sequence
MLLATFKLCAGSSYRHMRNMKGSRLEETLYSDQELAYLQQGEEAMQKALGILSNQEGWKKESQQDNGDKVMSKVVPDVGKVFRLEVVVDQPMERLYEELVERMEAMGEWNPNVKEIKVLQKIGKDTFITHELAAEAAGNLVGPRDFVSVRCAKRRGSTCVLAGMATDFGNMPEQKGVIRAEHGPTCMVLHPLAGSPSKTKLTWLLSIDLKGWLPKSIINQVLSQTQVDFANHLRKRLESHPASEARC

SEQ ID NO: 7412 - DNA, 858 bp, Artificial Sequence
  derived and/or modified sequence
atgctgctggccaccttcaagctgtgcgccggcagcagctacagacacatgagaaacatgaagggcctgagacagcaggccgtgatggccatcagccaggagctgaacagaagagccctgggcggccccacccccagcacctggatcaaccaggtgagaagaagaagcagcctgctgggcagcagactggaggagaccctgtacagcgaccaggagctggcctacctgcagcagggcgaggaggccatgcagaaggccctgggcatcctgagcaaccaggagggctggaagaaggagagccagcaggacaacggcgacaaggtgatgagcaaggtggtgcccgacgtgggcaaggtgttcagactggaggtggtggtggaccagcccatggagagactgtacgaggagctggtggagagaatggaggccatgggcgagtggaaccccaacgtgaaggagatcaaggtgctgcagaagatcggcaaggacaccttcatcacccacgagctggccgccgaggccgccggcaacctggtgggccccagagacttcgtgagcgtgagatgcgccaagagaagaggcagcacctgcgtgctggccggcatggccaccgacttcggcaacatgcccgagcagaagggcgtgatcagagccgagcacggccccacctgcatggtgctgcaccccctggccggcagccccagcaagaccaagctgacctggctgctgagcatcgacctgaagggctggctgcccaagagcatcatcaaccaggtgctgagccagacccaggtggacttcgccaaccacctgagaaagagactggagagccaccccgccagcgaggccagatgctag

SEQ ID NO: 7413 - DNA, 744 bp, Artificial Sequence
  derived and/or modified sequence
atgctgctggccaccttcaagctgtgcgccggcagcagctacagacacatgagaaacatgaagggcagcagactggaggagaccctgtacagcgaccaggagctggcctacctgcagcagggcgaggaggccatgcagaaggccctgggcatcctgagcaaccaggagggctggaagaaggagagccagcaggacaacggcgacaaggtgatgagcaaggtggtgcccgacgtgggcaaggtgttcagactggaggtggtggtggaccagcccatggagagactgtacgaggagctggtggagagaatggaggccatgggcgagtggaaccccaacgtgaaggagatcaaggtgctgcagaagatcggcaaggacaccttcatcacccacgagctggccgccgaggccgccggcaacctggtgggccccagagacttcgtgagcgtgagatgcgccaagagaagaggcagcacctgcgtgctggccggcatggccaccgacttcggcaacatgcccgagcagaagggcgtgatcagagccgagcacggccccacctgcatggtgctgcaccccctggccggcagccccagcaagaccaagctgacctggctgctgagcatcgacctgaagggctggctgcccaagagcatcatcaaccaggtgctgagccagacccaggtggacttcgccaaccacctgagaaagagactggagagccaccccgccagcgaggccagatgctag

SEQ ID NO: 7414 - DNA, 858 bp, Artificial Sequence
  derived and/or modified sequence
atgctgctggcaacctttaaactctgcgcagggtctagctacagacatatgaggaatatgaaggggttgcggcagcaggctgtgatggcgatttcccaggaattaaacaggcgcgctttaggcggaccaaccccatccacttggattaaccaggtccgacgcagaagcagtctgttgggctcccgtctcgaggagaccctttattccgaccaggaattggcctatctgcaacagggcgaagaggcaatgcagaaagctctgggcattctcagcaaccaggaaggctggaagaaagagtcccaacaggataacggggacaaggttatgagcaaggtggtgccagacgtgggcaaggtgtttcgactggaggtggtagtcgatcagcccatggagcggctctacgaggagctggtggagcggatggaggctatgggtgagtggaacccgaacgtgaaagaaatcaaggtgttacaaaaaatcggcaaggacaccttcattactcatgagctggccgccgaggctgctggcaatctggtggggcctagagattttgtgtctgtccgttgtgccaagagacgaggctccacgtgtgtcctagccggcatggccacagacttcggcaatatgcccgagcagaaaggagtcattagagccgagcatggtcccacatgtatggtgctgcatcccttggccggctcaccgtcaaagactaagctaacctggttgctgtccattgacctcaagggctggctacctaagtctatcataaatcaggtcttatcccaaacacaggtagactttgccaaccacctccggaaacggttggagtcccaccctgccagcgaggctcgatgttag

SEQ ID NO: 7415 - DNA, 744 bp, Artificial Sequence
  derived and/or modified sequence
atgctactggccacatttaagctgtgcgctgggtcttcctatcggcacatgcgaaacatgaagggaagcagacttgaagaaacgttatattctgaccaggaattggcctacctccagcagggtgaggaggccatgcagaaagccttagggatcttatctaatcaggagggttggaagaaagaatcgcagcaggataatggcgataaggttatgtcgaaggtggtgcctgatgtcggaaaagtttttaggctggaggtggtcgttgatcaacctatggaacgtctgtatgaagagctggtcgagcggatggaggctatgggagagtggaatcccaacgttaaagagatcaaggttctccagaaaatcggcaaggatactttcatcactcacgagctggccgctgaagcagcaggaaatctggtcggccctcgtgactttgtgtctgttcgatgcgcaaagcggcggggaagcacttgtgtcctcgcagggatggctactgattttgggaacatgcctgaacagaagggcgtcattagggctgaacacggccccacctgtatggtgctacatcctctggcggggtccccttctaaaacaaagctcacatggttgctgtctatcgacctcaaaggctggctccccaagtctataattaatcaggtgttgagtcagacccaagtggatttcgctaatcacctgaggaagagattggaatctcatccggcatcggaagctcgctgctag

SEQ ID NO: 7416 - DNA, 858 bp, Artificial Sequence
  derived and/or modified sequence
atgctgctggccaccttcaagctgtgtgccggcagcagctaccgccacatgaggaacatgaagggcctgcggcagcaggccgtgatggccatcagccaggagctgaacagaagagccctgggcggccccacccccagcacctggatcaaccaggtgagaagaagaagcagcctgctgggcagccggctggaggagaccctgtacagcgaccaggagctggcctacctgcagcagggcgaggaggccatgcagaaggccctgggcatcctgagcaaccaggagggctggaagaaggagagccagcaggacaacggggacaaggtgatgagcaaggtggtgcctgatgtgggcaaggtgttccggctggaggtggtggtggaccagcccatggagcggctgtatgaggagctggtggagaggatggaggccatgggagagtggaaccccaacgtgaaggagatcaaggtgctgcagaagattggcaaggacaccttcatcacccatgagctggccgctgaggccgccggcaacctggtgggcccccgggactttgtgtctgtgcgctgtgccaagaggcggggcagcacctgtgtgctggccggcatggccacagactttggaaacatgcctgagcagaagggcgtcatccgggcagagcacggccccacctgcatggtgctgcaccccctggccggcagccccagcaagaccaagctgacctggctgctgagcattgacctgaagggctggctgcccaagagcatcatcaaccaggtgctgagccagacccaggtggactttgccaaccacctgaggaagaggctggagagccacccagccagcgaggcccgctgctag

SEQ ID NO: 7417 - DNA, 744 bp, Artificial Sequence
  derived and/or modified sequence
atgctgctggccaccttcaagctgtgtgccggcagcagctaccgccacatgaggaacatgaagggcagccggctggaggagaccctgtacagcgaccaggagctggcctacctgcagcagggcgaggaggccatgcagaaggccctgggcatcctgagcaaccaggagggctggaagaaggagagccagcaggacaacggggacaaggtgatgagcaaggtggtgcctgatgtgggcaaggtgttccggctggaggtggtggtggaccagcccatggagcggctgtatgaggagctggtggagaggatggaggccatgggagagtggaaccccaacgtgaaggagatcaaggtgctgcagaagattggcaaggacaccttcatcacccatgagctggccgctgaggccgccggcaacctggtgggcccccgggactttgtgtctgtgcgctgtgccaagaggcggggcagcacctgtgtgctggccggcatggccacagactttggaaacatgcctgagcagaagggcgtcatccgggcagagcacggccccacctgcatggtgctgcaccccctggccggcagccccagcaagaccaagctgacctggctgctgagcattgacctgaagggctggctgcccaagagcatcatcaaccaggtgctgagccagacccaggtggactttgccaaccacctgaggaagaggctggagagccacccagccagcgaggcccgctgctag

SEQ ID NO: 7418 - DNA, 858 bp, Artificial Sequence
  derived and/or modified sequence
atgctgctggccaccttcaagctgtgcgccggcagcagctaccggcacatgagaaacatgaagggtctgagacagcaggcagtcatggccatctcgcaggagttgaatcggagagccctaggcggccccactccgtctacctggattaatcaggtccgccggcggagcagcttgctggggtcccggctggaggagaccctgtacagtgaccaggagttggcctacttgcagcaaggtgaagaagccatgcaaaaggccctgggtattctgtcaaatcaggaggggtggaagaaggagtcccagcaggacaacggcgacaaagttatgtcaaaagtggtgccggatgtggggaaagtcttccggctcgaagttgtcgtggatcagccaatggagcgcctatacgaggaactcgtggaaagaatggaagcgatgggtgagtggaaccccaatgtgaaggaaattaaggtgttgcaaaagatcgggaaggacacctttataacccatgagttagccgccgaagccgccggtaatctggtcgggccccgggatttcgtgagcgtaaggtgtgccaagagaagaggttcaacttgcgtgctcgcagggatggcaacagattttgggaatatgcccgaacagaagggggtgatcagagcggaacacggcccaacttgcatggtactgcaccccttggcaggatcaccctctaagactaagctgacatggctcttgtctatcgatctgaagggatggttacccaaaagcatcattaaccaggtactctctcagacacaggtagattttgctaatcacttgcggaagaggctcgaatcccatccagcctctgaagcccggtgttag

SEQ ID NO: 7419 - DNA, 744 bp, Artificial Sequence
  derived and/or modified sequence
atgctgctggccaccttcaagctgtgcgccggcagcagctaccggcacatgcgtaatatgaagggttctcggctggaggagactctttacagtgatcaagagctcgcttatctccaacaaggtgaagaagcaatgcaaaaggcgctggggattctgagcaatcaagagggttggaagaaggaatctcaacaggataatggagataaagtgatgtcaaaagtggtgccggatgttggcaaagttttcaggttagaggtggtcgtcgaccagcccatggaaaggctgtacgaggagttagtagaaaggatggaagcaatgggagagtggaatcccaatgtgaaagaaattaaagttctccagaagattggcaaggatacttttatcacccacgagctcgccgccgaggcagcgggcaatctcgtcggcccgagggactttgtttctgtgcgttgcgccaagcgacgtggttccacctgcgtgctcgctggtatggcaactgactttgggaacatgccagaacagaagggagtgatccgagctgagcacggtccgacgtgcatggtcctccatccattggctggatctccttccaaaactaaattgacttggcttctctctatcgacctcaaggggtggctgcccaagtctatcattaatcaggtcttgagccaaacccaggtggacttcgctaaccacttaagaaagcggctggagagccaccccgctagcgaggcacgttgttag

SEQ ID NO: 7420 - DNA, 858 bp, Artificial Sequence
  derived and/or modified sequence
atgttgctcgcaacattcaagctctgcgccggatcatcttatagacatatgcgtaatatgaaaggcctacgccaacaggccgtgatggccatctcccaggagctgaacagacgagcgctcggcggtcccacaccgtctacctggatcaatcaggttcgtaggaggtcgagcctacttggttcgcgtcttgaggaaacactgtactcagatcaggagctggcttacttacaacaaggagaagaagcaatgcagaaagccctcggcattctaagtaaccaggaggggtggaaaaaggaatcgcagcaggacaatggggacaaggtgatgtctaaagtcgtacctgatgtcgggaaggtgtttcgcttggaagtggtcgtcgatcaacccatggagcgcttgtatgaggagctggtggagaggatggaagcaatgggggaatggaacccgaacgtgaaggagattaaagtgctgcaaaagattggcaaagacacatttattacccatgagctggccgctgaagccgctggcaacctggtgggtcctagagattttgtctcagtaaggtgcgccaaacggcgaggttcaacttgcgtgctggcagggatggcaacggattttggcaacatgcccgaacagaaaggtgttatccgggctgagcatggtcccacctgtatggtgctgcacccgcttgccggaagcccttctaagacaaaactcacctggcttctttcgattgatctgaaaggttggttaccaaaatcaatcattaaccaggtgctgagccagacacaggtggatttcgccaatcatctgcgtaaaaggctggagtcacatccggctagtgaagctagatgctag

SEQ ID NO: 7421 - DNA, 744 bp, Artificial Sequence
  derived and/or modified sequence
atgttgctggcaacctttaaactatgtgcgggtagctcctatcgccatatgaggaacatgaaaggcagccggctggaggaaaccctgtacagcgatcaggaactggcttatttgcagcagggggaggaggccatgcagaaagctctcggcattctgagcaatcaggagggttggaaaaaggagtcacagcaagataatggtgataaggttatgtcgaaggtggtccctgatgtcgggaaagtgtttaggctcgaggtagtggtggaccagcctatggagcggctgtacgaagagcttgttgagcgcatggaggccatgggggaatggaaccctaacgtgaaagagataaaggtgctgcagaaaattggaaaggatacctttattactcatgagttggctgctgaggccgctgggaatctggtcggtcctagagatttcgtcagcgtcaggtgtgctaaaagaagaggatcaacctgcgtgcttgccggtatggctactgactttgggaacatgcctgagcaaaagggagtgatcagagccgagcatggacctacctgtatggtcctccatccacttgcaggtagccctagcaaaactaaactcacttggctcctctccatcgaccttaagggatggttacccaaaagcatcataaaccaggtgttgtcacagacccaggtggattttgccaaccatctacggaagcggctcgaaagtcaccctgctagcgaagcacggtgttag

SEQ ID NO: 7422 - DNA, 1929 bp, Artificial Sequence
  derived and/or modified sequence
agctgagcctggagtttctgaagacaagggctagaaatctgcactttaaagtcttgaaaaccactgtgtgccttcatctaagctgcccctgcttctctcccctccatccctcgcctggccctgtcctccctactctcccctgcaccctcccccgccccaagctccccacaaacggccaaagcagcagtgtgaggcaatcgctctatccttgaccccttcctttgcacagtgagtgatggcgtttttatctcctgatgatgatgcacagccttcagcgggggacatttaagacgcagaacaccaggtccaggctgcagctgcgggactcagaggcgaagcttgaggggctcaggaaggacgaagaaccacccttgagagaagaggcagcagcagcggcggcagcagcagcggcagcgaccccaccactgccacatttgccaggaaacaatgctgctagcgacattcaagctgtgcgctgggagctcctacagacacatgcgcaacatgaaggggctgaggcaacaggctgtgatggccatcagccaggagctgaaccggagggccctggggggccccacccctagcacgtggattaaccaggttcggcggcggagctctctactcggttctcggctagaagagactctctacagtgaccaggagctggcctatctccagcagggggaggaggccatgcagaaggccttgggcatccttagcaaccaagagggctggaagaaggagagtcagcaggacaatggggacaaagtgatgagtaaagtggtcccagatgtgggcaaggtgttccggctggaggtcgtggtggaccagcccatggagaggctctatgaagagctcgtggagcgcatggaagcaatgggggagtggaaccccaatgtcaaggagatcaaggtcctgcagaagatcggaaaagatacattcattactcacgagctggctgccgaggcagcaggaaacctggtggggccccgtgactttgtgagcgtgcgctgtgccaagcgccgaggctccacctgtgtgctggctggcatggccacagacttcgggaacatgcctgagcagaagggtgtcatcagggcggagcacggtcccacttgcatggtgcttcacccgttggctggaagtccctctaagaccaaacttacgtggctactcagcatcgacctcaaggggtggctgcccaagagcatcatcaaccaggtcctgtcccagacccaggtggattttgccaaccacctgcgcaagcgcctggagtcccaccctgcctctgaagccaggtgttgaagaccagcctgctgttcccaactgtgcccagctgcactggtacacacgctcatcaggagaatccctactggaagcctgcaagtctaagatctccatctggtgacagtgggatgggtggggttcgtgtttagagtatgacactaggattcagattggtgaaagtttttagtaccaagaaaacagggatgaggctcttggattaaaaggtaacttcattcactgattagctatgacatgagggttcaggcccctaaaataattgtaaaactttttttctgggcccttatgtacccacctaaaaccatctttaaaatgctagtggctgatatgggtgtgggggatgctaaccacagggcctgagaagtcttgctttatgggctcaagaatgccatgcgctggcagtacatgtgcacaaagcagaatctcagagggtctcctgcagccctctgctcctcccggccgctgcacagcaacaccacagaacaagcagcaccccacagtgggtgccttccagaaatatagtccaagctttctctgtggaaaaagacaaaactcattagtagacatgtttccctattgctttcataggcaccagtcagaataaagaatcataattcacacaaa

SEQ ID NO: 7423 - DNA, 1567 bp, Artificial Sequence
  derived and/or modified sequence
gtgatggcgtttttatctcctgatgatgatgcacagccttcagcgggggacatttaagacgcagaacaccaggtccaggctgcagctgcgggactcagaggcgaagcttgaggggctcaggaaggacgaagaaccacccttgagagaagaggcagcagcagcggcggcagcagcagcggcagcgaccccaccactgccacatttgccaggaaacaatgctgctagcgacattcaagctgtgcgctgggagctcctacagacacatgcgcaacatgaagggttctcggctagaagagactctctacagtgaccaggagctggcctatctccagcagggggaggaggccatgcagaaggccttgggcatccttagcaaccaagagggctggaagaaggagagtcagcaggacaatggggacaaagtgatgagtaaagtggtcccagatgtgggcaaggtgttccggctggaggtcgtggtggaccagcccatggagaggctctatgaagagctcgtggagcgcatggaagcaatgggggagtggaaccccaatgtcaaggagatcaaggtcctgcagaagatcggaaaagatacattcattactcacgagctggctgccgaggcagcaggaaacctggtggggccccgtgactttgtgagcgtgcgctgtgccaagcgccgaggctccacctgtgtgctggctggcatggccacagacttcgggaacatgcctgagcagaagggtgtcatcagggcggagcacggtcccacttgcatggtgcttcacccgttggctggaagtccctctaagaccaaacttacgtggctactcagcatcgacctcaaggggtggctgcccaagagcatcatcaaccaggtcctgtcccagacccaggtggattttgccaaccacctgcgcaagcgcctggagtcccaccctgcctctgaagccaggtgttgaagaccagcctgctgttcccaactgtgcccagctgcactggtacacacgctcatcaggagaatccctactggaagcctgcaagtctaagatctccatctggtgacagtgggatgggtggggttcgtgtttagagtatgacactaggattcagattggtgaaagtttttagtaccaagaaaacagggatgaggctcttggattaaaaggtaacttcattcactgattagctatgacatgagggttcaggcccctaaaataattgtaaaactttttttctgggcccttatgtacccacctaaaaccatctttaaaatgctagtggctgatatgggtgtgggggatgctaaccacagggcctgagaagtcttgctttatgggctcaagaatgccatgcgctggcagtacatgtgcacaaagcagaatctcagagggtctcctgcagccctctgctcctcccggccgctgcacagcaacaccacagaacaagcagcaccccacagtgggtgccttccagaaatatagtccaagctttctctgtggaaaaagacaaaactcattagtagacatgtttccctattgctttcataggcaccagtcagaataaagaa

SEQ ID NO: 7424 - protein, 583 aa, Artificial Sequence
  derived and/or modified sequence
MPLRKMKIPFLLLFFLWEAESHAASRPNIILVMADDLGIGDPGCYGNKTIRTPNIDRLASGGVKLTQHLAASPLCTPSRAAFMTGRYPVRSGMASWSRTGVFLFTASSGGLPTDEITFAKLLKDQGYSTALIGKWHLGMSCHSKTDFCHHPLHHGFNYFYGISLTNLRDCKPGEGSVFTTGFKRLVFLPLQIVGVTLLTLAALNCLGLLHVPLGVFFSLLFLAALILTLFLGFLHYFRPLNCFMMRNYEIIQQPMSYDNLTQRLTVEAAQFIQRNTETPFLLVLSYLHVHTALFSSKDFAGKSQHGVYGDAVEEMDWSVGQILNLLDELRLANDTLIYFTSDQGAHVEEVSSKGEIHGGSNGIYKGGKANNWEGGIRVPGILRWPRVIQAGQKIDEPTSNMDIFPTVAKLAGAPLPEDRIIDGRDLMPLLEGKSQRSDHEFLFHYCNAYLNAVRWHPQNSTSIWKAFFFTPNFNPVGSNGCFATHVCFCFGSYVTHHDPPLLFDISKDPRERNPLTPASEPRFYEILKVMQEAADRHTQTLPEVPDQFSWNNFLWKPWLQLCCPSTGLSCQCDREKQDKRLSR

SEQ ID NO: 7425 - DNA, 1752 bp, Artificial Sequence
  derived and/or modified sequence
atgcccctgagaaagatgaagatccccttcctgctgctgttcttcctgtgggaggccgagagccacgccgccagcagacccaacatcatcctggtgatggccgacgacctgggcatcggcgaccccggctgctacggcaacaagaccatcagaacccccaacatcgacagactggccagcggcggcgtgaagctgacccagcacctggccgccagccccctgtgcacccccagcagagccgccttcatgaccggcagataccccgtgagaagcggcatggccagctggagcagaaccggcgtgttcctgttcaccgccagcagcggcggcctgcccaccgacgagatcaccttcgccaagctgctgaaggaccagggctacagcaccgccctgatcggcaagtggcacctgggcatgagctgccacagcaagaccgacttctgccaccaccccctgcaccacggcttcaactacttctacggcatcagcctgaccaacctgagagactgcaagcccggcgagggcagcgtgttcaccaccggcttcaagagactggtgttcctgcccctgcagatcgtgggcgtgaccctgctgaccctggccgccctgaactgcctgggcctgctgcacgtgcccctgggcgtgttcttcagcctgctgttcctggccgccctgatcctgaccctgttcctgggcttcctgcactacttcagacccctgaactgcttcatgatgagaaactacgagatcatccagcagcccatgagctacgacaacctgacccagagactgaccgtggaggccgcccagttcatccagagaaacaccgagacccccttcctgctggtgctgagctacctgcacgtgcacaccgccctgttcagcagcaaggacttcgccggcaagagccagcacggcgtgtacggcgacgccgtggaggagatggactggagcgtgggccagatcctgaacctgctggacgagctgagactggccaacgacaccctgatctacttcaccagcgaccagggcgcccacgtggaggaggtgagcagcaagggcgagatccacggcggcagcaacggcatctacaagggcggcaaggccaacaactgggagggcggcatcagagtgcccggcatcctgagatggcccagagtgatccaggccggccagaagatcgacgagcccaccagcaacatggacatcttccccaccgtggccaagctggccggcgcccccctgcccgaggacagaatcatcgacggcagagacctgatgcccctgctggagggcaagagccagagaagcgaccacgagttcctgttccactactgcaacgcctacctgaacgccgtgagatggcacccccagaacagcaccagcatctggaaggccttcttcttcacccccaacttcaaccccgtgggcagcaacggctgcttcgccacccacgtgtgcttctgcttcggcagctacgtgacccaccacgacccccccctgctgttcgacatcagcaaggaccccagagagagaaaccccctgacccccgccagcgagcccagattctacgagatcctgaaggtgatgcaggaggccgccgacagacacacccagaccctgcccgaggtgcccgaccagttcagctggaacaacttcctgtggaagccctggctgcagctgtgctgccccagcaccggcctgagctgccagtgcgacagagagaagcaggacaagagactgagcagatag

SEQ ID NO: 7426 - DNA, 1752 bp, Artificial Sequence
  derived and/or modified sequence
atgcccctgcgaaaaatgaaaattccatttcttctcctgtttttcctgtgggaagccgagtcccacgcggcaagtaggcccaacattatactggtaatggccgatgatctcggtatcggtgatcctgggtgttacgggaataaaaccatccggactcccaacatcgacagactggcttccggcggcgtcaagttgactcagcatctggcagcttcacctctgtgcacgcctagtcgagccgcgtttatgaccggacggtaccccgtccggtcaggcatggcctcctggagtaggaccggcgtcttcctttttaccgccagctccggcggccttcctaccgatgagataaccttcgcgaaactgctcaaggaccaaggctacagtacagcacttattgggaagtggcaccttgggatgagttgtcactcaaagactgacttttgccatcatccgttacatcacggttttaactatttctacggaatctctctgactaatttaagggattgtaagcccggggaaggctccgtgtttaccactggctttaaaagactcgtcttcctacccttacagattgtgggcgtcaccctactaaccctggccgcactcaattgcttgggtttgttgcacgtgcctctgggagtgttcttctctctcttgttcctcgccgcactgattcttacgctgttcctcggctttcttcattacttccgtccactaaattgttttatgatgaggaactacgagatcatacagcaacccatgtcatatgacaacctcacccaaaggctgaccgttgaagctgctcaatttatccagagaaacacagaaacccctttcctgctggtcctgtcatatttgcacgttcacacagccctgttttcttccaaggatttcgccggcaagtcccaacacggcgtttatggcgatgccgtcgaagaaatggattggtccgtaggccagatactgaatctgctcgacgaactgcgcctggccaatgacactcttatctattttacgtcagaccagggcgcacatgttgaggaggtgagctcaaagggtgaaatccacggaggaagtaacggcatttataagggcgggaaagccaacaattgggaagggggcatacgggtccctggcattctgaggtggcccagggtgatacaggctggccagaagattgacgaacccacctccaatatggatatcttccctaccgtagcaaagttagccggagcccctctgcctgaggatcgaattatcgatggtcgggacttgatgccactcctcgagggaaaatctcaacgttccgaccatgaattcctgtttcattactgcaacgcatatttgaatgccgtgagatggcatccccagaattccacgagcatctggaaagctttcttcttcacccccaactttaaccccgtgggaagcaacggttgttttgccacccacgtgtgcttctgctttggaagctacgtaacccatcatgacccgccattgcttttcgacattagtaaggacccgcgggaacggaacccacttacgccggcgtcagagcctcgtttctacgagattttaaaagtgatgcaggaagccgctgacaggcatacccagacactgcccgaggtacccgatcaattctcgtggaacaattttctgtggaagccctggctccaactctgctgtcctagcaccgggttatcctgccagtgcgatcgcgagaagcaggacaaacggctgtctcgatag

SEQ ID NO: 7427 - DNA, 1752 bp, Artificial Sequence
  derived and/or modified sequence
atgcccctgaggaagatgaagatccccttcctgctgctcttcttcctgtgggaggccgagagccatgctgccagccggcccaacatcatcctggtgatggctgatgacctgggcattggagaccccggctgctacggcaacaagaccatccgcacccccaacatcgaccggctggccagcggcggcgtgaagctgacccagcacctggccgccagccccctgtgcacccccagccgggccgccttcatgacaggccgctaccctgtgcgcagcggcatggcctcctggagcaggactggagtcttcctgttcaccgccagcagcggcggcctgcccacagatgagatcacctttgccaagctgctgaaggaccagggctacagcacagccctgattggcaagtggcacctgggcatgagctgccacagcaagacagacttctgccaccaccccctgcaccacggcttcaactacttctacggcatcagcctgaccaacctgcgggactgcaagccaggagagggcagcgtcttcaccaccggcttcaagaggctggtgttcctgcccctgcagatcgtgggcgtgaccctgctgaccctggccgccctgaactgcctgggcctgctgcacgtgcccctgggcgtcttcttcagcctgctcttcctggccgccctgatcctgaccctcttcctgggcttcctgcactacttccggcccctgaactgcttcatgatgaggaactatgagatcatccagcagcccatgtcctatgacaacctgacccagaggctgactgtggaggccgcccagttcatccagaggaacacagagacccccttcctgctggtgctgagctacctgcacgtgcacacagccctcttcagcagcaaggactttgctgggaagagccagcacggcgtgtatggagatgctgtggaggagatggactggagcgtgggccagatcctgaacctgctggatgagctgcggctggccaatgacaccctcatctacttcaccagtgaccagggcgcccacgtggaggaggtgagcagcaaaggagagatccatggaggcagcaatggcatctacaagggcggcaaggccaacaactgggagggcggcatccgggtgcccggcatcctgcgctggcccagggtcatccaggccggccagaagattgatgagcccaccagcaacatggacatcttccccaccgtggccaagctggccggggcccccctgcctgaagatcgcatcattgatggccgggacctgatgcccctgctggagggcaagagccagaggagtgaccacgagttcctgttccactactgcaatgcctacctgaatgctgtgcgctggcacccccagaacagcaccagcatctggaaggccttcttcttcacccccaacttcaaccctgtgggcagcaatggctgctttgccacccacgtgtgcttctgcttcggcagctatgtgacccaccacgacccccccctgctgtttgacatcagcaaggacccccgggagaggaaccccctgaccccagccagcgagccccgcttctatgagatcctgaaggtgatgcaggaggccgctgacagacacacccagaccctgcctgaggtgcctgaccagttctcctggaacaacttcctgtggaagccctggctgcagctgtgctgccccagcacaggcctgagctgccagtgtgaccgggagaagcaggacaagaggctgagcaggtag

SEQ ID NO: 7428 - DNA, 1752 bp, Artificial Sequence
  derived and/or modified sequence
atgcccctgcggaagatgaagatccccttcctgctgctgttcttcctctgggaggcagagtctcatgctgcctcgcggcctaatattattctggtgatggctgacgatttgggaattggagatcctggatgctatggaaacaagactattcgcaccccgaacatcgatagattggcctccggcggagtgaagctgactcagcatctcgcagctagccctctttgtacaccttcccgggccgcttttatgacaggccggtacccggttcgatcaggtatggcctcttggtcacggacgggggtgttcttgttcactgcttcttccggtggactgccgaccgacgaaattacgttcgcaaagctgctgaaggatcaaggctatagcacagctctgatcgggaaatggcatcttgggatgagttgccatagtaagactgatttctgccatcatccactgcaccatggattcaattacttctatggaattagtttgaccaatttgagggactgcaagccaggggaagggagcgtgtttacaaccggtttcaagcgattagttttcctgcccctacagatcgtgggtgtgaccctgttgacgttagctgcgctgaactgcctgggattattgcacgtccctctgggcgtctttttcagcctgctgtttctggccgcgctgatcctgacactgttcctgggttttctgcactattttagaccccttaattgcttcatgatgaggaattacgagatcatccagcaaccaatgtcttatgataatctgactcagaggctaacggtcgaggcggcacagtttatccaacggaatactgagaccccattcctgttagtgctgtcttatcttcatgtgcacaccgctctattcagcagcaaggacttcgcaggcaagagtcagcatggggtgtacggagatgcggttgaggagatggactggagcgtcggacagattctgaatctcctcgacgagctgcggcttgcaaatgatacattgatctattttacgtctgatcaaggcgcccacgtggaggaagtaagtagcaaaggggaaatccatggaggatcaaatgggatatataaggggggtaaagcaaacaactgggaggggggaattagggttcccggcattctgcggtggccccgggtgatacaggcaggtcagaagatcgacgagcctaccagcaatatggatatattcccaacggttgctaagcttgctggggccccactcccagaagataggataatcgatggccgcgacttgatgccactcctggaggggaagagtcagcggagcgaccacgagttcctgtttcactactgcaacgcttatctgaacgctgtaagatggcatcctcaaaatagcacgtcgatctggaaagccttcttctttacacctaatttcaatcctgtggggagtaacggctgtttcgctacccacgtgtgcttttgttttgggagctatgttacacaccacgaccctcccctgcttttcgatattagtaaagatcctagggagaggaatccactgacccctgcaagcgagccccgcttctacgagatcctgaaggttatgcaagaagccgctgatcgccacactcagaccttgcccgaagttccggatcagtttagttggaataatttcctttggaaaccgtggctgcagctttgctgccccagcaccggactatcatgtcagtgcgacagagaaaaacaggataagaggctgtcccggtag

SEQ ID NO: 7429 - DNA, 1752 bp, Artificial Sequence
  derived and/or modified sequence
atgcctttgcgaaagatgaagattccatttctgttacttttcttcttatgggaggccgaatcgcatgccgctagccgcccaaatataattctcgtcatggctgatgacttgggtataggagatccaggctgctacgggaacaagactatcaggaccccaaatatcgataggctggctagcgggggagtgaaattgacacaacatctggccgcttctccactgtgtacacctagccgggcagcctttatgacgggtcgttaccctgtgcgcagtggtatggcctcctggtctcgtacgggagtgtttctatttacggcctcttcaggtggtctgcccaccgacgaaattacgttcgcaaaacttctgaaggaccagggctactcaactgccctgatagggaagtggcacttggggatgtcttgccatagcaagaccgacttttgtcatcatccgctgcatcacgggttcaattacttctacggaatttctttgacaaacctccgcgattgtaagcccggagaaggctctgtgttcactacgggcttcaagcggctagtcttcttgcccctgcaaatcgttggggtgaccttgctcactttagctgcactcaactgtcttggcctattgcacgtacccctgggcgtttttttttctctgctctttcttgctgccttaatcctaaccctatttttgggatttctgcattattttcgacctctgaactgcttcatgatgagaaattatgaaattattcagcagcctatgagctatgataacctcacacaaaggctgacagtggaggccgctcagtttattcagcggaatactgagaccccatttttgttagttctcagctatctgcatgtccacactgccctgtttagctctaaagactttgcaggaaagagccagcacggcgtgtatggagacgccgtggaggaaatggattggagcgtaggccagatcctgaacctactggatgaacttcgtctggccaatgatactctcatctatttcacaagtgaccagggagcccatgtagaggaggtctcttcaaagggcgagatccatggtggaagtaatggcatttataaaggagggaaagccaacaattgggagggaggcatccgggtgcctggtatactgaggtggccaagagtcattcaggccggacagaagattgacgaaccgactagtaatatggatatattcccaacggtggcaaagttggctggcgctccactgcctgaagacaggatcattgatgggagggacctgatgcctctactcgagggcaagtcccaacgcagcgatcatgagtttttgttccactattgcaatgcgtacctgaacgccgtcagatggcatccgcagaatagcactagcatctggaaggcctttttctttacacccaacttcaaccctgtcggttctaacgggtgtttcgcgactcatgtgtgtttctgctttggttcgtatgtgacacatcacgacccgccattgctgttcgatatctcaaaagacccaagggagagaaatcccttgacccccgcttccgaacctcgcttttacgaaatcctgaaggttatgcaggaggcggcagaccgccatactcagaccttgcctgaagtgcccgaccagtttagttggaacaacttcctctggaagccttggctgcagctctgctgcccatccaccggactctcctgtcaatgcgaccgcgagaaacaggacaaaagactctcacgctag

SEQ ID NO: 7430 - DNA, 6521 bp, Artificial Sequence
  derived and/or modified sequence
acagtgctgttggccaagcctccagcagctgacgggacccagctgtagtgaggttgcagtgattgagtaggattggcctgcttcaaagcagaggtttctcatgggaatatgcttattaaactcccactggtgcagaaaccatgaacagaggatgaacaagtgaagttgcaatctcctccatcacagctcagttccccaacaacaggatcacaagctggagatgcctttaaggaagatgaagatccctttcctcctactgttctttctgtgggaagccgagagccacgcagcatcaaggccgaacatcatcctggtgatggctgacgacctcggcattggagatcctgggtgctatgggaacaaaactatcaggactcccaatatcgaccggttggccagtgggggagtgaaactcactcagcacctggcagcatcaccgctgtgcacaccaagcagggcagccttcatgactggccggtaccctgtccgatcaggaatggcatcttggtcccgcactggagttttcctcttcacagcctcttcgggaggacttcccaccgatgagattacctttgctaagcttctgaaggatcaaggttattcaacagcactgatagggaaatggcaccttgggatgagctgtcacagcaagactgacttctgtcaccaccctttacatcacggcttcaattatttctatgggatctctttgaccaatctgagagactgcaagcccggagagggcagtgtcttcaccacgggcttcaagaggctggtcttcctccccctgcagatcgtcggggtcaccctccttacccttgctgcactcaattgtctggggctactccacgtgcctctaggcgtttttttcagccttctcttcctagcagccctaatcctgacccttttcttgggcttccttcattacttccggcccctgaactgcttcatgatgaggaactacgagatcattcagcagcccatgtcctatgacaatctcacccagaggctaacggtggaggcggcccagttcatacagcggaacactgagactccgttcctgcttgtcttgtcctacctccacgtgcacacagccctgttctccagcaaagactttgctggcaaaagtcaacacggagtctacggggatgctgttgaggaaatggactggagtgtggggcagatcttgaaccttctggatgagctgagattggctaatgataccctcatctacttcacatcggaccagggagcacatgtagaagaagtgtcttccaaaggagaaattcatggcggaagtaatgggatctataaaggaggaaaagcaaacaactgggaaggaggtatccgggttccaggcatccttcgttggcccagggtgatacaggctggccagaagattgatgagcccactagcaacatggacatatttcctacagtagccaagctggctggagctcccttgcctgaggacaggatcattgatggacgtgatctgatgcccctgcttgaaggaaaaagccaacgctccgatcatgagtttctcttccattactgcaacgcctacttaaatgctgtgcgctggcaccctcagaacagcacatccatctggaaggcctttttcttcacccccaacttcaaccccgtgggttccaacggatgctttgccacacacgtgtgcttctgtttcgggagttatgtcacccatcacgacccacctttactctttgatatttccaaagatcccagagagagaaacccactaactccagcatccgagccccggttttatgaaatcctcaaagtcatgcaggaagctgcggacagacacacccagaccctgccagaggtgcccgatcagttttcatggaacaactttctttggaagccctggcttcagctgtgctgtccttccaccggcctgtcttgccagtgtgatagagaaaaacaggataagagactgagccgctagcagcgcctggggaccagacagacgcatgtggcaaagctcaccatcttcactacaaacacgcctgagagtggcactggggaaacataactccatctacaccttggatttggactgattctccattttatcacctgaaggcttgggccagagctcaacagctactcaactggaggggtgagggggataaggtctgtagtatacagacaggaagatggtaggtttatgccttctgtggccagagtcttggactcatggaaatagaatgaatagaggggcattcacaaggcacaccagtgcaagcagatgacaaaaaggtgcagaaggcaatcttaaaacagaaaggtgcaggaggtaccttaactcacccctcagcaaatacctatgtcaacagtataagttaccatttactctataatctgcagtgatgcaataaccagcataataaaaaggcaatcacataaaaaagagtttagtcgtctaaacataagtaactttaaggtgaatgaaagatcttctttaggaataatagatgatggtaagttccactttggttattggaaggcaagtcattattactggtattagttaaaacacatatcaaatgcttgctcttcatcatatatatagttatgcatacatacacacacacacatacagtatattctttcctcaaaagggttaagatgtctaaaatagggacctagaagcttaacactatttaagtaaatacagtagaagctcacaaatagatttctttgcacaatgattttttgcaaaattttacagtaataataatcccaaggcaaatctctcctgaactgctttccattccataatttgtagtataattcttggattccactgttttctttggggaatggaagttctgaattaaaagcccactgtggagatgctgtggttcatggaatctcttccagtgtaattcagaatcattggcctagaaagtctctgatatttggaggggaacaaaaatcactcacaagcaatccatgatctatacacataagcataatttcctttagttctagttagtcatcagagaacagtcatgtatgcaagttttgtgactgagaaatttctgtgcttccaatccacaatgagatgcatgattttgttttcatcccatttcccccaagcccctgtaaatcagggaaaatgcgcaactgatcgcctaggagagggcctcgtagtggcacagctggagatagtttcaaagtctaaaccaccagcccatcctgaggaaagcctcctatggaatgtaaagtgcaatcatttcttcagatataagactttccccaacaatgtgattggattcctttatggcaaaatcgagagaagctgccatccacctgcttatgcatttatctcttttgtggacttgtctgaccaccttctatttgcccagagtttgctcaattccaagacagtgcccatgaatgggacacctgtaatgtaacccacacagcggtttgcagagaatgttagccatgacttgggctttctgaaagttggctataatttctctatccctacccacaaccctgggaagttggagcaagaggggcatactattgggctgggaggatttgacagcatttccccagttgccctttaagttcttctatttcaaacgttaattttgcttctctttctaaaaaaaaaaaaaaaaaagaaagagaagaaagaagtgattcctaccccctacctccagagttgttgaaagctgaaaagcatacaagattcttccttttaacttggatttctcgttccagaaattgtgggataatctgtattcttgctttagaaaacattcttagagagggtactagcttactgatgatgtgttaggattgctactgatgctgtcatgtggaaactatttaaaggcactattataaatttatcctataagatgacaatgtttactcaaagtctaacatattcaatgcaagtaagactttctgaaaacacttgatgatgtggaaatgctgcaggattaaataacttgaagagcctttatagattatatgaatgcctatttgtgtctagaaccagttatttaacctgtaaaatgtcaatagcaaatgaaggatgaagtatatctctagatgcaaatacattgagtttaaaagtgcctcaaaataattgagatcacatttcaggacatttggaaatcaggtcgatttgtggtaactgtagtcatcttaaatttcaaaccatttaccatctgaaagttttgatttgaatgtaaaacaggaaattggaattcctttgtccaggagaaacctcacaaaccttctttaaggcatagttttgttgtttgtttgcttgtttgttgcaggctgtaaggcatggctgcttgtttacaaagcatctcattcatattacctgtggagttgcatatccaaaccttagtgagttttgaagctttaagcaaattcttttaaaaaattcttgtatttctagcattactagatattaaaagttaagcaaatagattaatgacgtatacataggcatcatttcacaaggtcagtaatgctgcaggaaaagcaaaattgcaatctacgtatctatggtactaaggaagtcctgtttttcaaaaatggaagcccacttctcagatttttctgaagggcatacaatgaaaagtgaaggggaaacacacacacacaaaaaaacaagtatttggcttgtcacaggaatctgattgcattaagtgaaaggattatttagaatatgttaatgcaaagctaaaataaaattttccttggcaattaaaaatgctgtgcgctaataccctgctttctatcgtgactcaattcaacaatgtggggaatgtttactacatttccaacttgatgtcaagcaatggggaatacaagttccagttctgcaaagattcgtcaactttcttagctcaagagagaggctgagaaatgcagagaagaataagacataaaatagctccgacctccatgatccgagagtgggaaaaggcccgattattacccataaggcacactctctaaggccttttaaggggcctacaaaaatgttttattttataatcagaagaaaaggaaatgaacattggggattgaaaatcatattggtatttgcaccaacatagtcataaaatagtatgttaatatgtttttactttatatatttatatattaaaatatatttaatatgttttgcctttgtggcccatgaaagtcttactgggccctggggaaggtatcctaccctggtgaagcagctgctttgctctacaaatacctggggcagaaatttgatttgaaaagtattattctctcttctctttgtttcaactggattcctttggaaaaccaaactagtatcagaacaaaccccgaaacagtaagaaattggagtgagaagggcatggtattgggactaggatcggctctcattcgatcgagctattctcttaaaatgacaaaaagtgtccataaagaggctgctggagagtgcgtggccatagggagccgacatgcccgggaggaaaggtgttgattacatggatacttctaaaagctaaagccttgttgccttctctttaatgcctagagaatgggatgtgtgatgcaaatgctcaaaacctcttaaatcatagctgtctgacctctacggacctcacatccatctgaggcttcatggacaaagattctccacttggccaaactttagccaagctcctcaaccttctcccaggcccaatctgggcacttccttgtaaaatctagttttggcaagaagtctattaggtcagtttagcaagaacacctaacccccccatatctgttcaacctcagtatctgatcaggctcctcagcctccaccatcccccaggtgatgtctggtcaactggcctgccttcagctagaatcctgttaggtcggtttagatgaatgctccctgatatttcctcttggtaatcttccatccactgcccctgaccctgttccctgtctataaatccccagttttccatggtgtattcagagctgagtccagtctctctcccctactacaagtccccattgctgtggtccccgtacctgtcatgatggtcctaaataaagtcttactgtgctttaataggtagcattgaaaaatttttttctttgacatcattcatgacaacatgaaacctattgggacagcatgactgtgcagggtctttagagctcagctttctgaggccctgagcattcttggttttccgacatcgtgaacctgttctgtgttgcaagatatcactcaagccagtgttgcttaataccatctctttgtgtaatagatctgaataaagtaattgtaatacaccaatattttactttgttgagtattattttaatgggagcctttccaatgaaggaaacatcagctttccttgttagaatgcaagcagcttaaaaactacccatgtctttctggaaaggaaacattgccatgtaactatgtatcagttttctaagaacttcatgggccttccata

SEQ ID NO: 7431 - protein, 1011 aa, Artificial Sequence
  derived and/or modified sequence
RSQLSPSPARARAAMPLAFCGSENHSAAYRVDQGVLNNGCFVDALNVVPHVFLLFITFPILFIGWGSQSSKVHIHHSTWLHFPGHNLRWILTFMLLFVLVCEIAEGILSDGVTESHHLHLYMPAGMAFMAAVTSVVYYHNIETSNFPKLLIALLVYWTLAFITKTIKFVKFLDHAIGFSQLRFCLTGLLVILYGMLLLVEVNVIRVRRYIFFKTPREVKPPEDLQDLGVRFLQPFVNLLSKGTYWWMNAFIKTAHKKPIDLRAIGKLPIAMRALTNYQRLCEAFDAQVRKDIQGTQGARAIWQALSHAFGRRLVLSSTFRILADLLGFAGPLCIFGIVDHLGKENDVFQPKTQFLGVYFVSSQEFLANAYVLAVLLFLALLLQRTFLQASYYVAIETGINLRGAIQTKIYNKIMHLSTSNLSMGEMTAGQICNLVAIDTNQLMWFFFLCPNLWAMPVQIIVGVILLYYILGVSALIGAAVIILLAPVQYFVATKLSQAQRSTLEYSNERLKQTNEMLRGIKLLKLYAWENIFRTRVETTRRKEMTSLRAFAIYTSISIFMNTAIPIAAVLITFVGHVSFFKEADFSPSVAFASLSLFHILVTPLFLLSSVVRSTVKALVSAEIREEQCAPHEPTPQGPASKYQAVPLRVVNRKRPAREDCRGLTGPLQSLVPSADGDADNCCVQIMGGYFTWTPDGIPTLSNITIRIPRGQLTMIVGQVGCGKSSLLLAALGEMQKVSGAVFWSSLPDSEIGEDPSPERETATDLDIRKRGPVAYASQKPWLLNATVEENIIFESPFNKQRYKMVIEACSLQPDIDILPHGDQTQIGERGINLSGGQRQRISVARALYQHANVVFLDDPFSALDIHLSDHLMQAGILELLRDDKRTVVLVTHKLQYLPHADWIIAMKDGTIQREGTLKDFQRSECQLFEHWKTLMNRQDQELEKRRQLRARRMTTCRPCCTSVLRSHGEPAPSTCPPPASCSCRCWSSHSCSSTWSWWPSTTGWPSGPTAP

SEQ ID NO: 7432 - protein, 1581 aa, Artificial Sequence
  derived and/or modified sequence
MPLAFCGSENHSAAYRVDQGVLNNGCFVDALNVVPHVFLLFITFPILFIGWGSQSSKVHIHHSTWLHFPGHNLRWILTFMLLFVLVCEIAEGILSDGVTESHHLHLYMPAGMAFMAAVTSVVYYHNIETSNFPKLLIALLVYWTLAFITKTIKFVKFLDHAIGFSQLRFCLTGLLVILYGMLLLVEVNVIRVRRYIFFKTPREVKPPEDLQDLGVRFLQPFVNLLSKGTYWWMNAFIKTAHKKPIDLRAIGKLPIAMRALTNYQRLCEAFDAQVRKDIQGTQGARAIWQALSHAFGRRLVLSSTFRILADLLGFAGPLCIFGIVDHLGKENDVFQPKTQFLGVYFVSSQEFLANAYVLAVLLFLALLLQRTFLQASYYVAIETGINLRGAIQTKIYNKIMHLSTSNLSMGEMTAGQICNLVAIDTNQLMWFFFLCPNLWAMPVQIIVGVILLYYILGVSALIGAAVIILLAPVQYFVATKLSQAQRSTLEYSNERLKQTNEMLRGIKLLKLYAWENIFRTRVETTRRKEMTSLRAFAIYTSISIFMNTAIPIAAVLITFVGHVSFFKEADFSPSVAFASLSLFHILVTPLFLLSSVVRSTVKALVSVQKLSEFLSSAEIREEQCAPHEPTPQGPASKYQAVPLRVVNRKRPAREDCRGLTGPLQSLVPSADGDADNCCVQIMGGYFTWTPDGIPTLSNITIRIPRGQLTMIVGQVGCGKSSLLLAALGEMQKVSGAVFWSSLPDSEIGEDPSPERETATDLDIRKRGPVAYASQKPWLLNATVEENIIFESPFNKQRYKMVIEACSLQPDIDILPHGDQTQIGERGINLSGGQRQRISVARALYQHANVVFLDDPFSALDIHLSDHLMQAGILELLRDDKRTVVLVTHKLQYLPHADWIIAMKDGTIQREGTLKDFQRSECQLFEHWKTLMNRQDQELEKETVTERKATEPPQGLSRAMSSRDGLLQDEEEEEEEAAESEEDDNLSSMLHQRAEIPWRACAKYLSSAGILLLSLLVFSQLLKHMVLVAIDYWLAKWTDSALTLTPAARNCSLSQECTLDQTVYAMVFTVLCSLGIVLCLVTSVTVEWTGLKVAKRLHRSLLNRIILAPMRFFETTPLGSILNRFSSDCNTIDQHIPSTLECLSRSTLLCVSALAVISYVTPVFLVALLPLAIVCYFIQKYFRVASRDLQQLDDTTQLPLLSHFAETVEGLTTIRAFRYEARFQQKLLEYTDSNNIASLFLTAANRWLEVRMEYIGACVVLIAAVTSISNSLHRELSAGLVGLGLTYALMVSNYLNWMVRNLADMELQLGAVKRIHGLLKTEAESYEGLLAPSLIPKNWPDQGKIQIQNLSVRYDSSLKPVLKHVNALIAPGQKIGICGRTGSGKSSFSLAFFRMVDTFEGHIIIDGIDIAKLPLHTLRSRLSIILQDPVLFSGTIRFNLDPERKCSDSTLWEALEIAQLKLVVKALPGGLDAIITEGGENFSQGQRQLFCLARAFVRKTSIFIMDEATASIDMATENILQKVVMTAFADRTVVTIAHRVHTILSADLVIVLKRGAILEFDKPEKLLSRKDSVFASFVRADK

SEQ ID NO: 7433 - protein, 997 aa, Artificial Sequence
  derived and/or modified sequence
MPLAFCGSENHSAAYRVDQGVLNNGCFVDALNVVPHVFLLFITFPILFIGWGSQSSKVHIHHSTWLHFPGHNLRWILTFMLLFVLVCEIAEGILSDGVTESHHLHLYMPAGMAFMAAVTSVVYYHNIETSNFPKLLIALLVYWTLAFITKTIKFVKFLDHAIGFSQLRFCLTGLLVILYGMLLLVEVNVIRVRRYIFFKTPREVKPPEDLQDLGVRFLQPFVNLLSKGTYWWMNAFIKTAHKKPIDLRAIGKLPIAMRALTNYQRLCEAFDAQVRKDIQGTQGARAIWQALSHAFGRRLVLSSTFRILADLLGFAGPLCIFGIVDHLGKENDVFQPKTQFLGVYFVSSQEFLANAYVLAVLLFLALLLQRTFLQASYYVAIETGINLRGAIQTKIYNKIMHLSTSNLSMGEMTAGQICNLVAIDTNQLMWFFFLCPNLWAMPVQIIVGVILLYYILGVSALIGAAVIILLAPVQYFVATKLSQAQRSTLEYSNERLKQTNEMLRGIKLLKLYAWENIFRTRVETTRRKEMTSLRAFAIYTSISIFMNTAIPIAAVLITFVGHVSFFKEADFSPSVAFASLSLFHILVTPLFLLSSVVRSTVKALVSAEIREEQCAPHEPTPQGPASKYQAVPLRVVNRKRPAREDCRGLTGPLQSLVPSADGDADNCCVQIMGGYFTWTPDGIPTLSNITIRIPRGQLTMIVGQVGCGKSSLLLAALGEMQKVSGAVFWSSLPDSEIGEDPSPERETATDLDIRKRGPVAYASQKPWLLNATVEENIIFESPFNKQRYKMVIEACSLQPDIDILPHGDQTQIGERGINLSGGQRQRISVARALYQHANVVFLDDPFSALDIHLSDHLMQAGILELLRDDKRTVVLVTHKLQYLPHADWIIAMKDGTIQREGTLKDFQRSECQLFEHWKTLMNRQDQELEKRRQLRARRMTTCRPCCTSVLRSHGEPAPSTCPPPASCSCRCWSSHSCSSTWSWWPSTTGWPSGPTAP

SEQ ID NO: 7434 - DNA, 3036 bp, Artificial Sequence
  derived and/or modified sequence
agaagccagctgagccccagccccgccagagccagagccgccatgcccctggccttctgcggcagcgagaaccacagcgccgcctacagagtggaccagggcgtgctgaacaacggctgcttcgtggacgccctgaacgtggtgccccacgtgttcctgctgttcatcaccttccccatcctgttcatcggctggggcagccagagcagcaaggtgcacatccaccacagcacctggctgcacttccccggccacaacctgagatggatcctgaccttcatgctgctgttcgtgctggtgtgcgagatcgccgagggcatcctgagcgacggcgtgaccgagagccaccacctgcacctgtacatgcccgccggcatggccttcatggccgccgtgaccagcgtggtgtactaccacaacatcgagaccagcaacttccccaagctgctgatcgccctgctggtgtactggaccctggccttcatcaccaagaccatcaagttcgtgaagttcctggaccacgccatcggcttcagccagctgagattctgcctgaccggcctgctggtgatcctgtacggcatgctgctgctggtggaggtgaacgtgatcagagtgagaagatacatcttcttcaagacccccagagaggtgaagccccccgaggacctgcaggacctgggcgtgagattcctgcagcccttcgtgaacctgctgagcaagggcacctactggtggatgaacgccttcatcaagaccgcccacaagaagcccatcgacctgagagccatcggcaagctgcccatcgccatgagagccctgaccaactaccagagactgtgcgaggccttcgacgcccaggtgagaaaggacatccagggcacccagggcgccagagccatctggcaggccctgagccacgccttcggcagaagactggtgctgagcagcaccttcagaatcctggccgacctgctgggcttcgccggccccctgtgcatcttcggcatcgtggaccacctgggcaaggagaacgacgtgttccagcccaagacccagttcctgggcgtgtacttcgtgagcagccaggagttcctggccaacgcctacgtgctggccgtgctgctgttcctggccctgctgctgcagagaaccttcctgcaggccagctactacgtggccatcgagaccggcatcaacctgagaggcgccatccagaccaagatctacaacaagatcatgcacctgagcaccagcaacctgagcatgggcgagatgaccgccggccagatctgcaacctggtggccatcgacaccaaccagctgatgtggttcttcttcctgtgccccaacctgtgggccatgcccgtgcagatcatcgtgggcgtgatcctgctgtactacatcctgggcgtgagcgccctgatcggcgccgccgtgatcatcctgctggcccccgtgcagtacttcgtggccaccaagctgagccaggcccagagaagcaccctggagtacagcaacgagagactgaagcagaccaacgagatgctgagaggcatcaagctgctgaagctgtacgcctgggagaacatcttcagaaccagagtggagaccaccagaagaaaggagatgaccagcctgagagccttcgccatctacaccagcatcagcatcttcatgaacaccgccatccccatcgccgccgtgctgatcaccttcgtgggccacgtgagcttcttcaaggaggccgacttcagccccagcgtggccttcgccagcctgagcctgttccacatcctggtgacccccctgttcctgctgagcagcgtggtgagaagcaccgtgaaggccctggtgagcgccgagatcagagaggagcagtgcgccccccacgagcccaccccccagggccccgccagcaagtaccaggccgtgcccctgagagtggtgaacagaaagagacccgccagagaggactgcagaggcctgaccggccccctgcagagcctggtgcccagcgccgacggcgacgccgacaactgctgcgtgcagatcatgggcggctacttcacctggacccccgacggcatccccaccctgagcaacatcaccatcagaatccccagaggccagctgaccatgatcgtgggccaggtgggctgcggcaagagcagcctgctgctggccgccctgggcgagatgcagaaggtgagcggcgccgtgttctggagcagcctgcccgacagcgagatcggcgaggaccccagccccgagagagagaccgccaccgacctggacatcagaaagagaggccccgtggcctacgccagccagaagccctggctgctgaacgccaccgtggaggagaacatcatcttcgagagccccttcaacaagcagagatacaagatggtgatcgaggcctgcagcctgcagcccgacatcgacatcctgccccacggcgaccagacccagatcggcgagagaggcatcaacctgagcggcggccagagacagagaatcagcgtggccagagccctgtaccagcacgccaacgtggtgttcctggacgaccccttcagcgccctggacatccacctgagcgaccacctgatgcaggccggcatcctggagctgctgagagacgacaagagaaccgtggtgctggtgacccacaagctgcagtacctgccccacgccgactggatcatcgccatgaaggacggcaccatccagagagagggcaccctgaaggacttccagagaagcgagtgccagctgttcgagcactggaagaccctgatgaacagacaggaccaggagctggagaagagaagacagctgagagccagaagaatgaccacctgcagaccctgctgcaccagcgtgctgagaagccacggcgagcccgcccccagcacctgccccccccccgccagctgcagctgcagatgctggagcagccacagctgcagcagcacctggagctggtggcccagcaccaccggctggcccagcggccccaccgccccctag

SEQ ID NO: 7435 - DNA, 4746 bp, Artificial Sequence
  derived and/or modified sequence
atgcccctggccttctgcggcagcgagaaccacagcgccgcctacagagtggaccagggcgtgctgaacaacggctgcttcgtggacgccctgaacgtggtgccccacgtgttcctgctgttcatcaccttccccatcctgttcatcggctggggcagccagagcagcaaggtgcacatccaccacagcacctggctgcacttccccggccacaacctgagatggatcctgaccttcatgctgctgttcgtgctggtgtgcgagatcgccgagggcatcctgagcgacggcgtgaccgagagccaccacctgcacctgtacatgcccgccggcatggccttcatggccgccgtgaccagcgtggtgtactaccacaacatcgagaccagcaacttccccaagctgctgatcgccctgctggtgtactggaccctggccttcatcaccaagaccatcaagttcgtgaagttcctggaccacgccatcggcttcagccagctgagattctgcctgaccggcctgctggtgatcctgtacggcatgctgctgctggtggaggtgaacgtgatcagagtgagaagatacatcttcttcaagacccccagagaggtgaagccccccgaggacctgcaggacctgggcgtgagattcctgcagcccttcgtgaacctgctgagcaagggcacctactggtggatgaacgccttcatcaagaccgcccacaagaagcccatcgacctgagagccatcggcaagctgcccatcgccatgagagccctgaccaactaccagagactgtgcgaggccttcgacgcccaggtgagaaaggacatccagggcacccagggcgccagagccatctggcaggccctgagccacgccttcggcagaagactggtgctgagcagcaccttcagaatcctggccgacctgctgggcttcgccggccccctgtgcatcttcggcatcgtggaccacctgggcaaggagaacgacgtgttccagcccaagacccagttcctgggcgtgtacttcgtgagcagccaggagttcctggccaacgcctacgtgctggccgtgctgctgttcctggccctgctgctgcagagaaccttcctgcaggccagctactacgtggccatcgagaccggcatcaacctgagaggcgccatccagaccaagatctacaacaagatcatgcacctgagcaccagcaacctgagcatgggcgagatgaccgccggccagatctgcaacctggtggccatcgacaccaaccagctgatgtggttcttcttcctgtgccccaacctgtgggccatgcccgtgcagatcatcgtgggcgtgatcctgctgtactacatcctgggcgtgagcgccctgatcggcgccgccgtgatcatcctgctggcccccgtgcagtacttcgtggccaccaagctgagccaggcccagagaagcaccctggagtacagcaacgagagactgaagcagaccaacgagatgctgagaggcatcaagctgctgaagctgtacgcctgggagaacatcttcagaaccagagtggagaccaccagaagaaaggagatgaccagcctgagagccttcgccatctacaccagcatcagcatcttcatgaacaccgccatccccatcgccgccgtgctgatcaccttcgtgggccacgtgagcttcttcaaggaggccgacttcagccccagcgtggccttcgccagcctgagcctgttccacatcctggtgacccccctgttcctgctgagcagcgtggtgagaagcaccgtgaaggccctggtgagcgtgcagaagctgagcgagttcctgagcagcgccgagatcagagaggagcagtgcgccccccacgagcccaccccccagggccccgccagcaagtaccaggccgtgcccctgagagtggtgaacagaaagagacccgccagagaggactgcagaggcctgaccggccccctgcagagcctggtgcccagcgccgacggcgacgccgacaactgctgcgtgcagatcatgggcggctacttcacctggacccccgacggcatccccaccctgagcaacatcaccatcagaatccccagaggccagctgaccatgatcgtgggccaggtgggctgcggcaagagcagcctgctgctggccgccctgggcgagatgcagaaggtgagcggcgccgtgttctggagcagcctgcccgacagcgagatcggcgaggaccccagccccgagagagagaccgccaccgacctggacatcagaaagagaggccccgtggcctacgccagccagaagccctggctgctgaacgccaccgtggaggagaacatcatcttcgagagccccttcaacaagcagagatacaagatggtgatcgaggcctgcagcctgcagcccgacatcgacatcctgccccacggcgaccagacccagatcggcgagagaggcatcaacctgagcggcggccagagacagagaatcagcgtggccagagccctgtaccagcacgccaacgtggtgttcctggacgaccccttcagcgccctggacatccacctgagcgaccacctgatgcaggccggcatcctggagctgctgagagacgacaagagaaccgtggtgctggtgacccacaagctgcagtacctgccccacgccgactggatcatcgccatgaaggacggcaccatccagagagagggcaccctgaaggacttccagagaagcgagtgccagctgttcgagcactggaagaccctgatgaacagacaggaccaggagctggagaaggagaccgtgaccgagagaaaggccaccgagcccccccagggcctgagcagagccatgagcagcagagacggcctgctgcaggacgaggaggaggaggaggaggaggccgccgagagcgaggaggacgacaacctgagcagcatgctgcaccagagagccgagatcccctggagagcctgcgccaagtacctgagcagcgccggcatcctgctgctgagcctgctggtgttcagccagctgctgaagcacatggtgctggtggccatcgactactggctggccaagtggaccgacagcgccctgaccctgacccccgccgccagaaactgcagcctgagccaggagtgcaccctggaccagaccgtgtacgccatggtgttcaccgtgctgtgcagcctgggcatcgtgctgtgcctggtgaccagcgtgaccgtggagtggaccggcctgaaggtggccaagagactgcacagaagcctgctgaacagaatcatcctggcccccatgagattcttcgagaccacccccctgggcagcatcctgaacagattcagcagcgactgcaacaccatcgaccagcacatccccagcaccctggagtgcctgagcagaagcaccctgctgtgcgtgagcgccctggccgtgatcagctacgtgacccccgtgttcctggtggccctgctgcccctggccatcgtgtgctacttcatccagaagtacttcagagtggccagcagagacctgcagcagctggacgacaccacccagctgcccctgctgagccacttcgccgagaccgtggagggcctgaccaccatcagagccttcagatacgaggccagattccagcagaagctgctggagtacaccgacagcaacaacatcgccagcctgttcctgaccgccgccaacagatggctggaggtgagaatggagtacatcggcgcctgcgtggtgctgatcgccgccgtgaccagcatcagcaacagcctgcacagagagctgagcgccggcctggtgggcctgggcctgacctacgccctgatggtgagcaactacctgaactggatggtgagaaacctggccgacatggagctgcagctgggcgccgtgaagagaatccacggcctgctgaagaccgaggccgagagctacgagggcctgctggcccccagcctgatccccaagaactggcccgaccagggcaagatccagatccagaacctgagcgtgagatacgacagcagcctgaagcccgtgctgaagcacgtgaacgccctgatcgcccccggccagaagatcggcatctgcggcagaaccggcagcggcaagagcagcttcagcctggccttcttcagaatggtggacaccttcgagggccacatcatcatcgacggcatcgacatcgccaagctgcccctgcacaccctgagaagcagactgagcatcatcctgcaggaccccgtgctgttcagcggcaccatcagattcaacctggaccccgagagaaagtgcagcgacagcaccctgtgggaggccctggagatcgcccagctgaagctggtggtgaaggccctgcccggcggcctggacgccatcatcaccgagggcggcgagaacttcagccagggccagagacagctgttctgcctggccagagccttcgtgagaaagaccagcatcttcatcatggacgaggccaccgccagcatcgacatggccaccgagaacatcctgcagaaggtggtgatgaccgccttcgccgacagaaccgtggtgaccatcgcccacagagtgcacaccatcctgagcgccgacctggtgatcgtgctgaagagaggcgccatcctggagttcgacaagcccgagaagctgctgagcagaaaggacagcgtgttcgccagcttcgtgagagccgacaagtag

SEQ ID NO: 7436 - DNA, 2994 bp, Artificial Sequence
  derived and/or modified sequence
atgcccctggccttctgcggcagcgagaaccacagcgccgcctacagagtggaccagggcgtgctgaacaacggctgcttcgtggacgccctgaacgtggtgccccacgtgttcctgctgttcatcaccttccccatcctgttcatcggctggggcagccagagcagcaaggtgcacatccaccacagcacctggctgcacttccccggccacaacctgagatggatcctgaccttcatgctgctgttcgtgctggtgtgcgagatcgccgagggcatcctgagcgacggcgtgaccgagagccaccacctgcacctgtacatgcccgccggcatggccttcatggccgccgtgaccagcgtggtgtactaccacaacatcgagaccagcaacttccccaagctgctgatcgccctgctggtgtactggaccctggccttcatcaccaagaccatcaagttcgtgaagttcctggaccacgccatcggcttcagccagctgagattctgcctgaccggcctgctggtgatcctgtacggcatgctgctgctggtggaggtgaacgtgatcagagtgagaagatacatcttcttcaagacccccagagaggtgaagccccccgaggacctgcaggacctgggcgtgagattcctgcagcccttcgtgaacctgctgagcaagggcacctactggtggatgaacgccttcatcaagaccgcccacaagaagcccatcgacctgagagccatcggcaagctgcccatcgccatgagagccctgaccaactaccagagactgtgcgaggccttcgacgcccaggtgagaaaggacatccagggcacccagggcgccagagccatctggcaggccctgagccacgccttcggcagaagactggtgctgagcagcaccttcagaatcctggccgacctgctgggcttcgccggccccctgtgcatcttcggcatcgtggaccacctgggcaaggagaacgacgtgttccagcccaagacccagttcctgggcgtgtacttcgtgagcagccaggagttcctggccaacgcctacgtgctggccgtgctgctgttcctggccctgctgctgcagagaaccttcctgcaggccagctactacgtggccatcgagaccggcatcaacctgagaggcgccatccagaccaagatctacaacaagatcatgcacctgagcaccagcaacctgagcatgggcgagatgaccgccggccagatctgcaacctggtggccatcgacaccaaccagctgatgtggttcttcttcctgtgccccaacctgtgggccatgcccgtgcagatcatcgtgggcgtgatcctgctgtactacatcctgggcgtgagcgccctgatcggcgccgccgtgatcatcctgctggcccccgtgcagtacttcgtggccaccaagctgagccaggcccagagaagcaccctggagtacagcaacgagagactgaagcagaccaacgagatgctgagaggcatcaagctgctgaagctgtacgcctgggagaacatcttcagaaccagagtggagaccaccagaagaaaggagatgaccagcctgagagccttcgccatctacaccagcatcagcatcttcatgaacaccgccatccccatcgccgccgtgctgatcaccttcgtgggccacgtgagcttcttcaaggaggccgacttcagccccagcgtggccttcgccagcctgagcctgttccacatcctggtgacccccctgttcctgctgagcagcgtggtgagaagcaccgtgaaggccctggtgagcgccgagatcagagaggagcagtgcgccccccacgagcccaccccccagggccccgccagcaagtaccaggccgtgcccctgagagtggtgaacagaaagagacccgccagagaggactgcagaggcctgaccggccccctgcagagcctggtgcccagcgccgacggcgacgccgacaactgctgcgtgcagatcatgggcggctacttcacctggacccccgacggcatccccaccctgagcaacatcaccatcagaatccccagaggccagctgaccatgatcgtgggccaggtgggctgcggcaagagcagcctgctgctggccgccctgggcgagatgcagaaggtgagcggcgccgtgttctggagcagcctgcccgacagcgagatcggcgaggaccccagccccgagagagagaccgccaccgacctggacatcagaaagagaggccccgtggcctacgccagccagaagccctggctgctgaacgccaccgtggaggagaacatcatcttcgagagccccttcaacaagcagagatacaagatggtgatcgaggcctgcagcctgcagcccgacatcgacatcctgccccacggcgaccagacccagatcggcgagagaggcatcaacctgagcggcggccagagacagagaatcagcgtggccagagccctgtaccagcacgccaacgtggtgttcctggacgaccccttcagcgccctggacatccacctgagcgaccacctgatgcaggccggcatcctggagctgctgagagacgacaagagaaccgtggtgctggtgacccacaagctgcagtacctgccccacgccgactggatcatcgccatgaaggacggcaccatccagagagagggcaccctgaaggacttccagagaagcgagtgccagctgttcgagcactggaagaccctgatgaacagacaggaccaggagctggagaagagaagacagctgagagccagaagaatgaccacctgcagaccctgctgcaccagcgtgctgagaagccacggcgagcccgcccccagcacctgccccccccccgccagctgcagctgcagatgctggagcagccacagctgcagcagcacctggagctggtggcccagcaccaccggctggcccagcggccccaccgccccctag

SEQ ID NO: 7437 - DNA, 3036 bp, Artificial Sequence
  derived and/or modified sequence
agatctcagctgtcccccagcccagcaagagctagggctgctatgcccttggcattctgtggctcagaaaaccactcagccgcatatcgagtggatcagggggtcctgaataacggatgttttgtggacgccctgaacgtcgttcctcacgtctttctactctttatcactttccccatcctattcataggctggggctcacagtcctcaaaagtgcacattcaccatagcacctggcttcattttcctggtcacaacctgcggtggattctgacgttcatgctgctcttcgtgctggtgtgtgagatcgcagagggcatactgagcgatggagtcacagaatctcatcatctgcatctgtacatgcctgcaggaatggctttcatggctgcggtcacttcagtggtgtactaccacaacatcgagacttctaacttcccgaagttgctcatcgccctcttggtgtactggacacttgcttttatcactaaaaccatcaagtttgtgaagttcctcgaccacgcaatcggcttttctcagctgaggttctgtctgaccggcctcctggtgattctttacggaatgctgctgcttgtcgaggtcaatgtgattagggtccgccggtatatcttctttaagacacccagggaagtcaaaccgcccgaggacctccaagacctgggagtgcgatttctacagcctttcgtcaacctgcttagtaagggaacttattggtggatgaacgcatttatcaagaccgcccataagaagcctatagacctgcgagcaattgggaagttgcccattgccatgagagctttgacaaattatcagagactgtgtgaggcctttgacgctcaggtcaggaaagatatccagggaacacagggggctcgtgcaatctggcaagccctaagccacgcatttggaagacgacttgtgttaagtagtacattccgcatcctggccgacctgttggggtttgctggaccactgtgcatttttggcatcgttgaccacttgggaaaggaaaacgacgtgttccaaccgaaaacacagttccttggagtttacttcgtctcatctcaggagtttcttgccaatgcgtatgtgctggctgtgctgctatttctagctctgctgcttcagcgtacattcctgcaagcatcatattatgtcgccattgaaacaggcattaacctgcgcggcgctatccagactaagatttacaacaagatcatgcacttgtcaacatccaacctgtctatgggtgaaatgaccgccggccaaatctgcaatttagtggcgatcgatactaatcagcttatgtggttttttttcctatgccccaatctgtgggccatgcctgtgcagattatcgtcggcgtgatcctactttactacatcctcggagtttcagctctcattggagccgcggtcatcattttgctggcccccgtgcagtactttgtggccacgaaattatcccaagctcagagatccacactggagtactcgaacgaaagacttaagcagactaatgagatgctcagaggcataaaactgctgaagctctatgcttgggaaaatattttcaggactcgggtcgaaaccactagacggaaggagatgacgtccctgcgggccttcgctatctacacctctatctcaatctttatgaatacagccattcccatcgctgcggtgctcattacatttgtggggcatgtgtcctttttcaaggaagccgacttttctccaagtgtggccttcgcctccctgtcattattccatatccttgttactcccctgttcctgttgtcttccgttgtgcggtctactgtgaaggccctcgtgtcagccgagattcgtgaggaacagtgtgctcctcacgaaccgacgcctcaaggaccagcttcaaaatatcaggctgtaccattgagagtggttaatcggaaaaggcccgcaagggaggattgcaggggtctcacagggcctctgcagtccctggtccctagtgcggacggagacgctgacaactgttgcgtgcagattatggggggctatttcacctggacacctgatgggatccctacactcagtaatatcaccatccgaattccacgaggtcagttgaccatgatagtcggacaggtaggctgcgggaagtcctctctcctcctggctgcactcggtgaaatgcagaaggtgtctggcgcagtcttttggtctagtttgccagactctgagattggggaggacccctcaccagaaagagagactgctacagacttagatattagaaagagaggcccagttgcgtatgcttcccagaaaccttggctcctgaatgcaacagtcgaggaaaatattatatttgagagcccatttaataaacagcgctataagatggtgatagaggcctgctctcttcagccggacattgacattctgccccatggagaccagacacagatcggggagagaggcataaacctctccggcggccaacgccagaggatatcagtagccagagctctctaccagcatgccaacgtcgtctttttagatgaccctttttctgccctagacatccacctttccgaccatctgatgcaagctgggatactggagttgctacgcgacgataagcgcaccgtggtgcttgtgacccacaagttacagtacctcccgcacgccgactggatcattgctatgaaagacggcaccatccagcgggaaggaacgttgaaagacttccagcggtccgagtgccagctgttcgaacattggaagaccctcatgaaccgtcaggatcaggagttggaaaaacgccgacagttaagggccagacgaatgactacctgtcgaccttgttgtacctcagtcctccgctctcacggtgaacccgctccctctacttgccctcccccagcctcctgctcttgtagatgctggtctagccactcatgctcatccacgtggtcctggtggccaagtacaacagggtggcctagtggcccaactgctccatag

SEQ ID NO: 7438 - DNA, 4746 bp, Artificial Sequence
  derived and/or modified sequence
atgccgcttgccttttgcggcagtgaaaatcattccgctgcataccgggttgaccagggtgtgttgaacaacggctgctttgtcgacgcactcaatgtggtcccccatgtattcctcctgttcattacctttccgatcctttttatcggttggggcagtcaaagtagcaaagtgcacattcaccatagtacctggctgcattttcctggacacaacctgcgctggattcttacgtttatgcttttgttcgtcctcgtgtgcgaaatcgctgaaggcatcttgtccgatggcgtgactgagtcacaccatctccacctttacatgccggccggtatggctttcatggccgctgtgacttccgttgtgtattatcataatatagagacttctaatttccctaagctactgatcgctttacttgtctactggacgctggcatttataaccaaaactatcaagtttgtaaagtttcttgatcacgcaattgggttttcccagcttcgcttctgtctcactggactcctagtgatcctctatggcatgctgctgctggttgaggtcaatgtgattcgggtgcgcagatacatcttctttaagacgcccagggaggtgaagccacctgaggatctccaggatttgggggttcgatttctgcagccctttgtgaatctgttgtccaagggtacttactggtggatgaacgcattcatcaaaaccgcccacaaaaaaccaatcgacttgcgggccatcgggaagctccctatcgccatgcgagctctcactaattatcagagactctgcgaggcttttgacgcccaggtgcgaaaggacattcaagggacccagggcgcacgcgccatctggcaggctcttagccatgcgtttggacggcgtctcgtgctgagcagtacattcagaattctggcggatctgctcggattcgctgggccgctgtgtatctttggaatcgttgatcatttgggcaaagaaaacgacgtgttccagcccaagacgcagtttctgggcgtgtacttcgtctcctctcaagaattcctggcaaacgcatacgttctagctgtcctgttattcctggctctgttgcttcagagaacctttctacaggcctcctattacgtcgccatcgaaactggcatcaacctccggggggccatccagaccaagatttacaacaagatcatgcacctgagcacttccaacctatctatgggtgagatgacagcggggcagatctgtaacttggttgccattgacacaaaccagttgatgtggttttttttcctgtgtcctaatctatgggccatgcctgtgcaaattattgtaggcgtcatcctgctgtactacattctgggtgtgtcggccctgataggagcagctgtaattattctgttggctcctgtccagtactttgtggctacaaaactaagccaggcccagcgttcaacactggagtactctaatgagaggctgaagcagacaaatgagatgctaagagggattaagctgttaaaactctatgcttgggaaaatattttcagaacccgagtggagactacccgcagaaaagagatgaccagtttgcgtgcttttgccatatacacaagcatctcaattttcatgaacactgccatccctattgctgctgtgttgatcaccttcgtgggccacgtgagcttctttaaagaggccgacttctcccccagcgtggcttttgcttcactctccctcttccatatcttggttacgccactgttcctactgtcttctgtcgtgcggtccactgtgaaggcactggtgtcagtccagaagcttagcgagtttctgagttccgctgaaattagagaagagcagtgcgccccccatgaacctaccccacagggccccgccagcaaatatcaagctgtacccctgcgtgtggtcaataggaagcgtcctgcacgggaggattgtagaggcttgaccggacctttacaaagtctggtgccaagcgctgatggtgacgctgacaactgttgcgtgcagatcatgggggggtattttacttggacccctgatgggatccccacactgagcaacatcaccattcgtatccctcggggtcagctgactatgatcgtgggccaagtgggatgtggcaaatcttccctgctgctggctgccctgggagaaatgcagaaggtcagcggtgctgtcttttggtcatctctcccggattccgaaatcggcgaagatccgtcacctgagcgggagactgccacggatcttgacattaggaaacggggccctgtcgcttacgcctcccagaagccctggcttcttaacgctacagtcgaagagaacataatatttgagtccccattcaataaacagcgttataagatggtgattgaagcttgtagtttgcagccagatatcgatatcttgccacacggcgaccaaacgcagatcggtgaacgcggcattaaccttagcgggggccagagacaaaggatctcagtagcaagagctctttaccagcatgccaatgtggtatttttagatgatccgttcagcgccctggatatccatctgagcgatcacctcatgcaggccggcatcctggagctactcagggatgacaagcggacagtcgtgctcgtgacacataaactccaatacctccctcacgctgattggattattgccatgaaggatgggacaattcagcgggaagggactttgaaggattttcaaaggagtgaatgccaattgtttgagcactggaaaaccctgatgaacaggcaggatcaggagttagagaaggagaccgtcaccgaacgcaaggcaaccgaacctcctcagggactcagccgggcaatgtcaagtagagacgggctcctgcaagatgaggaagaagaagaagaagaagctgctgagagcgaggaggacgataacttatctagcatgctgcaccagagagccgagatcccctggagagcatgcgccaagtatttgagttctgcaggaatactcctgctgtcacttttggtgtttagccagctgctcaagcatatggttcttgtggccatcgattattggctggctaagtggactgactcggccctaaccctgactcctgccgcaagaaactgtagcctgagccaggaatgcactctggatcaaaccgtatatgcgatggtgtttacagtattgtgtagtttgggcatcgtcctgtgcctcgttaccagcgtgaccgtcgaatggacgggacttaaggtggcgaagaggctgcaccgttcactactgaacagaattatcctcgcccccatgcgcttctttgaaaccacccccctcggcagcatactgaacagattctctagcgactgcaacacaatcgatcagcatattccgtccactttggagtgcctgtctagatctacactgctgtgcgtgagcgctcttgctgtcatatcatatgtgacacctgtattcttggtcgctctcctgcctctggcaatcgtctgttattttatccaaaagtactttagggtagcttctcgcgatcttcagcagctggatgatacgacacagcttccacttcttagtcactttgctgagactgtggaagggctgaccactatcagggcttttagatatgaagctcggttccagcagaagttgctggagtacactgattctaacaacatcgcaagcctgttcctgacggcggctaaccgctggttggaggtacgaatggagtatattggggcttgtgtcgtcttaatagccgccgtcacgtcaatctctaatagtcttcaccgtgagctcagcgccggattggtcggactgggcctgacgtacgcactgatggtctcaaactaccttaactggatggtgagaaatcttgccgatatggagttgcaactcggagcagtgaaacggattcacggattactgaaaaccgaggcagagtcatatgagggcctactcgctcctagcctgattcctaaaaattggcctgaccaagggaagattcagatccagaacctgtccgtacggtatgattctagcttaaaacctgttttgaaacacgtaaatgccctcattgccccaggccaaaaaatcgggatatgtggtcggacaggctccggtaagtcaagcttttcactcgctttcttcagaatggtcgacactttcgaaggtcatattatcatcgatggcattgacattgctaagctgcctttgcatacgctgagatctcggctttctatcattttacaagatccggtacttttctctggaacgatcaggttcaatcttgaccccgaacggaagtgttccgattctactctttgggaggcgctcgaaattgctcaactcaaactcgttgtgaaagctctacctggcggccttgatgcaatcattacggaagggggcgagaacttctctcagggccagcggcagctgttctgtctggcaagagcgttcgttcggaagacaagtatcttcatcatggacgaggcgaccgcttccatcgacatggccactgaaaatattttgcaaaaggtggtcatgacagctttcgcagatcgaactgtggtgacaatcgcacatcgggttcataccatactgagtgctgacttagttatcgtcctgaagcgtggtgccatactcgaattcgacaagccggaaaagctgctgtccagaaaagactccgtttttgctagctttgtcagggcagacaagtag

SEQ ID NO: 7439 - DNA, 2994 bp, Artificial Sequence
  derived and/or modified sequence
atgccattggccttctgtggcagcgagaaccactccgccgcttatagggtggatcagggcgtcctgaataacgggtgtttcgttgacgccctgaatgtcgtgccacacgtcttcctgcttttcataactttccccattttatttatcggctggggttcgcagtcatcaaaggtgcacattcatcattctacgtggcttcacttcccaggccacaatttgcgctggattctgacatttatgttactgttcgtgttggtctgcgagatcgctgagggaatcctgtccgatggtgtgactgagagccatcatctgcatctgtatatgcccgccggcatggccttcatggccgccgttacctctgtggtttattatcacaatatagaaacctccaacttccccaagctccttatcgcattgctggtgtactggaccttggccttcatcacaaaaaccatcaaatttgtgaagttcttagaccatgccataggattctcccaactgcgcttctgcctgaccgggctcctggtgatcctgtatggtatgctcctcttggttgaggtcaatgtaatccgggtccgtagatatatcttcttcaaaacacctcgggaagttaaaccacctgaggacttgcaggacctgggcgtgagatttttgcagccctttgtgaacttgctgtcgaagggcacttactggtggatgaatgcttttatcaagacggcccataaaaagccaattgatctcagggctattggcaagctacccatcgccatgcgcgcgctgactaattaccagcggctatgtgaggcctttgacgctcaagtgagaaaagacatccaaggtactcagggagctagagccatctggcaggctttaagccatgcattcggtcgccgattggttctcagctccacctttcggatcctcgctgaccttctcggctttgccgggccactctgtatcttcggaatcgtggaccacttaggtaaggaaaacgatgttttccaaccaaagactcagttcctgggggtgtatttcgtatctagtcaagagttcttggcgaatgcatatgtactggccgtattgctgtttctggcccttttactgcagcgtacttttctccaggcatcctattacgtggccatcgaaacaggaatcaacttgcgaggcgctatccaaaccaagatttataacaaaataatgcacctgagcacttccaaccttagcatgggagaaatgacagctggccagatctgcaatctcgtggccatcgacaccaaccagctgatgtggtttttcttcctgtgtcccaatctgtgggcaatgcccgtacagatcatcgttggggtcattctgctgtactatattttgggagttagtgcactcatcggggcagctgtaattattctgctggcccctgtgcagtacttcgtggccactaagttgtctcaggctcagaggtcaacacttgaatatagtaatgagcggttgaagcaaacaaacgaaatgcttcgaggaatcaagctcctaaaactgtatgcgtgggagaacatttttcgcacccgagtggagacaacacgcagaaaggagatgaccagcctgcgggcattcgcgatatatacctcaatctccatattcatgaataccgcaatcccgatcgctgcagtactcatcacctttgtgggacatgtgtcttttttcaaagaggctgatttcagcccctcggtggcttttgcttccttaagtctttttcacatcctggtcacacctttattcctcctgtctagcgtggtgcgatccactgtgaaggctttggtgagcgcagaaatccgggaagagcagtgcgccccacacgaaccaacaccccagggcccggccagcaaataccaggctgtaccactccgggtggtgaaccgaaaaagaccagcgcgggaggattgccggggattgacgggacctctgcaatcactggttccttcagcagacggcgacgccgataattgttgtgtccagatcatggggggctattttacttggacaccggatgggatcccaacactgtctaatatcaccatccgcatccctagaggccaactgacaatgatcgtgggccaggtgggatgcggcaaatcatccctcttactggccgcacttggagagatgcagaaagttagcggcgcagttttctggagcagcctgcctgacagcgagataggggaagatcccagcccagagagggagacagcaacagacttagatattagaaagaggggcccagtcgcatacgcctcacagaagccatggctgctgaacgcaacggtggaggagaatataattttcgagtcgcctttcaacaagcagcgatataaaatggtgatagaggcctgttccctgcagcccgacattgatatcctgcctcacggggaccagactcagatcggcgagcggggcatcaaccttagtggcgggcaacggcagcgcatttctgtagcacgagcactgtatcagcacgcgaatgtggtgtttcttgacgaccccttctctgccctcgacatacacctatcagaccacctgatgcaggccggaattctcgagttactgagggatgataaacggactgttgttctggttacccataaactacaatatctgccccacgcagactggattattgctatgaaggatggcactatccagcgtgaaggtactttgaaagattttcagcgcagcgaatgtcaactgtttgagcactggaagacactgatgaaccgccaagatcaggaactagaaaagaggcggcagcttagggcgcgccgcatgactacatgccgcccttgttgcacttctgtgctcagatcacacggagagccagctcctagcacttgccccccccctgcgagctgcagttgccgctgctggagcagccacagctgctcttctacctggtcctggtggcccagcactacgggctggcccagcggacccacagcaccttag

SEQ ID NO: 7440 - DNA, 3036 bp, Artificial Sequence
  derived and/or modified sequence
cgcagccagctgagccccagccctgcccgggcccgggccgccatgcccctggccttctgtggcagcgagaaccacagcgctgcctacagagtggaccagggcgtgctgaacaacggctgctttgtggatgccctgaatgtggtgccccacgtgttcctgctcttcatcaccttccccatcctcttcatcggctggggcagccagagcagcaaggtgcacatccaccacagcacctggctgcacttccctggccacaacctgcgctggatcctgaccttcatgctgctgtttgtgctggtgtgtgaaattgctgagggcatcctgagtgatggagtgacagagagccaccacctgcacctgtacatgcctgctggcatggccttcatggctgctgtgacctctgtggtgtactaccacaacatcgagaccagcaacttccccaagctgctgattgccctgctggtgtactggaccctggccttcatcaccaagaccatcaagtttgtgaagttcctggaccacgccatcggcttcagccagctgcgcttctgcctgaccggcctgctggtgatcctgtatggcatgctgctgctggtggaggtgaatgtcatccgggtgcggcgctacatcttcttcaagaccccccgggaggtgaagcccccagaggacctgcaggacctgggcgtgcgcttcctgcagccctttgtgaacctgctgagcaagggcacctactggtggatgaatgccttcatcaagacagcccacaagaagcccatcgacctgcgggccatcggcaagctgcccatcgccatgagggccctgaccaactaccagaggctgtgtgaggcctttgatgcccaggtgaggaaggacatccagggcacccagggcgcccgggccatctggcaggccctgagccacgcctttggaagaaggctggtgctgagcagcaccttccgcatcctggccgacctgctgggctttgctggccccctgtgcatctttggaattgtggaccacctgggcaaggaaaatgatgtgttccagcccaagacccagttcctgggcgtgtactttgtgagcagccaggagttcctggccaatgcctacgtgctggccgtgctgctcttcctggccctgctgctgcagaggaccttcctgcaggccagctactacgtggccattgaaacaggcatcaacctgcggggggccatccagaccaagatctacaacaagatcatgcacctgagcaccagcaacctgtccatgggagagatgacagctggccagatctgcaacctggtggccatcgacaccaaccagctgatgtggttcttcttcctgtgccccaacctgtgggccatgcctgtgcagatcatcgtgggcgtcatcctgctgtactacatcctgggcgtgtctgccctgattggagctgctgtgatcatcctgctggcccctgtgcagtactttgtggccaccaagctgagccaggcccagaggagcaccctggagtacagcaatgaaaggctgaagcagaccaatgagatgctgcggggcatcaagctgctgaagctgtatgcctgggagaacatcttccgcaccagggtggagaccaccaggaggaaggagatgaccagcctgcgggcctttgccatctacaccagcatcagcatcttcatgaacacagccatccccatcgctgctgtgctgatcacctttgtgggccacgtgtccttcttcaaggaggccgacttcagccccagcgtggcctttgccagcctgagcctcttccacatcctggtgacccccctcttcctgctgagctctgtggtgcgcagcacagtgaaggccctggtgtctgctgagatccgggaggagcagtgtgcccctcatgagcccaccccccagggccctgccagcaagtaccaggccgtgcccctgcgggtggtgaacaggaagaggcctgcccgggaggactgccggggcctgaccggccccctgcagagcctggtgcccagcgcagatggagatgctgacaactgctgcgtgcagatcatgggcggctacttcacctggaccccagatggcatccccaccctgagcaacatcaccatccgcatcccccggggccagctgaccatgattgtgggccaggtgggctgcggcaagagcagcctgctgctggccgccctgggggagatgcagaaggtgtctggagctgtgttctggagcagcctgcctgattctgaaattggagaggaccccagccctgagcgggagacagccacagacctggacatcaggaagaggggccctgtggcctatgccagccagaagccctggctgctgaatgccaccgtggaggagaacatcatctttgagagccccttcaacaagcagcgctacaagatggtgattgaggcctgcagcctgcagcctgacatcgacatcctgccccacggggaccagacccagatcggggagcggggcatcaacctgagcggcggccagaggcagaggatctctgtggcccgggccctgtaccagcacgccaacgtggtgttcctggatgaccccttcagcgccctggacatccacctgagtgaccacctgatgcaggccggcatcctggagctgctgagagatgacaagaggacagtggtgctggtgacccacaagctgcagtacctgccccacgccgactggatcatcgccatgaaggatggcaccatccagcgggagggcaccctgaaggacttccagaggtctgagtgccagctgtttgagcactggaagaccctgatgaaccggcaggaccaggagctggagaagaggcggcagctgcgggcccggaggatgaccacctgccggccctgctgcacctctgtgctgcggagccatggagagcccgcccccagcacctgccccccaccagccagctgcagctgccgctgctggagcagccacagctgcagcagcacctggagctggtggcccagcaccaccggctggcccagcggccccacagccccctag

SEQ ID NO: 7441 - DNA, 4746 bp, Artificial Sequence
  derived and/or modified sequence
atgcccctggccttctgtggcagcgagaaccacagcgctgcctacagagtggaccagggcgtgctgaacaacggctgctttgtggatgccctgaatgtggtgccccacgtgttcctgctcttcatcaccttccccatcctcttcatcggctggggcagccagagcagcaaggtgcacatccaccacagcacctggctgcacttccctggccacaacctgcgctggatcctgaccttcatgctgctgtttgtgctggtgtgtgaaattgctgagggcatcctgagtgatggagtgacagagagccaccacctgcacctgtacatgcctgctggcatggccttcatggctgctgtgacctctgtggtgtactaccacaacatcgagaccagcaacttccccaagctgctgattgccctgctggtgtactggaccctggccttcatcaccaagaccatcaagtttgtgaagttcctggaccacgccatcggcttcagccagctgcgcttctgcctgaccggcctgctggtgatcctgtatggcatgctgctgctggtggaggtgaatgtcatccgggtgcggcgctacatcttcttcaagaccccccgggaggtgaagcccccagaggacctgcaggacctgggcgtgcgcttcctgcagccctttgtgaacctgctgagcaagggcacctactggtggatgaatgccttcatcaagacagcccacaagaagcccatcgacctgcgggccatcggcaagctgcccatcgccatgagggccctgaccaactaccagaggctgtgtgaggcctttgatgcccaggtgaggaaggacatccagggcacccagggcgcccgggccatctggcaggccctgagccacgcctttggaagaaggctggtgctgagcagcaccttccgcatcctggccgacctgctgggctttgctggccccctgtgcatctttggaattgtggaccacctgggcaaggaaaatgatgtgttccagcccaagacccagttcctgggcgtgtactttgtgagcagccaggagttcctggccaatgcctacgtgctggccgtgctgctcttcctggccctgctgctgcagaggaccttcctgcaggccagctactacgtggccattgaaacaggcatcaacctgcggggggccatccagaccaagatctacaacaagatcatgcacctgagcaccagcaacctgtccatgggagagatgacagctggccagatctgcaacctggtggccatcgacaccaaccagctgatgtggttcttcttcctgtgccccaacctgtgggccatgcctgtgcagatcatcgtgggcgtcatcctgctgtactacatcctgggcgtgtctgccctgattggagctgctgtgatcatcctgctggcccctgtgcagtactttgtggccaccaagctgagccaggcccagaggagcaccctggagtacagcaatgaaaggctgaagcagaccaatgagatgctgcggggcatcaagctgctgaagctgtatgcctgggagaacatcttccgcaccagggtggagaccaccaggaggaaggagatgaccagcctgcgggcctttgccatctacaccagcatcagcatcttcatgaacacagccatccccatcgctgctgtgctgatcacctttgtgggccacgtgtccttcttcaaggaggccgacttcagccccagcgtggcctttgccagcctgagcctcttccacatcctggtgacccccctcttcctgctgagctctgtggtgcgcagcacagtgaaggccctggtgtctgtgcagaagctgtctgagttcctgagcagcgctgagatccgggaggagcagtgtgcccctcatgagcccaccccccagggccctgccagcaagtaccaggccgtgcccctgcgggtggtgaacaggaagaggcctgcccgggaggactgccggggcctgaccggccccctgcagagcctggtgcccagcgcagatggagatgctgacaactgctgcgtgcagatcatgggcggctacttcacctggaccccagatggcatccccaccctgagcaacatcaccatccgcatcccccggggccagctgaccatgattgtgggccaggtgggctgcggcaagagcagcctgctgctggccgccctgggggagatgcagaaggtgtctggagctgtgttctggagcagcctgcctgattctgaaattggagaggaccccagccctgagcgggagacagccacagacctggacatcaggaagaggggccctgtggcctatgccagccagaagccctggctgctgaatgccaccgtggaggagaacatcatctttgagagccccttcaacaagcagcgctacaagatggtgattgaggcctgcagcctgcagcctgacatcgacatcctgccccacggggaccagacccagatcggggagcggggcatcaacctgagcggcggccagaggcagaggatctctgtggcccgggccctgtaccagcacgccaacgtggtgttcctggatgaccccttcagcgccctggacatccacctgagtgaccacctgatgcaggccggcatcctggagctgctgagagatgacaagaggacagtggtgctggtgacccacaagctgcagtacctgccccacgccgactggatcatcgccatgaaggatggcaccatccagcgggagggcaccctgaaggacttccagaggtctgagtgccagctgtttgagcactggaagaccctgatgaaccggcaggaccaggagctggagaaggagaccgtgacagagaggaaggccacagagcccccccagggcctgagccgggccatgagcagcagagatggcctgctgcaggatgaggaggaggaggaggaggaggccgctgagagtgaagaagatgacaacctgagctccatgctgcaccagagagctgagatcccctggagggcctgtgccaagtacctgagcagcgctggcatcctgctgctgagcctgctggtgttcagccagctgctgaagcacatggtgctggtggccatcgactactggctggccaagtggacagattctgccctgaccctgaccccagctgccaggaactgcagcctgagccaggagtgcaccctggaccagacagtgtatgccatggtgttcaccgtgctgtgcagcctgggcatcgtgctgtgcctggtgacctctgtgacagtggagtggacaggcctgaaggtggccaagaggctgcacaggagcctgctgaaccgcatcatcctggcccccatgaggttctttgagaccacccccctgggcagcatcctgaaccgcttcagcagtgactgcaacaccatcgaccagcacatccccagcaccctggagtgcctgagccgcagcaccctgctgtgtgtgtctgccctggccgtcatctcctatgtgacccctgtgttcctggtggccctgctgcccctggccatcgtgtgctacttcatccagaagtacttccgggtggccagccgggacctgcagcagctggatgacaccacccagctgcccctgctgagccactttgctgagaccgtggagggcctgaccaccatccgggccttccgctatgaggcccgcttccagcagaagctgctggagtacacagacagcaacaacatcgccagcctcttcctgacagctgccaaccgctggctggaggtgaggatggagtacatcggggcctgtgtggtgctgattgctgctgtgaccagcatcagcaacagcctgcaccgggagctgtctgctggcctggtgggcctgggcctgacctacgccctgatggtgagcaactacctgaactggatggtgaggaacctggccgacatggagctgcagctgggcgctgtgaagagaattcatggcctgctgaagacagaggccgagagctatgagggcctgctggcccccagcctcatccccaagaactggccagaccagggcaagatccagatccagaacctgtctgtgcgctatgacagcagcctgaagcctgtgctgaagcacgtgaatgccctgattgcccctggccagaagattggcatctgtggccgcacaggcagcggcaagagcagcttcagcctggccttcttcaggatggtggacacctttgagggccacatcatcattgatggcattgatattgccaagctgcccctgcacaccctgcggagccggctgagcatcatcctgcaggaccctgtgctcttcagcggcaccatccgcttcaacctggaccctgagaggaagtgcagcgacagcaccctgtgggaggccctggagatcgcccagctgaagctggtggtgaaggccctgcccggcggcctggatgccatcatcacagaaggaggagagaacttcagccagggccagaggcagctgttctgcctggcccgggcctttgtgaggaagaccagcatcttcatcatggatgaggccacagccagcattgacatggccacagagaacatcctgcagaaggtggtgatgacagcctttgctgacagaacagtggtgaccatcgcccaccgggtgcacaccatcctgtctgctgacctggtgattgtgctgaagagaggagccatcctggagtttgacaagccagagaagctgctgagcaggaaggacagcgtgtttgccagctttgtgcgggctgacaagtag

SEQ ID NO: 7442 - DNA, 2994 bp, Artificial Sequence
  derived and/or modified sequence
atgcccctggccttctgtggcagcgagaaccacagcgctgcctacagagtggaccagggcgtgctgaacaacggctgctttgtggatgccctgaatgtggtgccccacgtgttcctgctcttcatcaccttccccatcctcttcatcggctggggcagccagagcagcaaggtgcacatccaccacagcacctggctgcacttccctggccacaacctgcgctggatcctgaccttcatgctgctgtttgtgctggtgtgtgaaattgctgagggcatcctgagtgatggagtgacagagagccaccacctgcacctgtacatgcctgctggcatggccttcatggctgctgtgacctctgtggtgtactaccacaacatcgagaccagcaacttccccaagctgctgattgccctgctggtgtactggaccctggccttcatcaccaagaccatcaagtttgtgaagttcctggaccacgccatcggcttcagccagctgcgcttctgcctgaccggcctgctggtgatcctgtatggcatgctgctgctggtggaggtgaatgtcatccgggtgcggcgctacatcttcttcaagaccccccgggaggtgaagcccccagaggacctgcaggacctgggcgtgcgcttcctgcagccctttgtgaacctgctgagcaagggcacctactggtggatgaatgccttcatcaagacagcccacaagaagcccatcgacctgcgggccatcggcaagctgcccatcgccatgagggccctgaccaactaccagaggctgtgtgaggcctttgatgcccaggtgaggaaggacatccagggcacccagggcgcccgggccatctggcaggccctgagccacgcctttggaagaaggctggtgctgagcagcaccttccgcatcctggccgacctgctgggctttgctggccccctgtgcatctttggaattgtggaccacctgggcaaggaaaatgatgtgttccagcccaagacccagttcctgggcgtgtactttgtgagcagccaggagttcctggccaatgcctacgtgctggccgtgctgctcttcctggccctgctgctgcagaggaccttcctgcaggccagctactacgtggccattgaaacaggcatcaacctgcggggggccatccagaccaagatctacaacaagatcatgcacctgagcaccagcaacctgtccatgggagagatgacagctggccagatctgcaacctggtggccatcgacaccaaccagctgatgtggttcttcttcctgtgccccaacctgtgggccatgcctgtgcagatcatcgtgggcgtcatcctgctgtactacatcctgggcgtgtctgccctgattggagctgctgtgatcatcctgctggcccctgtgcagtactttgtggccaccaagctgagccaggcccagaggagcaccctggagtacagcaatgaaaggctgaagcagaccaatgagatgctgcggggcatcaagctgctgaagctgtatgcctgggagaacatcttccgcaccagggtggagaccaccaggaggaaggagatgaccagcctgcgggcctttgccatctacaccagcatcagcatcttcatgaacacagccatccccatcgctgctgtgctgatcacctttgtgggccacgtgtccttcttcaaggaggccgacttcagccccagcgtggcctttgccagcctgagcctcttccacatcctggtgacccccctcttcctgctgagctctgtggtgcgcagcacagtgaaggccctggtgtctgctgagatccgggaggagcagtgtgcccctcatgagcccaccccccagggccctgccagcaagtaccaggccgtgcccctgcgggtggtgaacaggaagaggcctgcccgggaggactgccggggcctgaccggccccctgcagagcctggtgcccagcgcagatggagatgctgacaactgctgcgtgcagatcatgggcggctacttcacctggaccccagatggcatccccaccctgagcaacatcaccatccgcatcccccggggccagctgaccatgattgtgggccaggtgggctgcggcaagagcagcctgctgctggccgccctgggggagatgcagaaggtgtctggagctgtgttctggagcagcctgcctgattctgaaattggagaggaccccagccctgagcgggagacagccacagacctggacatcaggaagaggggccctgtggcctatgccagccagaagccctggctgctgaatgccaccgtggaggagaacatcatctttgagagccccttcaacaagcagcgctacaagatggtgattgaggcctgcagcctgcagcctgacatcgacatcctgccccacggggaccagacccagatcggggagcggggcatcaacctgagcggcggccagaggcagaggatctctgtggcccgggccctgtaccagcacgccaacgtggtgttcctggatgaccccttcagcgccctggacatccacctgagtgaccacctgatgcaggccggcatcctggagctgctgagagatgacaagaggacagtggtgctggtgacccacaagctgcagtacctgccccacgccgactggatcatcgccatgaaggatggcaccatccagcgggagggcaccctgaaggacttccagaggtctgagtgccagctgtttgagcactggaagaccctgatgaaccggcaggaccaggagctggagaagaggcggcagctgcgggcccggaggatgaccacctgccggccctgctgcacctctgtgctgcggagccatggagagcccgcccccagcacctgccccccaccagccagctgcagctgccgctgctggagcagccacagctgcagcagcacctggagctggtggcccagcaccaccggctggcccagcggccccacagccccctag

SEQ ID NO: 7443 - DNA, 3036 bp, Artificial Sequence
  derived and/or modified sequence
cggagccagctgagccccagccccgcccgggcccgggccgccatgcctctggcgttttgcgggagtgaaaaccattcagcggcatatcgcgtggatcagggggtgctgaacaatggttgctttgtggatgccctaaacgtagtccctcatgtgtttctactgtttatcacctttcctattctttttatcgggtggggctcgcagtcctccaaggtgcatatacaccattcgacttggctccactttccgggacacaatctgaggtggattctgaccttcatgctgctgttcgtgctcgtgtgtgaaatcgcggagggtatcctctcagacggcgtcactgaatcccaccatctgcacctgtatatgcccgccggtatggccttcatggccgcagtcacctccgttgtgtattatcataatattgaaaccagcaactttcccaagctgctgattgctctcctggtatattggaccctggccttcatcactaaaacgattaagtttgtaaaatttcttgaccacgcgataggctttagccagctgcgattctgtctgacagggctgctcgtgattttgtatgggatgctcctgcttgtggaggtgaacgttatccgggtgcgtcgctatatcttctttaagacacccagggaggtaaaacctcctgaggatcttcaagaccttggggtcaggttcctccagcctttcgtaaatctgctcagcaagggcacttactggtggatgaatgccttcatcaagaccgcccataagaaaccgatcgacttgcgggcaattgggaagctgccaattgcaatgcgagccctcacgaattaccagcggctttgcgaagccttcgacgctcaggtgcgcaaggatattcagggtacccaaggggccagagccatttggcaggctctgtctcatgcctttggacgccggctggtgctctcctctacctttaggatcttagcggatcttctcggttttgccggacctttatgcatcttcgggatagtggatcatctggggaaagagaacgacgtttttcagcccaagacgcagtttctcggagtttactttgtgagctcccaagaatttcttgccaacgcttacgttctggcagtccttctattcctagcactactgctccaacgaaccttccttcaggcctcttattatgtcgcgatcgaaacgggcataaacctcagaggtgctatccagactaagatctacaataaaataatgcacctgagcacctccaatctgtcaatgggggaaatgaccgcagggcaaatatgcaatttggtagcaattgataccaatcagctgatgtggttcttctttctgtgcccgaacctctgggccatgcctgtgcagatcatcgttggcgtgatcctgctttactatatcctgggtgtttcggcattgattggcgccgccgtgatcattctgctcgctccagtccagtatttcgttgcaactaagctaagccaggctcagagatccactctggagtacagtaacgaaagattaaagcaaactaacgaaatgttacgcggaattaaacttttgaagttatatgcttgggaaaacatctttaggacccgagtggagactaccagaagaaaggaaatgacttctctgcgagctttcgcaatttatacatccatctcgatctttatgaacacggctattcccatagctgcggtcctgatcactttcgtgggccacgtgagttttttcaaagaggccgatttttctccgtctgtggcttttgcgagtctgtccctcttccacatactggttactcctctttttctgctctcttcagtagtgagaagtacggttaaagctctggttagcgccgaaattagagaggagcagtgcgcgcctcacgaacccacgccacagggcccagcctccaaataccaggctgtccccctgcgtgtggtgaaccggaaaaggccagccagggaagattgcaggggactaaccgggcccctgcagtcactggtgccttcagctgatggcgatgccgataattgttgtgtccaaattatgggagggtattttacgtggactcctgatggaatcccgacgttgagtaatatcactattcggatccccaggggacaactgacaatgatcgtgggccaggttggatgtggcaagtcaagcttgttacttgccgcgttgggcgagatgcagaaggttagtggagcagtcttttggagctcacttcccgactccgaaatcggtgaagatccctccccggagagggagactgccacagatctggacattcgtaaacgcggaccagtagcatacgcttcccagaagccatggctattgaacgcaaccgtcgaggagaatattatctttgagagcccattcaataagcagagatataaaatggtgattgaggcctgtagcctgcaaccagacatcgacatcctgccccatggcgaccaaacccagattggcgagaggggtatcaatctgagtggggggcaacgccagcgcattagtgttgctcgggccctctatcagcacgcaaacgttgtgttcctggacgaccccttcagcgccttggatattcatctatctgaccatctgatgcaagccgggatcctggagttactccgggatgacaaacgcaccgtggtgctggtgacccataagttgcagtacctcccccacgcagactggatcatcgctatgaaagatggaaccatccagcgggaaggtacattgaaggacttccagcgttctgagtgccaactgttcgagcattggaagacgctgatgaaccgacaggatcaagagctcgaaaagaggcggcagctcagagcgcgcaggatgaccacctgtaggccctgctgtacaagtgtgctaaggagccacggggagccagctccatcaacctgcccaccccctgcttcatgtagctgtagatgctggtcatctcattcatgtagcagcacgtggtcctggtggccctcgacgacggggtggccatcaggaccaaccgccccctag

SEQ ID NO: 7444 - DNA, 4746 bp, Artificial Sequence
  derived and/or modified sequence
atgcccctggccttctgcggcagcgagaaccacagcgccgcctacagagttgatcagggtgtactaaataatggctgcttcgtggacgccctgaacgtagtgcctcatgtttttttgctgttcattacatttccaattttatttatcggctggggttctcaaagtagcaaggtccatatacaccacagcacctggcttcactttccagggcataatctgcgctggatcttgacatttatgctcctgtttgtgcttgtgtgtgagattgctgaaggaattctgtcggatggtgtcacggagtcccaccacctgcatctatacatgcccgcaggcatggcctttatggccgctgtaactagtgtggtctattatcacaacattgagacatctaactttccaaagctgttgattgcactgcttgtgtactggaccttagcatttataacgaagactataaaatttgtcaaattcttggatcacgctatagggtttagccagctgaggttctgtttaacggggctgcttgtaatactgtacgggatgttgctcctggtggaagtgaatgtgatccgggtcaggcgctacatcttttttaaaacaccaagggaagttaaaccccccgaagatctccaagacttgggtgtgcggttcctgcagccctttgtgaacctcctgagcaaaggcacctattggtggatgaacgcattcataaagactgctcataaaaagcctattgatctgagggcaatcgggaaactgccaatcgccatgagggcgttaaccaactatcagaggctgtgtgaggcttttgacgcacaggtgcggaaggacattcaggggacccagggggcccgggcaatatggcaggctttgtcccatgccttcgggcggcgcctggtcttatcctcaacgttcaggattttagccgatctgcttggatttgccgggcccctgtgcatttttggcattgtcgaccacctgggcaaagagaacgacgtattccagccaaagactcagtttttaggcgtgtatttcgttagcagccaggaattcctggctaacgcatacgtgctggcagttttgctgttcctagcactgttgttacagcggaccttccttcaggcttcctactatgtggcgatcgagacaggcattaacctcagaggcgccatacagactaagatatacaataaaatcatgcaccttagtacatccaatctgtcaatgggcgaaatgacggctggtcaaatatgcaatctggttgcaatcgataccaaccagcttatgtggtttttcttcctctgcccaaacctgtgggctatgcccgtgcagatcatcgtgggcgtgatcctattatactatattctcggagtatcggccctcatcggcgccgccgtgatcattctgctggccccggtgcagtactttgtcgcaaccaagctatcacaagcccagcgcagcacgctggaatacagcaatgaaaggctgaagcagaccaatgagatgctaaggggtatcaaattgctgaagctgtacgcatgggagaatatcttccggacaagggtcgaaacaacacgccgaaaagaaatgacatccttgcgcgctttcgccatctacacttccatctccatatttatgaataccgctatccccatcgccgccgtgttgatcacattcgtgggacatgtgtccttctttaaggaggctgatttctcaccatcagttgcgttcgcatctctatccctattccacattctggtcacacccctgtttctcctatcttccgtggttcgatccactgtaaaggccctagtatccgtgcagaaactctcagagtttctcagctctgctgagatccgagaggagcaatgcgcgcctcacgagccaacccctcaagggccggccagcaagtaccaggctgttcctttaagggtagtgaatagaaaacgtcctgcccgcgaggattgtagagggctgaccggtcctctccagagcctggtgccatcagcggacggtgacgccgataactgctgcgtgcagatcatgggcggctactttacctggacacctgacggcattccaaccttgagtaacatcaccatcagaattcctcggggacagctgaccatgattgttggccaggtcggatgcggaaagtcctccctactgctggccgcgttaggggaaatgcagaaagtcagcggggccgtgttttggtctagcctacccgattctgagatcggcgaggatcccagcccagaaagggaaactgcaactgacctggacattcgcaagcgagggccagtggcctacgcttctcagaaaccatggctgttgaacgctaccgtggaggaaaatatcattttcgaatcaccctttaacaaacaaagatacaagatggtcatcgaagcatgctctctgcagccggacattgatattctgccccacggggaccagactcagattggcgaacgtggaattaacctaagcggcggccagaggcagcggatctctgtcgcaagagcactctatcagcatgctaatgtggtttttttggatgatccattttcagcgctggatatccacttatccgatcacttgatgcaagcaggcatcctcgaattgctgcgagatgacaagcgtactgtagtgctggtgacccataagttgcagtatctaccccacgccgactggattatcgccatgaaagatggcaccattcagcgcgagggcactctcaaggactttcaaaggtctgaatgccaactctttgaacattggaaaaccctgatgaatcggcaggaccaggaactggaaaaggagaccgtcaccgagaggaaggctacagagccaccccagggacttagtagggctatgtcgtctagagacgggcttctgcaggacgaggaagaagaggaagaggaggccgcagagagcgaggaagacgacaatctttcttctatgctccaccagagagctgagattccgtggcgagcgtgtgccaagtatctgtccagtgcggggatccttttattgagcttgctggttttcagtcaactgctcaagcacatggttttggtggccatcgactattggctggcaaagtggacagactctgctttgacactgacaccagcagccagaaattgttctctgtcccaggagtgcacccttgaccagaccgtgtatgccatggtgttcacagtcctgtgctcattaggtatcgtcctgtgtttggtgaccagcgtgacagtggagtggacaggcttgaaggtcgctaagaggctgcatcgatcccttttgaataggataattctcgcgcccatgcgttttttcgagaccactccgctggggtctatcttgaacaggttcagctctgactgcaataccatcgaccaacatattccatccacactagaatgtctgagccgatcaacactgttgtgtgtcagtgctcttgctgtgatatcctacgtgactccagtcttcttggtcgctttgctgccactggctatagtgtgctactttattcagaagtacttccgagtagccagtcgggatctgcagcagttagacgacacaacgcagctgccgctattgagtcatttcgctgagactgttgaaggactgacaactatccgggcttttaggtatgaagcacggtttcagcaaaaactgctcgagtataccgattcaaataatatagcttcactctttctcactgccgcgaatcgctggttggaggtgcgaatggaatacatcggggcatgcgtggtgctaatagccgccgttacttctatatctaacagtcttcaccgtgagctgtcagctgggcttgtgggcttagggctgacgtacgcactaatggtgagcaactatctgaattggatggtgcgcaacctggcagatatggagctgcaactcggcgccgtcaaaaggatccatgggctgctgaaaacggaggccgagtcctacgaaggcctgctggcaccctcacttatccccaagaactggcctgatcaaggaaaaattcagatacaaaatctcagcgtacgctatgactcctcactgaaacccgttttaaagcatgttaatgcgctcattgccccaggccagaaaattggtatctgcggaagaacaggctccggtaagtccagcttctccctcgccttctttcgcatggtcgatactttcgaggggcatattattatagatgggattgacatagcgaaactaccactgcacacgttgcggtcgaggctgtccattattctgcaggaccccgtcctcttttcgggaaccattcggttcaatcttgatccggagcgtaagtgcagcgactccaccctgtgggaggccctcgagatcgctcagctgaaactagtggttaaggcactgcctggaggcctggacgccatcattaccgaaggtggggagaacttctcacaggggcagaggcagctcttttgcctagccagggcattcgtgaggaagacaagtatttttattatggacgaggccacagcatccatcgacatggccacagaaaacatcctgcagaaggtggtcatgactgcctttgccgatcggacggttgtgactatcgcccaccgtgtgcacaccatcctaagcgcagacctcgtcatcgtactgaagaggggggccattctcgagttcgataaacctgaaaaattgctgtcaaggaaggatagcgtgtttgccagttttgtcagggccgataagtag

SEQ ID NO: 7445 - DNA, 2994 bp, Artificial Sequence
  derived and/or modified sequence
atgcccctggccttctgcggcagcgagaaccacagcgccgcctacagagttgaccagggcgtcctgaataacggctgctttgtggacgctttgaatgtggtaccccacgttttcctgctctttattacattccccatccttttcatcggatggggatcacagtccagcaaggttcacatccatcactccacatggctgcacttccctggccataaccttaggtggattctgacctttatgctcttgtttgtccttgtttgtgaaattgctgaggggatcctgagtgacggagtaaccgaatctcatcatctccatctttatatgcccgcagggatggccttcatggctgcggttacatccgtggtgtattatcataacatagagacctccaacttccccaagctgctgatagctctgctcgtctattggacgctcgcttttatcaccaagaccatcaagtttgtcaaattcctggatcatgcaatcggctttagccagctgcgattctgcctgacagggctgctggttattctgtacggaatgctgctgttagtagaggtcaatgtgatcagggtgaggagatatattttctttaagaccccccgcgaggtgaagccaccagaggacctacaagacctcggcgtgaggttcctgcagccattcgttaatctactaagtaagggtacttactggtggatgaatgccttcattaaaaccgcccacaaaaaaccaatagatttgcgcgcgatcggaaaactgccgatcgccatgcgagctcttacaaattaccagcggttgtgcgaggctttcgatgcacaagtacggaaagacattcaggggacacaaggggcccgtgccatatggcaggccttgtcccatgcatttggtcgccgcctggttcttagctctacctttaggatactggctgatctgttggggttcgcggggcccctttgcatttttggcatcgtcgaccaccttggtaaggagaatgatgtctttcagccgaagacacaattcttgggcgtgtattttgttagctcccaggagtttctcgccaatgcgtatgtcttagccgtcctcttgtttctcgccctcttgctccagcggaccttccttcaggccagttattatgtggccattgaaacaggtataaacttgcggggcgccattcagaccaaaatatataacaagatcatgcatctcagtaccagcaatctgagcatgggggagatgaccgccggccagatctgtaacctggtggcaatcgatacgaaccagctgatgtggttttttttcctttgtcccaacttatgggcaatgccggttcaaatcatcgttggagtgattttgctgtactatatcctcggtgtctcagcactgattggcgccgctgtgatcattcttctcgccccagtccagtattttgttgcaacaaagctatcacaggcacagaggtcaaccttagaatatagcaacgagcgactgaaacagacaaatgagatgctgcgcggaattaagttgctgaaactgtacgcctgggagaatatcttcaggacaagagtggaaaccacaaggcgtaaagagatgaccagcctgagagcctttgccatctacacttctatctctatctttatgaacaccgccattcccattgctgccgttttgataacgtttgtgggacacgtatccttcttcaaagaagccgacttttccccaagtgtcgctttcgcttcactgtccttatttcatatcctggtcacacccttatttctactgagctccgtcgtgcggagcacagttaaggcattggtgagtgccgaaattcgggaagagcagtgtgcgccccacgaaccgacaccccagggaccagcctctaagtaccaggccgtgccgctccgagttgtgaatcgaaaacgccctgcaagagaagactgccgcggactgaccggcccgttgcagagccttgttccaagtgcagacggcgatgcagataattgctgcgtgcagataatgggggggtactttacatggacccccgacgggataccaacattgtccaacatcaccatccgaattccaagggggcaactgaccatgattgtgggccaggttgggtgtggaaaaagctccctgctgctggccgcattaggtgaaatgcaaaaggtgagtggcgcagtcttttggtcgtccctccccgatagcgagattggagaagatcccagcccagagcgcgaaaccgccaccgatttggacatacgcaaacgtggccctgttgcttacgcatcccaaaagccatggcttctaaacgcaacggtcgaagaaaacataattttcgagtcccctttcaataaacagagatacaagatggtaatcgaggcctgctctctgcagcctgacatcgacatccttccccacggtgatcagacacagatcggcgagagaggaattaacctttccggggggcagcgtcagaggatctctgtcgctcgtgctctgtaccagcatgctaatgtggtgttccttgacgacccattcagcgccttggacatacatctgagtgatcatctgatgcaagccgggattctggagctgctgcgggatgacaagaggactgtggtgctcgtgacacataagctacagtatctaccacatgccgactggattatcgcgatgaaggacggcaccattcagcgggaaggcacactcaaggatttccagaggtctgagtgccagctctttgagcactggaaaaccctcatgaaccgccaggaccaggagcttgagaagcgacgacagctcagggcacgccgaatgactacgtgccgcccttgttgcacttctgtgctgcgaagccacggcgagccagcacctagtacttgcccaccaccagcctcttgctcatgcaggtgttggagttcccatagttgttcctcaacatggtcatggtggcccagtacgaccggatggccttccggacccactgccccctag

SEQ ID NO: 7446 - DNA, 3036 bp, Artificial Sequence
  derived and/or modified sequence
cggtcccagttaagcccctctcccgctcgagcgagggctgccatgcctctcgccttttgcggcagtgaaaaccacagtgcggcttatagagtggatcagggggtgctaaacaatggttgtttcgtcgatgcccttaatgtcgtgccccatgtgttcctgttgttcattacattcccaattcttttcataggatggggatctcagtcaagcaaggtccatatccaccacagtacatggcttcacttcccaggccacaatttgaggtggatcctgacattcatgttattgtttgtgctcgtgtgcgaaatcgcagaaggcattctgtccgacggagtgacggagtcccatcatcttcatctctacatgccggcaggtatggcttttatggcagcagtcacctctgtcgtttactatcataatattgaaacctctaactttcccaagttattgatcgccctcttggtctactggacccttgccttcataaccaagaccataaagtttgtgaaatttctggatcatgccattggtttctctcagctgcggttttgcctgacaggcttgctcgtcatcttatatggcatgctgctcttggtggaagtcaatgttattagggtccgcagatacattttcttcaagacacccagagaggttaagcccccagaagacctgcaggacttgggtgtgcgctttttacagccgttcgtcaatcttttatctaagggaacctactggtggatgaatgccttcatcaagactgcccacaaaaagccaatcgatctcagggcaataggtaagttacccatcgcgatgagagctctgaccaactatcagcgcttgtgcgaagctttcgacgcacaggtacggaaggatatacagggcacacaaggcgctagagctatctggcaagccttatcacacgccttcggtaggagactggtcctgtcttccacttttcggattctggctgacctcctaggcttcgccggtccactgtgcatctttggcattgtcgaccacctgggcaaggaaaatgacgtgtttcagcccaagacgcagtttttaggggtgtactttgttagcagccaagagtttttggctaacgcctacgtgctcgctgtcttgctctttcttgctctgctgctgcagcgtacctttctgcaggcaagttactacgttgccatagaaacgggcataaacctgagaggtgccattcagaccaaaatctataacaagatcatgcatctcagcacatccaacctcagtatgggggagatgacagctggccagatttgcaacctggtcgcaattgatactaaccaactgatgtggtttttcttcctgtgtccaaacttgtgggctatgccagttcagattatcgtgggcgtgatcttgctatactacattttgggcgtatctgctctgattggagcggctgtcataattttgttagcacccgtgcagtacttcgtcgctaccaaactctcacaggcgcagcggtcaacactcgaatattctaacgagagactcaaacagacaaatgagatgctgcgaggcattaaacttttgaaactttatgcttgggagaacatcttccgcacacgggtggagacaacccggagaaaggaaatgactagcctgcgagcattcgctatttatacttctatcagcattttcatgaacaccgccatccctattgctgccgtccttatcacttttgtcggacacgtgagtttttttaaagaagccgatttctccccttccgtcgccttcgccagcctgtccctgttccacattctggtcactcctctctttctgctcagcagcgtggtccgtagtaccgtcaaagcactggttagtgctgagattagggaggagcaatgtgcaccccacgaaccgaccccacaaggcccagcctcgaagtatcaggcagtcccccttcgcgtggtcaaccgaaagaggcccgctagggaagattgtagaggtttgactggccctctccagtcacttgtgccatctgccgacggcgacgcggataattgctgcgtccagattatgggcggttactttacttggactcccgatggcatacccacgctttctaatataacaatccgcatacccaggggacaacttacgatgattgtgggccaggttggatgtggcaaaagtagcctgctcttagccgctctcggggaaatgcagaaagtgagcggtgccgtgttctggtcaagcctgccagattccgagattggcgaggacccatcccccgagcgggagacggctacagatctcgacataaggaagagagggcctgtggcgtacgcttcccaaaaaccctggttgctcaacgccactgtagaggagaatatcatattcgaatccccatttaacaagcagagatataaaatggtgatcgaagcgtgcagtctgcagcccgatatcgacatccttccacacggagatcagacccagatcggagagcgaggtatcaacctatctggcggacagcgccagagaatctctgtggccagagctctgtaccaacatgccaacgtcgtctttttggacgacccctttagtgctctggatatacatctctcagaccacttgatgcaggctggaatcttagagttgctgagagatgacaaacgtaccgttgtgctagtgacccacaaactgcagtatctccctcacgccgattggattatcgctatgaaagacgggacgattcaacgggaagggaccctcaaagacttccaaaggtcagagtgtcagctgttcgagcattggaaaactctcatgaacagacaagatcaagagttggaaaaacgtaggcaactcagggccagaaggatgaccacctgtaggccctgttgtactagtgttctgcggtcacacggtgagcctgcacctagcacatgccctcccccagctagctgctcttgtcggtgttggagttcacacagttgcagcagtacctggtcgtggtggcctagcactactggctggccctccggacctacagccccatag

SEQ ID NO: 7447 - DNA, 4746 bp, Artificial Sequence
  derived and/or modified sequence
atgccactggcattttgtggaagcgaaaaccacagcgcagcctatagggtagaccaaggcgtgctcaacaatggctgtttcgtggacgctttgaacgtcgtcccacatgtgtttctgctttttatcacattcccaatcctattcattggatggggtagtcagtcctccaaggtccatatccaccacagcacatggctccattttccaggccacaacctgcgttggatcctgacatttatgcttctgttcgtgcttgtttgcgaaatcgcagaaggcattctctccgacggagtgaccgagagccaccatctgcacctatacatgccggcaggtatggcattcatggccgcagtgacatctgtcgtgtactatcacaatatagagacctccaacttcccaaaactgttgatcgctctgctagtctactggacacttgcattcatcaccaaaacaatcaagtttgttaagttcttggatcatgctatcgggttcagtcaattgcgcttctgtctcacaggattactcgtaattctgtatgggatgttactcctggttgaagtcaatgttatcagggtgcgtcgttatatctttttcaagactcccagagaggtgaagcctccggaagatttgcaggatcttggagtgcggttccttcagccattcgttaacctgctttctaagggaacctactggtggatgaatgcttttatcaagacagcccataagaagccaattgacctacgggcaatcgggaagctgcctatagctatgagggccctcacgaactaccagagactttgtgaggccttcgacgcgcaggtccggaaggatattcaaggtacgcagggggctagggctatctggcaggccctttcccatgcctttggccgaaggctggtgctcagtagcacttttagaatcttggcagatctgctggggtttgccggaccactctgcatattcggaatcgtggatcacctgggaaaagagaacgatgttttccagccaaagacgcagttcctcggagtgtatttcgtgtcttcacaggaatttctggccaacgcctacgtcttggccgtgctcctatttctcgctctcctattgcaacgcacctttctgcaggcgagctattatgtggcaattgagacaggaatcaacctcaggggcgctatccagactaaaatttataacaaaattatgcacctatccacatcaaatctgagcatgggtgaaatgacggccggacagatctgtaacctggtggccatcgatacaaaccagttaatgtggttcttctttctttgccccaacttgtgggccatgcccgtgcaaatcattgtgggcgtgattcttttgtattacatactgggagtgagtgctcttattggcgcagcggtcataatacttctagccccagtgcagtacttcgtcgctactaaactctcccaggcacagcgtagcactctcgagtattccaatgagagactgaaacaaaccaacgagatgctgcgaggtattaagttgctgaaattgtatgcatgggagaacattttcagaacaagggtcgaaacaacacggaggaaggagatgactagcctgagggcattcgccatctatacctctatctctatcttcatgaacactgcaatcccaatagcagccgtcctaataacattcgtgggacacgttagcttttttaaagaggcagacttcagtccctctgtggcattcgcgagtttaagcttgttccacattctagttacaccactatttcttctgtcaagcgtggtgagatccacagtcaaggcactggtatcggtgcaaaagttgtcagagtttctgagttcagccgagataagagaggaacagtgcgccccacacgagccaactcctcagggtcccgcatccaaataccaggcagtccccctcagagtggtaaaccgtaaacgacccgctagagaagattgccgcggtctgaccgggcctcttcagtcacttgtcccaagcgccgacggcgacgcagataactgttgcgtgcagattatgggagggtactttacatggacacctgatggaattcccaccctgtctaacattaccatccggatccccagaggacagctgactatgatagtgggccaggttgggtgcgggaaatcttctcttcttttagcagcactgggagaaatgcagaaagtgtcaggggctgtgttctggagctccttgcccgactccgagatcggtgaggatccaagcccagaacgcgaaacagccacagatctggacattcggaaaagaggtcctgttgcttacgcctctcagaagccatggctgctgaatgctactgtagaggaaaatattatctttgaaagcccctttaataagcagcggtataaaatggttattgaagcctgttctctgcagcccgacatcgatatactgccgcacggtgaccaaacacaaatcggcgagaggggaataaatctatctggcggacagcgccagcgtatcagcgtggctagggctctttaccagcatgcgaatgtagtgtttttggacgacccattctctgcactggatattcacctgtccgatcatttgatgcaggccggaattttggaactcctgcgggatgacaagagaacagtcgtactcgtgacacacaaactgcagtaccttccccatgccgactggatcatcgcaatgaaagatgggactatacaaagggaaggtactctcaaagactttcagcgtagcgaatgccagctgtttgaacattggaagaccctaatgaaccgccaggatcaggagctcgagaaggaaacagtcactgagagaaaggctactgagccccctcagggccttagccgggcaatgtcatcccgcgatggtctcttgcaggacgaggaggaagaagaagaggaggcggctgaaagcgaagaggatgacaacctttcttctatgctgcaccagcgggctgaaataccatggcgtgcctgcgcaaagtatctatccagcgcgggaattttgttgctgtccttgctggtgtttagccagctgctaaagcacatggtcctagtcgccatagattactggctggcgaaatggaccgactcagccttaaccctgacccccgctgcccgtaactgttcactgtcccaggaatgcaccctcgaccagacagtctacgccatggtgttcactgtgctttgtagtctgggaatcgtgctctgtctggttacctcagtgaccgttgagtggaccgggcttaaagtcgccaaacggctccacaggtctctcctgaacagaattattctggctcccatgaggttctttgaaacgacccccctgggctctattttgaatcgcttttcatccgactgtaataccatcgaccagcacatcccaagcactctcgagtgcctttcccgctcaacccttctgtgtgtctctgcgcttgcagtcatctcttacgttaccccggtgtttctggtggccctgctgccactcgcgatcgtatgttattttattcagaagtactttagggttgcctcccgtgacctccaacagctggacgacactactcagctgcctctcctgtctcacttcgccgaaacagttgagggtctaaccacgatccgggcttttagatacgaggcccgtttccagcagaagctactcgaatatactgattccaataatatcgcctcgctgttcctgactgccgctaaccgttggctcgaggttcggatggagtacatcggagcctgtgtcgtgctgattgcggcagtcacctcaatatccaattctctgcaccgtgagttatctgccggtctggtgggactgggtctgacttacgccctcatggtgtccaattatctaaactggatggtccggaatctcgccgatatggaacttcagctgggagcagtgaagagaatccatggcttgctgaagacagaagcagagagctatgaggggttgttggcacctagcctcattcccaaaaactggcctgaccagggaaagattcaaatccaaaacttatccgtgagatatgatagcagtctgaaacccgtgctgaaacacgtaaacgctttaattgctccaggccaaaaaatcgggatttgcggcaggacagggtcaggcaaaagttctttcagcctagcattcttcagaatggtggacacattcgagggccatatcatcatcgacggtattgacatcgccaaactgcctctacataccctcaggtctaggcttagcatcatcctgcaggatccagtcctgttcagcggaactattcgattcaacttggatcctgaaaggaaatgctctgatagtacgctctgggaagctctggaaatcgcgcagctcaagctcgtggttaaggccctgccaggcggattagatgcgattatcacagagggcggagagaacttttctcagggacaaagacagttgttttgcttagcgagagcgttcgtccgcaagacctccatttttattatggatgaagcgaccgcatccatagacatggccacggaaaacatcctccaaaaggtggtgatgactgccttcgctgacagaacagtcgtgaccattgcccatagagtgcacacgattctcagcgcggatctagttatcgtgctgaaacggggtgcaatcttggaattcgacaagccggagaagctactttcgcgtaaagattctgtctttgcctccttcgttagggctgataaatag

SEQ ID NO: 7448 - DNA, 2994 bp, Artificial Sequence
  derived and/or modified sequence
atgccactcgccttttgtggatccgaaaaccactccgcggcatatcgtgtagatcagggtgtgttgaataatggatgttttgtggacgccctgaacgtcgtgccacacgtctttttgctgtttattacattccccattcttttcataggatgggggtcgcagagcagtaaggtccacattcaccacagcacttggttgcatttcccgggtcacaacttgcggtggatcctcactttcatgttgctctttgtgctcgtttgcgagattgcggaaggaatcctctctgacggagtaacggagtcccatcatctgcatctgtacatgccagccggaatggccttcatggctgccgtgactagcgttgtgtattaccataatattgagacctctaactttcccaaactgctgattgcgctgctggtgtactggaccctggcctttattaccaaaacgattaagttcgtcaaattcctggaccacgcgatagggttcagccagctcaggttctgtctgaccggcttgctcgttattttatatggaatgctgctgctcgtggaggtgaatgtcatccgagtgaggcgatatattttcttcaagactccaagggaggtgaaaccgcctgaggatctccaagacctgggagttcggtttctccagcctttcgttaatctcttgtccaaaggcacctattggtggatgaacgcgtttatcaagaccgcacataagaaaccgatcgacctgcgggctattggaaaattacccatcgcgatgagggccctgaccaactaccaacgcctgtgtgaggcgtttgacgctcaagtgcgtaaggatatacagggtactcagggtgcaagagccatctggcaggcgctgtctcacgctttcgggaggcgacttgtactgtcctccacattcaggatccttgcggatttgctcggcttcgctgggccactatgcatttttggcatcgtggaccatctgggtaaggaaaacgatgtgtttcagcccaagacacagttcttgggagtttactttgtaagcagtcaggagtttctggccaacgcctacgttcttgcggtgttgctgttcctggccctgcttttgcagcggacgttcctccaggctagttactatgttgccatcgagacaggcatcaacctgcgaggagctatacagacgaagatttacaacaagattatgcatttgtccacaagcaacttgagcatgggcgagatgactgcagggcaaatttgtaacctggtagccattgacactaatcaactcatgtggtttttcttcctgtgtcctaatttgtgggctatgccggtgcagataatcgtgggagtgattcttctgtactatatactgggcgtgtccgccctcattggcgctgcagttattattctgctggcgcctgtacaatactttgtggccaccaaactgagccaggctcaaagatccacattagaatattcaaatgaacggctgaagcagactaatgaaatgctacgcggtatcaaattattgaaactgtacgcatgggagaacatctttcgcaccagagtcgaaacaacccgcaggaaagagatgacatctctgcgtgccttcgctatctacacaagtatctctatatttatgaacactgctattcccattgcagcagtgctcattacttttgtgggacacgttagcttcttcaaagaagcggatttctcaccatctgtagcctttgctagcctgtccttgttccacatcctggtgacgcctttgtttttactcagttccgtagtgagaagcaccgtcaaggccctagtgagtgctgaaatccgcgaagaacagtgtgctcctcacgagccaactccacagggaccagcatcaaaatatcaagccgtaccactgagggtggtgaataggaagcgacctgctcgggaagactgcagaggactgacaggcccactacagtcactggtgccaagcgctgacggcgatgcagataactgctgcgtgcaaatcatgggaggctactttacatggactccggatggtatcccaactctgagtaatataacaattaggatacctagggggcagttaactatgatcgtgggccaggtgggatgcgggaagagctcccttctgctggcagctctcggcgagatgcagaaagtgagcggagcagtgttctggagctcccttccagattcggagatcggggaggatcccagccccgagagagagacagcaaccgacctagacatcagaaaacgtggcccagtggcatatgcaagccagaagccctggctcctcaatgccacagtcgaggagaatatcatcttcgagagccctttcaacaagcaaagatataaaatggtcattgaggcatgctccttgcaacccgatatcgatatcttacctcacggagatcaaacgcagatcggagaaagaggcatcaaccttagcggaggacagcgccaacggatcagcgttgctcgagctttatatcaacatgcaaatgtcgtttttctggatgaccctttcagtgctttggacatccatctcagtgatcacctgatgcaggctggcatcctggaattactgagagacgataagcgcactgtcgtcctggtcacccacaagcttcaatacctgccacacgctgattggataattgcgatgaaagacgggaccatacagcgcgagggcactctgaaggatttccaacggagcgaatgtcagctcttcgagcactggaagacactcatgaaccgacaagatcaagagttagagaagaggcgccagcttagggcccgacggatgacaacctgccgtccatgctgtacatccgttcttagaagccatggcgaaccagcaccctccacgtgtcctccacccgcatcctgttcctgccgctgttggagctctcactcttgtagctctacatggtcgtggtggccctccacaaccggatggcccagcggcccaacagccccatag

SEQ ID NO: 7449 - DNA, 4848 bp, Artificial Sequence
  derived and/or modified sequence
cggggcccggggggcgggggcctgacggccgggccgggcggcggagctgcaagggacagaggcgcggcaggcgcgcggagccagcggagccagctgagcccgagcccagcccgcgcccgcgccgccatgcccctggccttctgcggcagcgagaaccactcggccgcctaccgggtggaccagggggtcctcaacaacggctgctttgtggacgcgctcaacgtggtgccgcacgtcttcctactcttcatcaccttccccatcctcttcattggatggggaagtcagagctccaaggtgcacatccaccacagcacatggcttcatttccctgggcacaacctgcggtggatcctgaccttcatgctgctcttcgtcctggtgtgtgagattgcagagggcatcctgtctgatggggtgaccgaatcccaccatctgcacctgtacatgccagccgggatggcgttcatggctgctgtcacctccgtggtctactatcacaacatcgagacttccaacttccccaagctgctaattgccctgctggtgtattggaccctggccttcatcaccaagaccatcaagtttgtcaagttcttggaccacgccatcggcttctcgcagctacgcttctgcctcacagggctgctggtgatcctctatgggatgctgctcctcgtggaggtcaatgtcatcagggtgaggagatacatcttcttcaagacaccgagggaggtgaagcctcccgaggacctgcaagacctgggggtacgcttcctgcagcccttcgtgaatctgctgtccaaaggcacctactggtggatgaacgccttcatcaagactgcccacaagaagcccatcgacttgcgagccatcgggaagctgcccatcgccatgagggccctcaccaactaccaacggctctgcgaggcctttgacgcccaggtgcggaaggacattcagggcactcaaggtgcccgggccatctggcaggcactcagccatgccttcgggaggcgcctggtcctcagcagcactttccgcatcttggccgacctgctgggcttcgccgggccactgtgcatctttgggatcgtggaccaccttgggaaggagaacgacgtcttccagcccaagacacaatttctcggggtttactttgtctcatcccaagagttccttgccaatgcctacgtcttagctgtgcttctgttccttgccctcctactgcaaaggacatttctgcaagcatcctactatgtggccattgaaactggaattaacttgagaggagcaatacagaccaagatttacaataaaattatgcacctgtccacctccaacctgtccatgggagaaatgactgctggacagatctgtaatctggttgccatcgacaccaatcagctcatgtggtttttcttcttgtgcccaaacctctgggctatgccagtacagatcattgtgggtgtgattctcctctactacatactcggagtcagtgccttaattggagcagctgtcatcattctactggctcctgtccagtacttcgtggccaccaagctgtctcaggcccagcggagcacactggagtattccaatgagcggctgaagcagaccaacgagatgctccgcggcatcaagctgctgaagctgtacgcctgggagaacatcttccgcacgcgggtggagacgacccgcaggaaggagatgaccagcctcagggcctttgccatctatacctccatctccattttcatgaacacggccatccccattgcagctgtcctcataactttcgtgggccacgtcagcttcttcaaagaggccgacttctcgccctccgtggcctttgcctccctctccctcttccatatcttggtcacaccgctgttcctgctgtccagtgtggtccgatctaccgtcaaagctctagtgagtgcagagatccgtgaggagcagtgtgccccccatgagcccacacctcagggcccagccagcaagtaccaggcggtgcccctcagggttgtgaaccgcaagcgtccagcccgggaggattgtcggggcctcaccggcccactgcagagcctggtccccagtgcagatggcgatgctgacaactgctgtgtccagatcatgggaggctacttcacgtggaccccagatggaatccccacactgtccaacatcaccattcgtatcccccgaggccagctgactatgatcgtggggcaggtgggctgcggcaagtcctcgctccttctagccgcactgggggagatgcagaaggtctcaggggctgtcttctggagcagccttcctgacagcgagataggagaggaccccagcccagagcgggagacagcgaccgacttggatatcaggaagagaggccccgtggcctatgcttcgcagaaaccatggctgctaaatgccactgtggaggagaacatcatctttgagagtcccttcaacaaacaacggtacaagatggtcattgaagcctgctctctgcagccagacatcgacatcctgccccatggagaccagacccagattggggaacggggcatcaacctgtctggtggtcaacgccagcgaatcagtgtggcccgagccctctaccagcacgccaacgttgtcttcttggatgaccccttctcagctctggatatccatctgagtgaccacttaatgcaggccggcatccttgagctgctccgggacgacaagaggacagtggtcttagtgacccacaagctacagtacctgccccatgcagactggatcattgccatgaaggatggcaccatccagagggagggtaccctcaaggacttccagaggtctgaatgccagctctttgagcactggaagaccctcatgaaccgacaggaccaagagctggagaagaggaggcagctgagagcgaggaggatgacaacctgtcgtccatgctgcaccagcgtgctgagatcccatggcgagcctgcgccaagtacctgtcctccgccggcatcctgctcctgtcgttgctggtcttctcacagctgctcaagcacatggtcctggtggccatcgactactggctggccaagtggaccgacagcgccctgaccctgacccctgcagccaggaactgctccctcagccaggagtgcaccctcgaccagactgtctatgccatggtgttcacggtgctctgcagcctgggcattgtgctgtgcctcgtcacgtctgtcactgtggagtggacagggctgaaggtggccaagagactgcaccgcagcctgctaaaccggatcatcctagcccccatgaggttttttgagaccacgccccttgggagcatcctgaacagattttcatctgactgtaacaccatcgaccagcacatcccatccacgctggagtgcctgagccgctccaccctgctctgtgtctcagccctggccgtcatctcctatgtcacacctgtgttcctcgtggccctcttgcccctggccatcgtgtgctacttcatccagaagtacttccgggtggcgtccagggacctgcagcagctggatgacaccacccagcttccacttctctcacactttgccgaaaccgtagaaggactcaccaccatccgggccttcaggtatgaggcccggttccagcagaagcttctcgaatacacagactccaacaacattgcttccctcttcctcacagctgccaacagatggctggaagtccgaatggagtacatcggtgcatgtgtggtgctcatcgcagcggtgacctccatctccaactccctgcacagggagctctctgctggcctggtgggcctgggccttacctacgccctaatggtctccaactacctcaactggatggtgaggaacctggcagacatggagctccagctgggggctgtgaagcgcatccatgggctcctgaaaaccgaggcagagagctacgaggggctcctggcaccatcgctgatcccaaagaactggccagaccaagggaagatccagatccagaacctgagcgtgcgctacgacagctccctgaagccggtgctgaagcacgtcaatgccctcatcgcccctggacagaagatcgggatctgcggccgcaccggcagtgggaagtcctccttctctcttgccttcttccgcatggtggacacgttcgaagggcacatcatcattgatggcattgacatcgccaaactgccgctgcacaccctgcgctcacgcctctccatcatcctgcaggaccccgtcctcttcagcggcaccatccgatttaacctggaccctgagaggaagtgctcagatagcacactgtgggaggccctggaaatcgcccagctgaagctggtggtgaaggcactgccaggaggcctcgatgccatcatcacagaaggcggggagaatttcagccagggacagaggcagctgttctgcctggcccgggccttcgtgaggaagaccagcatcttcatcatggacgaggccacggcttccattgacatggccacggaaaacatcctccaaaaggtggtgatgacagccttcgcagaccgcactgtggtcaccatcgcgcatcgagtgcacaccatcctgagtgcagacctggtgatcgtcctgaagcggggtgccatccttgagttcgataagccagagaagctgctcagccggaaggacagcgtcttcgcctccttcgtccgtgcagacaagtgacctgccagagcccaagtgccatcccacattcggaccctgcccatacccctgcctgggttttctaactgtaaatcacttgtaaataaatagatttgattatttccta

SEQ ID NO: 7450 - DNA, 4921 bp, Artificial Sequence
  derived and/or modified sequence
agaggcgcggcaggcgcgcggagccagcggagccagctgagcccgagcccagcccgcgcccgcgccgccatgcccctggccttctgcggcagcgagaaccactcggccgcctaccgggtggaccagggggtcctcaacaacggctgctttgtggacgcgctcaacgtggtgccgcacgtcttcctactcttcatcaccttccccatcctcttcattggatggggaagtcagagctccaaggtgcacatccaccacagcacatggcttcatttccctgggcacaacctgcggtggatcctgaccttcatgctgctcttcgtcctggtgtgtgagattgcagagggcatcctgtctgatggggtgaccgaatcccaccatctgcacctgtacatgccagccgggatggcgttcatggctgctgtcacctccgtggtctactatcacaacatcgagacttccaacttccccaagctgctaattgccctgctggtgtattggaccctggccttcatcaccaagaccatcaagtttgtcaagttcttggaccacgccatcggcttctcgcagctacgcttctgcctcacagggctgctggtgatcctctatgggatgctgctcctcgtggaggtcaatgtcatcagggtgaggagatacatcttcttcaagacaccgagggaggtgaagcctcccgaggacctgcaagacctgggggtacgcttcctgcagcccttcgtgaatctgctgtccaaaggcacctactggtggatgaacgccttcatcaagactgcccacaagaagcccatcgacttgcgagccatcgggaagctgcccatcgccatgagggccctcaccaactaccaacggctctgcgaggcctttgacgcccaggtgcggaaggacattcagggcactcaaggtgcccgggccatctggcaggcactcagccatgccttcgggaggcgcctggtcctcagcagcactttccgcatcttggccgacctgctgggcttcgccgggccactgtgcatctttgggatcgtggaccaccttgggaaggagaacgacgtcttccagcccaagacacaatttctcggggtttactttgtctcatcccaagagttccttgccaatgcctacgtcttagctgtgcttctgttccttgccctcctactgcaaaggacatttctgcaagcatcctactatgtggccattgaaactggaattaacttgagaggagcaatacagaccaagatttacaataaaattatgcacctgtccacctccaacctgtccatgggagaaatgactgctggacagatctgtaatctggttgccatcgacaccaatcagctcatgtggtttttcttcttgtgcccaaacctctgggctatgccagtacagatcattgtgggtgtgattctcctctactacatactcggagtcagtgccttaattggagcagctgtcatcattctactggctcctgtccagtacttcgtggccaccaagctgtctcaggcccagcggagcacactggagtattccaatgagcggctgaagcagaccaacgagatgctccgcggcatcaagctgctgaagctgtacgcctgggagaacatcttccgcacgcgggtggagacgacccgcaggaaggagatgaccagcctcagggcctttgccatctatacctccatctccattttcatgaacacggccatccccattgcagctgtcctcataactttcgtgggccacgtcagcttcttcaaagaggccgacttctcgccctccgtggcctttgcctccctctccctcttccatatcttggtcacaccgctgttcctgctgtccagtgtggtccgatctaccgtcaaagctctagtgagcgtgcaaaagctaagcgagttcctgtccagtgcagagatccgtgaggagcagtgtgccccccatgagcccacacctcagggcccagccagcaagtaccaggcggtgcccctcagggttgtgaaccgcaagcgtccagcccgggaggattgtcggggcctcaccggcccactgcagagcctggtccccagtgcagatggcgatgctgacaactgctgtgtccagatcatgggaggctacttcacgtggaccccagatggaatccccacactgtccaacatcaccattcgtatcccccgaggccagctgactatgatcgtggggcaggtgggctgcggcaagtcctcgctccttctagccgcactgggggagatgcagaaggtctcaggggctgtcttctggagcagccttcctgacagcgagataggagaggaccccagcccagagcgggagacagcgaccgacttggatatcaggaagagaggccccgtggcctatgcttcgcagaaaccatggctgctaaatgccactgtggaggagaacatcatctttgagagtcccttcaacaaacaacggtacaagatggtcattgaagcctgctctctgcagccagacatcgacatcctgccccatggagaccagacccagattggggaacggggcatcaacctgtctggtggtcaacgccagcgaatcagtgtggcccgagccctctaccagcacgccaacgttgtcttcttggatgaccccttctcagctctggatatccatctgagtgaccacttaatgcaggccggcatccttgagctgctccgggacgacaagaggacagtggtcttagtgacccacaagctacagtacctgccccatgcagactggatcattgccatgaaggatggcaccatccagagggagggtaccctcaaggacttccagaggtctgaatgccagctctttgagcactggaagaccctcatgaaccgacaggaccaagagctggagaaggagactgtcacagagagaaaagccacagagccaccccagggcctatctcgtgccatgtcctcgagggatggccttctgcaggatgaggaagaggaggaagaggaggcagctgagagcgaggaggatgacaacctgtcgtccatgctgcaccagcgtgctgagatcccatggcgagcctgcgccaagtacctgtcctccgccggcatcctgctcctgtcgttgctggtcttctcacagctgctcaagcacatggtcctggtggccatcgactactggctggccaagtggaccgacagcgccctgaccctgacccctgcagccaggaactgctccctcagccaggagtgcaccctcgaccagactgtctatgccatggtgttcacggtgctctgcagcctgggcattgtgctgtgcctcgtcacgtctgtcactgtggagtggacagggctgaaggtggccaagagactgcaccgcagcctgctaaaccggatcatcctagcccccatgaggttttttgagaccacgccccttgggagcatcctgaacagattttcatctgactgtaacaccatcgaccagcacatcccatccacgctggagtgcctgagccgctccaccctgctctgtgtctcagccctggccgtcatctcctatgtcacacctgtgttcctcgtggccctcttgcccctggccatcgtgtgctacttcatccagaagtacttccgggtggcgtccagggacctgcagcagctggatgacaccacccagcttccacttctctcacactttgccgaaaccgtagaaggactcaccaccatccgggccttcaggtatgaggcccggttccagcagaagcttctcgaatacacagactccaacaacattgcttccctcttcctcacagctgccaacagatggctggaagtccgaatggagtacatcggtgcatgtgtggtgctcatcgcagcggtgacctccatctccaactccctgcacagggagctctctgctggcctggtgggcctgggccttacctacgccctaatggtctccaactacctcaactggatggtgaggaacctggcagacatggagctccagctgggggctgtgaagcgcatccatgggctcctgaaaaccgaggcagagagctacgaggggctcctggcaccatcgctgatcccaaagaactggccagaccaagggaagatccagatccagaacctgagcgtgcgctacgacagctccctgaagccggtgctgaagcacgtcaatgccctcatcgcccctggacagaagatcgggatctgcggccgcaccggcagtgggaagtcctccttctctcttgccttcttccgcatggtggacacgttcgaagggcacatcatcattgatggcattgacatcgccaaactgccgctgcacaccctgcgctcacgcctctccatcatcctgcaggaccccgtcctcttcagcggcaccatccgatttaacctggaccctgagaggaagtgctcagatagcacactgtgggaggccctggaaatcgcccagctgaagctggtggtgaaggcactgccaggaggcctcgatgccatcatcacagaaggcggggagaatttcagccagggacagaggcagctgttctgcctggcccgggccttcgtgaggaagaccagcatcttcatcatggacgaggccacggcttccattgacatggccacggaaaacatcctccaaaaggtggtgatgacagccttcgcagaccgcactgtggtcaccatcgcgcatcgagtgcacaccatcctgagtgcagacctggtgatcgtcctgaagcggggtgccatccttgagttcgataagccagagaagctgctcagccggaaggacagcgtcttcgcctccttcgtccgtgcagacaagtgacctgccagagcccaagtgccatcccacattcggaccctgcccatacccctgcctgggttttctaactgtaaatcacttgtaaataaatagatttgattatttccta

SEQ ID NO: 7451 - DNA, 4283 bp, Artificial Sequence
  derived and/or modified sequence
gcggagccagctgagcccgagcccagcccgcgcccgcgccgccatgcccctggccttctgcggcagcgagaaccactcggccgcctaccgggtggaccagggggtcctcaacaacggctgctttgtggacgcgctcaacgtggtgccgcacgtcttcctactcttcatcaccttccccatcctcttcattggatggggaagtcagagctccaaggtgcacatccaccacagcacatggcttcatttccctgggcacaacctgcggtggatcctgaccttcatgctgctcttcgtcctggtgtgtgagattgcagagggcatcctgtctgatggggtgaccgaatcccaccatctgcacctgtacatgccagccgggatggcgttcatggctgctgtcacctccgtggtctactatcacaacatcgagacttccaacttccccaagctgctaattgccctgctggtgtattggaccctggccttcatcaccaagaccatcaagtttgtcaagttcttggaccacgccatcggcttctcgcagctacgcttctgcctcacagggctgctggtgatcctctatgggatgctgctcctcgtggaggtcaatgtcatcagggtgaggagatacatcttcttcaagacaccgagggaggtgaagcctcccgaggacctgcaagacctgggggtacgcttcctgcagcccttcgtgaatctgctgtccaaaggcacctactggtggatgaacgccttcatcaagactgcccacaagaagcccatcgacttgcgagccatcgggaagctgcccatcgccatgagggccctcaccaactaccaacggctctgcgaggcctttgacgcccaggtgcggaaggacattcagggcactcaaggtgcccgggccatctggcaggcactcagccatgccttcgggaggcgcctggtcctcagcagcactttccgcatcttggccgacctgctgggcttcgccgggccactgtgcatctttgggatcgtggaccaccttgggaaggagaacgacgtcttccagcccaagacacaatttctcggggtttactttgtctcatcccaagagttccttgccaatgcctacgtcttagctgtgcttctgttccttgccctcctactgcaaaggacatttctgcaagcatcctactatgtggccattgaaactggaattaacttgagaggagcaatacagaccaagatttacaataaaattatgcacctgtccacctccaacctgtccatgggagaaatgactgctggacagatctgtaatctggttgccatcgacaccaatcagctcatgtggtttttcttcttgtgcccaaacctctgggctatgccagtacagatcattgtgggtgtgattctcctctactacatactcggagtcagtgccttaattggagcagctgtcatcattctactggctcctgtccagtacttcgtggccaccaagctgtctcaggcccagcggagcacactggagtattccaatgagcggctgaagcagaccaacgagatgctccgcggcatcaagctgctgaagctgtacgcctgggagaacatcttccgcacgcgggtggagacgacccgcaggaaggagatgaccagcctcagggcctttgccatctatacctccatctccattttcatgaacacggccatccccattgcagctgtcctcataactttcgtgggccacgtcagcttcttcaaagaggccgacttctcgccctccgtggcctttgcctccctctccctcttccatatcttggtcacaccgctgttcctgctgtccagtgtggtccgatctaccgtcaaagctctagtgagtgcagagatccgtgaggagcagtgtgccccccatgagcccacacctcagggcccagccagcaagtaccaggcggtgcccctcagggttgtgaaccgcaagcgtccagcccgggaggattgtcggggcctcaccggcccactgcagagcctggtccccagtgcagatggcgatgctgacaactgctgtgtccagatcatgggaggctacttcacgtggaccccagatggaatccccacactgtccaacatcaccattcgtatcccccgaggccagctgactatgatcgtggggcaggtgggctgcggcaagtcctcgctccttctagccgcactgggggagatgcagaaggtctcaggggctgtcttctggagcagccttcctgacagcgagataggagaggaccccagcccagagcgggagacagcgaccgacttggatatcaggaagagaggccccgtggcctatgcttcgcagaaaccatggctgctaaatgccactgtggaggagaacatcatctttgagagtcccttcaacaaacaacggtacaagatggtcattgaagcctgctctctgcagccagacatcgacatcctgccccatggagaccagacccagattggggaacggggcatcaacctgtctggtggtcaacgccagcgaatcagtgtggcccgagccctctaccagcacgccaacgttgtcttcttggatgaccccttctcagctctggatatccatctgagtgaccacttaatgcaggccggcatccttgagctgctccgggacgacaagaggacagtggtcttagtgacccacaagctacagtacctgccccatgcagactggatcattgccatgaaggatggcaccatccagagggagggtaccctcaaggacttccagaggtctgaatgccagctctttgagcactggaagaccctcatgaaccgacaggaccaagagctggagaagaggaggcagctgagagcgaggaggatgacaacctgtcgtccatgctgcaccagcgtgctgagatcccatggcgagcctgcgccaagtacctgtcctccgccggcatcctgctcctgtcgttgctggtcttctcacagctgctcaagcacatggtcctggtggccatcgactactggctggccaagtggaccgacagcgccctgaccctgacccctgcagccaggaactgctccctcagccaggagtgcaccctcgaccagactgtctatgccatggtgttcacggtgctctgcagcctgggcattgtgctgtgcctcgtcacgtctgtcactgtggagtggacagggctgaaggtggccaagagactgcaccgcagcctgctaaaccggatcatcctagcccccatgaggttttttgagaccacgccccttgggagcatcctgaacagattttcatctgactgtaacaccatcgaccagcacatcccatccacgctggagtgcctgagccgctccaccctgctctgtgtctcagccctggccgtcatctcctatgtcacacctgtgttcctcgtggccctcttgcccctggccatcgtgtgctacttcatccagaagtacttccgggtggcgtccagggacctgcagcagctggatgacaccacccagcttccacttctctcacactttgccgaaaccgtagaaggactcaccaccatccgggccttcaggtatgaggcccggttccagcagaagcttctcgaatacacagactccaacaacattgcttccctcttcctcacagctgccaacagatggctggaagtccgaatggagtacatcggtgcatgtgtggtgctcatcgcagcggtgacctccatctccaactccctgcacagggagctctctgctggcctggtgggcctgggccttacctacgccctaatggtctccaactacctcaactggatggtgaggaacctggcagacatggagctccagctgggggctgtgaagcgcatccatgggctcctgaaaaccgaggcagagagctacgaggggctcctgggtgagaggctcagggagaggggtggggaagagtccaaggaggagtgtgtctgggttgggggccacaagggagcctggggatggggtggcactttcggatactagctgtggcccatgcctggtggctgagcccagcccggcccccagcaccatcgctgatcccaaagaactggccagaccaagggaagatccagatccagaacctgagcgtgcgctacgacagctccctgaagccggtgctgaagcacgtcaatgccctcatcgcccctggacagaaggtcagagcacgggcccaacccaatgctgcaggacaggcgtgagcaggggatggggcatgcacggagctggatggcttcgcagtcacctcgtggccctccagggcc

SEQ ID NO: 7452 - protein, 454 aa, Artificial Sequence [sequence omitted]

SEQ ID NO: 7453 - DNA, 1362 bp, Artificial Sequence
  derived and/or modified sequence
atggacccctacatgatccagatgagcagcaagggcaacctgcccagcatcctggacgtgcacgtgaacgtgggcggccgcagcagcgtgcccggcaagatgaagggccgcaaggcccgctggagcgtgcgccccagcgacatggccaagaagaccttcaaccccatccgcgccatcgtggacaacatgaaggtgaagcccaaccccaacaagaccatgatcagcctgagcatcggcgaccccaccgtgttcggcaacctgcccaccgaccccgaggtgacccaggccatgaaggacgccctggacagcggcaagtacaacggctacgcccccagcatcggcttcctgagcagccgcgaggagatcgccagctactaccactgccccgaggcccccctggaggccaaggacgtgatcctgaccagcggctgcagccaggccatcgacctgtgcctggccgtgctggccaaccccggccagaacatcctggtgccccgccccggcttcagcctgtacaagaccctggccgagagcatgggcatcgaggtgaagctgtacaacctgctgcccgagaagagctgggagatcgacctgaagcagctggagtacctgatcgacgagaagaccgcctgcctgatcgtgaacaaccccagcaacccctgcggcagcgtgttcagcaagcgccacctgcagaagatcctggccgtggccgcccgccagtgcgtgcccatcctggccgacgagatctacggcgacatggtgttcagcgactgcaagtacgagcccctggccaccctgagcaccgacgtgcccatcctgagctgcggcggcctggccaagcgctggctggtgcccggctggcgcctgggctggatcctgatccacgaccgccgcgacatcttcggcaacgagatccgcgacggcctggtgaagctgagccagcgcatcctgggcccctgcaccatcgtgcagggcgccctgaagagcatcctgtgccgcacccccggcgagttctaccacaacaccctgagcttcctgaagagcaacgccgacctgtgctacggcgccctggccgccatccccggcctgcgccccgtgcgccccagcggcgccatgtacctgatggtgggcatcgagatggagcacttccccgagttcgagaacgacgtggagttcaccgagcgcctggtggccgagcagagcgtgcactgcctgcccgccacctgcttcgagtaccccaacttcatccgcgtggtgatcaccgtgcccgaggtgatgatgctggaggcctgcagccgcatccaggagttctgcgagcagcactaccactgcgccgagggcagccaggaggagtgcgacaag

SEQ ID NO: 7454 - DNA, 1362 bp, Artificial Sequence
  derived and/or modified sequence
atggatccctatatgatccaaatgtcatctaaagggaacctcccctctatcctagatgtacacgtgaacgtcgggggacggtcaagcgttcctggcaaaatgaaaggtcggaaggcacgctggtcagtccgaccaagcgacatggccaaaaagacgtttaacccaatcagagccatcgttgacaacatgaaggtgaaaccaaatcccaacaaaacgatgatctcactatccatcggtgacccgaccgttttcgggaacttgcccacggacccagaagtgacccaagccatgaaagatgctctagactctgggaaatataacgggtatgctccgtccattggcttcctgagctcaagagaggaaattgccagttattaccattgtccagaggctcccctggaggccaaggatgtcatcctgacatcgggatgttctcaggcaatcgatctgtgcctagccgtgctggccaacccagggcagaacatcctagttccaaggcccggcttcagtctttacaagaccctggcggaaagcatgggtattgaggttaagctgtacaacctgctgcccgagaaaagctgggaaatcgacctgaagcagctggaatatctgattgacgaaaaaacagcttgcctcattgtcaacaatccttccaatccttgcggcagtgttttcagcaaacgccatctgcaaaagatcctggccgtagccgctaggcagtgcgtgcctattctcgctgatgagatttacggagatatggtgttctcggactgcaaatacgagccactggccacactgagcacagatgtcccaattctatcctgcggcgggctggccaaaaggtggctagtccccggttggcggttggggtggatattgatacatgataggcgcgatatttttggcaatgagatcagagacggattagtcaaactatcccaaagaatcctcggcccgtgtacaattgtgcagggggccctgaagtccatcttgtgcaggactcccggcgaattctatcacaacacacttagctttctgaaatcaaacgcagatttatgttatggcgccttggcagcgattcctgggctgcgtccagtgaggccatctggtgcaatgtacctcatggttggaatagagatggagcattttccagagtttgagaatgacgtagaattcactgagagactcgtcgctgagcagagtgtacactgcttgccagccacgtgttttgaatatccaaatttcattcgcgtggttataacagtgcccgaggtgatgatgttggaagcttgttcccgtattcaggaattttgtgaacagcactaccattgtgcagaggggagccaagaggagtgcgacaag

SEQ ID NO: 7455 - DNA, 1362 bp, Artificial Sequence
  derived and/or modified sequence
atggatccatacatgattcaaatgagcagtaaaggcaatctgcccagcattcttgacgtgcatgtcaatgtggggggccgctcctccgtgccaggcaagatgaaaggccggaaggcccggtggtctgtgagaccctctgatatggcgaagaaaacgtttaaccctatacgggccatcgtggataatatgaaagtgaagccaaacccaaataagacaatgattagcttaagcattggcgatcctactgtctttggtaacctccccaccgaccccgaggttacccaggccatgaaggatgcattggactccggtaagtataacggatacgctcctagcatcggcttcctgtcgtctagggaggagatcgcctcttactatcactgtcctgaagcacccctggaagctaaggacgtcatcttaacctctggttgtagtcaagcgattgatctgtgtttagcagtgctggccaacccagggcagaatattcttgtccctagaccaggattttcactctacaagactctggctgaaagtatgggaattgaggtaaagctgtacaacctgttgcctgaaaaaagttgggagattgacttgaagcaactggagtacctcatcgacgaaaagacggcatgcttaatagtcaacaatcccagtaacccttgcggctccgtgttctccaagagacacctgcagaaaatccttgcggtggctgcgagacagtgcgttcccattctggccgacgaaatttacggcgacatggtgttcagcgattgtaagtatgagcccctggccacactgagcacggacgtgcccatattgtcttgtggcggccttgcgaaacggtggctggttccgggttggaggctagggtggatcctgatccacgataggcgagatattttcgggaacgagattagagatggtctggtaaagttgagccagcggatcctcggaccttgcacgattgtgcagggcgctctgaaatcaatcctgtgtcgaacacctggggagttttatcacaacacactgtctttcctgaaatccaacgccgacttgtgctatggtgccctggccgctatccctgggctgcggcccgtgcgaccaagtggagctatgtacctgatggtggggatcgaaatggaacacttcccggagttcgagaatgatgtcgagtttacagagagactggtggcagaacagagcgttcactgcctgccagccacctgtttcgagtaccctaactttattagggtggtgataactgtaccggaggtaatgatgcttgaagcctgttccagaatccaggaattctgcgaacaacactatcactgcgccgagggttcccaggaagaatgcgataaa

SEQ ID NO: 7456 - DNA, 1362 bp, Artificial Sequence
  derived and/or modified sequence
atggacccttacatgatccaaatgtcctctaaaggaaaccttcctagtatcctggacgtccatgtaaacgtgggtggacgatcctcagtgccgggcaagatgaagggtcggaaagcgcgttggagcgtgcgcccttcggatatggcaaagaaaacttttaatcctattcgagctatcgtggacaatatgaaggtgaaacctaatcctaataaaactatgatttctcttagcatcggggatccgactgtcttcggaaatttaccaacagatccggaggtgactcaagccatgaaggatgccttagacagcgggaaatacaacggctacgccccctccatcgggtttttatcgtcacgcgaggaaattgcctcatactatcactgtccagaagctccgttagaagccaaagatgtaatccttacatccgggtgttcccaggctatcgacctgtgcctggccgtccttgccaacccaggccagaatatattggtgccgcgtcccgggttttccctgtataagaccctagctgagagcatgggcatcgaggtgaaactctacaacttgctccctgaaaaatcttgggaaatcgatctgaagcagcttgaatacctgattgacgagaagactgcatgccttatcgtgaataacccgtcaaatccctgcggaagtgtcttctccaaaagacatctacaaaaaattctggccgtggccgctcgacagtgcgtcccaattctcgctgatgagatatacggcgatatggttttcagcgattgcaaatacgagccattggctaccctgtccacagacgtcccaatcctttcatgtggcggactcgccaaacgctggctggttcccggctggcggcttggttggattctgatacacgaccgccgggacatatttggaaatgaaatcagagatggccttgtgaagttgtcccagaggatattgggtccatgtactattgtccaaggtgctttgaagagcattttgtgccggacgcccggagagttttatcacaatactctgtcattccttaaaagtaatgccgatctatgttacggagccctggccgccatccctgggctgagacctgtcaggcctagcggggccatgtatctgatggttggcatagagatggaacatttcccagagttcgaaaatgacgtcgagttcactgagcgactggtagccgaacaatccgtccactgtctgcccgcaacctgctttgagtatcccaattttatcagggttgtgatcaccgtccctgaagtgatgatgctcgaagcctgcagccggatacaggaattctgtgaacagcactaccattgcgccgaaggttcccaagaagaatgtgacaag

SEQ ID NO: 7457 - DNA, 1362 bp, Artificial Sequence
  derived and/or modified sequence
atggacccgtacatgatccagatgagctccaagggcaatctgccatcgatcctcgacgtgcatgtcaacgtgggaggacggtccagcgtcccaggcaagatgaagggccggaaggcacgctggagcgtgaggccttcggatatggcaaaaaagacgttcaatcctatccgcgccatcgtggacaacatgaaggtgaaacctaacccgaacaaaaccatgatttccctgtccattggcgaccccaccgtctttggaaacctgccaactgatccagaagtgacccaggctatgaaggacgccctggattcgggaaagtataacggatacgccccgagcatcggattcctgtcatcgcgggaagagatcgcatcgtactaccactgcccagaagcgccgttggaagcaaaggacgtaatactcacctcaggatgctcccaggccatcgacctgtgcctggcggtgctcgcaaaccccggacaaaacatccttgtgccgcgccctggtttctccctgtacaaaaccctcgccgaaagcatgggaatcgaggtgaagctctacaatctgctgccagaaaagtcatgggaaatcgacctcaagcagctggaatacctgatcgacgaaaagacggcgtgccttatcgtgaataatccaagcaacccatgcggctccgtgttttcaaaacgccatctgcagaagatcttggccgtggcagccagacaatgcgtccctatcctcgcagatgagatctacggcgacatggtcttttcggactgcaagtacgagccactggcaactctgtccaccgacgtgccaatcttgtcgtgtggcggcctcgctaaacggtggctggtgccgggatggcgactcgggtggatccttatccacgatcgcagagacatcttcggcaacgagatccgggatggactcgtgaagctgtcgcagcggatcctgggaccttgtactatcgtgcagggagccctcaagtcaatcctttgcaggactccaggagaattctatcataacaccctcagcttcctcaagagcaacgccgacctgtgttacggagccctcgctgccatccctggattgcggccagtccgcccatcaggggcgatgtacctgatggtaggcattgaaatggaacactttccagagtttgagaatgacgtggaattcacggaacggctggttgccgagcaatcagtccattgcctgccggctacctgtttcgagtacccgaacttcatccgcgtggtcatcaccgtgccagaagtgatgatgctggaggcttgctcgagaatccaggagttctgtgagcaacactaccactgcgctgaaggatctcaggaggagtgtgacaag

SEQ ID NO: 7458 - DNA, 1362 bp, Artificial Sequence
  derived and/or modified sequence
atggatccatatatgatccaaatgtcatcgaagggaaatctgccatcaatcctggacgtccatgttaacgtgggcggccggtcgagcgtgccaggaaagatgaaaggacgcaaggctcgctggagcgtgcgcccttcggacatggccaaaaagacctttaacccgatccgcgccatcgtggacaatatgaaggtgaagccgaatccgaacaagactatgatctccttgagcatcggtgacccgaccgttttcgggaacctcccgacggacccggaagtaacccaagccatgaaggacgcgctggattctggaaaatacaatggatacgccccgtcgatcggattcctgtcgtcgcgggaagaaatcgcgagctactaccactgccccgaagctccgctcgaggccaaggacgtgatcctcaccagcggctgttcccaggcaatcgacctctgcctggcagtgttggccaatcccggacagaacatcctggtcccacgccccggtttcagcctgtacaagactttggccgagtcaatgggaatcgaggtgaaactgtacaaccttttgccagagaaatcctgggaaatcgatctgaagcagcttgaatacctcattgacgaaaagactgcttgtctgatcgtcaataatccgtcaaacccgtgcggcagcgtgttctccaaacgccatttgcagaagatcctggcggtggcagcaagacagtgtgtgccaattctggcagacgagatttatggcgacatggtgttctcggattgcaaatacgagccgctggccaccctgtccaccgacgtgccgatcctctcctgcggtggcctggccaaacgctggctggtcccaggctggagactcgggtggattctcatccacgaccggcgcgacatcttcggaaacgaaatccgggacggcttggtgaaactttcccaacggatcctcggaccgtgtaccatcgtgcaaggggcgttgaaaagcatcctgtgtcggactcctggtgaattctaccataacactctgtcattcctcaaatcaaacgcagacctgtgctacggagccctcgcagccatcccgggacttagacctgtgcggccttccggagccatgtacctgatggtgggaatcgagatggagcacttcccagagttcgaaaacgatgttgaattcaccgagcgactggttgcggagcagtccgtccattgtctcccggctacctgcttcgagtatccgaacttcatcagggtggtaatcaccgtgcccgaagtgatgatgcttgaggcatgctcgcggatccaggagttctgcgaacagcactaccactgcgctgaaggcagccaggaggaatgcgacaaa

SEQ ID NO: 7459 - DNA, 1362 bp, Artificial Sequence
  derived and/or modified sequence
atggacccctatatgatacagatgagttcaaaggggaatctcccatcaatcctggacgtgcacgtgaatgtcggcgggagatctagcgtgccgggcaaaatgaaaggaagaaaagcccgctggtccgtgcgacctagcgatatggctaaaaagacgttcaatccaataagggctattgtcgataatatgaaggttaaacccaatcccaataagactatgatatcgttgtctatcggtgatccgaccgtctttggcaacttaccaactgatccagaggtgacccaggctatgaaagatgcacttgacagtgggaagtacaatggatatgcacccagtatcggctttctttcatccagagaagagatcgccagctactaccactgccccgaagcgcctctggaggcaaaggacgtcattctgacgtcgggatgttctcaggctatcgatctttgcctggcggtgctggccaaccctggtcagaatattctagttccccgtccagggttctccctgtataagaccctcgcagaatccatgggcattgaagttaagttatacaatcttctacccgaaaagtcttgggaaattgacctgaagcaattggaatacctcatcgatgaaaagacagcctgcctaatcgtgaacaaccccagcaacccctgtggctccgtcttttccaagcgccacctccagaagattctcgccgtcgcggcgcgtcagtgtgtgccaatattagctgacgagatttacggcgacatggtttttagcgactgtaagtacgagccactcgccacactcagcacggacgtgccaatcctgagttgtgggggacttgcaaaacggtggttggttcccgggtggcgtttaggatggatcttgattcacgatcgtcgcgacatcttcgggaatgagatcagggacgggctggtgaaactttcccagcgcattctcgggccctgcaccattgtccagggcgctctgaagagcattctgtgtcggaccccaggtgagttctatcataatacccttagctttctcaagagcaacgccgatctgtgctacggagctttggccgctatacccggtcttagaccagttagaccatccggggccatgtatcttatggtcggaattgaaatggagcatttcccggaatttgagaatgatgtggagtttaccgaaaggctggtggccgaacagtctgtgcactgcttgcccgcaacatgcttcgagtacccaaattttatccgtgtggtcatcacggtccctgaggtcatgatgctggaggcatgctcacggatccaagagttctgcgagcaacactaccactgtgccgagggaagccaggaggaatgtgacaag

SEQ ID NO: 7460 - DNA, 1362 bp, Artificial Sequence
  derived and/or modified sequence
atggacccatacatgatacagatgtcgtcaaaggggaacctgccctccattctggacgttcacgtgaacgtcgggggaagatcctcggtccccggtaaaatgaaagggaggaaagcccgatggtcagtccggccgagtgatatggcgaaaaaaaccttcaatccaatccgtgcaatcgttgataatatgaaagtcaagcctaaccccaacaagaccatgatttcactgtctatcggggaccctacagtgttcggaaatcttcccacagaccccgaggtgacccaggccatgaaggacgcccttgacagtgggaaatacaacgggtatgcgccttctattggctttctatctagccgggaagagatagcttcctattaccactgccccgaggcccccctggaagcaaaggacgtgatactgacaagcggttgctcacaggccattgacctgtgtctggctgtgctggcaaaccctgggcagaatatcctggtaccgcggcctggattctccttgtataaaactcttgcagaatccatggggatcgaggtaaagttatacaacctgctccccgagaagtcctgggagattgacctcaaacaactggaatacctcatcgatgagaagacagcctgccttatcgtgaataacccctctaacccttgcggaagcgtattctcaaagcggcacttacagaaaatcctcgcagtagctgctagacagtgtgtacccattctggccgacgaaatctacggagacatggtattctcagactgcaaatacgaacccttagccaccttgtccaccgatgttcctatattaagctgtggggggttggccaagcgctggctagtgcctggttggcggctcggctggatacttatccacgacagacgcgacatctttggaaatgaaattcgagacggcctagttaagctcagccagcgaattctcggaccctgcaccatcgtgcagggagccttaaaaagtatcctctgtcgaacccctggggagttttaccacaataccttgtctttccttaaaagtaatgctgatttatgctacggggcactcgccgcaattcccgggctccgccctgtcaggccatccggagctatgtatctcatggtaggcatcgagatggaacacttcccagagttcgagaacgatgttgagtttacagaacgtctagttgccgagcagagcgtgcactgcctccccgctacctgcttcgaatatcctaacttcatacgagtggtgataaccgtacccgaggtaatgatgttggaagcttgctcccggattcaggagttctgcgaacagcattatcattgcgccgagggttcccaagaggaatgtgataag

SEQ ID NO: 7461 - DNA, 1362 bp, Artificial Sequence
  derived and/or modified sequence
atggatccctacatgattcagatgtcctctaagggaaatctgccttcaatactcgatgtgcatgtcaacgtgggggggagatcatcagtgcctgggaaaatgaaaggacgcaaggcacgctggtcagttagaccctctgatatggccaagaaaacttttaaccctataagagcaatcgtcgataacatgaaagttaaaccaaacccaaacaaaacgatgatctctctgagtattggggatcccactgtgttcgggaacctacctacagatccagaagtaacgcaggcaatgaaggatgcactggattctgggaagtacaatggatatgcccctagtattgggtttctctcctcaagagaagaaatcgcgagttattatcactgtcccgaggcaccactggaagcaaaagatgtcattcttacatctgggtgttctcaggctatcgatctctgccttgccgtactagccaaccctggacagaacatcctcgtgccaaggcccggattcagtctttacaaaactttagcagaatctatggggatcgaagttaaattatataacctcctccctgagaagagttgggaaattgatctcaaacaactagaatatttaatagatgaaaagacagcttgtctgattgtaaataacccttctaatccctgcggatcagtgttctccaaaaggcatctacagaaaatactagcagtcgctgcacggcagtgcgtgcccattctggcagatgagatatacggagatatggtcttttctgattgtaagtacgaacccctcgccactctgtctactgatgtgcccatactctcttgtgggggactggctaaacgatggcttgtgcctggatggagacttgggtggatcctcatccatgatcggcgagacatatttgggaacgaaatcagagatggacttgtgaaattatcccagagaatacttggaccgtgtactatagtgcagggggctctaaagtccatcctctgtaggacgccaggggagttttaccacaatacactcagttttttaaaaagtaatgcagatctgtgttatggggcacttgccgctatacctgggctccggccagtgagaccctcaggggctatgtatctaatggtgggaatagaaatggaacacttcccggaattcgaaaacgatgtcgaatttacagaacggcttgtggccgagcagtcagtacattgcctcccagcaacatgctttgaatatcctaattttatacgggtggttataactgttcccgaggtcatgatgttggaagcctgctctaggattcaggaattttgcgaacagcactaccactgtgctgaaggatcccaggaagaatgcgacaaa

SEQ ID NO: 7462 - DNA, 1362 bp, Artificial Sequence
  derived and/or modified sequence
atggacccttatatgattcagatgtcgtccaaaggtaatcttccctccatactcgatgtccacgtcaacgttggcggccgctcttcggtgccaggtaagatgaaaggaagaaaggcacggtggtccgtgcggccttcagatatggcaaagaaaactttcaacccaattagagcgattgtggacaacatgaaggtgaagcctaaccctaataagactatgatttcgctctccattggggatccgaccgtgtttggtaaccttccaacggatccagaagtcacccaggctatgaaggatgccttggactcggggaaatacaatggttacgcgccgagcatcggcttcctcagctcgcgggaagagattgccagctactaccattgcccagaggcccctcttgaggccaaggatgtgattcttacttccggctgctcccaagctatcgacctgtgcctggcagtcctcgcaaaccctggtcagaatatccttgtcccgcgtccaggcttttccctgtataagaccctcgcagaaagcatggggattgaagtgaaactttacaatctcctccccgagaagtcttgggaaattgatttgaaacaactggagtacctgatagacgaaaagaccgcttgtttgatcgtcaacaacccatccaatccttgtggtagcgtgtttagcaaacggcacctccagaagatcctggcagtggcggcacgacaatgtgtgccgattttggcggacgagatctacggagacatggtgtttagcgattgcaagtacgaaccactggccaccctgtcgactgatgtccctatactgtcgtgtgggggccttgcgaagagatggctcgttccaggatggaggctcggatggatccttattcatgatcgtcgcgacatatttgggaacgagatccgggatggccttgtgaaactttcgcagaggatcttgggcccttgtactatcgtgcagggtgccctcaagtctattctgtgcagaacgcccggagaattctatcataacaccttgtcattcctgaagtctaacgccgatctttgctacggtgcactggcagccatcccaggactgaggccagtgcgacctagcggagcaatgtacctgatggtgggtattgaaatggaacattttccggagtttgagaacgatgttgaattcactgaaagactggtcgcggagcagtcagtgcattgtttgcccgccacttgtttcgaataccccaatttcatccgtgtggtgattaccgtccccgaagtcatgatgcttgaggcttgttcaagaatacaggaattctgcgaacaacattaccattgtgcagaggggtcgcaagaagaatgtgacaag

SEQ ID NO: 7463 - DNA, 1362 bp, Artificial Sequence
  derived and/or modified sequence
atggatccctacatgatccagatgagttcgaaggggaacctgccatctatcctagacgtccatgtcaacgtgggtgggagatccagtgtgccgggcaaaatgaaagggcgcaaggcgcgctggagcgtccgcccgtccgatatggctaagaaaaccttcaacccgattagagcgatcgtggataacatgaaggtgaagcccaatccgaacaaaaccatgatcagtctaagcattggcgaccccactgtcttcggcaacctgcccactgatcccgaggtcacccaggctatgaaagacgccttggattccggcaaatacaatggatacgccccttctattggcttccttagctcacgcgaggaaattgcttcttactatcattgccccgaggcgcccttggaggcgaaggatgtcattctgacctccggctgttcgcaggcgatcgacctttgtctggccgttctcgccaatcccggccagaacatcctcgttcccagacccgggttctcattgtacaagactctcgcggaatctatgggtatcgaggtcaagctgtacaacctgctcccggaaaagtcttgggagatcgatctgaagcagctggagtacctaattgacgaaaagactgcctgtttgatcgtcaataatccctctaacccctgcggctccgtctttagtaagcgacacctgcaaaagattctggcagtcgcggctcggcagtgcgtgcccatactggcggatgagatatacggtgacatggttttctccgattgcaaatacgaacccctggccacactgtccaccgatgtgcccattctgtcgtgcggaggcttggctaagcgctggcttgtccctggctggcgcctaggatggatcctgatccacgatagacgcgacatcttcggaaacgagatccgtgacggtctggttaagttgtcgcaaagaatcctcggaccctgtacaattgttcagggtgctctgaagtcgattctctgccgcacgccgggtgagttctatcataacaccttgagcttcttgaagtcgaacgccgatctgtgttatggcgctctcgctgccattcccggtctccgccctgtacgtcctagcggcgctatgtaccttatggttggtatcgaaatggaacacttccccgagttcgagaacgacgtcgagtttactgagcggttggttgctgagcagagtgtgcattgcctacctgccacgtgtttcgagtaccccaactttattcgcgtcgtgattacggtacccgaggtcatgatgctagaagcatgcagccgcatccaggagttctgcgagcagcactatcactgcgccgagggctcgcaggaggagtgcgacaag

SEQ ID NO: 7464 - DNA, 1362 bp, Artificial Sequence
  derived and/or modified sequence
atggacccctatatgatccaaatgagcagcaagggtaaccttccttctatccttgatgtgcatgttaacgtgggtggcagatcctctgtgccagggaaaatgaagggaagaaaagctaggtggtcagtaaggccatctgacatggctaagaaaacctttaatccaatccgcgcaatcgtggacaacatgaaggtgaagcccaacccaaacaagacaatgatctcgctctcaatcggcgatcctaccgtctttggtaacctgcctaccgacccagaagttacccaagccatgaaggatgctctcgattccggaaaatacaatggctatgctcccagcatcgggtttcttagctcacgggaagaaatagcctcttactaccactgccctgaggcgcctcttgaagccaaagatgtgattttaacatctgggtgtagtcaggccatcgacctctgcctcgcagtgcttgccaacccgggacaaaacatcctggtgcctcgcccaggctttagcctatacaaaacactcgctgagagtatgggaatcgaggtgaaactgtacaatctgctgcctgaaaagtcttgggagattgacctaaagcaactcgagtatctgatcgacgagaaaacagcttgcctgatcgtgaacaacccgtcaaacccgtgtggatccgtgtttagcaagagacatctgcagaagatactggcagtagccgcgcgccagtgcgttccaatcctggccgacgagatctacggagatatggtgttctccgattgcaagtatgagcctctggcaactctatcaactgatgtccccatccttagttgcgggggactggcaaaacgatggcttgttccaggatggagactgggatggatcctgatccatgacagaagagatatcttcggcaatgaaataagggacggcctggtcaagctttcccagcggatccttggtccttgcaccatcgttcaaggggctctcaagtccatcctgtgccgcaccccaggagaattctaccataacacactgtccttcctgaaatcaaatgctgacttgtgctacggagctctggccgccatccctggcctgcgccctgtaagaccctctggagctatgtatttaatggttggcatcgaaatggaacacttccctgaatttgagaatgacgtggagttcactgaaagactggttgcagagcagtctgtccactgcctccccgctacttgttttgaatacccgaactttatccgcgtggtcatcactgtgcctgaagttatgatgctggaagcatgtagccgcatccaggaattttgtgagcagcactaccactgcgcagaggggagccaggaagagtgtgacaag

SEQ ID NO: 7465 - DNA, 1362 bp, Artificial Sequence
  derived and/or modified sequence
atggacccctacatgatccagatgtcatccaaagggaatcttccctccattctggatgttcacgtgaatgtggggggacggagttccgtccctggcaagatgaagggaagaaaggcacgctggtcagtgcgcccctccgacatggccaagaaaactttcaatcccatcagggctatcgtagacaatatgaaagtaaaaccaaatccaaataaaaccatgatttctctatccatcggagatccaacggtgtttgggaacctgcccacagatccggaggtgacccaggccatgaaggacgctctggatagcggtaaatataatggctatgctcccagcatcggcttcctgtccagccgggaggaaattgcctcttactaccactgtccggaggccccactagaggctaaagacgtgatcctcaccagcggttgcagccaggcaatcgatctgtgtctggccgtcctcgccaaccctggtcagaatatcctagtgccccgacctggattctccctttacaagacattggccgaatcaatggggatcgaggtgaagctatacaacttgttacctgagaagagctgggagattgatctgaagcaactggagtatcttattgacgagaagacagcgtgtctgatcgtcaacaatccctcaaatccctgcggatctgttttttcaaagcgccatctgcaaaagatcctggctgtggccgcaaggcagtgcgtgcctatcctagccgacgagatctacggtgacatggtcttttcagattgcaaatatgagccactggctacgctgtccactgatgtgcccattcttagctgtgggggcctggctaagcggtggcttgtccccggttggaggctggggtggatactaatccacgatcggcgggacattttcggtaacgaaatccgggacgggctggttaagttaagccaacggatattgggcccttgcacgatcgtgcagggagccctcaaatctatactgtgtcgaactccaggggagttctaccacaacaccctgagttttctcaaaagcaacgcggatctatgttacggtgcactggcagcaattcccgggctcaggcccgttaggccctctggggcgatgtatctgatggtgggtatcgagatggaacactttcctgaattcgagaatgacgttgaatttaccgagcggctcgtggctgaacagtccgtacattgtctccccgctacttgtttcgagtacccaaactttataagggtggtgatcactgtccccgaggtgatgatgctggaagcgtgctcccggatacaggagttctgcgagcaacactaccattgcgcggaagggtctcaagaggaatgtgacaag

SEQ ID NO: 7466 - DNA, 1362 bp, Artificial Sequence
  derived and/or modified sequence
atggacccatacatgatacagatgagctctaaaggcaatctgccctcaatccttgacgtgcatgttaatgtcgggggcaggagttctgttccagggaagatgaaaggtcggaaagcccgctggagtgttcggcctagtgacatggcgaaaaagacctttaatcctattagggctattgtcgataacatgaaagtgaaacccaaccctaacaagactatgatctccctgtctatcggagaccctaccgtattcggcaacctccccaccgatcccgaggtgacacaggccatgaaggatgccttagattcgggaaagtacaatggttatgccccctctattggattcctgtcgtcaagggaggagatagcctcctattaccattgtcccgaggccccattggaggccaaggacgtgatcttaactagtggttgctctcaggctatcgatctctgcctcgcagtgcttgctaatcctgggcaaaatatcctggtgcctagaccaggcttcagcctctacaagacccttgccgaaagtatgggaattgaagttaagctgtacaatcttctgccagaaaagtcctgggagatagacctgaaacagcttgagtacctgatcgacgaaaagactgcctgtttaattgtcaacaacccctccaacccctgcggctcagtgttttccaagcgccatcttcagaaaatcttggcggtcgctgcccgccagtgtgtcccaattctagctgacgaaatttatggagacatggttttctccgactgcaaatacgagccactggcgaccctttcaaccgatgtgcctatcctgagctgcggcgggctcgctaagcgctggctggtcccaggatggcgactgggatggatactgattcacgatcgacgtgacatttttggtaatgaaataagggacggcctggtcaagctctctcagcggatcctggggccctgtacgattgtgcagggagccctcaagtctatcctgtgtcggactcctggggagttttatcacaatacactgtccttcttaaagagcaatgcagacctatgttacggcgcactcgcggctatacccggtctccgccctgtgaggccgtccggcgcgatgtatctgatggtcggaatagaaatggagcactttccagagtttgaaaacgatgtggaatttacggagaggctcgtcgctgagcaaagcgttcactgcctcccggcaacctgctttgagtacccaaactttattcgtgtggtgatcaccgtgcccgaggtgatgatgctggaggcctgttcgcgaatccaagagttttgcgagcagcattaccattgcgcagagggatcccaagaggagtgcgataaa

SEQ ID NO: 7467 - DNA, 1362 bp, Artificial Sequence
  derived and/or modified sequence
atggacccatacatgatccagatgtcctcgaagggtaacctgccgagcatccttgatgtgcatgtcaacgtggggggacggagctctgtgcccggaaaaatgaagggccgtaaggcgagatggtctgtgcgaccatcggacatggcgaagaaaactttcaacccgatcagggccattgtggacaatatgaaggtcaagcctaacccgaacaaaaccatgatctcactgtcgattggcgatcctactgtgttcggaaacttgcctactgacccagaagtgacccaagcaatgaaggatgcacttgattcaggcaaatacaatggctacgccccctccattggcttcctgtcaagccgggaagaaatcgcatcctactaccactgcccggaggcgcctctcgaagcaaaggatgttattctgactagtggatgcagccaagcgatcgatctctgcttggccgtccttgccaacccgggacagaatatcctcgtgccacggccaggattctcactctataagaccctcgcggagtcgatgggaatcgaagtcaagttgtataacctgctgccggagaagtcatgggaaatcgatctcaagcagctcgagtacctcatagacgagaaaactgcttgtttgatcgtgaacaacccaagcaacccatgcggatcagtgttctccaaacggcatctgcaaaagatcttggcagtggctgctcggcagtgcgtgccgatcctggcagatgagatttatggggatatggtgttctcggactgcaagtacgaaccactggcgaccctctcaacggatgtgcccatccttagctgcgggggcctcgcaaagagatggcttgtgccgggatggcgcttgggctggattctgatccatgaccgccgcgacatcttcggcaatgaaatcagggacggcctggtgaagctctcccaacgcatcctcggaccctgcaccatcgtccaaggagctttgaagtcgattctttgccgcactccgggggagttttaccataataccctgtccttcttgaagtcaaatgcagacctctgctacggagctttggccgcgatccccggactcaggcctgtgcgcccgtcgggggccatgtacctgatggtgggaatcgaaatggaacattttccggaattcgagaatgacgtggaattcactgaacgcctggtggcggaacaatcggtgcactgtctccccgctacctgcttcgaatacccaaactttatcagggttgttattaccgtgccggaagtcatgatgctggaagcgtgctcccgcattcaagaattttgcgagcagcactaccattgcgcggagggatcgcaggaagagtgcgataag

SEQ ID NO: 7468 - DNA, 1362 bp, Artificial Sequence
  derived and/or modified sequence
atggatccgtacatgattcaaatgtcatcaaaaggaaaccttccttcgattcttgacgtgcatgtcaacgtcggcggccgctcctcggtcccgggtaagatgaaaggtagaaaggcccgctggtccgtgcggccgtcagacatggcgaagaagacctttaatcctattcgcgccatcgtggacaacatgaaggtgaaaccaaacccaaataagactatgatctccctgagtatcggcgaccctaccgtgttcggtaacctgcccacggacccagaagtgacgcaagctatgaaggacgccctcgattcaggcaagtacaacggatacgcgccgtcgatcggattcctgagcagccgcgaagaaatcgcctcctattaccattgtccggaggccccactggaagctaaggacgtgattctcactagcggatgctcacaagcgatcgatctgtgcctcgccgtcctcgcgaatccaggacaaaacatcctggtgccgcggccaggcttctcactctacaaaactctggcagagagcatgggaatcgaggtgaagttgtacaacctgctcccagaaaaatcttgggaaatcgacctgaagcaactggagtacctgatcgacgagaagactgcatgtctcatcgtgaataaccctagcaacccgtgcggatctgtcttctccaaacgccacctccagaagatcctggctgtagcagcgaggcaatgtgtgccgatcttggccgatgagatatacggggacatggtcttctccgactgcaagtacgaaccactcgctactctgtcaactgacgtcccgatcctgtcgtgtggagggctcgctaaaagatggctggtccctggatggcggctgggctggatcctgatccacgaccgccgggacatctttggcaacgaaatcagggatggactcgtgaagttgtctcagaggatcctgggcccttgtaccatcgtgcagggggcactgaagagcatcctgtgcaggactcctggagagttctaccacaacactctgagctttctcaagtccaacgccgacttgtgttacggagcactcgcggccatccctggactccggccggtgcggccctcgggggccatgtacctgatggtgggcatcgagatggaacacttcccagaattcgaaaacgacgtggagttcactgaaaggctggtggctgaacaatcagtgcactgtctgccggccacttgcttcgaataccctaatttcattcgggttgttatcactgtgccggaagtgatgatgttggaagcctgctcgcgcattcaggagttttgcgaacagcattatcattgcgccgaggggtcccaggaggaatgtgacaaa

SEQ ID NO: 7469 - DNA, 1362 bp, Artificial Sequence
  derived and/or modified sequence
atggatccttacatgatacagatgtcctcgaagggtaacctgccttcaattcttgacgtgcatgtgaacgtgggcggtaggagctcggtgccaggaaagatgaaaggaagaaaggcaaggtggtcggtgcgaccatctgacatggcgaagaaaacttttaacccaattcgcgcaatcgtggataacatgaaggtcaaacctaaccctaataagacgatgatatctctgagcattggagatccaaccgtctttggcaaccttcctactgaccctgaggtgacccaagcaatgaaggacgcactggattcgggtaagtacaacggttacgcaccatcgataggttttctttcctcacgggaagaaattgcatcatactaccattgtccggaagcaccacttgaagcaaaggacgtcatccttactagcggttgtagccaagctattgatctgtgtctggcagtgcttgcaaatcctggtcagaacattctggtgccaaggccgggtttctcgctctacaagacccttgcagaatccatgggaattgaggtgaagttgtacaatcttcttccggagaagtcctgggaaattgacttgaagcaacttgaataccttattgatgaaaagactgcctgtctcatcgtgaacaacccttccaatccatgtggttccgtcttttcgaagcggcacctgcaaaagatcctggccgtggcagcacgccaatgtgtaccaatcttggcagatgagatatatggggatatggtgttctccgattgtaagtacgagccacttgccaccctgagcaccgacgtccccatcctgagctgcggaggccttgccaagcgatggctggtgcctggatggcgactgggatggattctcattcatgatcgcagggatatctttgggaatgaaattcgagatggcctcgtgaagctctcacagaggattcttggaccttgcactatcgtgcagggggcattgaaatcgatcctgtgtcgaacccctggggagttctaccacaacacgctgagctttctgaaatcgaacgcagatctgtgttacggagcccttgctgctattccaggacttagacctgtccggcccagcggtgccatgtacttgatggtcggtattgaaatggaacatttcccagagtttgaaaacgatgtcgaattcaccgagagacttgtggcagaacaatcagttcactgtctgcctgcaacctgtttcgaatatcctaactttatcagagtcgtgatcactgttcctgaggtgatgatgttggaggcatgttcgaggatccaggaattttgcgagcagcactaccactgcgccgaaggttcgcaagaagaatgcgataag

SEQ ID NO: 7470 - DNA, 1362 bp, Artificial Sequence
  derived and/or modified sequence
atggatccgtacatgatacagatgtcttcaaaaggcaatttgccttcaatcttggatgttcatgtgaatgtgggagggcgtagctctgtgcctggcaaaatgaaaggcagaaaggccagatggtcagtaagacctagcgacatggctaagaaaacatttaacccgataagggcaatcgtcgacaacatgaaagtgaagccaaatcccaacaagacgatgatctccttatcaatcggcgaccctaccgtctttgggaacctcccgacagaccctgaggtgactcaggcgatgaaagatgcactcgattcaggcaaatataacggctatgccccctccatcgggttcctttccagcagagaagaaatcgcatcatactaccattgtccagaagctcccctggaggctaaagacgtgattcttacctccgggtgctcacaggccattgatctgtgcttagctgttttggccaaccccggccagaacatcctggtgccacggccgggattctctctgtataagacactggcagaaagtatgggcattgaggttaaactgtataatctgctccctgaaaagtcatgggagatagatctgaaacagctggagtatttgattgatgagaagacagcttgcttgattgtaaacaatccgagcaacccttgcggtagtgtgttcagcaaaaggcatttacaaaaaattcttgccgtagcagcccggcagtgcgtccccattcttgcagatgagatatatggtgatatggtcttcagtgactgcaaatacgagcccctggcgactttaagtactgatgtgccgatcctgtcctgtggtggtttagccaagcgatggctggttcccggctggaggctggggtggatactgattcatgaccgtagagacatctttggaaacgagatccgggacggtctggtcaagctctcccagaggatcctaggtccttgcaccattgtgcagggtgcgttgaaatctatcttgtgccggacccctggagagttctaccacaatactctgtcattcctcaagtctaacgcagacctttgctacggcgccttggctgccattcctggacttagacctgtacgcccctcaggagcgatgtatttgatggtggggatagagatggaacatttccctgaattcgaaaacgacgtggaattcaccgagcggctcgtggccgagcagtccgtccactgcctgccagccacctgtttcgagtatccaaactttatccgcgtggtgatcacagtccccgaggttatgatgctcgaggcctgttctcgaatccaagaattctgcgagcaacactatcactgtgccgaaggcagtcaggaggaatgtgataag

SEQ ID NO: 7471 - DNA, 1362 bp, Artificial Sequence
  derived and/or modified sequence
atggatccctatatgatccagatgtcgtcgaagggcaacttgccgtcaatcctggatgtgcatgtcaacgtgggcggccgctcatcggtgccaggtaaaatgaagggacgcaaggcccgctggagcgtgaggccatccgatatggcgaaaaagactttcaacccgatcagagctatcgtcgacaatatgaaggtgaaaccgaacccgaacaaaactatgatctcactgtccatcggagatcccaccgtgttcgggaacctgcccactgacccggaggtcacccaggccatgaaagatgctttggatagcgggaagtacaacggctacgcgccatccatcggcttcctcagcagccgggaagaaatcgcctcgtactaccactgccctgaagcaccgctggaagcgaaagacgtgattctgacctcgggttgttcccaggccatcgatctctgcctggccgttctggcaaatccggggcagaacatcctcgtgccgcgaccaggatttagcctctacaaaaccctggcggaatcgatgggcatcgaagtgaagctgtacaacctgttgccagaaaagtcgtgggagatcgacctgaagcagctggagtacctgattgacgaaaagacggcctgcctcatcgtgaacaacccgtcgaacccatgtggaagcgtgttcagcaagcggcatctgcagaagattttggccgtggcggcccggcagtgcgtgccgattctggctgacgaaatctacggagatatggtcttttcggattgcaagtacgagcccctggccactttgtccactgacgtgcctatcctctcatgtggcgggctcgcgaaaagatggctggttccgggatggaggttgggctggattctcatccacgatcggcgggacatctttggtaatgaaatcagagacggactcgtgaagctctcgcagagaatcctgggaccatgtactatcgtccagggcgccctcaaatccatcctctgcagaaccccaggcgagttctaccacaacactctgtccttcctgaagtcaaacgcagacctctgttacggggcactggcagcgatcccgggcctgcggccagtccgcccgtcgggggccatgtacctgatggtgggcattgagatggagcattttcctgaattcgagaatgatgttgaattcaccgaacggctcgtggccgagcaaagcgtgcactgcctcccagctacctgcttcgaataccccaatttcatccgcgtggtgatcactgtgccggaagtgatgatgctggaagcctgtagcaggatccaggagttttgcgaacagcactaccactgcgccgagggcagccaggaggagtgtgacaaa

SEQ ID NO: 7472 - DNA, 1362 bp, Artificial Sequence
  derived and/or modified sequence
atggatccatacatgatccagatgtcctcgaaaggaaatctgcccagcatcctcgacgtgcacgtgaacgtgggaggtagaagctccgtgccgggcaagatgaaaggccgcaaggcgcgctggtctgtcaggccatcagatatggctaagaaaaccttcaaccccatcagagcgattgtggacaacatgaaggtcaagccgaaccccaacaaaactatgatctctctgtctatcggggatccaactgtctttggcaacttgccgaccgatccagaggtgacccaggccatgaaggacgcgttggactcgggcaagtacaacgggtacgccccgtcaataggcttcctgtcctcacgcgaagaaatcgcatcgtactaccactgtccggaggccccgctcgaagcaaaggatgtgatactgacctcaggatgtagccaagccatcgatctgtgcctcgctgtgctggcaaatccgggccagaatatcctggtgccaagaccaggcttctccctttacaagactctggccgaatcgatggggatcgaggttaagctgtacaatctgctgccggagaagtcgtgggagatcgacctgaagcagttggagtacctgatcgatgagaaaactgcctgtcttattgtcaacaatccaagcaatccgtgcggctcggtgttttccaagcggcaccttcagaaaattctggccgtcgccgcgcggcagtgcgtgccgatcctcgctgacgaaatctatggagacatggtgttctccgactgcaagtacgaaccgctcgctaccctctccaccgatgttcctattttgtcatgcggaggtttggccaagcgatggctggtgccgggatggagactgggatggatccttatccatgacaggcgcgacattttcggaaacgaaatccgcgatggactggttaagctcagccagagaatcctgggcccctgcactatcgtgcagggagctctcaagtcaatcctgtgccggactccgggtgaattctaccacaataccctgtcatttctgaagtcaaacgcagacctctgctacggagccctcgcggccatcccggggctgcgtcctgtccggccctccggagcaatgtacctcatggtcggtatcgaaatggaacatttccctgaattcgaaaacgacgtcgaattcaccgagcgacttgtggccgaacaatcagtgcactgccttcctgctacgtgctttgagtaccccaacttcatccgggtggtgatcactgtgcccgaagttatgatgcttgaggcgtgttcgcggatccaagaattctgtgagcaacattatcactgcgcggaagggtcccaagaagaatgcgacaaa

SEQ ID NO: 7473 - DNA, 1362 bp, Artificial Sequence
  derived and/or modified sequence
atggatccgtatatgatccaaatgtcctcaaaaggaaaccttccgagtatactggatgttcacgtgaatgtaggcggccgctcatccgttccaggaaaaatgaaaggccggaaagccaggtggagtgttcggccaagtgatatggccaaaaaaacttttaacccaattcgtgccatcgtagataacatgaaggtgaagccaaaccctaacaagacaatgattagtctctccattggcgatccaactgtgttcggcaacctgcccaccgaccccgaggtaacccaggctatgaaagacgcactggatagcggaaagtacaacgggtacgccccatccattggatttctgtcctctcgcgaagagatcgcctcgtattaccactgtccagaggctccactggaagccaaagatgtcattctcacttccgggtgcagccaagctattgacctttgccttgcagtcttggcgaatcctggccaaaacatccttgtgcctcggcccggcttcagtttgtacaagaccctggccgagtcgatgggaatagaagtcaaactctataatttgttgcctgagaagtcgtgggaaattgatctgaaacaactggaatatctgattgatgaaaagaccgcttgtctgatcgttaataacccatctaatccgtgtggcagcgtattttcgaagcggcacctgcagaagatcttggccgtggcggctcgacagtgtgtacccatccttgcagacgaaatctacggtgacatggtcttttcagattgcaagtatgaacctctcgctacactaagcaccgatgtaccaatactgagctgcgggggtcttgccaaaagatggttggtacccggctggcgcttagggtggatcctgatccacgacagaagagatattttcggaaatgagatccgcgacggcctcgtgaaactgtcccaacgcatactgggtccatgtaccattgtccagggcgcgctgaagtctatattgtgccgaacccccggggagttctaccataacaccttgtcttttctgaagtcaaatgcagatctatgttatggagcactggctgccatccccggactccggcctgtccgcccctccggcgccatgtatcttatggttgggatagagatggaacactttcctgagtttgagaacgacgttgagttcaccgaacgtttggtggccgagcagagcgtgcactgtctgccagccacctgttttgagtacccgaacttcattagggtcgttatcaccgtgccggaagttatgatgctggaggcctgttccagaattcaggagttctgtgagcagcactatcattgtgccgagggttcccaagaagaatgtgataag

SEQ ID NO: 7474 - DNA, 1362 bp, Artificial Sequence
  derived and/or modified sequence
atggatccttacatgattcaaatgtcctctaaaggcaatctcccatctatcctcgatgtgcacgttaatgtgggtggccggtcttctgtaccaggaaaaatgaaggggcgtaaagcaaggtggagcgtgagaccatccgacatggccaagaagacatttaacccgattcgcgcaatagtggacaacatgaaggtgaagccaaaccctaacaagacaatgatttccctgtcaataggggatcccacggtcttcggaaatctgccgacagatccagaggtgacacaggctatgaaggacgccctcgacagcggcaagtataatggctacgctccgtctattggatttttgtcgtcccgcgaggagatagcctcgtactatcattgcccggaggccccactggaggcaaaggacgttattctgaccagcgggtgctcgcaggccatagacctgtgtctggctgtgttggctaatccaggccagaatatcctcgtccctagacctgggttctccctgtataagaccctggccgagtccatgggcatcgaggttaagctgtacaacctgctgccagagaagagctgggagatcgacttgaagcagctggaatacctgattgacgagaaaaccgcttgcctaattgtgaataatcctagcaacccatgcggctccgtgttctctaagaggcatcttcaaaagatcctcgctgtggctgcgcggcagtgtgtgcctatcctggctgatgagatctacggcgatatggttttctcagactgtaagtacgagcccttagcaaccctgtctacagacgtccctattctctcttgtggcgggctcgccaagagatggctggtcccaggatggagactcgggtggatactgatccacgacagaagggacatctttggcaacgagatccgagatggcctggtcaagctatctcagagaattctgggcccgtgcacaatagtccagggcgcacttaagtccatcttgtgcagaacacctggagaattttaccataacactcttagtttcctcaagtccaacgccgatctgtgctatggagccctggccgccattccgggcctcaggcccgtgcgaccttccggagccatgtatctgatggtggggatagagatggagcacttccctgagttcgaaaacgacgttgaattcacggaaaggctggttgcggagcaaagcgtgcactgtctgcccgctacatgcttcgaataccctaacttcattcgtgtggtgatcaccgtccctgaggtgatgatgcttgaggcttgttctaggatccaggagttctgcgagcaacactaccactgtgccgaaggttctcaggaggaatgcgataag

SEQ ID NO: 7475 - DNA, 1362 bp, Artificial Sequence
  derived and/or modified sequence
atggatccttacatgatccagatgtccagcaagggcaaccttcctagcattctagatgtgcatgtgaacgtggggggacgcagctctgtgcctgggaagatgaagggtaggaaagcacgttggagcgtgcggccttcagacatggccaagaagaccttcaatcccattcgcgccattgtcgataatatgaaggtgaaacctaacccaaacaagactatgatttcccttagtattggcgaccctacagtgttcggcaatctgccaactgatcctgaagtgacgcaggcaatgaaggatgctctggacagcggaaagtataacggctacgcaccttctatcggattcctctcttcccgagaagagattgcctcgtattaccattgcccggaagctcccctggaagccaaggacgttatactgaccagcgggtgctctcaggccatagacctgtgcctcgccgtgctggcaaacccaggccaaaacatcctagtgccaagaccaggcttttcactttacaagacactagctgaatcaatggggatcgaagtcaaactgtataaccttctccctgagaagtcctgggaaatcgatctgaagcagctagagtacctcatcgatgaaaagacagcttgcctgattgtgaacaatccctcaaacccgtgtgggtctgtgtttagtaaacgacatttacaaaagatcctagccgtggccgcgcgacagtgcgtgcctatcttggccgatgaaatctacggcgacatggtgttcagcgactgtaaatacgagccactggccacgctctcgaccgacgttcccatcctatcctgtggcggactggctaaaaggtggctggtgccaggctggcggctgggttggattttaatccacgatagaagagatatcttcgggaatgagatccgagatggtctcgtgaagctgtctcagaggatcttgggcccgtgtacgatagtacagggcgcactgaagtccatactgtgtcggactcccggagagttctaccataacacgctgagctttttgaagagcaatgcggacttatgctatggcgctctggcagctatcccagggctccgccctgtgcgtccgagtggtgctatgtatctcatggtgggcattgagatggagcactttccagagttcgagaacgacgtggagtttaccgaacgcctggtagccgaacagtccgtgcactgcctccctgctacatgctttgagtaccctaatttcatccgggtcgtgatcactgttccagaggtgatgatgctggaagcgtgcagccgcatccaagaattctgtgagcaacactaccattgcgcggaaggatcgcaagaagaatgtgataag

SEQ ID NO: 7476 - DNA, 1362 bp, Artificial Sequence
  derived and/or modified sequence
atggatccgtatatgatacaaatgtcgtcgaaaggtaatctaccgtcgatattagatgttcatgttaatgtaggtggtcgttcgtcggtaccgggtaaaatgaaaggtcgtaaagcgcgttggtcggttcgtccgtcggatatggcgaaaaaaacgtttaatccgatacgtgcgatagtagataatatgaaagtaaaaccgaatccgaataaaacgatgatatcgctatcgataggtgatccgacggtatttggtaatttaccgacggatccggaagtaacgcaagcgatgaaagatgcgctagattcgggtaaatataatggttatgcgccgtcgataggttttctatcgtcgcgtgaagaaatagcgtcgtattatcattgtccggaagcgccgttagaagcgaaagatgtaatactaacgtcgggttgttcgcaagcgatagatctatgtctagcggtattagcgaatccgggtcaaaatatattagtaccgcgtccgggtttttcgctatataaaacgttagcggaatcgatgggtatagaagtaaaactatataatttattaccggaaaaatcgtgggaaatagatctaaaacaattagaatatttaatagatgaaaaaacggcgtgtttaatagttaataatccgtcgaatccgtgtggttcggtattttcgaaacgacatctacaaaaaatactagcggtagcggcgcgacaatgtgttccgatactagcggatgaaatatatggtgatatggttttttcggattgtaaatatgaaccgttagcgacgctatcgacggatgtaccgatactatcgtgtggtggtctagcgaaacgttggttagtaccgggttggcgtttaggttggatactaatacatgatcgtcgtgatatatttggtaatgaaatacgagatggtttagtaaaattatcgcaacgtatattaggtccgtgtacgatagtacaaggtgcgttaaaatcgatattatgtcgaacgccgggtgaattttatcataatacgttatcgtttttaaaatcgaatgcggatctatgttatggtgcgctagcggcgataccgggtctacgtccggtacgaccgtcgggtgcgatgtatttaatggttggtatagaaatggaacattttccggaatttgaaaatgatgtagaatttacggaacgactagttgcggaacaatcggttcattgtctaccggcgacgtgttttgaatatccgaattttatacgtgttgttataacggttccggaagttatgatgttagaagcgtgttcgcgtatacaagaattttgtgaacaacattatcattgtgcggaaggttcgcaagaagaatgtgataaa

SEQ ID NO: 7477 - DNA, 1362 bp, Artificial Sequence
  derived and/or modified sequence
atggacccctacatgatccagatgagctccaagggtaacctgccgtcgatcctggatgtgcacgtgaacgtgggagggcgttcttcagtgccagggaagatgaagggacggaaagcccggtggagcgtgaggccctcagacatggccaaaaagaccttcaaccctatcagggctatcgtcgataacatgaaggtgaagccgaacccaaacaagaccatgatctcactgtcaatcggcgatccgaccgtattcggaaacctccccacggacccagaagtcacccaagccatgaaagatgcgctcgatagcgggaagtataatggatatgcaccgtccatcggctttctttcatcgagagaggaaattgcgagctactaccactgtccagaagcccctctggaagcaaaggacgtgatcctcacttccggatgctcacaggccatcgatctgtgcctcgcggtgcttgcgaacccgggacagaacattctggtgccgcggccgggattctcgctctacaagactctcgccgaatcaatgggcatcgaggtgaagctgtacaatctcctgccagagaagtcctgggaaatcgacctgaagcagcttgagtacctgatcgacgaaaagaccgcttgcctcatcgtgaataacccctccaatccgtgcggatcagtgtttagcaaacggcaccttcagaaaatcctcgccgtggctgccagacagtgcgtgccgatcctggcagacgaaatctacggagatatggttttctccgactgcaagtacgaacccctggctaccctttccacggacgtgccaatcctcagctgtggaggcctcgcgaaaagatggctggtccctggctggcgacttgggtggatcctgatccacgatcgccgcgatatcttcggcaacgagattagagacggcctggtgaaactgtcccaacgaattctcggaccatgcaccatagtgcagggtgccctgaagtcgatcctctgccgcacgccgggggagttttaccataataccctgagctttctcaagtccaacgcagacctgtgctacggggcactggccgcgattccgggactccggccggtgcgcccaagcggagccatgtacctgatggtcggaatcgaaatggaacacttcccagagttcgaaaacgacgtggaattcaccgaaaggttggtggctgaacaatccgtgcattgcctgccggctacctgctttgaatacccgaatttcatccgggtggtgatcaccgttcctgaggtcatgatgctggaagcatgctcccggatccaggaattttgtgaacagcattatcattgtgcggaaggatcccaagaggaatgcgacaag

SEQ ID NO: 7478 - DNA, 1362 bp, Artificial Sequence
  derived and/or modified sequence
atggatccctacatgattcagatgagctcgaagggaaacctccccagtatcctggacgtccacgtgaacgtgggcggaaggtcttccgtcccgggcaagatgaagggccgtaaggccaggtggtccgtccggccctccgatatggccaagaagacctttaaccctatccgtgctattgtggacaatatgaaggttaaacccaatcccaacaagaccatgatttcattgtccatcggcgatcctaccgtgtttgggaacctgccaacagatcccgaggtgacacaggctatgaaggacgcgttagactccggtaagtataatggctatgccccttcaattggattcctctcgtctagggaggagattgcttcctattaccattgtcctgaggcccccctagaggccaaagacgtgatactcacaagcggatgcagccaggcgatcgacctctgcttggccgtcctagccaatcccggccagaacattctggtcccacggcccggattcagcctctataaaactctcgccgaatcaatggggatcgaggtgaaactatacaatctgctgcccgagaagtcttgggaaattgatttgaaacagctggagtacctgatcgatgagaagacggcttgtctgatcgttaataacccgtcaaacccatgtgggtcggtattcagcaaacgccacctccagaaaattttagcggtcgcagcccgtcagtgtgtgcccattctggcggatgagatctatggcgacatggtgttcagcgattgcaagtacgagccactggctacactgagtaccgatgttcccatactctcttgcggaggtcttgccaaacgatggctagtccccggctggagattaggctggatcttaattcacgatcgcagagacatcttcggcaacgagattcgagacggcctagtgaaactcagtcagcggatacttggcccatgtaccatcgttcaaggggcattaaagagtatcctctgtcgcactcctggggagttttatcacaataccctgagctttctgaaaagcaacgccgatctctgttatggggctttagcagcaattcctggtttgaggcctgtcaggcctagcggagccatgtatctgatggtaggcatcgaaatggagcatttcccagaattcgaaaacgatgttgagtttaccgagcgccttgtcgcagagcagtccgtgcactgtctgcccgctacctgttttgagtacccaaacttcattcgggtagtgattacagtgcccgaggttatgatgctggaagcgtgcagcagaatccaggagttctgcgagcagcattaccactgtgccgaggggagccaggaggagtgtgataag

SEQ ID NO: 7479 - DNA, 1362 bp, Artificial Sequence
  derived and/or modified sequence
atggacccgtacatgatacaaatgtctagtaaaggtaatcttccaagcatcctggacgtccatgtcaacgtgggtggcagaagcagcgtgccaggcaagatgaagggccgcaaggcccggtggagcgtgcgcccatcagatatggccaagaagaccttcaacccgatacgagccattgtagataacatgaaggtgaagcccaaccccaacaagactatgatcagcctcagcatcggagatcctacagtgttcggcaatctgccaactgatccagaagtgacccaggcaatgaaggacgctttagatagcggcaagtacaacggctacgcgccatcaatcggcttcctatcatcgagggaggaaatagcatcttactatcattgtcctgaggcgcccctcgaagctaaggacgtcatcctcaccagcggatgcagccaggccattgacttgtgccttgctgttcttgcaaacccaggccagaatatccttgtaccgaggcccggcttcagcctgtataagactttggcagagtccatgggcatcgaggtcaagctctataacctgctgcccgagaaatcctgggagattgaccttaagcaactggaatacttgatagatgaaaaaaccgcatgcctgatcgtgaacaatcctagcaacccttgcggaagtgtgttctctaaacgtcacctgcagaagattttggccgtggccgctcggcaatgtgtccctatcttggccgacgagatttatggagatatggtctttagcgactgtaagtacgagcccctggctactctttcaactgacgtgcctatcctcagctgtggtggcctcgctaaacgctggctggtacctggatggaggctggggtggattttgatccatgacaggagggatatttttgggaacgaaatccgcgatggcctggtcaaactcagccagcggatcctggggccatgcacaattgtccaaggggcgcttaaatcaatcttgtgcaggactccaggtgagttttaccataacaccctgagttttttgaagtctaacgcggacttgtgctatggagcacttgccgctatccctggcctgcggcctgtgcgtccgtccggtgccatgtatcttatggtgggcattgaaatggagcattttcctgagttcgagaatgacgtggagttcaccgaacgcctcgtcgcagagcagagcgtgcattgtctgcctgcaacatgctttgagtatcccaactttattagggtggtgattactgtgcctgaggtgatgatgctggaagcttgcagtcgtatccaggagttttgtgaacagcattaccactgcgccgaaggaagccaagaggaatgtgacaaa

SEQ ID NO: 7480 - DNA, 1362 bp, Artificial Sequence
  derived and/or modified sequence
atggatccctacatgattcaaatgtcgagcaagggtaacctcccgtccatactagacgtgcacgttaatgtgggtggtaggtccagtgttcccggcaagatgaaaggtcggaaggcccggtggtcggtgcgtccttcggacatggccaagaaaacgtttaatcccattcgcgccatagtcgataacatgaaggtgaaaccgaatccgaacaagaccatgatatcgctgagtatcggtgatccgaccgtgttcggcaacctgccgaccgatcccgaggtgacgcaggccatgaaggatgccctagactccggcaagtacaatggatacgcgccctcgatcggattcctgtcatcgcgagaagaaatcgcctcatactaccactgccctgaggcccccttggaggcgaaagatgttatcctgacctcgggttgctcccaagccatcgacctctgtctcgccgtgctcgcgaatcccggacaaaatattctcgtgccacgcccaggcttcagcctctataaaacgttggcggagtctatgggcattgaggtcaagttgtacaatctgctgcccgaaaagtcctgggaaattgacctaaagcaattggagtatctgattgacgagaagaccgcttgcctgattgtcaacaatccatcgaatccttgcggatcggtgttcagtaagcgacatttgcaaaagatccttgccgtcgcagcccgacaatgcgtgccaattttagcggacgagatctatggtgacatggtgttctcggactgcaaatacgaacccctggccacactatccacggacgtgcctatcctgtcctgcggtggcctggcaaagcgttggttagtcccaggctggcggcttggttggatcttaattcacgaccgcagggatatcttcggcaatgagattcgggatggtctcgtgaaattgtcgcagaggattctagggccatgcacaattgtgcagggagccctgaagagtattctttgccggacccccggagagttctaccacaatactctgtccttcctgaagtccaatgcggacctgtgctatggcgcgctggcagccattccgggccttaggccggtaagaccgtcgggggctatgtatctgatggtcggtatagaaatggagcactttcccgagtttgaaaatgacgtggaattcaccgaaaggctggtggctgaacagagcgttcattgcctccctgccacgtgtttcgagtaccctaatttcattcgcgttgtcatcacagttccagaggtgatgatgctggaggcctgctcgagaattcaggagttttgcgagcagcattaccactgcgcagaaggcagtcaggaagagtgcgataag

SEQ ID NO: 7481 - DNA, 1362 bp, Artificial Sequence
  derived and/or modified sequence
atggatccctacatgattcagatgtcgtccaagggcaatttgccttcaatactggatgtgcatgtcaatgtgggtggaaggtcctcggtgccaggcaaaatgaagggaagaaaagctcgctggtccgtgaggccttcagatatggcaaagaaaacctttaaccctatacgagccatagtggataacatgaaggtgaagccaaaccctaacaagaccatgatcagcttgagcatcggagatccaactgttttcggaaacctgccaactgatcctgaagtgacccaggcaatgaaagatgcacttgattccggtaagtacaatggatacgcaccctcgattggtttcctctcctcacgcgaggaaatcgcaagctactaccattgcccagaagcgcctctggaagctaaggatgtgatccttaccagtggttgttcacaagctattgacctttgtctggctgtccttgcaaaccctggacaaaacatactggtgcctcggcccgggtttagcttgtacaagaccctggcggaatcgatgggaattgaagtcaagctctacaatcttctcccagagaagagctgggaaatcgatcttaaacaattggaataccttattgacgaaaagacggcttgcctgatcgtgaacaacccatcgaatccttgtggatctgtgttcagcaagcgccatctgcagaagattctggccgtggcagcaagacaatgcgtgcctattctggcggacgagatttacggagatatggtgttctccgattgtaagtacgaacctctggcaactttgtcaactgatgtgcctattctttcatgcggcggtcttgcgaaacgttggcttgtcccaggttggagactcggttggattcttatccatgaccggcgcgacattttcgggaacgaaattagagatggactggttaaactgtcgcaacgcattcttggaccttgcactattgtgcaaggagccctgaagagcattctgtgtcggactccaggtgaattctaccataacactctttccttcctgaagtcaaacgcagacctctgttacggggcacttgcagcaatccctggcttgcgtcctgttcgccccagcggggcgatgtacctcatggtgggcatcgagatggagcattttcccgaatttgaaaatgatgtggaatttactgaacgcctggtcgcggaacagtccgtgcactgcctgcccgcaacctgttttgaatacccgaatttcattagagtggtgataactgtccctgaggtcatgatgctggaggcctgctcacgcattcaggaattctgtgaacagcattatcattgtgctgaaggtagtcaagaagaatgtgataag

SEQ ID NO: 7482 - DNA, 1362 bp, Artificial Sequence
  derived and/or modified sequence
atggacccctatatgatacagatgtcttccaagggcaacctcccatcaattctggacgtacatgtgaacgttggtggccgctcaagtgtgccaggtaaaatgaagggcaggaaagctagatggtctgtaagaccgtctgatatggcaaagaagaccttcaatccgattagagctatcgtggataacatgaaggtaaaacctaatcccaacaagacaatgatctcactctctatcggagaccccacagtgttcggcaatctcccaactgatcctgaagtaacacaggctatgaaggatgcattggactctggcaagtataacggctatgcaccttccataggttttctgtcctcacgcgaggaaatcgcatcttactaccattgccccgaggccccccttgaagccaaagacgttattctgacgtccggatgttcccaagccatagatctttgcctggctgtcctcgccaacccgggccagaacatcctggtgccccgccccggctttagtctctataaaacattggctgagtctatgggtatagaggtcaaactttacaatctgcttcccgagaaatcttgggaaatcgatttgaaacaactcgaatatctgattgatgagaaaactgcctgcctgatcgtgaataacccatcaaacccatgcggctccgtcttcagcaagagacacctgcaaaagatcttggccgtggccgcacgccaatgcgtgcctattcttgccgacgagatctacggtgacatggtattctccgactgtaagtacgaaccgctggctactctctccactgatgtgcctatcttgagctgcggaggactggcaaaaaggtggttggtgccaggctggagacttggctggattctgattcatgaccgcagggacatcttcggcaacgaaatcagagatggtctggtgaagctgtcccagagaatcctgggcccctgcacaatagtacagggagctctcaagtccattctgtgcaggaccccaggagaattctaccataatactctgtcattcctgaaatctaacgctgatctttgctatggtgcgctcgccgccatcccgggccttaggcccgttcgcccgagtggagccatgtatctcatggtcggcattgagatggagcatttcccagagttcgagaacgacgtggagttcaccgagaggctcgtggctgaacaatccgtgcattgtctccctgctacatgcttcgagtatcctaactttattcgcgtggtgattactgtgcctgaggttatgatgctggaggcctgctcacgcattcaggagttctgcgagcagcactaccattgtgccgagggctcacaggaagaatgcgacaaa

SEQ ID NO: 7483 - DNA, 1362 bp, Artificial Sequence
  derived and/or modified sequence
atggacccatacatgatacagatgtcatcaaagggcaaccttccgtctatcctggatgtgcacgtgaacgtcggcgggagatcgtccgtccctggcaaaatgaagggaagaaaagctcgctggagcgtcaggccctctgatatggccaagaagaccttcaatcccatcagggcaattgtggataacatgaaggtgaaacctaacccaaacaaaaccatgatatcattgagcattggcgatcccaccgtctttggcaacctacctactgatcccgaggtgacacaggccatgaaagacgctctggatagtggcaagtacaacgggtacgctcccagtatcgggttccttagtagccgcgaggaaattgcatcttattaccattgccccgaggctcctctggaagcaaaagacgtgattctgacctctggatgctcccaggccattgatctgtgcttggccgtcctggcaaacccaggacagaacatactagttcccaggccaggctttagcctgtacaaaaccctcgccgaatcaatggggatcgaggtgaagctttataatcttctgccagaaaagagctgggaaattgatctgaagcagctggagtatcttattgatgagaaaactgcctgcctgattgtgaataatccgtcaaacccttgtgggtccgtcttctctaaaagacatttgcagaagatactggccgtagcagcccgccaatgcgtgccgattttggctgatgagatttacggggatatggtgttctccgactgtaagtacgaacccctggctaccctgtccacagacgttcccatcctgagttgcggaggacttgccaaacggtggctggttcctggctggcggttggggtggatcttgatacacgataggcgcgatatcttcggaaatgagattcgagacggcttggttaagttgtcgcagagaatcctcggcccttgtactatcgtgcagggcgctctcaaaagcatattatgtcgcacacccggggaattttaccacaacactctgagtttcctgaagtctaacgccgatctatgttacggagccctggccgcaattcctgggcttcggccagtacgcccgtcgggggctatgtacctgatggtcgggattgagatggagcactttccagagttcgaaaacgatgttgagttcaccgaacgcctggtcgcagagcagtcagtccactgtctacccgcaacttgtttcgagtatcccaattttattcgggtggtgattacagtccccgaagtcatgatgctggaagcttgctctagaatccaggagttttgtgagcaacattaccattgtgccgaggggtcccaagaggagtgcgacaag

SEQ ID NO: 7484 - DNA, 1362 bp, Artificial Sequence
  derived and/or modified sequence
atggatccttacatgatccaaatgtcctcaaaggggaatcttccttccatacttgatgtccatgtgaacgtgggaggtcgctcgtcggtccccggaaagatgaaaggccgaaaggcacgctggtctgtgaggccgtccgacatggcaaagaaaacgttcaatcctattcgggccatcgtggataacatgaaggtcaagcctaatcctaacaagaccatgatttcgttgtcgatcggagatcctactgtgtttggcaatcttcctactgatcccgaagtgactcaggcgatgaaggatgcccttgattctggtaagtacaatggctacgcaccttcgataggctttctcagcagccgtgaagagattgcgtcatactaccactgtcctgaagctccccttgaggccaaagatgtgattctgacttcaggttgtagccaagcaattgatttgtgtcttgcagtcttggcgaatcctgggcagaacatactggtgccaagaccaggtttctcgctgtacaagactctggcagaatccatgggaatcgaagtgaaattgtacaacttgctgcctgaaaagtcatgggaaatcgacctcaagcaactggagtaccttattgatgaaaaaaccgcatgtctcatagtgaacaacccatcaaacccatgtggatcagtgttttccaaaagacacctgcaaaagattcttgccgtcgcggcacgacagtgtgtgcccattctggcggacgagatttacggggacatggttttcagcgactgtaagtatgaaccccttgcaaccctttccaccgatgtaccaatactttcctgcggaggtctggctaaaaggtggcttgtccctggttggaggctgggctggattctcatacacgacagaagagatatcttcggcaacgagatacgagacggactggtcaagctgtcgcagcgcattttgggtccctgtactatagtgcagggtgcactcaagtccattctttgcagaactccaggcgaattctaccacaacaccttgtcctttcttaagtcgaatgcggatctttgctacggcgcattggccgccatacccgggctccgtccggtcagacccagcggagcaatgtacctcatggtcggtattgaaatggaacactttcctgaattcgaaaatgatgttgagttcactgaacgactggtggccgagcagtctgtccactgtctgccagcaacttgcttcgagtatccaaacttcattcgggtggtgattacggtcccagaagtcatgatgctcgaggcatgctcgagaatccaggaattttgtgaacagcattaccattgtgctgaaggtagccaagaggaatgtgataag

SEQ ID NO: 7485 - DNA, 1362 bp, Artificial Sequence
  derived and/or modified sequence
atggacccctacatgatccaaatgtcctctaaaggtaacctgccgtccatattggacgtgcacgttaatgtgggtggacgatcaagtgtgcctggaaaaatgaagggccgtaaggccagatggtcagtgcggccctccgacatggctaaaaagacttttaaccctattcgagccattgtagataatatgaaagtgaaaccgaacccaaataaaacaatgatctcgctgagcatcggcgaccccactgtttttggtaatcttccaaccgaccctgaggtgacacaggctatgaaggatgctttagactcggggaagtacaacggatatgctccaagcatcggatttctttcaagtagagaggagattgcatcttattaccattgcccagaggctcccctggaggccaaggacgtgatactgacctccgggtgctcacaggctatcgatctgtgcctcgccgttctagctaaccctggccagaatatccttgtgcctagaccaggatttagtctgtacaagactctggcagaatccatgggcatcgaggtcaagctctacaacctgctgcctgagaagtcatgggaaatcgacttgaaacagcttgaataccttatcgacgagaagactgcatgtcttattgtcaacaatccttctaacccttgcggcagcgtgttctccaagcgtcacctgcagaagatactggccgtggccgcccgacagtgtgtgcccatcctcgctgacgaaatttacggcgacatggttttcagtgattgtaaatacgaacctctggctacccttagtacagacgtccctatcttgagttgcggggggctagccaaaaggtggctcgtccccggctggcgtctaggatggattcttatccacgaccgcagagatattttcggaaatgagataagggatggcctggtgaagctcagccagcggatactgggaccttgtacaatcgtccagggggcgttgaagtccattctgtgcaggacccctggggagttctatcacaacacattgtcttttctgaaatcgaatgcagatttgtgctacggagcattagccgccattcctggattgcggcctgtcaggcctagcggagccatgtatttaatggtgggaatagagatggagcactttccagaatttgaaaacgacgtcgagttcacggaaaggctggtggccgaacagtcagtgcactgcctacccgctacctgcttcgagtatcctaattttattagagttgtgataacagtgcctgaggtgatgatgctggaagcttgttctaggatccaagagttttgcgagcagcactaccactgcgcagagggtagccaggaggagtgtgacaag

SEQ ID NO: 7486 - DNA, 1362 bp, Artificial Sequence
  derived and/or modified sequence
atggatccctacatgatacagatgtcatcaaagggcaacttgccatccatcctcgacgtccacgttaatgtaggcggtcggtctagcgtgccaggcaagatgaagggcagaaaagccagatggagcgtgaggccctctgacatggctaagaaaacatttaacccaatccgtgctatcgtcgacaatatgaaggttaagccaaatcccaacaaaactatgattagtcttagcatcggcgaccccacagtgttcggaaaccttcctaccgaccccgaagtgacgcaggctatgaaggatgccctcgattctggtaaatataacggctatgcgccatctatcggcttcttgtcttcaagagaggaaattgcgagttattaccattgccctgaggcaccactggaagccaaggatgttattctcacatctggctgttcacaggcaatcgacctgtgcctagctgtgctggccaaccctgggcagaatatcctggtgcccaggccgggcttttccctttacaaaacgctcgcggagagtatgggaattgaagtgaagctatataacctcctgcctgagaagtcatgggagatagatttgaaacagcttgaatacctgatcgatgagaagaccgcatgcctgatagtcaacaatccatccaacccctgcgggagcgtgtttagtaaacggcacttgcagaagatcctggcagtggcagcacggcagtgtgtacctattctggccgacgagatctacggagatatggttttctctgattgtaaatacgagccccttgcaacccttagtaccgatgttcccattctgtcctgtggcgggctggctaagcgctggctggtccctggttggagactgggttggatcctgattcacgatcgcagggacattttcggcaacgaaatacgggacggactcgttaagttatctcagcggattctgggcccctgtactatcgtccagggagcactgaagtcaattctctgtagaactcccggggagttctaccacaatacactgagctttttgaaaagtaatgccgacctttgctatggcgcgctggctgcgatccccggcctgcggccagtgagacccagcggagcaatgtacctcatggtcggaatcgagatggagcattttcctgagtttgaaaatgacgttgaatttacagagagacttgtggcagaacagagcgtccattgcctccccgccacttgctttgaatacccaaattttatacgagtggtgattacagtgcccgaggtaatgatgctggaagcctgttcgagaatccaggagttttgcgaacagcactatcattgtgcagaaggatcccaagaggaatgtgacaaa

SEQ ID NO: 7487 - DNA, 1362 bp, Artificial Sequence
  derived and/or modified sequence
atggatccttatatgatacagatgagctcaaaaggtaacctgcccagtatcctggacgtgcacgtgaacgtaggggggcggtcaagcgtgcccggcaaaatgaagggtcggaaggcacgatggtccgtccggccttcagatatggctaaaaagacttttaaccctatccgtgccatcgtggataatatgaaggttaagccgaacccgaataagacaatgataagtttgtcgattggagatcccacagtgtttggaaatcttccaactgatccagaagtaacccaggcaatgaaggacgcattggactctgggaagtataatgggtacgcaccctccataggctttctgtcttcaagagaggagatcgcgagctactatcattgccctgaggccccccttgaggccaaggatgtcatactcacctcggggtgtagccaggccatcgacctatgcctggctgtgctcgccaaccctggtcaaaacattcttgtgccgaggccaggcttcagtctttacaagaccttagccgaaagtatgggtattgaagttaagttgtataacctcctcccagaaaaaagttgggagatagaccttaagcaactggagtatctgatagatgagaaaacggcctgtttgatcgttaacaacccatccaatccatgtggatccgtctttagcaagcgccatctccaaaagatcctggcagtcgcagcgcggcagtgcgtgccgattcttgcagacgagatttatggcgacatggtatttagcgattgcaagtatgagccattggcaaccctcagcacggacgtgcctatcctcagctgcgggggactggcaaagcgctggctggtgcccggctggcggctgggctggatcctgattcacgatagacgggatatcttcgggaatgagattcgcgacggactagttaaactatcccaaaggattttgggcccctgcacgattgtccagggtgccttgaagtccatactgtgtaggacacctggagaattttaccacaacactctgagtttccttaagtctaacgccgacctttgctacggagcattggccgcaatccctggcctgagaccggtgcgcccaagtggtgccatgtatttgatggttgggattgagatggagcatttccctgagtttgagaatgatgtcgagttcacagaacgactagtcgccgagcagtcagtccactgtctccctgctacttgcttcgaatatcccaattttatccgagttgtaatcacggtacccgaagtaatgatgcttgaagcctgttctaggatccaggagttctgcgagcagcactaccactgcgcggaggggtcccaagaagagtgcgacaag

SEQ ID NO: 7488 - DNA, 1362 bp, Artificial Sequence
  derived and/or modified sequence
atggatccgtatatgatccagatgtcctccaaaggaaacctgcccagcatccttgatgtgcatgtgaacgtcggaggacggtctagtgtgccgggaaagatgaagggacggaaggcccggtggagtgtgcggccgtccgacatggctaagaaaaccttcaatcccatcagggccattgtggacaacatgaaagtcaagccgaacccaaataagaccatgatctcactgtcgatcggagatccgaccgttttcggtaacttgccgaccgacccggaagtgactcaggcgatgaaggatgccctcgacagcggaaagtacaacggatacgcaccatccatcggattcctgagctcgcgtgaagagatcgcctcctactaccactgcccggaggccccactcgaagccaaggacgtgatcctgacgagcggatgctcccaagcaattgacctgtgccttgccgtgctcgcaaacccaggccagaacatcctcgtgccgcgccccggattctccctgtacaagactctggccgaaagcatgggaatcgaagtgaagttgtacaatctgctgccagagaagtcgtgggagatcgatcttaagcaactggagtacctgatcgacgaaaagaccgcatgtctgatcgtgaataatccttcgaacccatgcggatcggttttttctaagcgccacctccaaaagatcctggctgtcgcagcgcgacaatgtgtcccgatcctggcggacgagatctacggagatatggtgttttctgactgcaaatacgaacctctcgcgactctttcaactgacgtgcctatcctgtcatgtggtggattggcaaagaggtggctcgtgccgggctggcggctggggtggatcctcattcacgacagaagagatatcttcggcaatgagatcagagatggacttgtgaaactgtcgcaacggattcttggcccgtgtactatcgtccagggtgcgcttaagtccatcctctgccgcaccccgggcgagttctaccataacactctgagcttcctgaaaagcaacgcggatctgtgttacggggctctggccgcgattccgggtctgcgcccggtgcggccatcgggagcgatgtacttgatggtgggcatcgagatggaacacttcccggagtttgaaaacgacgtcgaattcaccgagcggctcgtcgcggagcaatccgtgcactgtctgcctgcaacctgcttcgagtacccgaacttcatccgcgtggtgattactgtcccggaagtcatgatgctggaagcatgcagcaggatccaggaattctgcgaacagcactaccactgtgcagaaggatcccaggaggagtgtgacaaa

SEQ ID NO: 7489 - DNA, 1362 bp, Artificial Sequence
  derived and/or modified sequence
atggacccttacatgatccagatgtcgtccaagggaaatctgcctagcatactcgatgtgcacgtgaacgtgggtggtcgaagctcggtgccagggaaaatgaagggcagaaaagctcgctggagtgttcgcccgtcggatatggcaaagaaaactttcaatccgatcagggccattgtcgacaacatgaaagtaaagccgaacccaaacaagactatgatctcgctgtctattggcgacccaactgtgttcggaaacctcccaaccgacccagaggtgacccaagctatgaaagatgccctggatagcgggaagtacaacggttacgctccatccatcggtttcctctcgagccgggaagaaattgcctcatattaccattgcccagaagcgccgctggaagccaaagatgttattctcactagcggatgctcgcaggcgatcgacctgtgcctcgcggtgttggctaatccaggacagaacattctcgtcccgaggcccggcttctccctctacaagaccctggcggagtccatggggattgaggtgaaactgtataacttgctccccgaaaagtcttgggagatcgatttgaagcagctggagtatctcatcgacgagaaaaccgcgtgcctgatcgtgaataatccttctaatccgtgcggatcggttttctcgaagcgccatcttcagaaaatcctggcggtggcagcccggcaatgcgtgccgattttggctgatgaaatctacggcgacatggtgtttagcgattgtaagtacgagcctctggcaacgctgtcaaccgatgtgccgatcctcagctgtggaggtctggcgaagagatggcttgtgccagggtggcggctggggtggatccttatccacgatcgccgcgacatcttcggaaacgaaatcagagacggcctcgtcaagctgagccagcgcatccttggcccgtgtactatagtgcaaggtgcactcaagtccatcctctgtcggaccccgggagagttctaccataataccctctccttcctgaaatcaaacgccgatctttgctacggcgccctggctgccatcccagggctccggcctgtccgccccagcggcgctatgtacctgatggtcggaattgaaatggaacacttccccgagttcgaaaacgatgtggaattcaccgagagactcgtggccgaacaaagcgtgcactgcctcccagccacctgtttcgaatacccgaatttcatccgcgtggtgattaccgtgccggaggtcatgatgttggaggcctgtagccggatccaggaattctgcgaacaacactaccattgtgccgaaggatcacaggaagagtgcgacaag

SEQ ID NO: 7490 - DNA, 1362 bp, Artificial Sequence
  derived and/or modified sequence
atggatccttacatgattcagatgagcagcaaaggtaacctgccatctatactggatgtgcacgtgaatgtaggtggtaggtcttctgtgcctggcaaaatgaaggggcgcaaggcgaggtggtcagtgcgacccagtgacatggctaaaaaaaccttcaaccccattagggcgatcgtggacaacatgaaggtgaaacctaaccctaataagaccatgatttcactgtccatcggcgatcctaccgtattcggcaatctcccaactgacccagaagtgacccaggcaatgaaagatgccttggactctggcaagtacaatgggtacgctcctagcatcggcttcctgtcctcaagggaggagattgcttcttattatcactgccctgaggccccccttgaagctaaggatgttattctcacgagtgggtgctctcaagccattgacctctgcctcgctgtgctggcgaaccccgggcagaatatcttggtgcctaggcccggtttcagtttgtacaaaacactggcagagagcatgggcatagaggttaagctgtacaatctcctgcccgagaagtcctgggaaatcgatctgaagcagctggaatacctgattgatgagaagactgcctgcctgattgtgaataatccgtccaatccctgcgggtctgtattttcaaagagacacctccaaaagatcctcgccgttgccgctcggcagtgcgttcccattcttgctgatgagatctacggggacatggtgttcagcgattgcaaatacgaaccattggctacactttccaccgatgtgccaatcctgagctgcgggggtttggctaagcgatggctggtgcctgggtggaggcttgggtggatccttattcacgatcgcagggatatctttgggaacgagatcagggatggtcttgttaagctgagccaacgcatcctgggaccatgtacaattgtgcagggtgcacttaagagcatcctgtgcagaacccccggcgagttttatcacaataccctgtcttttctcaagtccaacgcagatctgtgctatggggcccttgccgctattcccggcctccggcctgtccggccatctggcgccatgtacctcatggttggtatcgaaatggagcacttccctgaatttgaaaacgatgtggaattcaccgagagactcgtggcagagcagtccgtgcactgcctgcccgccacatgttttgaataccccaacttcatcagagttgtgataactgttccagaagtgatgatgctggaagcctgctcacggatccaagaattctgtgaacagcattatcactgtgccgagggcagccaggaagagtgcgataag

SEQ ID NO: 7491 - DNA, 1362 bp, Artificial Sequence
  derived and/or modified sequence
atggatccgtatatgatacaaatgtcatccaagggcaacctgccttctatcctggatgttcatgtcaacgtgggcggtaggagcagcgtgcctggcaaaatgaagggacgcaaggcccgctggtccgtgcgaccctcagacatggctaaaaagaccttcaatcctattcgggccatcgttgacaacatgaaggttaaaccaaaccccaataaaaccatgatttctttgtccataggcgaccccacagtgttcggtaatctgcccactgaccccgaagttacccaggccatgaaggatgccctcgactcagggaagtataacggatatgctccaagtatcggattcctgtcaagccgagaggagattgcatcttactatcattgccccgaggccccactggaagcaaaggatgttatcctcacaagtggatgttcacaggctatagatctgtgtcttgctgtcctggccaacccaggccagaatatactggtgcctagacccggcttttccctgtataaaaccctcgcagagtcaatgggtattgaggtgaagctttacaatctgctcccagagaagagctgggagatcgacttgaaacagctcgagtatcttatcgatgagaagaccgcttgccttattgtgaataatccgtcaaatccctgcggctcagttttttctaagcggcatttgcagaaaatcctggcagtcgctgccagacaatgtgtaccgatcctggcagacgaaatctacggagacatggtcttcagcgattgtaaatacgaacctctcgctacgctctccacagatgtgcctattctgagctgcggtggactggcgaagcgatggttggtcccggggtggcgcctggggtggatacttatccacgatcggagagacattttcggcaacgaaattagggacgggctggttaagctgagccagcggatcctgggaccatgcacaatcgttcagggcgcactcaaatcaatcctttgccgcacaccaggtgagttctatcataacacactctctttcctcaagtccaatgctgatctctgttacggggctctggcggctatacctggactgcgccccgtccgcccctcaggagcaatgtatctgatggtgggcattgagatggaacacttccctgagttcgaaaacgacgtggagtttaccgaacggctggtcgcagaacagagcgtacactgtctgccagccacttgcttcgagtaccctaattttattcgggtggtgattacagtgcccgaggtgatgatgctcgaggcatgcagtaggatccaggagttttgcgagcagcattatcattgtgctgagggctcccaggaggagtgtgataaa

SEQ ID NO: 7492 - DNA, 1362 bp, Artificial Sequence
  derived and/or modified sequence
atggacccttacatgatccagatgtcgtcaaaggggaacctcccctccatcctggacgtccatgtcaacgtgggcggacggtcctccgtgccaggaaagatgaaaggcaggaaggcgcggtggagcgtgcggccctcggacatggcgaagaaaaccttcaatccaatccgcgccattgtggataacatgaaggtcaaacccaacccaaataagaccatgatttccctgtcaatcggagatcccactgtctttgggaacctgccgaccgatcccgaggtgacccaggcaatgaaggatgccctggattccggcaagtacaacgggtacgcaccatccatcggattcctctcgtcgcgggaggaaattgcatcatactaccactgtccggaagcgccgctggaagccaaggatgtcatcctgacctctggctgctcgcaggccattgacctgtgtctcgcagtgttggcaaacccgggacagaacatcctcgtgccgcgcccgggattttcgctgtacaagaccctggccgagtcgatgggaattgaagtgaagttgtacaacctgttgccggaaaaatcttgggagatcgatctgaaacagctggaataccttatcgacgaaaagaccgcctgtctgattgtgaataacccttctaacccttgcggaagcgtgttttcaaagagacacctgcaaaagatcttggcggtggcggcacgccagtgtgtgccgatcctcgcggatgaaatctacggcgatatggtgtttagcgattgtaaatacgaaccactggccactctgtcaactgacgtcccaatcctgtcatgcggaggcttggctaaaaggtggctggtgccgggctggcgtctgggatggatcctcatccatgacaggcgcgacatcttcggtaacgaaatccgggacggactggtcaagctctcgcagagaatcctcggtccgtgcaccatcgtgcaaggagccctcaagtcgattctctgccggaccccgggcgaattctaccataacactctgtcattcttgaagagcaacgcagatctctgctacggggcgcttgccgctatcccaggactccgcccagtcaggccgtcaggcgctatgtacctgatggtgggcatcgagatggagcactttccggagtttgagaatgacgtcgagttcaccgagcgcctggtggcggagcagtcggtccattgcctgccggccacctgcttcgaatacccgaatttcattagggtggtgatcaccgtcccagaagtcatgatgctggaggcgtgttcgcggatccaggaattctgtgaacagcattaccactgcgctgaaggtagccaagaggaatgcgacaag

SEQ ID NO: 7493 - DNA, 1362 bp, Artificial Sequence
  derived and/or modified sequence
atggatccttacatgattcaaatgtcgtcaaagggcaacttgccatccattctcgacgtgcatgtcaatgtcggaggacggtcgtcggtgcctggcaaaatgaaaggacgcaaagccagatggagcgtgaggccatcggatatggcgaaaaagacttttaaccccatccgcgcaatcgtggataacatgaaggttaagcccaatccgaataagactatgatctccctttcaattggagatcccacggtctttggtaacctcccaaccgaccctgaggtcactcaagcaatgaaggatgccctggattcaggaaagtacaatggctacgccccctcaattggctttctgtcctcgagggaggaaatcgcatcctactaccactgtccagaagctcctctggaagccaaggatgtcattcttacttccggctgctctcaggcgattgacttgtgccttgctgtgctggcaaacccaggccagaatatactggtccctagaccaggcttttccctctacaaaactctggcagaatctatgggaattgaggtgaaactttacaacctcttgcctgaaaagtcatgggagatcgatcttaagcaacttgagtaccttatcgatgagaaaactgcatgtttgatagttaacaaccccagcaatccttgcggtagcgtgttctccaagagacatctgcaaaagattcttgccgtggccgcacggcagtgtgtgccaatcttggctgacgaaatctacggagatatggtctttagcgattgcaagtacgaaccacttgcaacgctgtcaaccgatgtgcccatcctctcctgtggtggtctggcaaagcgttggctggtgcctggatggcgacttggctggattcttatccatgacaggagggacatattcgggaacgagattagagatgggctcgttaagctctcgcaacggattctggggccctgtacgattgtgcagggggcccttaagtccattctgtgtcggacccctggagaattctaccataacacgctcagcttcctcaagtcgaatgccgatctgtgttacggtgcacttgccgcgattccaggacttcgtcccgtgcgccctagcggtgcaatgtatttgatggtgggaattgaaatggaacacttcccagaatttgaaaacgatgtggaattcacggaacgcctggtcgccgagcaatcagtgcattgtctcccggccacttgtttcgaataccccaactttatccgagtggtgattaccgtccctgaagtcatgatgctcgaggcctgttccagaatacaggaattttgcgaacaacattaccattgcgcagagggatcacaggaagaatgcgacaag

SEQ ID NO: 7494 - DNA, 1362 bp, Artificial Sequence
  derived and/or modified sequence
atggacccttatatgatacagatgtctagcaaaggaaacctaccgagtatcttagatgttcatgtcaatgtgggagggcgcagtagcgtccccggaaagatgaagggccgtaaggctaggtggagcgtgaggccctcagatatggcgaagaaaacgtttaatcccatcagggcaatcgtcgacaatatgaaagtgaagcctaaccccaacaaaaccatgatctctctctccatcggagatcctaccgtgtttggtaacctgcctacggaccctgaggtgacccaagccatgaaggacgccctggactccggcaagtataatggctatgccccctctattgggttcttgtcctcccgcgaagagatcgccagctattaccattgtcccgaggctcctctggaagccaaggacgttattctgacatcgggttgcagccaggccatcgacctgtgcttagcagtgctagccaaccccggccagaatattttggttccccgaccaggattcagcctgtataagacacttgcggagagcatgggtatagaggtgaaactgtacaacctgctgcctgagaaatcatgggagatcgacctgaagcagctggaatacctcatcgacgagaagacagcctgtcttatcgtgaacaatcccagtaacccctgtgggagcgtgttttccaagcgacacctgcaaaagatcctcgcggtggcagccaggcagtgtgtgcccatcctggctgacgaaatctacggggacatggtgttctctgactgtaagtacgagcccctcgcaacactgagcaccgatgtgcccatcctttcatgtggaggcttggctaaaaggtggctggtaccgggatggagactgggctggattctaatccatgacaggagggatatattcggaaatgagatacgcgacggcctagtcaaactgtctcagcggatactcggtccctgtactatcgttcagggggcactcaagagtatcctgtgtaggactcctggcgagttttaccacaatacactgagtttcctgaagtccaacgccgacctctgttacggtgcacttgccgccatccccggcctgaggccagtgaggccaagcggtgcaatgtacttgatggtggggattgaaatggaacattttcccgagtttgaaaatgacgttgagttcactgagcggttggtggcggagcaatcagtgcactgcttgccggccacatgttttgaatacccgaattttatccgcgtcgttatcacagtccccgaagtaatgatgctcgaggcctgttctcggattcaggagttctgcgagcagcactatcactgtgccgaaggaagccaggaagaatgtgataaa

SEQ ID NO: 7495 - DNA, 1362 bp, Artificial Sequence
  derived and/or modified sequence
atggacccttacatgatccaaatgtctagcaagggcaatctcccctctatcttggacgtccatgttaacgtgggcggcaggagttccgtgccaggtaagatgaaggggcgcaaggcccggtggtccgttcgaccaagtgacatggccaagaagacctttaatcccataagggcaattgtggataacatgaaggtgaaacccaatcccaacaaaactatgatcagtctgtccatcggagatcctactgtgttcggtaatcttccaaccgacccggaggtgactcaggccatgaaagacgcgttggactccgggaagtacaacggctatgcaccatcaatcggcttcctgagctctagagaagagattgcatcatattatcactgcccagaggccccattggaggccaaggacgtaatcctgaccagcggctgctcccaggcaattgacctctgtctggcagtcctggcgaaccccggtcagaatatcctagtgccccgtcctgggttttctctgtataagacattggccgagagtatgggtatcgaggttaagctgtacaaccttctgcccgagaagtcttgggaaatcgatcttaagcagctggagtacctgattgacgaaaaaactgcttgtctgattgtcaataatcccagtaacccatgcggtagtgtcttcagtaagcgccacctgcagaaaatcctcgcagttgccgcccggcagtgcgtgccgattctggcggatgagatatacggcgacatggtgttttctgattgtaaatacgagccgctggcgacgctgtcaaccgacgttcctatcctgtcctgtggcggccttgccaagcgttggttggtcccaggatggagactcggatggatactcatacacgaccgccgtgatattttcggaaacgaaatccgggatggcctcgtgaaactgagccagaggatcttagggccctgtaccatcgtacaaggcgccctgaagtctattctctgccgcactcccggagagttttatcacaatactctctctttcctcaaaagtaacgccgatctgtgctatggagcgttggctgctattcccgggcttaggcccgtgcggccatcaggcgcgatgtacttgatggtcggcattgagatggagcattttcctgaattcgaaaatgacgttgagttcaccgaaagactcgtggccgagcagtccgtacactgtctcccagccacctgtttcgagtatcccaacttcatccgtgtggtgataacagtccctgaggtgatgatgctggaggcttgctctcgcatccaagagttttgtgaacagcactaccactgcgcagagggttcacaggaggagtgcgataaa

SEQ ID NO: 7496 - DNA, 1362 bp, Artificial Sequence
  derived and/or modified sequence
atggatccatatatgatccagatgtcttccaaggggaatctgccttccatactggacgtgcatgttaatgtgggtggtagaagttctgtccccggtaagatgaaaggcaggaaggccagatggtctgtaaggccgtctgacatggccaagaagactttcaacccgatacgcgccatagtggataacatgaaagtgaagccaaaccccaataagacaatgatttctttgtcaataggcgacccaacagtgttcggcaatctccctacagatcctgaggtcacgcaggctatgaaggatgccctcgattcaggcaaatataacggatacgctccgagcatcggatttctgagcagccgagaggagattgcttcctactaccactgccccgaggcacccctggaagcaaaagacgtaatcctcacctctgggtgcagccaagccatcgacctttgtctggccgtactggccaatccaggacagaacatcctggtgccccgcccaggattttctctctataagactctggcagaaagcatgggcatagaggtgaaattgtacaacctgttgcccgaaaaatcatgggaaatcgacctgaagcagctggagtacctgattgacgagaaaaccgcgtgcctcattgtgaataatcctagcaacccctgcggctcagtgttcagcaagcgccacttgcaaaagatacttgccgtggccgcccgccagtgtgtcccaattctggcggatgagatctatggagacatggtgttctcagactgcaaatacgagccgctggcaactctgtccactgacgtgcccatactgagctgcggcgggctcgccaagcgatggctcgtccccggttggagactgggctggattctcattcacgatcggagggatatcttcggaaacgagatccgggatggtctggttaagctttcacaaaggattctggggccctgcaccatcgtgcagggcgctctcaaatcaatcctgtgtcgcaccccgggagaattctaccacaacacactgtcatttcttaaaagcaatgctgatctgtgctacggagcgctggctgcaatccctggattgcggcccgtcagaccctcaggagccatgtatcttatggtcggcatcgagatggaacacttcccggagttcgaaaacgacgttgagtttactgagcgactcgttgccgagcaatctgtccactgcctccccgcgacatgcttcgaatacccaaatttcatccgagttgtgatcaccgtgcctgaggtgatgatgctcgaggcgtgcagcaggatacaggagttttgcgaacagcactaccactgtgcagagggcagtcaggaggagtgtgacaag

SEQ ID NO: 7497 - DNA, 1362 bp, Artificial Sequence
  derived and/or modified sequence
atggacccatacatgattcaaatgtcctccaagggcaacctacctagcatacttgacgtacacgttaatgtaggaggtagatctagcgtccccggcaaaatgaaggggcgtaaagcgcgctggtctgtgaggccttctgatatggccaagaagacatttaacccgatccgagctattgtagataacatgaaagtgaagccgaatcctaacaaaactatgatcagtttaagcataggagatcctaccgttttcgggaacctgccgaccgaccctgaagtaacacaagccatgaaagatgccctcgatagcgggaagtacaatggttatgcccccagtatcgggtttctgtcatctagagaagagatcgcctcgtattaccactgtccagaggctcctctcgaagccaaggacgtgatcttgactagcggctgttctcaggcaatcgacctgtgcctggccgtgctggcgaatccgggccagaacattttagttcctcgtcccggcttctcgctgtacaaaaccctggcagaatctatgggcattgaggttaagctatacaatttactgccggaaaagtcatgggaaatcgacctgaagcaacttgagtaccttatcgacgaaaagactgcatgcctgatcgtgaacaaccccagtaatccctgcggctctgtgttctctaaaagacatttacaaaaaatcttggccgttgccgctcgtcaatgtgtgccaattctggctgacgaaatctacggtgatatggtgttctccgattgcaagtacgagccactggccaccttgtccactgacgttcctatcttatcctgcggcgggctggccaagcgctggctcgtcccagggtggaggctcggatggatcctgatacacgaccggagggacatcttcggcaatgagatccgcgacggcttggtaaaactgtctcagaggatcctcggcccctgtaccatcgtccaaggtgctctgaagtcaattctgtgtcgaacccctggggagttctatcacaatactcttagctttctaaagtccaatgcagacctgtgttacggagctctggccgccatcccagggctacgacccgtgaggccttctggcgcaatgtatttgatggtcggtatagaaatggagcacttccctgagttcgagaacgatgtggagtttacagagcgcctagtagctgagcagtcagtgcactgcttacctgctacctgcttcgaatacccgaattttatccgggtggtcatcacagttccagaagttatgatgctcgaggcctgtagccgcattcaggagttttgtgagcagcattatcattgtgccgaagggagccaggaggagtgtgataaa

SEQ ID NO: 7498 - DNA, 1362 bp, Artificial Sequence
  derived and/or modified sequence
atggatccctacatgattcagatgtcctccaaaggaaatttaccctccatactcgacgtccacgtgaatgtggggggtcggagctccgtgccagggaaaatgaaggggaggaaagcccgttggagcgtgaggccatctgacatggcgaagaagacttttaatcctattcgagcaatcgtggataacatgaaggtgaaaccaaaccctaataagacgatgatttctctttctatcggggacccgaccgtctttgggaacctgcctaccgatcccgaggttactcaggctatgaaggacgctttagactctggcaaatacaatggctacgcaccaagtatagggtttctctcctctagagaggagatcgccagctattatcattgtccagaagcacccctggaggcaaaggacgtaattctgacatcaggctgtagtcaggcaatagatctatgtctggcagtgcttgccaacccaggccagaatatcctggtgcctaggcctgggtttagcctctacaagaccctggccgagtccatgggaatagaagttaagctgtacaatctgctccctgagaaatcctgggagattgatttgaagcagctcgaatacttgatcgatgaaaagaccgcgtgcctcattgtgaacaacccatcaaacccttgcgggagtgtcttttctaagagacacttacaaaagatactggcggtggcggcacgacaatgtgttcccatcctggcagatgagatctacggcgatatggtcttttcagactgcaagtatgaacctctggctactctgtcaaccgacgttccaattctctcttgcgggggcctcgcaaaaagatggctggtgccaggttggagactcggctggattttgattcacgacagaagagacatcttcggaaatgaaataagggacggactcgtaaaattgtcccagcgtattctgggtccctgtacaatagtgcagggcgctttgaagtccatcctgtgtagaaccccaggggagttctaccataataccctgtccttcctgaaatcaaacgctgacctatgttacggggcactggcggcaatcccaggtctgcgccccgtccgacctagtggggcgatgtatctgatggtgggaattgaaatggagcacttcccggaattcgaaaacgatgtggaatttaccgagaggctggtcgccgagcagagcgttcattgtttacctgcaacttgtttcgagtatccgaactttattcgagtggtcatcaccgtacccgaggtcatgatgttggaagcttgctccaggattcaggagttttgcgaacagcactatcattgcgccgaagggtctcaggaagaatgtgataag

SEQ ID NO: 7499 - DNA, 1362 bp, Artificial Sequence
  derived and/or modified sequence
atggatccttacatgatccagatgtcctccaagggtaatttgccgtcaatactcgacgtgcatgtgaatgtggggggtcggagttctgtgccaggaaagatgaagggaagaaaagctcgatggtcggtcagacctagcgatatggccaaaaagactttcaacccgatccgcgcgatcgtcgataacatgaaggtgaagcccaatccaaacaaaaccatgatttccctctcgatcggggaccccaccgtgttcggtaaccttccgactgatcctgaggtcactcaggcgatgaaggacgccctcgactcagggaagtacaacgggtacgccccgtcgatcggcttcttgagctcacgggaagaaattgcgtcctactatcactgcccagaggctccgctcgaagcgaaggatgtcatcctgacctccgggtgctctcaggctatcgatctgtgcctcgccgttctggccaatccaggacagaacatcctggtgccacggccgggattctctctgtacaaaactcttgcggaatcaatgggaatcgaggtcaagctctacaacctgctcccggaaaaaagctgggaaattgatctgaagcaactggaatacttgatcgatgagaaaaccgcctgcttgatcgtcaacaatccgtcgaatccgtgcggaagcgttttctcgaagcgccacctccagaagatcctcgctgtggctgcccgccaatgcgtgcctatcctggcggacgagatctacggagatatggtgttttccgactgcaagtatgagccactggccactctttccactgacgtgcccattctttcgtgcgggggtttggcaaagcggtggttggtgcccggatggcgccttggttggatcctgattcacgatcgccgggacatttttggtaacgaaatcagagatggactggtgaaactctcgcagcgcatcctcggaccatgtaccatcgtccaaggcgcgctcaaatctatcctctgtcggactcctggagagttctaccataataccctgtccttcctgaagtcgaacgccgacctgtgctacggcgccctcgccgcgatcccgggtttgcgcccagtgcgcccgagcggcgccatgtacctcatggttgggatcgagatggaacacttcccggagttcgagaacgacgtcgagtttactgagcggctcgtggccgagcaatccgtccactgcctgccggcaacttgtttcgagtaccctaactttatccgcgtggtcatcacggtgcccgaggttatgatgctcgaggcgtgctcgcggatccaggaattctgcgaacagcactaccattgtgctgagggatcccaggaagagtgcgacaag

SEQ ID NO: 7500 - DNA, 1362 bp, Artificial Sequence
  derived and/or modified sequence
atggatccatacatgatccagatgagcagtaaaggcaacctcccctcgattctggacgtgcacgtgaacgtgggcggacgcagttccgtcccaggtaaaatgaaggggcggaaggctaggtggagtgttcgcccatccgacatggcgaaaaaaacgtttaatcctatccgggccatcgtggataatatgaaagtcaagcccaacccaaacaagaccatgattagccttagcattggtgacccaacggttttcggcaatcttcccacagatccagaagtgactcaggccatgaaagatgctctggacagcggcaagtataatggatatgcaccctccattggattcctatcatcgcgcgaggagattgcttcatactatcattgccccgaggctccactggaggctaaagatgtcatcctgacatcaggatgttcccaggccatcgatctgtgtctagccgtcttagcaaaccccggtcaaaacatccttgttccccgacccgggttttctctgtataaaacacttgccgagtcaatgggcatcgaagtcaagctctacaatttactacctgagaagtcctgggaaattgacctgaagcagctcgagtacctgatcgatgagaagacagcctgtctgattgtgaataacccttctaatccctgcggtagcgtattcagtaaacgacatctgcagaagattttggcggtcgctgcacggcagtgcgtcccaatcctggccgacgagatttatggtgatatggtgttttctgactgtaagtacgagccactggctaccctctctacagacgttcccattttgtcctgcggaggcctcgccaagagatggcttgtacccggatggaggctcggctggatcctgatccacgacagacgagatatattcggaaatgaaattagagacggtctggtcaagctgtctcagcgaatcctagggccctgcaccatcgtgcagggggcattgaagtcaatcttatgtaggacacctggagagttctaccacaacacactttcatttctgaaatctaatgctgatttgtgctacggagcccttgcagcgattcctggactaaggccagtaagaccgagcggcgctatgtatctaatggtgggcatcgaaatggaacactttccagagttcgagaacgacgtggagttcaccgagcgtctagtggcagaacagtcggtgcactgcctgccggctacgtgcttcgagtacccaaactttataagagttgtgattacggttcccgaagtgatgatgcttgaggcctgtagccgcattcaggaattttgtgagcagcattatcactgcgccgagggctcacaagaggaatgtgataaa

SEQ ID NO: 7501 - DNA, 1362 bp, Artificial Sequence
  derived and/or modified sequence
atggatccgtacatgatacaaatgtcctcgaagggcaatttgccatcaattctggatgtccatgtcaacgtcggaggacgttcatcagtgccggggaaaatgaaaggtagaaaggccagatggagcgtgcggccttcggatatggcgaagaaaacttttaacccaatccgcgcaatagtagacaatatgaaggtcaagccaaaccccaacaaaaccatgatatccctctcaatcggtgatcctaccgtgttcggtaacctgcctaccgacccagaagtgacccaggccatgaaggatgcactggattccggtaagtacaacggttacgccccctcaatcggatttctgtcatcgagggaggaaattgcatcctactaccattgcccagaggcacctcttgaggccaaggatgtcattctcacctcagggtgttcacaagctattgacctgtgtcttgccgtcctcgcaaatcctggacagaatattcttgtgcctagacctggattttcgctctacaaaaccctcgccgagtcaatggggattgaagtgaagctgtacaatctcctgcctgaaaagagctgggaaatagatttgaagcaactggagtacctcattgacgagaaaaccgcgtgtctgattgtcaataacccatccaatccttgtgggtcggtgttttcgaagcgccatcttcaaaagattcttgccgtggcggcgaggcagtgcgtccctatcctcgcagatgagatttatggggacatggtgttcagcgattgcaagtatgagccccttgcaacgctctcaacggacgtgccaatcctctcatgcggaggacttgcaaaacgttggctggtgcccggatggcgtcttggttggatcctcatccacgacaggcgcgacattttcgggaacgaaatcagagacggacttgtcaagctcagccaacggattctcggcccatgtactatcgtgcaaggagcactgaaatccatcctctgtaggaccccaggtgaattctaccacaacactctttcgttcctcaagtcgaacgcagatctttgttacggagcactggcggccattcctggactgcgccctgtgcgcccatcgggagcaatgtaccttatggtcggcattgaaatggaacacttcccagaatttgagaatgatgtggaattcactgaacgcctcgtggcggaacaatccgtgcattgtctgccagccacctgttttgagtacccaaactttattcgggtggttattaccgtccccgaagtgatgatgcttgaagcatgttcccggatccaggagttctgtgaacaacactaccattgcgccgagggctcccaagaggaatgtgataag

SEQ ID NO: 7502 - DNA, 1362 bp, Artificial Sequence
  derived and/or modified sequence
atggatccgtacatgattcagatgagttccaagggaaatttaccctccattctcgatgttcatgttaatgtcggcggacggagctctgtccccggaaaaatgaaagggcgtaaggcgcggtggtctgttcggcctagcgatatggcgaaaaagacatttaatcctatcagagcgattgtggacaatatgaaagttaaaccgaatccaaataagactatgatatccctctcaattggcgatccaacggtatttggcaaccttccaacagatccggaagttacccaggcgatgaaagatgcactcgattctggaaaatataatggatacgcgcctagcatcggatttttgtcctcacgagaagaaatagcgtcgtactaccactgccctgaagcaccgctagaggcaaaagacgtaattttgacatcaggatgcagccaagcgattgatctttgtttggccgtgttggccaatccaggtcaaaatatccttgtgccgcggccgggtttctctctctataaaacgcttgcggagagcatgggaatcgaggttaagttatacaatttgctcccggaaaaaagctgggaaatcgacctcaaacaactcgaatatttgatagatgagaaaacggcatgtttgattgtaaataatccgagtaatccgtgcggaagtgtgttctctaaaaggcatctgcaaaaaattcttgcagtcgcagcgagacaatgcgtgccgattttagctgacgagatctatggggacatggtgttttcagattgcaaatacgaaccgttagccacactgtctacggacgtccctatattgagctgtggcggcctagcgaaacgctggttagtgccgggctggagacttggatggatactcattcatgatcgcagagatatttttggtaatgaaatacgcgatggtctggtcaagttgtcccaaagaatccttggaccgtgcactattgtccaaggagcactcaaatctattttatgccgcactcctggcgaattttaccataatacattgtcttttctaaagtctaatgctgatctgtgctacggcgcgcttgcagccatcccggggctgagaccggtccgcccttctggcgcaatgtatctgatggtagggattgaaatggaacactttccagagttcgaaaatgacgtggaatttaccgagcggttagtagcagagcagtcggtgcattgtcttcctgcaacctgtttcgagtaccccaattttattagggtcgttattacagtaccggaggtcatgatgttggaagcttgctcccgcattcaagaattttgcgaacagcactatcattgtgcggaagggagtcaagaagaatgtgataaa

SEQ ID NO: 7503 - DNA, 1362 bp, Artificial Sequence
  derived and/or modified sequence
atggatccctacatgattcagatgagtagcaagggcaatttaccttcaatcctagatgtccacgttaatgtgggaggtagatcatccgtgccaggaaagatgaaaggccgcaaggcccgctggtctgtgcgcccgtccgatatggccaagaagacctttaacccaatccgcgccatcgtggacaatatgaaggttaagccaaacccaaataaaacaatgatttcgctatctattggcgatcctacagtgttcggaaacctgccaaccgatcctgaggtgacccaggccatgaaagatgcgctcgactctggaaaatacaacggatacgctccctccatcggcttcctgtccagccgggaggaaatcgcctcttattatcactgcccagaggccccgcttgaagctaaagatgtcatactaacttcaggctgttcacaggccatcgacttgtgtctggctgttctggcaaacccagggcagaatattctcgttcccaggcccggattttctttatataagacccttgccgagtccatgggtattgaggtgaaactttacaatttgctgcctgagaaatcgtgggagattgatctgaaacagctggagtatttaatagacgaaaagactgcctgtctgatagtcaataatccctctaacccctgtggctccgttttcagcaaacgacatctgcagaaaattctggcggttgcagcgcgacaatgtgtgcccattctcgccgacgaaatatacggtgacatggtcttttcggactgcaagtacgaacccctggctactctctccaccgatgtccccattcttagttgtgggggtctggccaaacggtggctggtgcccggctggcggttgggatggatattgattcacgatcgaagggacatctttgggaacgagatacgggacggactcgtgaaactgagtcaacggatactgggaccctgcacgatcgtgcaaggcgcccttaagtcaatactttgtaggacccctggagagttctaccacaacacattgtccttcctcaagtcaaacgcggacctatgttatggcgcccttgccgcaattcccggcctgcggcctgtgcggccctccggggctatgtatctaatggtgggcattgagatggagcatttcccggagttcgagaacgacgtggagttcaccgaacgtttagtggctgagcaatccgttcattgtcttcctgctacctgtttcgagtatcctaactttattcgggttgtgattacagtgcccgaggtcatgatgctcgaggcttgttcacgtatacaggagttttgcgagcagcattatcattgcgcagaggggtctcaggaggagtgtgacaag

SEQ ID NO: 7504 - DNA, 1362 bp, Artificial Sequence
  derived and/or modified sequence
atggatccatacatgatccaaatgtcctcgaaaggcaacctgcctagcattctggatgtccacgtgaatgtgggtggtcggtcatccgtccctggaaagatgaagggacgcaaggcacggtggtccgtgaggccgtccgatatggcaaagaaaacgttcaacccgatccgcgctatcgtggacaacatgaaggtcaaaccgaaccccaataagaccatgatatctctcagcatcggcgaccctacggtatttggaaacctgccaactgaccccgaagtgacccaggcgatgaaggatgctctggattcaggaaagtacaacgggtacgcgccgagcatcggctttttgagctcgcgcgaggagatcgcctcctactaccattgcccggaagcacccctcgaagcgaaagacgtgatcctgacttcgggatgttcccaagccatcgacctttgtttggccgtgctcgcgaatcctggacagaatatcctggtgccaaggccagggttttcgttgtacaagacccttgcagagtcaatgggaatcgaggtcaagctctacaacctcctgccggagaaatcgtgggaaatcgatctgaagcagctggagtacctgatcgacgaaaagaccgcctgccttatagtgaacaatccgtcgaatccgtgcgggtccgttttctcaaaacggcacctgcaaaagatccttgccgtcgctgcacgccagtgcgttcctatcctggcggatgagatctacggggacatggtgttcagcgactgcaagtatgagccactggctactctgtcaacggacgtcccgatcttgtcctgcggtggcctggctaagagatggctggtgcctggatggcggctgggatggatcctgatccacgaccgccgggacatatttggtaacgaaatccgggacggactcgtgaagctcagccaaaggattctcgggccctgtaccatcgtgcagggggccctgaagtcgattctctgccgcaccccgggcgagttttaccacaacaccctttcattccttaaatccaatgccgatctgtgctacggtgcgctcgcggccattcccggcctgaggccggtccgaccatcaggagccatgtaccttatggtcggtattgaaatggagcatttcccggaattcgaaaacgacgtggaattcactgagaggcttgtggctgagcaaagcgtgcattgcctgccggcgacttgcttcgagtaccctaacttcattcgcgtggtgatcactgtcccggaagtgatgatgcttgaagcctgttcgcgcatacaggaattttgcgagcagcactatcattgcgcggaaggatcgcaggaggaatgtgataaa

SEQ ID NO: 7505 - DNA, 1362 bp, Artificial Sequence
  derived and/or modified sequence
atggacccgtacatgatccaaatgtcgtcgaaaggaaatctcccatccatcttggacgtacatgtgaacgtcggcggtcggtcctccgtcccgggaaagatgaaaggacggaaggctcgttggtcggtccgcccgtcggatatggcgaaaaagactttcaatccaattcgggccatagtggataacatgaaagtgaaaccgaacccgaacaagaccatgatctccctctcgatcggggatcccaccgtctttggcaacttgccgaccgatcccgaggtcactcaggcgatgaaagacgcgctggattcgggtaagtataacggctacgccccttctatcggttttctgtcgtcccgggaggaaatcgcatcgtactaccattgcccggaggcaccactggaagcgaaggacgtcatactcacttctgggtgctcacaagccatcgatctgtgcttggccgtcctggctaatcctggacagaatatcctggtgcctagaccgggtttctcgctgtacaagactctggccgaatcaatggggatcgaagtcaagctgtacaacctgctcccggagaagtcgtgggagattgacctgaaacagctcgagtatctgatcgatgaaaaaactgcatgtctgatcgtgaacaacccgtccaacccatgtggctcggtgttcagcaagaggcacctccagaagatcctggctgtggcggcgaggcagtgcgtgcctatcctggccgacgaaatctacggtgacatggtgttctcggactgcaaatacgaaccgctggcgacgctgtccaccgatgtcccgatcctgagctgcggaggacttgccaagaggtggctcgtcccaggctggcggctggggtggatcctcatccacgaccgccgggacatctttggaaatgagatccgggatggcctggtgaagctgtcacagcgcattctgggaccatgcaccatcgtgcagggagccctgaagtcaatcctgtgtcggactccaggagagttctaccataatactctgtcatttttgaagtccaacgcggacctctgttacggagccctggctgctatccctgggcttcgcccggtccgcccctccggagccatgtacctgatggtgggaattgaaatggaacacttcccggaattcgaaaacgacgtcgaattcactgaacggctggtggccgagcagagtgtccattgcctccctgcaacttgtttcgagtacccgaatttcatcagggtggtgattactgtgcccgaggtgatgatgctggaagcatgctcccgtatccaggaattctgcgaacagcactaccactgcgcggagggcagccaagaggagtgcgataag

SEQ ID NO: 7506 - DNA, 1362 bp, Artificial Sequence
  derived and/or modified sequence
atggacccatatatgatccaaatgagctcgaaagggaatctgccctcaattctggatgttcacgtgaatgtgggcggaaggagctcagtccctggcaagatgaaaggtcggaaggcacgctggtcagttagacctagcgatatggccaagaaaacctttaatcctatcagagcgatcgtggataacatgaaggtgaaaccgaacccaaataagactatgatctccctttcgattggtgatcctactgtctttggaaacctgccaaccgatccagaggtgactcaagcaatgaaggacgcacttgactccgggaaatacaacggctacgcccctagcataggatttcttagcagcagagaagagatcgcatcctactaccattgtcctgaggcaccactcgaagcgaaggatgtcattctcacgtctggatgctcccaggccatcgacctttgtctcgcagtcctcgcaaatccgggacaaaacattctcgtgccgcggcccggatttagcctctacaagactctcgcagagtccatgggaattgaagtgaaactgtacaaccttctgccagaaaagagctgggaaattgatttgaagcaattggaatacctgattgatgaaaagaccgcatgcctcattgtgaacaacccttcaaacccatgcggctcagtgttttcgaaacgccatcttcagaaaatactcgcagttgccgctcgacaatgcgtgcctatcctggcagatgagatttacggcgatatggttttctcggactgcaagtacgaacctcttgccaccctttcgactgatgtgccaattctgagctgcgggggccttgcgaagcgctggctggtgccaggatggcgactcggttggatcctgattcatgaccgtcgcgacatttttggtaatgaaatcagagatggcctggtgaagctgtcacaacggattctcggcccctgcacgattgtgcagggagctctgaagtcaattctgtgtagaactcccggagaattctaccataacactctgtcgtttctgaaatccaacgcagacctgtgctacggagcgcttgccgcaataccagggctgcgcccggtccgcccttcgggcgccatgtacctcatggtgggcattgagatggagcacttcccggaattcgaaaatgacgtggagtttactgagagacttgtggccgaacaaagcgtgcactgcctccccgcaacctgtttcgagtacccaaactttatccgcgtagtgattactgtgccagaagtcatgatgcttgaagcatgtagccgaattcaagagttttgtgaacagcattaccattgtgccgaaggatcccaggaagagtgcgataaa

SEQ ID NO: 7507 - DNA, 1362 bp, Artificial Sequence
  derived and/or modified sequence
atggacccctatatgatccaaatgtcatctaagggaaatcttccttcaatcctcgatgtgcatgtgaatgtcggagggcgtagctcagtgcccggtaagatgaagggccggaaggcccggtggtcggtaagaccgagcgatatggcaaagaaaactttcaacccaattcgcgccattgtggacaacatgaaagtgaaacctaatccaaacaagactatgattagcctgtcgatcggggatcccaccgtgtttggaaatcttcccactgacccagaagtgacgcaggcaatgaaggacgcactggactcgggaaagtataacggctacgcacccagcatcggtttcctttcgtcgcgcgaggagattgcaagttactaccattgtccagaagcgcctctggaagccaaggatgtcattctcacctccggatgttcgcaagcaatagatctgtgtttggccgtgctggctaaccccggccagaatatacttgtccctaggcctgggtttagcctgtacaaaaccctggccgagtccatgggaattgaagtgaaactttacaatcttctcccagagaaaagctgggagatcgacctcaagcagctggaataccttattgacgaaaaaacggcgtgcttgatagtcaataacccatccaatccttgtggaagcgtgttttcgaagcgccaccttcaaaagattctggcagttgcagctaggcaatgcgtgcccattctggcagatgaaatctacggggatatggtcttttcagactgtaaatacgaaccactggcaaccctttcgaccgatgtgccaattcttagctgtggtggactcgcaaagagatggttggtgcctggatggagactggggtggatccttattcatgatcggagagacattttcggaaacgaaattcgggatggtctggtaaaacttagccaacggatcctgggaccatgtaccatcgtgcaaggtgccctgaagtccatactgtgccgcactccgggggagttttaccataacactctctcatttctgaagtcgaatgcagacctttgctacggggctttggctgcaatccccggactgaggccggttagaccctcgggtgctatgtacctcatggtcgggattgagatggaacactttccagaattcgagaatgatgtggagtttaccgaacgactggtcgcagagcagtcagtgcattgtctgccagccacttgcttcgagtaccctaacttcattagggtggtgatcacggtgccagaggtgatgatgcttgaagcatgctcaagaatacaagaattttgtgaacagcactaccactgcgcggagggcagtcaggaagaatgtgataag

SEQ ID NO: 7508 - DNA, 1362 bp, Artificial Sequence
  derived and/or modified sequence
atggacccttacatgatccagatgtcctccaagggaaatttgccctccattctggacgtgcatgtgaacgtcggaggccgaagtagtgtcccgggtaagatgaaaggtcgcaaagcgcgttggtctgtgcggccttccgatatggcgaagaaaacattcaatcccattcgcgccattgtagacaatatgaaggtaaagccaaaccccaacaagactatgatcagtttgtcaattggcgaccccaccgtgtttgggaatctgcctaccgatcccgaggtaacacaagccatgaaggacgctctggactcaggaaaatacaacggctacgccccatccattggatttctatcatcgcgagaagagatagcatcttattatcactgtcccgaggcccccctcgaggccaaagacgttatcctgaccagtggatgttctcaggccattgacctgtgtttggctgttttagccaatcccgggcagaacattctcgttccgaggcccggattcagcctgtataagacccttgccgagagcatggggattgaagttaaactctataacctcttgccggagaagtcttgggagattgatctgaagcagctggaatacctgatcgatgagaagaccgcctgcctcattgtgaacaatccaagtaatccttgtggaagcgtgttcagtaaacggcacttacagaaaatcttggcagtggcggctcgacaatgtgtgcccatccttgcagatgagatctacggggatatggtgtttagtgactgcaagtatgagccccttgccaccctatctacagatgttccgattttgtcatgtggagggctggctaagaggtggcttgttcccggttggaggctaggctggatcctaattcatgacagacgggatatctttgggaatgaaattcgagacgggcttgtcaaattatcacagcgtattctgggaccctgcaccattgtccagggggcactgaaaagcatactttgccggacccccggtgagttttaccacaatacgctctccttcctgaagtctaacgcagacctctgctacggcgccctggcggccatccccggcctgcggccagtgaggccatcgggcgctatgtacctcatggtggggatagaaatggagcattttcccgagtttgagaatgatgtggagtttaccgaacgcctggtggcagagcagagtgtgcactgtctgcctgccacctgctttgagtatcccaatttcatccgagtcgtcattaccgtcccagaggtgatgatgctggaggcatgctccaggattcaggagttttgtgagcagcactatcactgcgctgagggcagccaggaggagtgtgataag

SEQ ID NO: 7509 - DNA, 1362 bp, Artificial Sequence
  derived and/or modified sequence
atggatccatacatgatacagatgtcttcaaagggaaatctgccctccatcctcgatgtccatgtcaacgtgggaggtaggagtagcgtcccaggtaagatgaagggcaggaaggcccgctggagtgtccgtcccagtgacatggccaagaaaacttttaatcctattagagccattgtagacaacatgaaagtgaagcctaacccaaataagaccatgatcagcctgtctatcggcgatccaacagtgtttggaaatttgcccacagatcctgaggttacacaggccatgaaagatgctcttgactcaggtaagtataatggatacgcccctagcattggatttctctcctctcgtgaagaaattgcatcctattatcattgtcccgaggctcccctggaggccaaagacgtcatcttgacttctggttgcagccaagcaatcgatctttgcctcgctgtcttggctaatcctggccaaaacatcctggtgcccaggcctggcttcagcctctacaagactctcgccgagtctatgggaatcgaggtaaaattgtacaatctgctgcctgagaagagttgggagatcgacctgaaacagctggaatacctgatcgatgagaaaaccgcatgcctgattgtgaacaatcccagtaatccatgtggctctgtattctcaaaacgccacctgcagaagattctggcagtcgctgcccgtcagtgtgtcccaatcctggccgacgagatatatggagatatggtgttctccgattgcaaatacgaaccactggctactctgtctactgacgtgcccatcttgagttgtggaggtctggctaagaggtggctggtcccaggttggcgtctcggctggatcctgattcacgaccgccgcgacatctttggcaacgaaattcgcgacggccttgtgaagctttctcaacgtatcctcggaccctgcaccattgttcagggagccctgaaaagcattctctgcaggacacctggtgaattctatcacaatactctttctttcctgaagtcaaatgctgatctgtgctatggcgctttggctgccattcccggacttcgccctgtaagaccctctggagctatgtacctgatggtcggtatagagatggagcatttccctgagttcgagaacgatgtggagtttaccgagcgcctggttgctgaacagagcgtgcattgtctgcccgcaacatgctttgagtaccccaacttcattcgcgttgtgatcactgttcccgaagttatgatgctggaagcatgttccaggattcaggaattttgcgaacagcactaccattgcgctgagggttctcaggaggagtgcgataaa

SEQ ID NO: 7510 - DNA, 1362 bp, Artificial Sequence
  derived and/or modified sequence
atggatccgtacatgatccagatgtcatctaaggggaatttgccaagcatcctcgatgttcacgtcaacgtggggggccggtcgtcggtgcccgggaagatgaaaggccgcaaagcaagatggtcggtgcgcccttcggatatggctaagaaaactttcaatccaatcagagcgatcgtagacaacatgaaggtgaagccgaatccgaacaagacgatgattagcctctccatcggtgatcctaccgtttttggaaacctgcctaccgacccggaggtgactcaggcaatgaaggatgcactggactctggaaagtacaacggatacgccccttcgattggattcctgagctcgagagaggagatcgcttcgtactatcactgcccggaggctcccttggaagcaaaggacgtcattctgactagcggatgttcccaagctatcgacctctgcctggccgtgctcgcgaatcccggccaaaacatcctcgttccgcggcctggcttctcgctgtataagactctcgcggagtcaatgggaatcgaagtgaagctgtacaatctgctccctgaaaaaagctgggaaattgaccttaagcaactggagtacctgatcgatgagaaaaccgcgtgtctgatcgtgaataacccatcaaatccgtgcggatcggtgttttccaagcggcaccttcagaagatcctggcagtggccgcgcgtcagtgtgtgcccatcctggctgacgagatctacggagacatggtgttttcagactgcaagtacgaacccttggcgactctctccaccgacgtgccgatccttagctgcgggggactggctaaacgctggcttgtccctggttggagactgggatggatcctcatccacgaccgcagagacatctttggcaacgaaataagggatggcctggtgaaactgtcgcagcgcattctcggaccgtgtactattgttcagggagcgctcaaaagcattctttgccgaaccccaggagaattctaccacaacactctctccttcctgaagagcaacgcggatttgtgctacggagccctggccgctatcccggggctgaggccagtgcggccatctggcgctatgtacctgatggttggcattgaaatggaacacttcccggaattcgaaaacgatgtcgagttcacggagagactcgttgctgaacagtccgtccattgcctcccggccacctgcttcgaatacccaaacttcatccgagtcgtgatcaccgtcccggaagtgatgatgcttgaggcttgctccagaatacaggaattttgcgagcaacattaccattgtgctgagggatcccaagaagaatgcgataag

SEQ ID NO: 7511 - DNA, 1362 bp, Artificial Sequence
  derived and/or modified sequence
atggatccatatatgattcaaatgtcaagtaaaggtaacttaccaagtattttagatgttcatgttaatgtaggaggaaggtcatctgtaccaggtaaaatgaagggaagaaaggccagatggtcagttagaccatcagatatggctaaaaaaacatttaatcctattagagctattgtagataatatgaaagttaaacctaatccaaataagactatgataagtttatctattggtgatccaacagtttttgggaatcttcctactgatccagaagtaacacaggctatgaaggatgcattagatagtggtaaatataatggttatgcaccatcaataggttttctaagttctagagaagaaattgcatcatattatcattgtccagaagctccacttgaagctaaagatgtaattttaacaagtggttgttctcaagctattgatttatgtttagctgttttagctaatcctggtcaaaatatattagttccaagaccagggttcagtttatataagacattagcagaatctatgggtattgaagttaaattatataaccttcttccagaaaagagttgggaaattgacttaaagcaattggaatatcttattgatgaaaagacagcatgtttaatagttaataatccatccaatccatgtgggtcagttttttctaaaagacatcttcaaaaaatattagctgttgctgctagacaatgtgttccaattttagcagatgaaatttacggagacatggttttttcagactgtaaatatgagccattggctactttgtcaactgacgttccaattctttcttgtggaggtttagctaaaagatggcttgtaccaggatggagacttggatggatattaattcatgatagaagagatatttttggaaatgaaattagagatggattagttaaattatcacaaagaatacttggaccatgtactattgttcaaggagctttaaaatcaatattatgtcgtactccaggagaattctatcataatactttatccttcttaaaatcaaatgcagatttatgttatggtgcacttgctgctattccaggattacgaccagttagaccatcaggagctatgtatcttatggttggtatagagatggaacacttccctgaatttgaaaatgatgttgaatttacagaaagacttgttgcagaacaatcagtacattgtttaccagcaacttgtttcgaatatcctaattttattcgtgttgttattactgttcctgaagttatgatgttagaagcttgttcacgtatacaagaattttgtgaacaacattatcattgtgcagaaggatctcaagaagaatgtgacaaa

SEQ ID NO: 7512 - DNA, 1362 bp, Artificial Sequence
  derived and/or modified sequence
atggacccatacatgatccagatgtcctcaaaagggaatctgccctccatcctggatgtgcacgtgaacgtgggagggcgcagtagcgtgcccggcaagatgaagggacggaaggcccggtggagcgtaaggcccagcgacatggcaaagaagacatttaacccaatcagagccattgtggataatatgaaagtaaaaccaaaccccaacaaaactatgatttcactctctataggggaccccaccgtgtttggaaatctcccaacagatccagaagtgactcaagctatgaaggatgccttagattccggcaagtataacggttatgccccttcaattggcttcctcagcagtcgcgaagaaattgcctcatactatcactgtccagaagctccgctagaggcaaaagacgtgattctgacttcaggatgctcacaggcaatcgacctctgcctcgcggtcctcgccaatcccgggcagaatatcctagtacccagaccgggtttcagtctgtacaaaactctggcagaatccatgggaattgaagttaaactttataatctcttgcctgagaagagttgggagatagatctgaagcagctcgagtatctcattgacgagaaaaccgcatgtctgatagtcaacaatccctccaatccttgcggctcggtgttcagtaaacgccaccttcagaaaatactcgccgtcgcagcacggcagtgcgtgcctattcttgctgacgagatctatggggacatggtcttttcagattgtaagtacgaacccctggccaccctttctaccgacgtcccaatactgtcatgcggtggcctcgctaagcgctggcttgtccctggctggcgtctgggctggatactgattcacgatagacgggatatctttgggaatgagatccgggacgggctggtgaaactctcacaacgcattctgggcccttgtaccatagtgcagggcgctctcaagtctatcttgtgccgcacccctggcgagttctaccataatacactatcctttctcaagagcaacgccgatctctgctatggggcccttgcagcgattccagggctgagacctgtgcgaccgtctggcgccatgtacctcatggtgggcattgagatggagcacttcccggagttcgaaaatgatgtcgaattcacagagcgtcttgtagctgagcagtcggtccactgtctgccggcaacctgttttgagtatcccaatttcatacgcgtcgttatcactgtgccagaggtgatgatgctcgaggcatgcagtcgaattcaggaattctgcgagcagcattatcactgcgccgaaggaagtcaggaagagtgtgataaa

SEQ ID NO: 7513 - DNA, 1362 bp, Artificial Sequence
  derived and/or modified sequence
atggatccgtacatgatccaaatgtcgtccaagggtaatctgccttctatcctcgacgtccacgtgaacgtgggaggacgctcctcagtgcctggaaaaatgaagggccggaaggcacgctggagcgtgcgcccttcggatatggcgaagaaaacctttaacccgatcagagccatcgtggataatatgaaggtcaagccaaaccccaacaagactatgatctcgctctccatcggagatccgaccgtgtttggaaatctgccaactgatccagaagttacccaagcaatgaaggacgcgcttgactcgggaaaatacaacggatacgctccatctatcggtttcctgtcatcgcgggaagaaatcgctagttactaccactgccctgaagctccccttgaagcgaaggacgtgatcctcacctcgggatgcagccaggccatcgacctgtgcctggcggtgttggcaaacccgggacagaacattctggtgccgcggccaggcttcagcctgtacaaaactttggccgagagcatggggatcgaggtcaaactgtacaaccttttgccggagaaatcctgggaaattgacctcaagcaactggagtatctcattgatgaaaagacggcgtgcctgattgtgaacaatccgagcaatccctgtggcagcgtgttcagcaagcggcacctgcagaaaatcctggccgtcgcggcccgccaatgcgtgccgatccttgccgatgagatctacggagacatggtgttctccgattgcaagtacgagcctctcgccactctgtcgaccgacgttccaattctgtcatgcggcgggctggctaagagatggttggtgccggggtggcgcctcggatggatcctgatccatgatcggagggacatcttcggaaacgagatccgagacggactggtgaagctctcccagagaatcctgggtccgtgtaccatcgtccagggagcactgaaatcgatcctctgccgcactcctggcgagttttaccacaataccttgtcgtttctgaagtcaaatgctgacctctgttatggcgccctcgcggccatccctgggctgcgtccggtacgcccgtcaggggcaatgtacctcatggtcggtatcgagatggagcatttccccgaattcgaaaacgacgtcgaattcaccgagagactggtcgccgaacaatcagtgcattgcctcccagccacttgtttcgagtacccaaacttcataagggtggtcattacggtgccggaagtgatgatgctggaggcatgctcccggatccaggaattctgcgaacagcattaccactgtgccgaaggctcccaggaagagtgcgacaag

SEQ ID NO: 7514 - DNA, 1362 bp, Artificial Sequence
  derived and/or modified sequence
atggatccctacatgatccaaatgagcagcaaaggcaacctgccctcaattcttgacgtacacgtgaacgtgggcggacggtcatcagtcccagggaaaatgaagggaagaaaagctaggtggtctgtgagacctagtgacatggcaaaaaaaactttcaatcctatcagagctatagttgataatatgaaggtgaagccaaatccgaataagacaatgatcagtttgtcaataggcgaccccactgtcttcggaaatttgcccaccgaccccgaagtgacacaagccatgaaggacgcgttggacagcggtaaatacaatgggtacgcccccagcattgggtttttgtcatctagggaggaaatcgcgtcatattatcattgtccagaggctcccctggaggccaaagatgtgattctaacttcaggctgctcgcaggccatagatctgtgtctggctgtgcttgctaatcctggccagaacatcttggtgccccgacccggcttttcattgtataaaaccttagccgagtctatgggtattgaggtgaagctctacaatctactgccggagaaatcatgggaaattgatctgaagcaactggagtatctgattgacgagaagaccgcatgcctcatcgtaaataatccttccaacccgtgtggcagtgttttttctaaaagacaccttcagaaaatcctagctgtcgccgcccggcagtgtgtgccaattttggcggacgaaatctatggggatatggtgttctctgactgcaaatacgaaccgttggcaactctgtctaccgatgtgcccatattatcttgtggcggactggccaagagatggctggtcccgggctggagactaggttggattttgatccacgacaggagggacattttcggtaatgagattcgagacggactcgtaaaattatctcagagaatacttgggccatgtactattgttcagggtgccctaaaatcgattctgtgtcgtactccaggggaattttatcacaatactctgtcttttctgaagagcaacgctgatctttgctacggcgccttggccgccattcccggtctacgaccagtgcggccgtcaggtgcaatgtatctgatggtcgggatagagatggaacattttccagagttcgaaaacgacgtggagttcactgaaagactcgtagccgagcagtctgtgcattgtctccccgctacttgcttcgaataccccaattttattcgcgttgtgataacagtgcccgaggtgatgatgcttgaggcctgcagccgcatacaggagttctgcgagcagcattatcactgcgctgaggggagccaggaggaatgcgacaaa

SEQ ID NO: 7515 - DNA, 1362 bp, Artificial Sequence
  derived and/or modified sequence
atggacccttacatgatacagatgagcagcaagggaaatctgcctagcatccttgacgtgcatgtcaacgtcggaggacgttcgagcgtgccaggaaaaatgaagggtcgcaaggccaggtggtccgtcagaccttcagacatggcaaagaaaaccttcaaccctatccgcgcgatcgtggacaacatgaaggtgaagcccaatccgaataagaccatgatcagcctgtccatcggcgacccgactgtgttcggcaacctgccgaccgacccggaagtgacccaagcaatgaaggatgccctggactctggcaagtataatggatacgcgccgagcatcggcttcctttcctcacgcgaggagattgcttcgtactaccactgcccagaagccccattggaagccaaggatgtgattctcacctccgggtgctcacaggccattgacttgtgcctggcggtcctcgccaacccaggacagaacatcctggttccgcggccggggtttagtctgtacaagaccctcgcggaatcgatgggaatcgaagtcaaactgtacaacctgctgcccgagaagtcctgggaaatcgatctgaagcagctggagtacctcatcgacgagaaaactgcatgcctcattgtcaataacccgtcgaacccatgcggatccgtgttctcaaagaggcatctccagaagatcctggccgtggcggcacggcaatgtgttccaatcctggctgacgaaatctatggagacatggtgttctctgattgcaaatacgaaccgctggcgactctgtcgactgatgtgcccatcctgtcgtgtggtgggctggccaaaagatggttggtgcccggctggagacttgggtggatactgattcacgacaggcgcgacatcttcggaaacgagatccgtgatggtcttgttaaacttagccaaagaatcttggggccgtgtactattgtgcagggtgcccttaagtctatcctctgccggactccgggggaattctaccacaatacgctgagcttccttaagtcaaatgcagatctgtgctacggagccctggcagcgattccgggactccggccagtaagaccgagcggagcgatgtacttgatggtgggtatcgaaatggagcattttcctgaatttgagaacgacgtcgagtttaccgaacggcttgtggctgagcaatccgtccactgcctgcccgctacgtgcttcgagtaccccaactttatcagagtcgtgatcaccgtgccagaggtaatgatgctggaagcctgctcgcgaatccaagaattctgcgaacagcactaccattgtgccgaaggcagtcaggaggagtgtgataag

SEQ ID NO: 7516 - DNA, 1362 bp, Artificial Sequence
  derived and/or modified sequence
atggatccatacatgattcagatgtcctcaaagggaaacctgccttcaattctcgatgtccacgtgaatgtgggtggtagaagctccgtccctggaaaaatgaaaggacgcaaggctaggtggtccgttcgcccgtccgatatggcaaaaaagaccttcaaccccatcagagcgattgtggataacatgaaagtgaagcctaatcccaacaagaccatgatttccctttcaattggggatcctaccgtctttggtaacctccccactgacccagaagtcactcaggcgatgaaagacgcactggactcgggcaagtataatgggtacgcaccttcgattggatttctctcttcaagagaggagatcgcttcctactaccattgtcctgaagctcctctggaagcaaaggacgttattctcacttcaggatgttcccaagcaattgatctctgtttggccgtgctcgcaaacccaggtcaaaacattcttgtgcccagacccggcttttctctgtacaaaacgctcgcagaaagcatgggcatagaagtcaagctgtacaacctcttgccagagaaatcgtgggagatcgatctgaagcagctggaatacctgattgatgaaaagacggcatgtctgatcgtgaacaacccgtccaatccatgcggttcagtgtttagcaaaagacatctgcagaaaatccttgcggtggcggcccgtcagtgcgtccctattttggcggacgagatttacggagatatggtctttagcgattgcaaatacgagccccttgccactctgtcgactgatgtgccgattctgtcatgtggtggactggcaaagcgctggctggtgccagggtggcgccttggttggattcttattcatgaccggcgcgatatctttggaaacgaaatcagagatggtctggtgaaactttcccaacgcatcctgggaccatgtaccattgtgcaaggggcactgaagagcatcctgtgcagaactccaggcgaattctatcataacaccctgtcctttcttaagtccaatgctgacctttgttacggggcccttgcagcaatccctggcctgcgtcctgtgcggccatcaggtgcaatgtaccttatggtgggaatcgagatggaacatttccctgaattcgagaacgatgtcgaatttacggaacgtctggtggctgagcagtcggtgcactgccttcctgccacttgttttgaataccccaacttcataagggtcgtgatcactgtgcctgaggtgatgatgcttgaagcctgctcgcggatacaggaattttgtgaacaacactaccactgtgcagagggaagccaggaagagtgtgataag

SEQ ID NO: 7517 - DNA, 1362 bp, Artificial Sequence
  derived and/or modified sequence
atggatccgtatatgatccagatgagcagcaagggaaatctgcccagtatcctggacgttcatgtcaatgtaggggggcgaagtagtgtgcccgggaaaatgaagggacgaaaagctcggtggtccgtacgaccgtccgacatggccaagaagacctttaacccgatcagagccattgtggataatatgaaagtcaagcctaaccctaataagacgatgatcagccttagcattggagatcccacagtgtttggaaatctgcccaccgatccagaagtgacccaggctatgaaggatgccctggacagcggaaaatacaatgggtacgctccatcaatcggctttctctcatcccgcgaggaaatagcttcttattaccactgtccagaggcacccctagaggccaaggacgtcatattgacctcaggatgttcccaggctatcgacctttgtctggccgtgctcgccaacccggggcaaaacatcctggtaccccgaccagggtttagcctgtacaagacactggccgagagcatggggatagaagttaagctctacaatctgctgccagagaaaagctgggagatcgacctcaagcagttggagtacctgattgatgagaagactgcctgcctcattgtcaacaacccttcaaacccatgcggaagtgtgttttcgaaacggcaccttcagaaaattttggccgtggcggcgcgtcaatgcgtgccaatcctagccgatgaaatctatggagatatggtgttttctgattgtaaatacgagcccttggctactctgtctacagatgtgcccattctcagctgcggcggactggcaaaacgctggctcgtgccgggctggcggcttggttggattttgatccatgaccgccgagacatttttggaaatgaaattcgggatggtttggtgaagttgtcccagcgaatcctgggcccatgcaccatcgtgcagggcgcgttgaagtccatattgtgcaggactccgggggagttttaccataacaccctgtcctttctaaagtcaaacgcggacctgtgttacggagccttagccgccatccccgggttgcgccccgtacggcctagcggtgctatgtatctgatggtcggaattgaaatggagcacttcccggagttcgagaatgacgtggagttcacagagaggttggttgctgagcagagtgtgcactgcctgcccgctacatgcttcgagtatccgaattttatccgcgtagtcatcaccgtgccagaggtgatgatgctggaggcttgcagtcgcatccaggagttctgcgagcaacactaccattgtgccgaaggctctcaagaggagtgcgacaag

SEQ ID NO: 7518 - DNA, 1362 bp, Artificial Sequence
  derived and/or modified sequence
atggacccatatatgattcaaatgtcaagcaagggcaatctgccttccatcttggatgttcacgttaatgttgggggtcggagttccgtgcctggtaaaatgaagggaagaaaggccaggtggagcgtgagaccttcagatatggcaaaaaagaccttcaatcctattagggcaattgtggacaatatgaaggttaagccaaatcccaacaagaccatgatttccttgagcataggcgatcctactgtattcggcaacttgccaacagacccagaggttacgcaagcaatgaaggatgcactggattcaggtaagtacaacgggtacgctccatctattggatttttgtcctccagggaagaaatcgctagttactaccattgtcccgaggctcctctcgaggctaaagatgttattttgacatccgggtgttctcaggccatcgatctctgcctggctgttctggctaacccgggtcaaaacatcttggtccctagaccaggcttttcgctctataaaacgcttgcggagagtatgggaatcgaggttaagttgtacaatttattaccagagaagtcgtgggagattgatctgaaacagcttgagtacttaatcgacgaaaagactgcctgtttaatcgtgaacaacccatccaatccatgcggctcagtgttctctaagaggcacctccagaagatcctggcagtggctgcgagacagtgcgttccaatcttggccgatgagatttacggtgatatggtcttctcggactgtaaatatgaacctttggctacattatcaactgatgttcctattctttcctgcggcggacttgcgaagcgatggttggttccaggatggagactcgggtggatccttatccatgataggcgtgatatctttgggaatgaaatccgtgacgggcttgtcaagctgagccaaaggattctggggccttgcaccatagttcagggtgctcttaagagcatcttgtgcagaacccctggtgaattttaccataacacattatcttttttaaaatcaaatgcagatctttgctacggagctcttgccgccattccgggacttcgtcccgtcagaccttctggtgccatgtatcttatggtaggaattgagatggaacactttccagagttcgagaatgatgttgaatttactgaaaggttggtcgccgagcagtcagttcactgtcttcctgcaacgtgttttgagtaccctaattttattcgggtagtcattacagtccctgaggtgatgatgcttgaagcttgctcccgcattcaggaattttgcgagcagcattaccattgcgccgaggggtcgcaggaggaatgtgacaag

SEQ ID NO: 7519 - DNA, 1362 bp, Artificial Sequence
  derived and/or modified sequence
atggatccctacatgatccagatgagctccaaaggcaatctcccaagcatcctggacgtgcacgtaaatgtcgggggccgctcctctgtgcccggtaagatgaaaggaaggaaagcccgatggagtgtccggcccagcgacatggcgaagaaaactttcaatccaattcgggctatcgtcgataacatgaaagttaaacctaatcctaataaaaccatgatcagccttagtattggcgatcccaccgtgtttgggaacctgcctaccgatcccgaagtcacccaggcgatgaaagacgcactggattctgggaagtataatggctacgcgcctagcattggttttctgtcatcccgcgaagagattgcaagttattatcactgccccgaagctcctctcgaagcgaaagacgtcatattgacttcaggctgttcacaagccatcgatttgtgtttagccgtgctggccaatcctgggcagaacattctagtgccccggcctggcttctccttgtacaagacccttgccgaatctatgggaattgaggtgaagctgtacaacctccttcccgagaaaagctgggagattgatctgaagcagctggaatacttgatcgacgaaaagactgcctgtcttatagtcaacaacccctcaaacccatgcggtagcgtcttctctaagcgtcacctacaaaagatcctggcagtggcagcccgtcagtgtgttccgatcctggcagacgaaatatacggtgatatggtctttagtgactgcaagtacgagccacttgccacgctgagcacagacgtgcccattctgtcctgcggaggactggcaaagagatggttggtgcccggctggaggctgggctggattctcatccacgatcgacgcgacatttttggcaacgaaattagggacggccttgtgaaactgtctcaaaggattctcggcccctgtacgattgtgcaaggtgccttaaagagcattctctgtcggacacctggagagttttaccacaacactctttcctttctgaagtccaatgcagatctctgctacggagcccttgcagccatacccggattgaggccggtgcgaccaagtggcgctatgtatttaatggtgggaatagagatggaacatttcccggaatttgagaacgacgtggagtttaccgaacgacttgtagcagaacagagtgtacactgtcttccagccacctgtttcgagtatcctaatttcatccgggtggtaatcacagtacctgaggtgatgatgttggaagcctgcagccgcatccaggagttctgtgagcaacactatcactgcgcggaaggcagtcaggaagagtgcgataag

SEQ ID NO: 7520 - DNA, 1362 bp, Artificial Sequence
  derived and/or modified sequence
atggatccctacatgattcagatgtcctcgaagggaaatcttccttccatactggatgtccatgtcaacgtgggaggcagaagctcggtgcctgggaagatgaagggcagaaaggcgcgctggtcggtgcgcccatcggatatggcaaaaaagactttcaatccgatacgcgcaattgtggacaatatgaaggtgaagccaaatccgaacaaaacgatgatttcgctgtcgatcggagatccaacggtgtttggaaacctccccacggaccccgaggtcactcaagcaatgaaggacgcgctggatagtggtaagtacaacggttacgcgcccagcatcggatttctctcctcgcgtgaggaaatcgcttcctactaccattgcccagaagcacctctggaagccaaagacgtgattctcacctccgggtgttcgcaggcgatcgacctgtgccttgctgtgcttgctaatccaggccaaaacatacttgtcccacgtcctggattctccctttacaagactctggcagaatccatgggtatagaagtcaagttgtacaaccttctcccagaaaagtcatgggagatcgaccttaaacagctcgaataccttatcgatgaaaagaccgcctgtcttattgtgaacaatccctccaatccttgtggttcagtgttctcgaagcgccaccttcagaaaatactggccgtcgccgcccggcaatgtgtccctattctcgcagacgagatttacggagatatggtcttttcggattgtaagtacgagccccttgcaaccctgtccacggatgtccctattttgtcatgcggtggcctcgcaaaacgttggcttgtgcctggttggagactcggttggattctgatccacgatagacgagacatatttgggaatgagattagagatggattggtgaagttgtcacaacggattctcggcccctgtacgattgtccagggggcactgaagagcatcctctgtcgaactcctggcgaattctaccacaacactctttcatttctcaagtcgaatgcagatctctgttacggggcactggcagccatccctggtcttaggccagtgcgaccttctggggcaatgtacctgatggtgggcatcgaaatggagcactttccagagtttgagaacgacgttgaatttaccgaacgccttgtcgcagagcaaagcgtccactgcctcccagcaacctgttttgagtacccaaactttatccgagtcgtcataaccgtgcccgaagtgatgatgctggaagcctgttcaagaatccaggaattttgcgaacagcattaccactgcgccgaaggctcgcaggaagagtgcgataaa

SEQ ID NO: 7521 - DNA, 1362 bp, Artificial Sequence
  derived and/or modified sequence
atggatccgtatatgattcaaatgtcttcgaagggcaatctgccaagcattctcgacgtgcacgtcaatgtgggtggccgctcaagcgtgcctggtaaaatgaaggggcgtaaggcacggtggagcgtgagaccatccgatatggcaaaaaaaacttttaatcctatacgcgctattgttgataacatgaaggtcaaacctaatcctaataaaactatgatatctctctccatcggtgacccgacggtgtttgggaatctacctaccgatccagaggtcacccaggcaatgaaggacgcgttggatagcggtaagtacaatggttacgcgcctagcattggttttctgtccagccgagaggagatcgcgagctattatcattgccctgaggctcctctggaggcaaaggatgtaattttgactagtggttgtagccaagcgatcgatctgtgcctggcagtgctggcgaacccaggccagaatattctggtgccccgcccagggttttcattatacaagaccttggcggagtcgatgggaatcgaggttaagctatacaatctgctgccggagaaatcctgggagatcgacctgaaacagctggagtaccttatcgatgaaaagaccgcctgcctgattgtcaataacccatccaatccatgcggtagcgtgttttccaaacgccacctccaaaaaatcctggctgttgcagcgcgccaatgcgtaccaatcctagcagacgaaatttacggtgatatggtctttagcgattgcaagtatgaacctctcgctaccctgtcgactgacgtgccgattctgtcctgtgggggcctggcaaaacggtggctggtaccgggttggcgtcttggctggatcctgatccatgacaggcgggacatatttggaaatgagatccgcgacggtttggtgaagctgtcccaacgcattttggggccatgcaccatcgtgcagggcgcgctgaagagcatcctttgtcgcaccccaggtgagttttaccacaatactctgagcttcttgaagtcaaatgcagacctgtgctatggcgctctggccgcgattcctggtttgcgcccagttcgaccaagcggcgcgatgtatctgatggttggtattgagatggaacactttccagagtttgagaatgacgtcgaatttaccgagcgcttggtggctgaacagagcgtccactgtttgccagctacttgcttcgagtatccaaacttcatccgcgtggtcattacggtgccagaggttatgatgctggaggcatgtagtcgaatccaagaattttgcgagcagcactatcactgcgcggagggaagccaggaagaatgtgacaag

SEQ ID NO: 7522 - DNA, 1362 bp, Artificial Sequence
  derived and/or modified sequence
atggacccatatatgatccagatgagttctaaagggaaccttccttctatccttgatgtgcacgttaacgtaggagggcggagtagtgtgcccgggaaaatgaaagggaggaaagctcgatggtccgttaggccctccgatatggcaaagaaaacttttaatccaatcagagctatcgtagataacatgaaagtgaaacccaatcccaataaaactatgatatcactttccatcggagatcctacagtgttcgggaatctccctacagatcctgaagtcactcaggcaatgaaagatgctctcgattcagggaaatacaacgggtatgcaccctccataggattcctatcatcacgggaagagatcgccagttattaccattgcccggaagctcccctagaagccaaagatgtgatcttaacttctggatgctctcaggccattgatctgtgtttagctgtgcttgccaaccccggacagaacattcttgtgccccggcctgggttttctctttataagacacttgctgagtcgatgggaatcgaagttaaactctataacttgctacccgaaaagtcgtgggagatcgatcttaagcagctggagtatttaatcgacgagaaaactgcttgtctgattgtgaataatccatccaacccttgtggatctgtgtttagtaagcgccacctccagaaaatccttgccgtagctgcacggcaatgtgtgcccatcctagctgatgaaatttatggggatatggtcttctcagattgtaaatatgaacctctggctactctgtccactgacgtccccatcctttcctgtggagggctagccaaaagatggcttgtccctgggtggcggttaggatggatactaattcacgatcgccgagatatatttggaaatgaaatccgggatgggttggttaaactgtcacagagaatattaggaccctgtacaatcgtacagggagcactgaaatccattctatgcagaacacccggagagttctaccataatacactctcgtttctaaagtccaatgcagatctgtgttatggagcccttgccgcaatccctggactgcggcctgtgcggccatctggggccatgtacttgatggtcggaatcgaaatggaacacttccccgaatttgaaaacgatgtggagtttactgaacgactggtcgctgaacagagtgtgcattgtctccctgcgacatgctttgagtacccgaacttcataagggttgtcattacagtccctgaagtcatgatgctcgaagcatgttctcgcatacaggaattttgtgaacagcactatcactgtgcggaagggtcacaagaagaatgtgataaa

SEQ ID NO: 7523 - DNA, 1362 bp, Artificial Sequence
  derived and/or modified sequence
atggatccgtacatgatccagatgtcgtcaaaggggaacctgccatcgattcttgacgtgcatgtgaatgtgggaggccgatcctccgtcccaggaaaaatgaaaggcagaaaggcacgttggagcgtgcggccttccgatatggcaaagaaaacttttaaccctattagagccattgtggacaatatgaaagtgaaacctaatcctaataagactatgatatcgctgtccattggagatccaactgtgtttgggaacttgcctaccgacccagaggtcacgcaagcaatgaaggatgcactcgattcgggtaaatacaacggctacgctccatccattggcttcctgtccagccgcgaggagattgcgagctactaccactgtccagaggcacctcttgaagcgaaagacgtcattcttacctcgggatgttcccaagcaatcgacctttgcctggcggtgcttgccaaccccggccagaatatactggtccctcggccaggattctcactctacaagactttggctgaaagcatggggattgaggtgaagctgtacaaccttctgcctgaaaagtcgtgggaaattgaccttaagcaactggaatacctgatcgatgagaaaactgcatgccttatagtgaataacccaagcaacccctgtggatccgtgttttcgaagcggcaccttcaaaagatcctggcagtggcggcacgccaatgtgttccaatattggccgatgagatatacggcgacatggtgttttcagattgcaaatacgagccactggccaccctgtcaactgatgtgcccattctgtcctgcggaggtcttgcaaagaggtggctcgtgccgggctggagactgggctggatccttattcacgatcgtcgggacatattcggcaatgaaatcagagacggcttggtcaagttgtcgcaacggattctgggcccctgcaccatcgtgcagggtgcacttaagtcgatactttgcagaacccccggggaattctaccataacacgctgagctttctgaagtcgaatgcggatctctgctacggcgcattggcggcgatcccaggtcttagacctgtcaggccctcaggagcaatgtaccttatggtcgggattgaaatggaacatttcccagaattcgagaacgacgtggaatttactgaaagacttgtggcagagcagtcggtgcattgtctccctgcaacttgttttgagtatcctaatttcattagggtggtaattacggtgcctgaagtgatgatgcttgaagcatgcagtcgtatccaagaattttgtgaacaacattaccattgtgcagaagggagccaagaagaatgtgataaa

SEQ ID NO: 7524 - DNA, 1362 bp, Artificial Sequence
  derived and/or modified sequence
atggacccttacatgatccaaatgtcctctaagggcaatctgccaagcatcctggatgttcacgtaaatgtgggggggcgctcgtcagttcctggcaaaatgaagggacgcaaagcgaggtggtccgtgcggccatctgatatggctaagaagacattcaatccaataagagccatagtagacaacatgaaagtgaagccaaaccctaacaaaacaatgataagcctctccatcggtgatcctacggtcttcgggaatctcccaactgatcctgaggtgacacaagcaatgaaagatgctctggatagcggaaagtataacgggtacgcgccatccatcggatttctgagctcacgtgaagagatcgccagctactatcactgtcccgaagcacctctcgaggcaaaagatgtgatcttgacgtctgggtgttcccaagccattgatctgtgtctggccgtactggccaatcccggacagaacatactggtgcctaggccaggctttagtctgtacaagactcttgccgagtccatggggattgaagtaaaactgtataatctgctgccagagaaaagctgggagatcgatttgaaacagttagaatatctgatcgacgagaagactgcttgtcttatagtgaacaaccctagcaacccatgcggctctgtctttagcaagcgtcacctccaaaagattctggcggtggccgccagacagtgcgtgcccattttggctgacgagatttacggagacatggtgttctccgactgcaagtacgagccactcgccactctctctaccgacgtgcctatcctgtcctgtgggggtttggcaaaaaggtggctggtgccggggtggcggctcggatggattctaatacatgatcgtagggacatcttcggaaacgaaattcgggacgggttagtgaagcttagccagcggatactgggcccttgcaccattgtccagggggctctcaaatctattctctgccgcacacctggggagttctaccacaacacactcagcttcctgaagtcaaacgccgacttgtgttatggcgctctggccgccatccctggccttagacccgtgaggccctccggcgcaatgtatttgatggtcggaatcgagatggaacactttccagaattcgaaaacgacgtggagttcacggagagactggtggcagagcagtctgtacactgtctacctgctacatgctttgagtacccaaactttatcagggttgtcatcacggtgccagaggtgatgatgttggaggcctgcagcaggattcaggaattctgcgagcagcactaccactgcgcagaagggagtcaggaggagtgtgataaa

SEQ ID NO: 7525 - DNA, 1362 bp, Artificial Sequence
  derived and/or modified sequence
atggatccttatatgatccagatgtcgagcaagggaaacctcccatccattctcgatgtgcatgtgaacgtgggtgggcgatcctcggtcccaggaaaaatgaaaggacgcaaagcgaggtggagcgttcggccctcggatatggctaaaaagacgttcaatcctatccgagcaatcgttgacaatatgaaggtgaagcctaaccctaataagactatgatcagcctcagcatcggcgatcccactgtattcggcaatctcccgaccgaccctgaagtcacgcaagccatgaaggatgctctcgactccggaaagtacaacggctacgctccgagtattggctttttgtcctcaagggaggaaattgcgtcgtactaccactgccccgaagcgccattggaggccaaggacgtgatcctgactagcgggtgctcgcaagccatcgacttgtgcctggctgtgttggccaaccctggacagaacattctcgtgccgcgcccgggattttcgttgtacaagactctcgccgaatcaatgggtatcgaggtgaagctgtacaacctgctgccggaaaaatcatgggagatcgacctgaagcagctcgagtatttgatcgatgaaaagactgcctgcctgattgtgaataatccgtccaacccttgtggatcggtgttttcgaagcgccaccttcagaaaattctggcggtcgcggcaagacagtgcgtgcccatcctggccgacgaaatctacggcgacatggtgttctcagactgcaagtacgagcctctggccaccctcagcacggatgtcccaatcctgtcgtgcggaggcctggctaagcgctggctggttccgggatggcgcttgggatggatactgattcatgacaggagggatatcttcgggaacgagatccgcgacggtctggtgaaactgtctcagcgcatactcggaccatgcaccatcgtccaaggcgcgttgaagagcatcctctgccggaccccaggagaattctaccacaacactctgtccttcctcaagtcgaatgcggatctctgttacggcgcactggctgcaatccctggtctgcggccggtgaggccttcgggagccatgtacctgatggtcggcatcgagatggaacatttcccagaattcgaaaatgacgtcgagttcaccgaacggcttgtcgcagaacagagcgtgcactgtctccccgcaacctgtttcgaatatcccaactttatccgagtcgtgatcaccgtgccggaggtgatgatgctggaagcatgctcgagaatacaagagttctgcgaacaacactaccactgcgccgaggggtcgcaggaggagtgtgacaaa

SEQ ID NO: 7526 - DNA, 1362 bp, Artificial Sequence
  derived and/or modified sequence
atggatccctatatgatccagatgtcttccaagggtaaccttccaagtattctggatgtgcacgttaacgtcggtggccgaagttccgtgcctggaaaaatgaagggaagaaaagcacgatggtccgtgcgtccatctgacatggctaaaaagacttttaatcctattagagcaatcgtagacaatatgaaagtcaaaccaaacccgaacaagaccatgattagtttatctattggagatccaactgttttcgggaatctgccaacagatcctgaagttactcaggccatgaaagatgcacttgattctggtaagtacaacggatacgcccctagtattggatttctctcctcccgtgaagagatcgcatcatactatcactgtccggaagcacctcttgaagccaaggatgtgattcttacgtcaggatgctcacaggccattgatctatgcttggccgtcttggctaaccctggacagaacattctggtgccacggccaggattttcattgtacaaaactttggcagaatcaatgggtatcgaagtaaaactgtataacctgctcccagaaaaatcctgggaaattgatcttaaacaactcgagtatcttattgatgagaaaacagcatgtctcatcgtaaataacccatccaatccatgtggatcggtgttttctaaaagacaccttcagaagattcttgcagtcgcagcgcggcagtgcgttccgatcttggcagatgaaatctacggcgatatggttttttctgattgtaaatatgaaccattggcgacattgtcaacagatgtccctattttgtcctgcggaggactcgcaaaaagatggcttgtgccaggctggcgactcggatggatactcattcatgatagacgagatatttttggcaacgaaataagagacggattggttaaattgagtcaaaggatactgggaccgtgtactattgtacagggagccttaaaaagtattttgtgtcgcacaccgggagaattttatcataatacactttctttcttgaaatcaaatgcagacctctgttacggggctctagcagcaattcctggcttgcgaccagttcgtccgtccggtgccatgtatctcatggtcggtattgaaatggaacattttccagagtttgaaaatgacgtcgaatttacagagagactagtagcagagcaatccgtgcattgcttgccagctacgtgctttgagtatcctaatttcatacgtgtcgtgatcacagttcctgaggttatgatgctcgaagcttgcagccgtatacaggagttttgtgagcaacattaccattgtgcagaaggaagtcaagaagaatgtgataag

SEQ ID NO: 7527 - DNA, 1362 bp, Artificial Sequence
  derived and/or modified sequence
atggatccctatatgatccagatgtcaagcaagggcaacctgccatcaattctcgacgtccatgttaatgtcgggggtaggtcgtcagtgcccgggaagatgaaggggagaaaggcccgctggagtgtgcgaccgtcagatatggcaaagaaaacgtttaatccaattagagcaattgtagataacatgaaggtcaagcccaatccaaataagaccatgatttccctctcgataggtgaccctactgtttttggaaacctgcctaccgatcctgaagtaactcaagccatgaaggatgcacttgatagcggtaagtacaatggatacgccccctccatcggatttctgagttctcgtgaggaaatcgcatcctactatcactgcccagaagcaccgttggaggccaaggacgtgattctgacttcagggtgctcccaggccatcgacctttgcctcgcggtgctggcaaaccctgggcaaaacattctggtgccacggcctgggttctcactttacaaaacccttgcggaaagcatgggtattgaggtgaaattgtacaacctgcttcctgaaaaatcgtgggagattgatctgaaacaactggaataccttatcgatgaaaagaccgcatgtctcattgtgaacaacccttcgaatccttgcggctcggtgttctcgaaaagacatcttcagaagatcctggcagtcgcagctagacagtgtgtgcctatactcgcagatgagatatacggagacatggttttttcggattgtaagtacgagcctcttgctactctgtcgaccgacgtgccaatcctctcctgtggtggactggctaagcggtggcttgtgccaggatggcgtctcggatggattttgatccatgacagacgagatatctttggaaatgaaattcgagatggacttgtcaaactttcgcagaggatcttgggtccttgcactattgtgcagggtgcacttaaatctattttgtgtagaaccccaggtgaattctaccacaatacgctgtccttccttaagtcaaacgccgacctttgttacggagccctcgcagcaatacctggcctgcggcctgtgcggccaagcggtgcaatgtacctcatggtcggaatcgaaatggagcattttcctgaatttgaaaacgacgtggagttcaccgaacggctggtggcggagcaatccgtgcactgtctcccggcaacttgtttcgagtaccctaacttcattagggtggtgattacggtcccggaagtcatgatgctcgaggcatgttctcgtattcaagaattctgcgaacagcattaccactgtgcagagggatctcaggaagagtgtgataag

SEQ ID NO: 7528 - DNA, 1362 bp, Artificial Sequence
  derived and/or modified sequence
atggatccttacatgatccaaatgtcgtcgaagggtaaccttccatcgatcctggatgtgcatgtgaacgtcggtggcagatcctcggtccccggcaagatgaaggggcgtaaggcacggtggagcgtgcgtccatcagacatggcaaagaaaacttttaaccctattagggcaatcgtcgacaacatgaaagtcaagccgaaccctaacaaaactatgatttcactttcaattggcgaccctactgtctttggtaatctcccaaccgatccagaggtcacccaggccatgaaggacgcacttgattcgggtaagtacaatggttacgctccctcgatcggttttctgagcagcagagaggaaattgccagctactaccattgccccgaggcgccactggaagcaaaagacgtgatacttactagcggttgttcccaagcaattgacctttgcctggccgtgcttgcaaatcctggacaaaacattcttgtccctagaccaggcttttcactctacaagaccctggcagaatcaatgggaattgaagtgaagttgtacaatctgctgcccgagaagtcgtgggaaatcgatttgaaacaactcgagtacctcattgatgagaaaactgcatgtctcattgtgaacaatccctcgaatccctgtggatccgtgttctcaaagcgccacctccaaaagattcttgcagtggctgcgcgccagtgtgtcccaatactggcagatgaaatctacggggacatggtcttttccgattgcaagtacgagcctctggccaccctttccaccgacgtgcctatacttagctgcgggggattggcaaagaggtggctggtgccaggatggagactgggatggattttgattcatgatagacgtgacatttttgggaacgagatccgcgatggtcttgtgaagctgtcccaaaggattctgggaccttgtactattgtgcaaggtgccctcaagagcatactgtgccgcaccccgggggagttctaccataacaccctgtcattcctgaaatccaacgcggacctttgctacggtgccctcgccgcgattcctggactcagaccggtccgcccttcaggtgcaatgtacctgatggtcggcatagaaatggaacattttccagagtttgagaacgatgtcgagtttactgaacgcttggtcgccgagcaatccgttcattgccttcctgccacctgcttcgagtacccaaacttcatccgggtggtgatcacggtgccagaagtgatgatgctggaagcctgctcacggatacaagagttctgtgaacagcattaccactgtgcagaagggagccaggaagaatgtgataag

SEQ ID NO: 7529 - DNA, 1362 bp, Artificial Sequence
  derived and/or modified sequence
atggatccctacatgatccaaatgtcatcaaaaggaaatctgccttccattcttgacgtccacgtgaatgtgggaggaagatcctcagtgccgggaaagatgaagggacgcaaagcacggtggtccgtccggccttcggatatggcaaagaaaactttcaacccaattagagccattgtggataacatgaaagttaagcctaacccaaacaagactatgatcagcttgtcgattggggatcccacggtctttggtaacctccctaccgatcctgaagtgacccaggctatgaaagatgcgctggattcgggcaagtacaacggctatgcgccatcaataggctttctctcatcgcgagaggaaattgcatcctactaccattgcccagaggcaccactcgaggcaaaggatgtgatccttacttccggatgctcgcaagcgattgatctgtgtctggcggtgctcgcaaacccaggccaaaacatccttgtccctcgccctggattttcgctttacaagacccttgcagagagcatgggaatcgaggtgaagctgtacaacctgcttccggagaaaagctgggaaatcgatcttaagcaactggagtacctgatagatgaaaagacggcttgtctgattgtcaataacccaagcaacccatgcggatccgtgttctcgaagcgtcaccttcaaaagattctggctgtcgctgcacgacagtgtgtgccgatcctggcagacgagatttacggagatatggtgttttcggactgcaagtacgaacctttggcaactctgagcaccgatgtgcccatcctgagctgtggagggctggcaaagagatggctggttcctggatggcggcttggatggattctcattcacgataggcgtgacattttcggcaacgaaattcgcgacggcctggttaagttgtctcagaggattctgggtccatgtacgatcgtgcaaggagcgctcaagtccattctctgccgcaccccaggggaattctaccataatacgttgtcatttcttaaaagcaatgcagatttgtgttacggcgcacttgccgccatccctggtctgcggccagtgcgcccgtccggtgccatgtatctgatggtgggaattgagatggaacatttcccggagtttgagaacgatgtggaattcaccgaaagacttgtggctgaacagtcggtgcattgtctgcccgcaacctgtttcgagtaccctaatttcataagagtggtgattaccgtgcccgaagtgatgatgctggaagcatgttcacggatccaagagttttgtgagcagcattaccactgcgcagagggttcgcaagaggaatgcgacaaa

SEQ ID NO: 7530 - DNA, 1362 bp, Artificial Sequence
  derived and/or modified sequence
atggatccatacatgatacagatgagcagtaagggtaacctgcccagcatactagatgtgcacgtcaatgtcggtgggcgatcctcagtgcctggcaaaatgaagggcaggaaagcccggtggagtgttcggcccagcgatatggctaagaagaccttcaatcccatacgtgctatagtggataacatgaaagtgaagccaaatccaaataagaccatgatctctctgagcattggcgaccccaccgtgtttggcaatttaccaactgaccccgaagtgacacaggccatgaaagatgccctggactctggcaagtacaacgggtacgccccttctatcgggtttctatcttcccgggaagaaatcgcttcctattaccactgtcctgaggccccactggaagcaaaagacgtgattctgacaagtggatgtagccaggctatagatttgtgcctggctgttctggctaatcctgggcagaacatcctggtgcctagacccgggttcagtctgtacaagactcttgccgagagtatgggaattgaagtgaagctttacaacctgctgcccgagaaaagctgggaaatagatctcaagcagctggaatatctgattgatgagaagactgcatgcctgattgtgaacaatccttccaatccctgtggaagcgtcttttccaaacggcacctgcagaaaatacttgccgtggcagcccgacagtgcgtgccaatactagccgacgaaatttatggcgacatggttttttctgactgtaagtacgagcccctcgccaccctgtctacagacgtccccatcctgtcttgcggcgggctggccaaacggtggctggttcctgggtggcgtctaggttggattctcattcacgatcgccgggacatttttggaaacgagatacgcgacggcttagtgaaattatcccagaggattttaggaccttgtaccatagttcaaggcgctctgaagtctatactgtgccggacaccaggggaattttaccacaataccctgtcttttctgaaatcaaatgccgatctctgctatggcgccctcgccgctatcccagggcttcgaccagttagaccttcaggcgccatgtacttaatggtgggcattgaaatggagcattttcccgagtttgagaacgatgtggagtttactgaacggctggtggccgagcagagcgtgcattgcctgcccgcaacatgtttcgagtacccaaactttatacgcgtggtgatcaccgtgcccgaggtgatgatgctggaggcctgttctcgcatccaagagttttgcgaacagcactaccactgcgcagagggcagtcaagaggaatgcgataaa

SEQ ID NO: 7531 - DNA, 1362 bp, Artificial Sequence
  derived and/or modified sequence
atggatccttacatgattcaaatgtcctcgaagggcaacctaccctccatcctggatgttcacgtcaacgttgggggtcgaagttccgtcccagggaagatgaaagggagaaaggcacgttggagcgtacgcccttccgacatggcaaagaagaccttcaatcctatacgggcaatagttgataatatgaaggttaagccgaatccaaataaaactatgatttcactctcaatcggtgacccaacggtattcggcaatctcccgaccgaccccgaagtcacccaggcgatgaaagatgcgctggactctggtaaatataatggttatgctcctagcataggctttctgagcagtcgtgaggaaattgctagctactaccactgtcccgaagccccgctggaggccaaggatgttatcttaacctcaggctgttcccaggcaatagacctgtgcctagccgtccttgcaaaccctggacagaacattcttgtccccaggccaggattctcactctacaagacacttgcagaatcaatgggcattgaagtaaaactctataatcttttgcctgaaaagtcatgggaaatcgaccttaagcaactggagtatctgatagacgaaaaaacggcgtgcctcatagttaacaacccctccaatccctgcggttcggtcttttctaagcgacacctgcagaagatactggcagttgcagctcgtcaatgcgtgcctatccttgctgatgaaatatatggtgacatggtattttcagattgtaagtatgaaccacttgccacactttctactgacgtaccgattctctcttgcggcggtttggccaagaggtggctcgtgcccggttggcggttgggttggatcctaattcacgaccgaagggatatcttcggcaacgagatacgagacggcctggttaagctgagccagcggattctaggaccctgcacgattgtccagggcgctctcaagtcgattctctgccgaactcctggggaattttaccacaacaccctgagtttcctaaagagcaatgcggacctgtgctatggagccttggctgctatacccggtcttcgccctgtgcggcccagcggcgccatgtacctgatggtggggattgagatggagcattttcccgaatttgaaaatgacgttgaattcacggagcgccttgtggccgaacaatcagtccactgcttgccagctacctgctttgagtaccctaacttcatccgcgttgtgattacggttcctgaagttatgatgttggaagcctgttcccggattcaagaattttgtgagcagcactatcactgtgcagagggatctcaggaagaatgcgataaa

SEQ ID NO: 7532 - DNA, 1362 bp, Artificial Sequence
  derived and/or modified sequence
atggatccatacatgattcaaatgtcctcaaaggggaacctgccttccatccttgacgtgcatgtgaatgtggggggacggtcatcggtcccgggcaagatgaaaggccgcaaagcccgctggtcagtgcgccctagcgacatggcgaagaaaactttcaacccaatccgcgcgatcgtcgacaacatgaaggtcaagccaaacccgaacaagaccatgatttcactgtccattggcgatccgactgtgttcgggaaccttccgaccgacccggaggtcacgcaggcaatgaaggacgccctggattccggcaagtataacggatacgccccatccatcggtttcctgtcatcgcgcgaagaaatcgcgagctactaccactgcccagaggctccactggaggccaaggacgtgatcctgacctcgggctgttctcaggcaattgacctgtgcctcgcggtcctggccaatcccggacaaaacatcctggtgccaagacctggattctccctgtacaagaccttggcggaatcgatggggatcgaggtgaagctctacaatctgctgcccgaaaaatcgtgggaaatcgacctcaagcaactcgaatacctgatcgacgaaaagaccgcctgtctcattgtgaataaccccagcaacccgtgcggatctgtcttttccaagcgtcacctccagaagatcctcgctgtcgctgcacgccagtgtgttccaatcttggccgacgagatttacggagatatggtgttttcggactgcaaatacgagcctctggctaccctgtctaccgacgtgcccatcctgagctgcggcggactcgctaagcggtggctggtcccgggatggagactgggctggatcctgatccatgaccgccgggacatctttggcaacgagatccgggatggtctggtgaagttgtcgcaacggatcttgggaccgtgtactatcgtacagggggcgctgaaatccatcctttgtcgcactccgggggagttctaccataacaccctgtccttcctcaagtcaaacgctgacctgtgctacggcgcgctggcagctatcccggggctccgcccggtgcgcccctcgggcgccatgtaccttatggtgggtatcgaaatggaacattttcccgaattcgaaaatgatgtggaatttactgagcggctggtggcggaacagtcagtgcactgcctgccggcaacctgcttcgagtacccgaatttcatcagagtcgtcatcactgtgcccgaggtgatgatgctcgaggcttgttcgcggatccaggagttctgcgaacagcattaccactgtgctgaaggatcccaggaggaatgtgataag

SEQ ID NO: 7533 - DNA, 1362 bp, Artificial Sequence
  derived and/or modified sequence
atggatccatacatgatccagatgtcctccaaagggaatctaccctctatcctggacgtgcacgttaacgtgggcggtcgcagctccgttccaggcaagatgaaagggcggaaagctaggtggtccgtacggcctagcgatatggccaagaaaaccttcaatccaattcgcgcgatcgtggataacatgaaggtcaaacccaacccgaacaagacaatgatttcactctctattggtgatcctaccgttttcgggaacctcccaacagaccctgaggtcactcaggcaatgaaggatgccctcgacagcggcaaatataatggctacgcaccaagcattggcttcctgtcctctcgagaagaaattgccagttattaccattgcccggaagcaccgctggaggcaaaagacgtgatactgacctctggctgttctcaggctatcgatctctgcctcgcggtgctggctaatcccggccaaaacatactggttcctcggcccggtttttctctgtacaaaacactagctgagagcatggggatcgaggtgaaactgtacaacttactccctgaaaagagttgggagattgatctgaagcagctagaatacctaatcgacgaaaagacagcctgtttaattgtcaacaatccgtcgaacccatgtggatccgtgttctccaaaagacacctacagaagatcctagcagtagccgctcgtcagtgcgtgccaatcctcgccgacgagatttacggtgacatggtgttcagtgactgcaaatacgaacctctggcgacgctttcaacggacgttccaatcctatcatgtggagggctcgcaaaacgctggttagtgcccgggtggaggctaggatggatcctgattcatgacaggagagacatctttggaaacgaaatccgcgatgggcttgtgaaactctcacagagaatactcggcccctgtacaatcgttcagggcgcgttaaagagcatcctgtgtcgtacacccggggaattctaccataatactctgagttttctgaagtcaaacgccgatctctgctatggagccctggctgctatccctggattaaggccagtacgcccgagcggtgccatgtacctgatggtgggcattgagatggaacactttccagaatttgagaacgacgtggaattcacagagagactggttgcagagcagagtgtacactgtctgcctgccacttgttttgaataccccaattttatacgagtggtgattaccgtgcccgaagtgatgatgctcgaggcatgcagccggatccaggagttctgcgaacagcactatcactgtgcggagggaagccaggaggagtgcgacaaa

SEQ ID NO: 7534 - DNA, 1362 bp, Artificial Sequence
  derived and/or modified sequence
atggatccatatatgattcagatgtccagtaaggggaatctaccgtcgatactggacgtacatgtcaatgttggcggaaggagcagtgtgcccggaaagatgaaggggcggaaggctcgctggagcgtacgaccaagcgacatggcaaagaagactttcaatcccataagggcgatcgtggataacatgaaagtgaaaccaaatccaaacaagacaatgatctctttgagtataggagaccccacggtctttgggaacctgcctaccgatccggaagtgacccaggcgatgaaagatgctcttgactctggcaagtacaatggatatgcaccatccatcgggttcctgagctctcgcgaggagattgcctcatactaccactgtcctgaggctccactggaggctaaggacgtcatactcacctctggctgttctcaggccatagatctctgcctggccgtgctcgctaacccgggccagaatattctcgtcccccggcctggcttttcactttacaagactcttgcagaaagcatgggtattgaggtcaaactgtataatcttcttccggaaaaatcttgggaaatcgacctcaaacaactggagtacttaatagacgagaaaactgcgtgtcttattgtaaataatccaagcaatccttgcggctccgtcttctctaagcggcacctgcagaaaatccttgctgttgccgcccgccagtgtgtcccaatcttggctgacgagatatatggtgatatggtgtttagcgactgcaagtacgagcctctggccaccctctcaactgatgtgcctatcctgtcttgtggcggcttggccaagaggtggctcgtaccaggatggagactgggctggattctgatccacgaccgcagagacatttttggtaacgagattagggacgggttggtgaagctgtcacagcggatcctggggccgtgcactattgtgcaaggggctttaaagtctattctgtgccgcacacccggggaattctatcataatactctgtcctttcttaaaagcaacgccgacctctgttacggcgcgctggccgccattccagggttacggcccgtgaggccgtcaggcgctatgtatctgatggtgggcatagaaatggagcacttccccgagttcgaaaatgacgtggagtttactgagagattggtggccgagcagagtgtgcattgcctccctgccacctgctttgagtaccctaattttatcagggtggtgatcactgtgcctgaggttatgatgctcgaggcgtgcagccgaattcaggagttctgtgagcaacattatcattgcgcggaggggtcccaggaggagtgcgacaaa

SEQ ID NO: 7535 - DNA, 1362 bp, Artificial Sequence
  derived and/or modified sequence
atggatccttacatgatccagatgtcgagcaagggaaaccttccatcaatccttgatgtgcatgtgaatgtcggcggacggtcctccgtcccaggaaaaatgaagggccggaaagccagatggagcgttagacccagcgacatggctaagaaaactttcaaccctatccgcgcaatcgtagataacatgaaggtgaaaccaaatcccaacaaaaccatgataagcctctccataggtgatcctactgtgttcgggaatctgccgacggaccctgaggttacccaagccatgaaagatgcgctcgatagcggtaagtataacggatacgcacctagcattggttttctcagcagccgggaagagattgcatcctactaccactgtcctgaggccccacttgaagccaaggatgtcatactgacctcaggatgttcccaagcaattgatctgtgcctggcagtccttgcgaaccctggtcagaacatactggtgcctcggccagggttttcgctttacaagactcttgcagagtccatgggaattgaagtcaagttgtacaaccttcttccagagaaatcgtgggagattgatctgaagcagctggaatacctgattgatgaaaagactgcttgtcttattgtgaacaacccttcgaacccatgtggatctgtgttctcgaagcgccatctccaaaagattctggcggtggcggcgcgccagtgtgttcccattctggcagatgaaatctatggagacatggtgttttctgattgtaagtacgagcctctggcaactctttccaccgatgtgcctattctttcctgcgggggccttgcgaaacgctggttggtgcccggatggcgactcggatggattctcattcatgaccgtcgagacatttttggaaatgaaatccgtgatggtctggtcaaactttcacaacgcattctcgggccgtgtactattgttcaaggagcgttgaagtcaattctctgtagaacccctggagaattctaccataacactctctcgtttctgaagtcgaacgccgatctttgttacggagccttggcagcgatccctggcctgcgtccggtaagaccatcaggtgccatgtaccttatggtgggaatcgagatggaacattttcccgaatttgagaacgacgtggagtttaccgagaggctggtggcagagcaatcagtgcattgtttgcctgccacgtgctttgagtaccctaatttcattagggtcgtgattaccgtgccagaagtcatgatgcttgaagcatgtagccgtattcaggagttctgtgagcaacactaccactgtgcagaggggtcacaagaagaatgcgataaa

SEQ ID NO: 7536 - DNA, 1362 bp, Artificial Sequence
  derived and/or modified sequence
atggatccctatatgatccagatgagctccaagggaaacctgccaagtattctggacgtgcatgtgaacgtcggtggacgatcgagcgttcctggaaaaatgaagggacgaaaagcacggtggtcggtgaggccctcagatatggccaagaaaaccttcaacccaattagggccatcgtggacaacatgaaagtgaagcctaaccctaacaagacgatgattagcctgtccattggagatccaactgtgtttggcaacttgcctaccgatcccgaggtgacccaagctatgaaagacgcactcgactccggtaagtacaatggatacgcaccctccatcggatttcttagctcgcgggaagaaatcgcaagctactaccattgtccagaagctccactggaggcaaaagatgtcatcctgacctcgggatgttcacaagcgattgatctttgccttgcagtgcttgcaaaccctggacagaatatcctggtgccccgccctggctttagcctgtacaagactcttgccgaatccatgggtatagaggtcaagttgtacaacctgctgcctgagaaaagctgggagatagatcttaagcagcttgagtatcttatcgacgaaaagactgcctgtcttattgtcaacaacccttcgaacccctgcggtagcgtattctcaaaaagacatcttcaaaagattcttgccgtggcagcgagacaatgtgtcccaatcctggctgacgagatctacggagacatggtcttttccgattgtaagtacgagccacttgcaactctgtcaactgacgtcccaattctgagctgtggaggactggcgaagcgatggctcgttccaggctggaggttgggatggattcttatccatgaccgccgggacatttttgggaatgagattcgtgatggactggtgaagctctcccaacggattctgggtccctgtactattgttcagggagcattgaagtcaatcctgtgccgtactcctggcgagttttaccataacacgctttcctttcttaagtcaaacgccgatctgtgctacggcgcactggcggcgattcctggactgaggcctgtcagaccctcgggtgccatgtacctcatggtggggatcgagatggagcatttcccagaattcgagaatgatgtggaattcaccgaacgccttgtggccgaacaaagcgtgcattgcctcccggcaacctgttttgagtacccgaacttcatcagagttgtcattaccgtcccggaagtgatgatgctggaagcatgtagcagaatccaggaattctgtgaacaacactaccattgtgcagagggcagccaggaggaatgcgataag

SEQ ID NO: 7537 - DNA, 1362 bp, Artificial Sequence
  derived and/or modified sequence
atggacccttatatgatccaaatgtcctccaagggaaaccttcccagcattcttgatgtccatgtcaacgtgggcgggagatcgtcagtccccggtaagatgaaggggagaaaggcacgctggtccgtccggccttcggacatggcaaaaaagactttcaatccaatacgagcgattgtggataacatgaaggtcaagccaaaccccaacaaaaccatgatctcactgtcgattggtgaccctaccgtttttggaaacctgcccaccgatcctgaagtcactcaggcaatgaaggacgccctggatagtggaaagtacaatggatacgccccatccattggatttctcagttcacgggaagagattgcttcgtactaccattgtccagaagcacctctcgaggcaaaagacgtcattctgactagcggctgcagccaagcaatagatctttgtcttgcagttttggcaaatcctggccagaacattctcgtgccccgtccgggcttctcactttacaaaaccctcgcggagtcaatgggtattgaggtgaaactgtacaacctccttcctgaaaagtcctgggaaattgacctcaagcaactcgaatatcttattgatgaaaaaaccgcgtgtctgatcgtgaataacccaagcaatccctgcgggtccgtgttcagcaagaggcatcttcagaagatcctcgcagtcgcagcaagacaatgcgtgcctattttggcagacgaaatctatggtgacatggtgttttcagattgcaagtacgaacctcttgccaccttgtcgaccgacgtgcctattctgtcatgcggaggccttgcaaaacgttggctcgtgccaggttggagacttggatggatccttattcatgatcgacgcgatatcttcggaaacgaaatacgagatggactggtgaagctctcacagcgtatcctcgggccctgcaccattgtgcaaggtgcccttaagtcgattctttgcagaactccaggagagttctatcacaacaccctttcctttctgaagtcgaatgctgacttgtgttacggagcgctcgcagcaatccctggactgcggcccgtaagaccctccggagccatgtacctgatggtgggaattgagatggagcattttccagaatttgaaaatgacgttgagtttaccgagcggctcgtggcagaacagtcggtccactgccttcccgcgacctgctttgaatacccaaacttcattcgcgtggtcatcactgtgccagaggtgatgatgcttgaggcatgttcgcgcatacaggaattctgtgagcaacattaccattgcgcagaaggttcccaggaagaatgtgataag

SEQ ID NO: 7538 - DNA, 1362 bp, Artificial Sequence
  derived and/or modified sequence
atggacccctacatgatacaaatgagtagcaaaggaaacctaccttcaatcttggacgtgcatgtaaatgtggggggcaggtcaagcgtgccagggaagatgaagggcaggaaagcccgttggtccgtgagaccttcagacatggcgaaaaagacttttaaccccatacgcgccatcgtagacaatatgaaggtgaagcctaatccaaacaagaccatgatctcactgtcaatcggggaccccactgtatttggaaatctgcctacagatccagaagtgacacaagccatgaaggacgccctggactcaggaaagtacaacggctatgcacccagtatcgggttcctgagttcccgggaggaaatcgcttcctattatcactgtcccgaagcccctctcgaggcaaaagatgtgatcttaacttctggatgctctcaagccattgacctttgcctggccgtgctcgcaaaccccggccagaacattttggtgcccagaccgggtttcagtctctataagacgctggcagagagcatgggaatcgaggtgaaactctataatttactcccggagaagagctgggagatcgacctaaaacagcttgagtacttgattgacgagaaaactgcttgtctgatcgtaaacaatccctccaacccctgcgggtcggtgttcagcaaaagacaccttcagaagatactcgctgtagcagccagacagtgcgttccaatacttgcagacgagatttacggggatatggttttctcggactgtaagtatgagcccctggccacgttatcaacagacgtgcctatattgtcttgtggcggactcgctaagcgctggctggtgcctggctggaggctggggtggattctgatccatgatcggcgagatattttcggcaatgagatcagggacgggctcgtgaagctttcccagcgaatactaggcccatgtactatcgtgcagggagccctgaagtccatcctttgtcgaacccccggtgagttctatcacaatactctcagctttctgaagtctaacgccgatctgtgttacggggctctcgcagccatacccggcttaagaccggtgcggccatcaggggcgatgtatttgatggttgggattgagatggaacatttccctgaattcgaaaacgacgtggaatttacggagagacttgtggccgagcaatctgttcattgcctgcctgcaacatgtttcgagtaccccaattttatccgggttgtgattaccgtgcctgaagtgatgatgctggaggcctgcagtcgcatccaggaattctgcgaacagcactaccattgtgccgaagggagccaggaagaatgtgacaag

SEQ ID NO: 7539 - DNA, 1362 bp, Artificial Sequence
  derived and/or modified sequence
atggatccgtacatgatccaaatgtcgtctaaaggaaatctgccatcaatcctggacgtccatgtgaacgtgggcggaagaagctcggtcccggggaagatgaagggacgcaaagctagatggagcgtgcgcccaagcgatatggcgaagaaaacgtttaaccctatcagagcgatagtcgacaatatgaaagtgaagccgaatccaaataagactatgatctcgttgtccataggagatcccaccgtctttggcaaccttccgactgaccctgaggtcacgcaggcgatgaaagacgcactcgactcaggcaagtacaacggctacgcgccgtcgatcggattcctcagctcgagagaggaaatcgcttcgtactaccactgtcctgaagcacccttggaagccaaggacgtgatcctgacctcgggatgctcacaagccatcgatctctgcctggcggtcctggcaaaccctggacagaacatccttgtgccacggccgggcttctcgctctacaagaccctcgcggaaagcatgggaatcgaagtgaagctgtacaacctgctcccggagaagtcatgggaaattgatctcaaacagctcgagtatctgatcgacgaaaagactgcttgcctgatcgtcaataacccatccaatccgtgcgggtccgtgttttctaaaagacatctgcaaaagatcctcgctgtcgcagccaggcagtgcgtgcctatcctcgcggacgagatatacggagacatggtgttctcggactgcaagtacgaacccctggccaccctgtccactgacgtcccgatcctgtcctgtggcggcctcgccaaacggtggttggtccccggatggcggctgggatggatcctgatccatgatcgccgggacattttcggaaacgaaattcgggatggactcgttaagctgtcgcaacggatcctggggccgtgcactatcgtccagggagcgctgaagtccatcctgtgccggactccaggggaattctaccacaacaccttgagcttcctcaagtcgaacgccgatctgtgctacggcgccttggctgccatcccaggacttcgacccgtgcggccgtcgggagcgatgtaccttatggtgggcattgagatggagcacttcccggaatttgagaatgacgtggaatttacggagcggctggtcgccgaacagagcgtgcactgcctgcccgccacctgtttcgagtatcctaacttcatcagggtggtcatcacggtgccggaggtgatgatgctggaagcatgttcgcgcattcaggagttctgtgaacagcattaccactgcgccgaaggatcccaagaggaatgcgacaag

SEQ ID NO: 7540 - DNA, 1362 bp, Artificial Sequence
  derived and/or modified sequence
atggacccctacatgatccaaatgagctccaagggtaaccttccctcaatcctcgatgtgcacgtgaacgtaggcggacgatctagcgtccccggcaagatgaagggccggaaagcacgttggtctgtccgtcccagcgatatggctaagaagacgttcaatcctatacgagcaatagtggacaatatgaaagtgaagccaaacccaaataagaccatgatcagcctgagcatcggtgatcccactgtcttcgggaacttacccaccgaccctgaggtgacacaggcgatgaaggacgcgcttgattcgggcaagtataacgggtacgctccttcaatcggctttctgtcgtcccgggaagaaattgcttcatattaccattgcccagaggctcccctggaggccaaagatgtgatcctgacttccgggtgcagtcaggctattgatctgtgcctggccgtgctcgccaacccagggcaaaatattctcgtgcctcggccaggattttccttgtacaagacacttgccgagagcatgggcattgaggtcaaattgtacaacctgctccctgaaaaaagctgggaaatagacttgaagcagctggagtacctaattgacgagaaaacagcatgtttgatagtgaacaacccatcaaacccctgtgggtctgttttcagcaaaaggcacttgcaaaagatcctcgcagtggccgctaggcaatgtgtccccatactcgctgacgaaatatacggcgacatggtattttccgattgtaagtatgagcccctcgccaccctgagcacagacgttccaatcctaagctgcggggggctggccaaaaggtggctggttcccggatggaggttggggtggattcttatacatgaccgccgggatatttttggaaatgaaatccgcgacggtttggttaagctgagccagcgaatcctgggtccatgtactattgtccagggtgctctgaagtccatcttgtgtaggacacctggagagttttaccacaacacactgtccttcttgaagtcaaacgcagacttatgctacggggcgctagcagccattcctggcctccgcccagttaggcctagtggcgctatgtatctcatggtgggaattgaaatggagcactttccagagttcgaaaacgatgtcgagttcaccgaaagacttgttgctgagcaaagtgtacattgccttcctgcaacatgctttgagtatcctaacttcataagagttgtgataacagtgccagaggtaatgatgctggaagcttgcagccggatccaggagttttgcgagcagcactaccactgcgccgaggggtcccaggaggagtgtgataaa

SEQ ID NO: 7541 - DNA, 1362 bp, Artificial Sequence
  derived and/or modified sequence
atggacccctacatgatccaaatgtcatccaagggcaaccttccctccattctcgacgtccacgttaacgtgggaggccgatcttccgtgccaggcaagatgaagggccggaaagcgagatggagtgtcaggccttctgacatggccaagaaaacattcaatccaatcagagctatagttgacaatatgaaggttaagccaaaccccaataaaacaatgatctctctgtccatcggagatcctactgttttcggtaacctccctacggaccctgaagttactcaggccatgaaggatgctcttgactctgggaagtataatggttacgcgccttcaattggttttcttagtagccgcgaggagatagctagctactaccactgtccggaggctccccttgaggctaaggacgtgatcttgacgagcggctgtagccaggctatagacctctgtctggcagtcctcgcaaatcccggacaaaatatcttggttcctagaccaggattctccctgtacaagacactggcagagtccatggggattgaggtgaagctttacaatctgttgccagagaagtcttgggaaattgacttgaaacagctggaatacctgatcgacgagaagacagcctgcctcattgtgaacaacccaagcaacccttgcggttctgttttttctaagaggcacctccagaagattctcgctgtcgccgccaggcaatgcgtgccaatcctggctgatgaaatctacggggacatggttttttcagactgtaagtatgaaccacttgcaacactctccactgacgtccctatcctttcatgtggcggtcttgctaaaagatggctggtgccaggctggaggttgggctggattcttatccatgatcgccgagacattttcggaaatgagatacgagacgggcttgtgaaactcagccagcgcatcctggggccgtgtacaatcgttcagggtgctctcaaaagcattctgtgtcgcacacccggcgagttctatcataacactctgtccttcttgaaatccaatgcggatctgtgttatggtgctctcgcagctatccccggattgagacctgtacggcccagtggtgccatgtacctgatggtcggtattgagatggagcattttccggaattcgagaacgacgttgaatttaccgagagattggtagctgaacaatctgtgcattgccttccggccacatgttttgagtatcctaactttatccgagttgtgatcaccgttccagaggtgatgatgctggaggcctgctcccgcatacaggagttttgcgagcagcattatcattgcgcagaagggagccaggaggaatgtgataag

SEQ ID NO: 7542 - DNA, 1362 bp, Artificial Sequence
  derived and/or modified sequence
atggacccatatatgatccaaatgtcatctaagggaaacctgccctcaatcctcgatgtgcacgtgaacgtgggtggtcgctcttccgtgccaggcaagatgaaaggtcgtaaggccagatggagcgtgaggccttctgatatggccaagaagacatttaaccccattcgtgccatcgttgacaacatgaaggtaaagccaaacccaaacaaaacaatgatctccctgtctattggcgaccccaccgttttcggcaatttgcctacagaccctgaagtgactcaggctatgaaggatgcactcgacagtggtaagtacaatggatacgctccttccattggattcctgagctcacgcgaggaaatcgcctcctactaccactgtcccgaagcccctttggaggccaaagatgtcattctgacatccggatgctcacaagccattgacctttgccttgctgtcctggccaaccccggacagaatatactcgtccctcgtcccggtttttccttgtacaagactctggcagagtctatgggaatcgaagtcaagctctacaatttgttgcccgagaaatcttgggaaatcgaccttaagcaattggaatacttgatcgatgagaagactgcttgcctcatcgtcaataatcctagtaatccttgcggatccgtgttctctaaacgccacctgcagaagatactggccgtcgctgcccgtcagtgcgtgcccatactcgctgacgaaatctatggtgacatggttttctcagactgtaaatacgagccattggctacactgtcaactgacgtgcccatcctcagttgcggaggcctcgccaagaggtggctggtcccaggttggagactgggatggattctgattcacgaccgcagggacattttcggtaacgaaattagggacggcctggtgaagctttcccagaggattctcggtccctgcaccatagtgcaaggcgctctgaaatccatcctgtgtcgcacaccaggcgaattttatcataatacattgagtttcctcaaaagcaacgctgacctttgctacggcgccctggcagctatccccggtctgaggccagtccgtcctagcggagctatgtatcttatggttggtattgagatggaacattttcctgagttcgagaatgatgttgagttcaccgagcgcctcgtggccgagcagtcagtgcattgtcttcccgccacctgcttcgagtaccctaactttattcgtgtagttattacagtgccagaggttatgatgctggaggcatgtagccgcattcaggagttctgcgaacagcattaccactgcgccgaaggctctcaggaagagtgcgacaag

SEQ ID NO: 7543 - DNA, 1362 bp, Artificial Sequence
  derived and/or modified sequence
atggacccttacatgatccagatgtcgagtaagggaaacctgccaagtatattggacgttcacgtcaacgttggcggacgaagttccgtgccaggaaaaatgaagggccgtaaggcgcggtggtcagtgcgcccatccgatatggcgaagaagacattcaatcccattcgtgcaattgtggataatatgaaagtcaagccaaaccccaataagacgatgatttcgctgtctattggcgatccaacggtatttggtaatctgccgacggaccccgaggtaacacaagccatgaaggatgcgctcgactccggaaagtacaacggctacgctccgtcgatcggcttcctctcctcccgagaggagatcgcttcctactaccactgcccagaggcccccctggaggccaaggacgtgatcctgacctccggttgctcccaggcaatagatctgtgcctagcagtgttggcgaaccctggtcagaatattctggtgcctaggcccgggttctctctatataagacgctcgccgagtctatgggcattgaggtgaagttatataacctattgccagaaaagtcgtgggagattgatcttaagcaactggagtatctcattgacgagaagaccgcctgcttgatcgtgaacaatccgagcaacccgtgcggctcagtgttcagtaagcggcacctgcaaaaaattctggctgtggctgcccgccaatgtgtgcccattctggccgacgagatatacggagacatggtgttcagtgactgtaagtatgagccgttggcaaccctctcgactgacgtgcctattctgagctgcggtggcctggcgaagcgatggctcgtaccgggttggcgcctgggttggatcctcatccatgatcgccgagatatcttcggcaatgagatcagagacggactggtgaagctgtcgcagcgcatccttggtccctgcactatcgtccagggcgcgttaaagtcgattctgtgtagaaccccaggggagttctaccacaacaccctgtcgttcctcaagagtaatgccgacctctgctatggtgccttggccgccattccgggcctgcgacccgttaggccttcgggcgctatgtacctgatggtgggtatcgaaatggagcattttccggaatttgaaaacgacgttgagttcacggagcgactcgtggccgagcagagtgtccattgtctaccagctacctgcttcgagtaccccaactttatacgagtcgtgattactgtgccagaggtgatgatgctggaggcctgcagtcgcattcaggagttctgtgaacagcattatcactgcgctgagggcagccaggaggagtgcgataaa

SEQ ID NO: 7544 - DNA, 1362 bp, Artificial Sequence
  derived and/or modified sequence
atggatccatacatgatccaaatgtcttcaaagggaaacctgccatccattctggacgtgcacgtgaacgtgggcggtcgctcctcagttcctgggaagatgaaaggacgcaaggctaggtggtctgtgaggccttcagatatggctaaaaagaccttcaatcccatccgcgccattgtggataatatgaaggtcaaaccaaaccctaataaaacaatgatttccctgagcattggggacccaaccgtgtttggcaaccttcccacagacccggaggtcactcaggctatgaaagacgcactagactctggtaaatataacggttacgcgccctccataggattcttgagttcgcgagaagagatcgcgagttactatcactgtccggaggcacctcttgaggcaaaggatgttatcctaacttcagggtgttcacaggccatcgatttgtgtctggccgttcttgctaatcctggccagaatatcttggtaccacgccctggttttagtctgtacaagacattggcagaaagtatgggcatagaagtgaaactttataatttgttacccgagaaaagttgggagattgatctgaaacagctcgaatacttaattgatgagaagacggcatgtctcattgtgaataatccgtctaatccttgtgggtccgttttttccaagaggcatctacaaaaaatcttggcggtggctgctcggcagtgcgtaccaattctggccgatgagatatatggagatatggtcttcagcgattgcaaatacgaacctctggccacactttcaaccgacgtccccatattatcttgtggcggtctggctaagcggtggctggtgccagggtggaggctcggctggatactgatacacgatcggagagatatcttcgggaatgagattcgcgacggactcgtgaagctttcccagcgcatcctggggccttgtactatcgtgcaaggcgcgctgaagtccatcctgtgtcggacacctggggaattttaccacaatactctgtccttcctgaaatccaatgcagatctgtgctatggggcactggcagcaatccccgggttgcggccagtccgcccatcaggagccatgtatttgatggtgggaattgaaatggaacacttccccgagttcgagaacgacgtggagttcaccgagagactcgtcgctgagcagagtgtgcattgcctgccggctacttgcttcgagtacccgaattttatccgcgttgtgattacagtgcctgaggttatgatgctcgaagcgtgcagccgaatccaggaattttgcgaacagcattaccactgcgcggaaggcagccaggaggaatgcgataaa

SEQ ID NO: 7545 - DNA, 1362 bp, Artificial Sequence
  derived and/or modified sequence
atggacccctatatgatccagatgtcttcaaaaggaaatctgccttcaatcctcgatgttcacgttaacgtggggggtcgcagctctgtgcccggtaaaatgaaagggcgtaaagcgaggtggtctgttcgaccttccgacatggccaaaaaaaccttcaacccaattcgggctattgtggacaacatgaaggtcaagcctaaccccaataagacaatgatcagtctctcaatcggcgaccccacagttttcggaaacctccctaccgaccccgaggttacgcaagcaatgaaagatgctctggattccggaaagtacaatggctacgcaccatctattggtttcctctcttctagggaggagatcgcatcttactatcattgccctgaagcccccctggaggccaaagacgtgatcctgacttcgggatgttctcaggctatcgacctgtgtcttgcagtgcttgccaatcctgggcagaacatcctcgtccccagaccggggttcagcttgtacaaaaccttagctgaatctatgggcattgaggtgaaactttataaccttttacctgagaagagttgggaaattgacctcaagcagctggagtatcttattgacgagaaaaccgcctgcctgatcgtcaacaacccatcaaatccttgcgggtccgtcttctctaaaaggcaccttcaaaagattcttgccgtcgccgcccgccaatgcgtgcctatcctcgcagatgaaatatacggagacatggtattttccgactgcaagtacgagcctttagccactctttcgactgacgtccccatcctgtcctgcggaggtcttgcaaaacggtggctggtgcccggctggcgcttggggtggatcctgatccacgaccgaagggacatctttggaaatgaaatacgtgatgggctagttaaactgtcacagagaatactgggtccttgtacaatcgtccaaggggcactgaaatccatcctgtgccgtactcccggtgagttttatcataacacccttagcttcttgaagagcaacgccgacttgtgctatggagcgctcgcagctattcccgggctccgtcctgtgaggcccagtggcgccatgtacctgatggtcggcatcgaaatggaacattttcccgaattcgaaaatgatgtcgagtttactgagcgcctggttgccgagcaaagtgtgcattgcctgccagccacctgcttcgaatacccaaattttattagggttgtgatcaccgtcccagaggtgatgatgctagaggcctgcagtaggatccaagagttctgtgagcaacactaccactgtgcagaggggtctcaggaggaatgtgacaaa

SEQ ID NO: 7546 - DNA, 1362 bp, Artificial Sequence
  derived and/or modified sequence
atggacccttacatgatacaaatgtcctcgaaaggaaatctgccgagcatcctcgatgtgcatgtaaacgtgggtggccgcagcagcgtccccggcaagatgaaaggccgcaaggcgcgatggtccgtgagacccagcgatatggctaagaaaaccttcaaccccatcagagccattgttgacaacatgaaggtaaagcccaacccaaataaaactatgatcagcctcagcattggggacccaactgtgttcgggaatctgccaaccgaccccgaggtgacccaagcaatgaaggacgctctagacagtggtaagtacaacggttacgcgccctctatcggatttctgagcagtcgggaggagattgcaagttactaccactgccccgaagcacctcttgaggccaaggacgttattcttacctcaggatgtagccaagccatcgacctttgcttggccgttctcgcaaatcctggtcagaatatacttgtgcccaggccagggtttagcctgtataaaacactggctgagagtatgggcatcgaagtgaagctgtataatttgcttccagaaaagtcgtgggaaattgacttgaagcagctggaataccttattgatgagaaaactgcatgcctaattgtaaataatccgagtaatccgtgtggaagtgtgttctcaaaacggcacctgcagaaaatcctggccgtggcggcccggcagtgtgttccgatcctggctgacgagatctatggagacatggtgttttccgattgcaagtacgaacccctcgccactctgtcaactgatgtaccgattctgtcatgcggaggactcgctaaaaggtggctcgtgcccgggtggcgcctaggatggatacttatccatgatagaagagacatattcgggaacgagattagggatgggctcgtgaaattgtctcagaggatcctgggcccttgcaccatcgtgcaaggggcactcaaatcgatcctgtgccgcactccaggggaattttaccataacaccctgagttttctgaagtcaaatgcggatctatgctacggtgctctggccgcaatccccggtcttcgccccgtgcgtccttccggcgctatgtatttaatggtgggcatcgagatggaacacttccccgaattcgagaacgatgttgaatttactgaacgactggtggcagagcagtcggtgcactgccttcccgctacctgcttcgagtacccaaacttcattcgcgtggtgatcactgtgccggaagtgatgatgctagaggcctgtagccggatccaggaattttgtgaacagcactatcactgtgcagaaggcagccaagaggagtgtgacaag

SEQ ID NO: 7547 - DNA, 1362 bp, Artificial Sequence
  derived and/or modified sequence
atggacccctacatgatacaaatgagtagcaaggggaatctccccagtatcttggatgtgcacgtaaatgttgggggtaggagttccgtacccgggaaaatgaaaggccggaaagctagatggagcgtgcgtccctcagacatggccaaaaagacctttaaccccattcgggcaattgttgacaatatgaaggtcaaacccaacccaaacaaaaccatgatctctctgtccattggagatcctaccgtattcggcaaccttcctacggatcccgaggtgacccaagccatgaaagatgctttagacagtggtaagtataacgggtatgctccttccatcggctttctgagttcacgggaggagatcgcttcgtactatcattgcccagaggcacctctggaagccaaagacgtgatcttgacctccggatgctcccaggccatcgacttgtgccttgccgtgctggcaaatccagggcaaaatatactggtgccccggcctggcttcagcctttacaaaaccctggccgaaagcatgggcatagaagtgaagctctacaaccttctgccagaaaagtcttgggaaatagatttgaagcagctggagtatctcattgacgagaagacagcttgtttgatagtcaacaatccatctaatccgtgcggatctgtgttctcaaagcggcatctgcagaagatcctggcagtggcagcaaggcagtgcgtgcccattctggctgatgagatttatggggatatggttttctctgattgcaaatatgaacccctcgccacgctgagcacagatgtgcccattctctcatgtgggggactggcgaagcgctggttggtgcccggatggcgtttggggtggatacttatccatgatcggcgagacatcttcggcaatgagatccgtgatgggctcgtcaagctgagccagcggattctaggaccctgcactattgtgcaaggcgctctgaaatcaatcctgtgtcgcactcctggagaattttaccacaacacactctcattcctgaaaagtaatgcggatctgtgctacggggccttagcagccatccccggactccgcccagtccggccaagcggggcaatgtatttgatggttggaatagagatggagcactttcccgaatttgaaaatgacgtcgagtttacggagcggctggtcgccgaacaatctgtgcactgtttgccggccacgtgcttcgaatatcccaattttatcagagtggtgattactgtgcccgaggtgatgatgctggaggcgtgtagccggatccaggagttttgtgaacagcactatcactgtgcagaggggagccaggaagaatgcgacaag

SEQ ID NO: 7548 - DNA, 1362 bp, Artificial Sequence
  derived and/or modified sequence
atggatccttacatgattcaaatgtcttcaaagggaaacctgccatctatcttagacgtgcatgtcaatgtcggaggacggagtagcgtgcctggcaagatgaaaggtaggaaggcacgctggtcggtgaggccatccgacatggcgaagaagactttcaacccaatccgagcgatcgttgataacatgaaagtgaaacctaaccctaacaaaaccatgatctccctatccatcggagaccctactgtgttcgggaatctgcctaccgaccctgaggttacacaggcaatgaaagatgcactagactctggcaaatacaatggctatgctcctagtatcggtttcctgtcttctagagaagaaatcgcaagctactaccactgtccggaggctcccctcgaggcaaaagatgtgatcctgacaagcgggtgcagtcaggcaatcgatctgtgtctggccgtgctggcaaacccagggcagaacatactcgtgccacgcccaggcttcagtctgtataagaccttggcggaatctatgggcatcgaggtgaaattgtataatctgctgcctgagaagagttgggagatcgatctgaaacagttggagtatctcatcgatgagaagacagcatgcctgatagttaataatccatctaacccttgtggcagcgtgttctccaaacggcacctgcagaagatcctggccgtcgcagcgagacagtgcgtacctatcctggccgacgagatttatggcgatatggtgttcagcgattgcaaatatgaacccttagccacactgagtacagacgtgccgatcctgtcatgcggggggctcgcaaagcgttggctggtgcccggttggcgcctggggtggattcttatccacgaccggcgggacatattcggtaatgagataagagacggtctggttaagctcagccagcgcatcctgggtccctgcacaattgtacaaggcgccctcaagtccattctgtgcaggacaccaggagagttctaccacaacactctaagcttcctaaaatcaaatgccgatctttgctacggcgctctagctgcgatacccggactgcgcccagtcagacctagcggcgctatgtatctcatggtcggaatagaaatggagcacttcccagaatttgaaaacgacgtcgaatttacggagagactcgtcgccgagcagtcagtgcattgcctgcctgccacctgtttcgaatacccgaatttcattagggtcgtgattacagtaccagaagtcatgatgctcgaagcctgctcccgcatccaggagttttgcgaacagcactatcattgcgctgaaggttcacaggaggagtgcgacaag

SEQ ID NO: 7549 - DNA, 1362 bp, Artificial Sequence
  derived and/or modified sequence
atggacccatatatgatccaaatgtcaagcaaagggaatcttccgtctattctcgatgtgcacgtaaatgtcgggggcaggtcgagcgtgcctggcaagatgaaaggacgcaaggctagatggtccgtgcggccctcagatatggcgaagaagacctttaatcccatcagggcgattgtggacaatatgaaagtgaaacctaatccaaacaagactatgatttccctctcgattggagatccaaccgtgttcgggaacctgccaactgaccccgaggtaactcaggcaatgaaggacgccctggatagtgggaagtacaatggctacgccccctccattgggtttctttcctccagagaagagatcgcttcctattaccactgccctgaggcccctctggaagctaaggatgtaattctaacatccggctgttcccaggccattgacctgtgcctcgctgtgttagccaaccctggtcagaatatactcgtgcccaggccagggttctccctctacaaaaccctggccgagtctatgggtatagaggtcaagctttacaacttactaccagaaaaatcttgggagattgatctgaagcagctagagtacttgatagatgagaagaccgcctgcttgatcgtaaacaaccccagcaatccctgtggatctgttttcagcaagcgccacctgcagaagattttggctgttgctgcacggcagtgtgtgcctatactggctgatgagatttatggcgatatggtgttcagcgattgcaagtatgagcccttagctactttaagtacggatgtaccgatcctctcatgcggcggcctcgccaagagatggcttgtgcctgggtggcggttgggttggatactcattcatgaccgcagagacatcttcggcaatgaaattcgggacggtttagttaagctctctcagcggatcttgggaccttgtaccatcgtccagggggccctgaagagtatcctgtgccgcacacccggtgagttctatcacaacactctttccttcctcaaatctaatgctgatctttgttacggggctctggccgctattccgggccttcggccagttcgaccgagcggtgccatgtatctaatggtcggaatcgagatggagcactttcctgaatttgaaaacgatgtcgaattcactgagaggctcgtcgccgaacagagtgttcattgtttgcctgcaacctgtttcgagtaccccaacttcatcagggtggtgatcaccgttcccgaagtcatgatgcttgaggcctgctcgcgtattcaggaattctgcgagcagcactaccactgtgccgagggtagtcaggaagagtgcgataag

SEQ ID NO: 7550 - DNA, 1362 bp, Artificial Sequence
  derived and/or modified sequence
atggatccatatatgattcagatgagttccaaggggaatctaccttctatcctggacgttcatgtgaacgtcggcgggagaagtagtgttccaggaaagatgaagggccgcaaagcccggtggtcggtaaggcccagcgatatggctaagaagacattcaacccgattcgtgccattgtcgacaacatgaaggtgaagcccaaccccaacaagacaatgatctccctgtctataggtgatccaaccgtttttggtaacctacccactgatcctgaggtgactcaggccatgaaggacgctctggactcaggaaaatacaacggatacgccccctctatcgggtttctgtcgagtagggaggaaatagcctcatactatcactgtcccgaagcccccctggaagccaaagacgtgatcctcacttctgggtgcagtcaggcaattgacctgtgcctggcagtgctggccaatcccggacagaacatcctggtgcctcgtccagggttcagcctttataagacacttgccgaaagtatgggaatagaagttaagctctacaacttgctgcctgagaaaagctgggagatcgacctgaaacagctcgagtaccttatcgacgagaagactgcctgccttatcgttaacaacccatctaacccatgcgggtctgtgttcagcaagagacacctccagaagatcctcgccgttgctgctcgccagtgtgttcctatcctcgccgatgagatctacggggacatggtttttagcgactgtaagtatgagcccctcgccactttatccacagatgtcccaatactgagctgcggcggattggctaagcggtggctggtccctggatggcgactcgggtggatcctgattcatgaccgcagggatatattcggtaacgagattagggacggtctggtcaaattgtcacagcggatccttgggccctgtacgatcgttcagggggctcttaaatccatactctgcagaacacctggagagttctatcataacaccttatcgttcctcaagtcaaatgccgacctatgctatggtgcgctggcagccatcccgggactcaggccggttcggccctctggagcaatgtatctcatggtcgggatcgagatggagcatttcccagagtttgaaaatgacgtggaatttaccgagcggctggtggccgagcagtcagtccactgcttgcctgccacttgttttgagtaccctaatttcatcagagtggtgatcactgtacctgaggtgatgatgctcgaagcctgctcccgcattcaggaattctgtgagcagcactatcactgtgccgagggtagccaagaagaatgcgataaa

SEQ ID NO: 7551 - DNA, 1362 bp, Artificial Sequence
  derived and/or modified sequence
atggacccctacatgatacagatgagctccaaaggaaatctgccatcaatcctggatgtgcacgtgaacgtaggcggacggtccagcgtgccagggaaaatgaaaggcaggaaggcaaggtggagcgtccgcccgtccgatatggctaagaaaacgtttaacccaataagagctattgtggataacatgaaagtcaagcccaatccaaacaagacaatgatatccctgtccatcggggaccccactgttttcggcaacctacctactgaccctgaagtgacacaggctatgaaagacgcccttgactcaggcaagtataacggttacgcccctagtatcggcttcctctcgagtcgagaggagatcgcttcctattaccactgcccagaagcccctctggaggctaaggatgtgattttaacgtccggctgctcgcaggcaattgacctgtgcctcgcagtgttggcgaacccgggacagaacattctggtaccaaggcctggcttttcattatacaagactctcgccgaatcaatgggaatagaagtgaagctgtacaacctccttcccgagaagtcctgggagatcgacctgaaacagctggagtacctgatcgatgagaagacggcttgccttattgttaataacccctccaacccctgtggttctgtgttctccaagcgacatctgcagaagatcctggccgtggcggccaggcagtgtgtgccaatccttgctgacgagatctacggggacatggtgttctccgactgcaagtacgagcccctggcgaccctttccacggacgtccccattctttcctgtggcggcctcgccaaaagatggctcgtacccggctggcggctgggatggattctcatacacgatcgaagagacattttcggaaatgaaatcagagacggcttagtgaaactcagtcagcgtatcctcggtccctgcacgatcgttcagggtgctctcaagagcatactgtgccgcacacccggtgaattctaccacaatacactatccttcttgaaaagcaacgcagatctgtgctacggagccctagccgccattcccggccttcgacctgtgagacctagcggcgccatgtatcttatggtcggaatagagatggagcatttccccgaatttgaaaatgacgtcgagtttacagagcggctcgtggctgagcagtcagtgcactgcctgccggcgacatgctttgagtatcccaatttcatcagagtcgtgattaccgtacctgaggtcatgatgctggaagcttgttcgcgcattcaagagttttgtgaacagcactatcactgtgccgaaggatcccaggaagaatgtgacaaa

SEQ ID NO: 7552 - DNA, 1362 bp, Artificial Sequence
  derived and/or modified sequence
atggatccctacatgattcagatgagcagtaagggaaatcttccctctatcctggatgtgcatgtcaacgtgggcgggcggtcctctgtccccggaaagatgaagggtcgcaaggctaggtggagcgtgcgcccatctgatatggccaaaaagacgttcaatcctattagagcaatcgtggataacatgaaagttaaaccaaatccaaataagacaatgatctccttatcgattggagatccgacggtttttggcaacctgcccaccgatcctgaggtcacccaggcgatgaaagacgctttggacagcggaaagtataacggatacgcgccctctatcggattcctaagcagtcgggaggagatagcctcctactatcactgccctgaagcgccactcgaggcaaaggacgtgatcttgacatctggatgctcccaggcgattgacctgtgcctcgccgtattagccaatcccggacagaacatcctggtgccacggcctggtttctctctgtataagactcttgcagaaagtatggggatagaggtaaaactctacaaccttttacccgagaaatcatgggaaattgatctcaagcagcttgagtacttgatagacgagaagacggcatgcctgatagtgaacaatccttctaacccctgcgggtcggtgttcagtaaacgccaccttcaaaaaattctggccgtggcagctaggcagtgtgtgcctatattggctgacgaaatctatggggacatggttttctctgactgcaaatatgaacctctagctacactgagcacagacgtccctattttaagttgtggcggcctggccaagcgctggctagttcctggatggcgcctaggctggatcctcatacacgataggagggatatttttggcaacgagattcgggacggtctggtgaagctttcccagcgtatcctgggcccttgtacaatagtgcagggagccttgaaaagcattctgtgtaggaccccaggagagttttatcataatacactgagcttcctcaagtccaacgcagatctctgttacggagcacttgcggccatcccaggactccgaccagttaggccaagtggcgcaatgtaccttatggtaggcatcgaaatggagcattttcccgagttcgagaatgatgtggaatttaccgagcggctcgttgccgagcaaagcgtgcactgtttgccagcaacatgctttgagtacccaaattttatccgcgtggtcattacagtgcctgaagtgatgatgctcgaggcttgttctagaatccaggaattttgcgagcagcactaccattgtgccgagggttcccaggaagaatgtgacaag

SEQ ID NO: 7553 - DNA, 1362 bp, Artificial Sequence
  derived and/or modified sequence
atggacccctatatgatccagatgtcttcgaaggggaatttaccgtctatcttggacgtgcacgttaatgttggtgggaggtcgtccgtgccagggaagatgaaaggtcgcaaagccaggtggtccgtgcgcccttctgatatggcgaagaaaacctttaaccctataagggcgatcgtcgataatatgaaggtaaagcccaatcccaataagactatgatcagcctgagtatcggagacccgactgttttcgggaacttacctaccgatcccgaggtgactcaggccatgaaggatgcgctcgacagcgggaagtacaatgggtacgcccccagtattggcttccttagtagccgtgaggagatagcgagctactatcattgtcctgaagcccccttggaagccaaggatgtcattctgacgagtgggtgttctcaggctatagacctgtgccttgcggtccttgccaaccccgggcaaaatattcttgtgcctcgcccaggtttctccctgtataagacacttgcagaatccatgggcattgaggttaagctgtacaatctgttgcctgaaaaatcttgggagatcgatctgaaacagctggaatatcttattgacgaaaagacggcatgcctcatcgtgaataatccatccaacccttgtggcagtgtgtttagtaagcgtcacctgcagaagattctcgcagtggcagctcgccaatgcgtgcccattctggccgacgaaatctatggtgatatggttttttccgattgtaaatatgagccacttgcgacactttccacagatgtgcccatcctatcctgcggcggacttgccaagcggtggctggtacccggatggcgtctgggctggattttgattcatgacaggcgggacatattcggcaatgagatacgtgacggcctcgtgaagctttctcagagaatcctgggtccctgtacaattgtgcaaggggcccttaagagtatcctttgccggacgcccggtgagttttaccataacaccttatcttttttaaaatccaacgctgacctatgctacggcgcattggccgcaatcccaggcttgcgccctgttaggccatccggggcaatgtacttaatggtcggtatcgagatggagcatttccccgagttcgagaatgacgtggagtttacagaacgtctggtagcagagcagagtgtccattgtcttccggctacttgcttcgaatacccgaatttcatccgagttgtcataacagtgccagaggtcatgatgctggaggcctgcagtcggattcaggaattctgtgagcagcattaccactgtgcagaaggcagtcaggaagaatgcgacaaa

SEQ ID NO: 7554 - DNA, 1362 bp, Artificial Sequence
  derived and/or modified sequence
atggatccttatatgatccagatgtctagtaaagggaacttaccaagcatactggatgtccacgttaacgtagggggccggtctagcgtgcccgggaagatgaaaggcagaaaggcccgctggtctgtgcggccaagtgacatggccaagaagacattcaacccaatcagggccatcgtggataatatgaaagtcaagcctaaccctaacaagactatgatatctctctctatcggggaccctaccgtgttcggcaacctacctaccgatcctgaagtgactcaggcaatgaaggacgccctggacagcggtaagtacaatggctatgcaccctcaattggattcctatctagtagagaggagatagcatcctactaccactgccctgaagccccactagaggctaaggacgtgatcctcacttctggctgttcccaggctattgacctgtgcttagccgtccttgccaaccccggacagaacatactggttcccagacctggattctctctttacaagaccctggctgagtctatggggatagaggtgaagttgtacaatctgctgcctgagaagtcatgggaaatagatttaaagcaactagagtacctaattgatgagaaaaccgcatgtctgattgtgaacaatccttcaaacccttgtggctccgtcttttctaaacggcacctccagaagatcctcgccgttgcagctcggcagtgcgtgccaattctggcagacgagatttacggtgatatggtgttttctgactgcaagtatgaacctcttgctaccctgagcacagatgtccccattctgtcctgtggcgggctcgcaaagaggtggcttgtgcctggttggcgactgggctggatcctcatccacgacaggcgggatatctttggaaacgagattcgggatgggttagtgaagctctcccaaagaatcctaggcccatgcactatagttcagggcgccctgaaaagtattttatgtcgcactcctggcgagttctatcacaatactctaagtttcctgaagagcaatgctgatctctgctacggagccttggctgccattccagggctcagacccgtccgcccttctggagctatgtatctgatggtcgggatcgaaatggaacactttcccgagtttgagaacgacgtggagtttacagaaaggctggtggccgagcagagtgttcattgcttgcctgctacctgcttcgaatatccaaatttcatacgtgtggtcattacagtgccagaggtgatgatgctggaagcatgctctcgcattcaagagttctgtgaacagcactaccactgcgctgaagggtctcaagaggaatgtgacaag

SEQ ID NO: 7555 - DNA, 1362 bp, Artificial Sequence
  derived and/or modified sequence
atggatccatacatgatccagatgtcttctaagggcaaccttccctccatcctcgacgtgcatgttaatgtgggaggccggagctcagtcccagggaaaatgaagggccgcaaggcccggtggtctgtcagacctagcgatatggctaaaaagaccttcaatccgatacgcgccattgtcgacaatatgaaggtgaagcccaacccaaacaaaactatgatcagtctgagcatcggcgacccaaccgtgttcggcaacttgccaacggatcctgaagtgacccaagccatgaaagacgctctggactctgggaaatacaacgggtacgctccatcaatcggcttcctttcatcccgagaggaaatagccagttactatcactgccccgaggcacccctggaggcaaaggatgtcatcctcacatctgggtgtagccaggctattgatctctgcttggccgttttggccaacccggggcagaacattctggtgccacgtcccgggttttcactatacaagaccttggccgagagcatggggattgaggttaaactctataacctgctccctgagaagtcttgggagattgatttgaaacagctggagtacctgatagatgagaaaactgcttgcctcatcgtgaacaatccatccaacccttgtggcagtgtgttttcaaaacggcatcttcaaaagatcctggccgtcgccgcccggcaatgcgtgcctatcctggctgacgagatatatggagatatggtgttcagcgactgcaagtacgagcccctagccaccctttccaccgatgtgccaattctcagttgcggaggtctcgccaagcggtggctggtgcccgggtggcggctgggctggattctgatacatgatagacgggacatcttcgggaacgagattcgcgacggcctggtcaaactgtcccagcgaatccttgggccatgcactatcgtacagggagccctcaaatccatactgtgtaggacccctggcgagttctaccataataccctgtccttccttaaatccaacgccgacttgtgctatggagccttggccgcaatacctggcctcaggccagttcgacccagtggcgctatgtatctcatggtgggcatcgagatggagcatttcccggagtttgaaaatgatgtggaattcacagagaggctcgtggccgagcagtctgtgcattgcctacccgcgacttgctttgagtatcctaactttatcagagtcgtgataaccgtgcccgaggtaatgatgctggaggcttgttctagaattcaggaattctgcgaacagcactatcattgtgccgagggcagtcaagaagaatgcgataag

SEQ ID NO: 7556 - DNA, 1362 bp, Artificial Sequence
  derived and/or modified sequence
atggacccgtacatgatccaaatgagctcgaagggcaatctcccaagtatcttggatgttcatgtgaacgtaggcggcagatcctccgtgccgggcaaaatgaaggggcggaaggcacggtggagtgtgcgcccgagcgacatggcaaagaaaactttcaatccaatcagagccatcgtggataacatgaaggtgaaacctaacccaaataaaacaatgattagtttaagtatcggggatcctacagtcttcgggaatctgccgaccgatcctgaagtgacccaagccatgaaagatgcactcgactcaggcaaatacaatggctatgccccctcaataggttttctcagcagcagggaggagatcgccagctattaccattgcccggaggctcctctggaagccaaagacgtgattctgacatctggctgttcacaagcaatcgacctgtgcttggcggttctggcaaacccaggccagaacattttggtgcccaggccgggcttttcactctataagacattggccgagagtatgggtatcgaggtcaaactttacaatctgcttcctgaaaaaagttgggagatcgacctcaagcagctcgagtacctgattgacgaaaaaactgcctgccttattgttaataacccatccaatccatgcggctcagtgttctcgaagagacacctccaaaagattttagcggttgcagctcgccagtgcgtaccaatcttagcagacgaaatctatggcgacatggtgttttccgactgtaagtatgagccactagcaacccttagtactgatgtgccaattctgagctgtggtggattggctaagcgctggctcgtgcctggttggcgtctggggtggatcctcatccacgacaggcgtgatattttcggaaatgagattcgcgatggcctggtgaaactgagtcagaggatcctcggcccttgtaccatagtgcagggagctctgaagtcgatactctgtagaacaccaggcgagttctaccataatacgctatcatttttgaaaagcaatgcagatctgtgttatggtgcgttggcggcgattcccggtctaagacccgtccggccatccggggccatgtatctcatggtggggattgagatggagcatttccctgaattcgaaaatgacgtcgagtttacagagcggctcgtggctgaacaatccgttcattgtttacccgcgacctgttttgagtatcccaattttatccgagtagtgattactgtgcctgaagttatgatgctggaagcttgcagtcggatacaggagttctgcgagcagcactatcactgtgcagagggttcacaggaagaatgcgataag

SEQ ID NO: 7557 - DNA, 1362 bp, Artificial Sequence
  derived and/or modified sequence
atggatccttatatgatccagatgtcctccaaaggaaatttgccttccatactcgatgtgcatgtgaacgtgggggggaggtctagtgtgcccgggaaaatgaagggacgaaaagccaggtggagtgtgagaccttctgacatggctaaaaaaacattcaatcccatacgcgcaattgtcgataacatgaaagtgaaacctaaccctaataaaactatgatttcactctcaataggggatccgactgtattcggaaaccttcccacagatccagaagtaacacaggctatgaaagatgccctggattcagggaaatataatggatatgcgccctctataggattcctcagttcacgcgaggagatcgccagttactatcattgtcctgaggctccactggaagccaaagatgtgatactcacatccggatgttctcaggccattgatctgtgcctagccgtccttgccaacccagggcagaatatactggtccctcgcccaggattctccctctataaaacactggccgaatctatgggaatcgaagtcaaactctacaacctgttacctgagaaatcttgggaaatcgatctaaaacagctggaatacttgatcgatgaaaaaacagcctgccttatagtgaataacccctcaaatccatgtgggtctgttttctcaaagagacacctgcagaaaatactcgctgtggctgctaggcagtgtgtccctatattggctgacgaaatatacggggatatggtgttttccgattgtaaatatgaacccctcgcaacgctctctacagatgtccctattttatcctgtgggggattagccaaacggtggcttgtgcccggatggaggcttggatggatcttaatacatgatcggcgggatatctttggaaacgaaattcgagatgggctcgtgaaactgtcacagcggattctcggaccatgcacaatcgtgcaaggggccctcaagagtatcctttgtaggacaccaggagaattctatcacaacactttgtcctttctaaaatctaacgctgatctttgctatggagcactcgctgccatacctgggttacggccagtgaggccaagtggagctatgtatctcatggttgggatcgaaatggaacactttcccgaatttgaaaatgacgtggaattcactgaacgattagtagccgaacagtcagtgcattgtttacccgcaacttgctttgaataccctaactttattagggtggtgatcactgtccctgaagtaatgatgctcgaagcatgctctaggatacaggagttttgtgagcagcactatcattgtgctgaagggtcacaggaggaatgtgataaa

SEQ ID NO: 7558 - DNA, 1362 bp, Artificial Sequence
  derived and/or modified sequence
atggatccatacatgattcagatgagctcaaagggcaacttaccatcaattctcgacgttcacgtaaatgtgggcggtcgaagttccgtgcccggaaaaatgaaagggaggaaagcgcgctggtccgttcgcccctcagacatggctaaaaagactttcaaccccatacgcgcaattgtagataacatgaaggtgaagcctaatccaaacaagactatgatctccttgtcaataggcgatcctactgtgtttgggaatctgcctaccgatccagaggtaactcaagccatgaaggatgcccttgactccggaaaatacaacggctacgcacctagcattggattcttgtcgtcccgggaggaaattgccagctactaccattgccccgaagcaccactggaggccaaagacgtgattctcacctctggatgttcccaggccatcgatctgtgtctcgccgtgctggctaatcctggccagaacatcctggtgccgcgcccggggtttagtctctataaaacacttgcggaaagcatgggaattgaggtcaagctctacaatctcctccctgagaagtcctgggagattgacttgaaacagttggagtacttgattgatgaaaagaccgcgtgcttgatcgtgaacaacccaagcaatccttgtggcagcgtattttcaaaaaggcacctccagaaaattctggcggtcgcagctcgacagtgcgtgccaatcttagcagacgagatctacggcgacatggtgtttagcgattgtaaatatgagcctctggcgaccctgagtaccgacgttccgattctgtcctgcggcggcctggccaagcgctggctggtccctgggtggagacttggctggatcctgattcacgaccgcagggatattttcgggaacgagatccgtgatggtcttgtgaaactatctcagcggatcttgggcccctgcacaattgtacagggcgcactaaagagcatcctctgccggaccccaggtgagttttatcacaataccctgtccttccttaaatcgaacgctgatctgtgttacggcgcccttgccgccattcccggactgaggcccgttcggccctccggcgccatgtatctcatggtcggaatcgagatggaacacttcccagagttcgaaaacgacgtggaatttaccgaaaggctggtcgccgagcagtccgtgcactgcctgcctgcgacttgcttcgaatatcctaactttatacgagttgtgatcaccgtgccagaggtgatgatgttagaggcctgctcaaggattcaggagttttgcgaacagcattatcattgcgcagagggcagtcaggaggaatgtgacaaa

SEQ ID NO: 7559 - DNA, 1362 bp, Artificial Sequence
  derived and/or modified sequence
atggatccgtatatgattcagatgtcgtccaaggggaatcttcctagcattctggatgtgcatgttaatgtcggcggacgatccagcgtgccgggcaagatgaaggggcgtaaggcccggtggtccgtccgacctagtgacatggccaagaagacattcaatcccatccgagcgattgttgataacatgaaggttaagccaaacccgaacaagacgatgattagcctcagcataggggatccaaccgtcttcgggaacctccccacagaccccgaggtcacacaagctatgaaagatgcacttgactccgggaagtacaatgggtatgctccgtcgatcggcttcctcagttctcgcgaggagattgctagttactatcattgcccagaagcgcctctcgaagccaaggatgttatcttgacctctggatgcagtcaagctattgatctttgcttggcagtcctcgccaacccaggtcaaaatattctcgtcccacgtcctggttttagcctctacaagaccctagcggaatcaatgggaatagaggtgaagctttataatttgctccccgaaaagtcctgggagatcgaccttaaacagttggagtatcttatagacgagaaaaccgcatgtctaattgtgaacaacccgtctaacccgtgcgggtcagttttctcgaagcgccatctgcagaagatcctggctgtcgctgctagacagtgtgtgcccatcttagccgacgagatatatggtgacatggtcttctctgactgcaaatacgaaccactcgctaccctttccacagacgtccccattttgtcttgtggtggtcttgccaagcgttggcttgtccccggttggcgtcttggttggatcctcatccatgaccgcagggatatattcggtaacgagattcgtgatggcctcgtaaagctctctcagcgtatcctcggcccgtgcacaatagttcaaggagctctaaagtctatcctgtgtaggaccccaggagaattctaccacaacacattgtctttcctgaagtccaatgctgatttatgctatggggctctcgccgcgatccctggactcaggcccgtcaggcctagcggtgctatgtatctaatggttggtattgaaatggagcattttccggagttcgagaatgatgttgaattcacggaacgtctcgtggccgagcagtccgtgcattgcctccccgctacttgctttgaatatccgaactttatccgtgttgttatcacagtcccagaggtcatgatgctggaggcgtgctcaagaatccaggagttttgtgagcagcactaccactgtgcggagggttctcaagaggagtgtgacaag

SEQ ID NO: 7560 - DNA, 1362 bp, Artificial Sequence
  derived and/or modified sequence
atggatccctatatgatccaaatgtcttctaaggggaatctcccatcaatcttggacgttcacgtgaatgttggtgggcgctccagcgtccccggaaagatgaaaggacgtaaggccagatggagcgtgcgtcccagtgatatggcaaagaaaacatttaaccctattagagcaatcgtggataatatgaaagtgaagccaaatcctaacaaaaccatgatatccttatcaatcggcgaccccacggtgttcggcaatctccctaccgatcccgaagtcacgcaagctatgaaggatgcccttgactctggtaaatacaacggatacgctcctagtattggcttcctttcatctcgtgaggaaatcgcgagttactatcattgcccagaggctcctctggaagccaaagacgtgatcctgacgtctggttgcagtcaagctattgatctgtgcctggccgtactggccaaccccggccagaatatcctggtaccccgacctggcttttccctgtataagacattagccgagtctatgggaatcgaagtgaaattgtacaaccttctgcctgaaaagagttgggaaatcgaccttaagcagttagagtatctgatcgatgagaaaactgcatgtcttatcgtcaataatccatctaacccgtgcgggtcagttttctccaagcgccatctccagaagattctggcagtggctgccaggcagtgcgtgcctattctggctgatgaaatttatggagatatggttttttcagattgcaaatatgaaccccttgccacactgagtaccgacgtccccattctgtcgtgcggaggcttagcaaagaggtggctggtcccaggttggcgtctagggtggatcctgattcacgatcggcgtgacatcttcgggaatgaaataagggatgggctcgtcaagcttagtcagcggatcttggggccttgcaccatcgtgcagggggccctgaaaagtattctctgcaggacgccaggcgagttctaccacaatacgctctctttcctcaagagcaatgccgacctgtgctacggcgccttggcagccatccctggcctcagacccgtacggccctctggggcaatgtatctgatggtgggcatcgagatggagcatttcccggagtttgaaaatgacgtggagttcactgaacggctggttgctgagcagagcgtgcattgcttgccagcaacatgcttcgaatacccgaactttatcagggtagtgatcacagtgccagaggtcatgatgctggaggcgtgctcccgaattcaggagttttgtgagcagcactatcactgtgccgaggggtcccaagaggagtgtgataaa

SEQ ID NO: 7561 - DNA, 1362 bp, Artificial Sequence
  derived and/or modified sequence
atggatccttatatgatccagatgagtagtaaagggaacctgccgtctatactggatgttcatgttaatgttggcgggagatcaagtgtcccaggcaaaatgaagggccgaaaagcaaggtggtcagttcgaccctccgacatggccaagaagacttttaaccctataagagccattgtcgacaacatgaaggtgaagccaaaccctaacaagaccatgatctctctgtctatcggtgaccctacagtctttgggaacctacccactgacccggaagtgacgcaggctatgaaggatgccctggactctgggaagtacaatggctacgctcccagtataggtttcctgtcgtccagggaagaaatcgcctcttattaccactgtcccgaagcccctctggaggcaaaagacgtgatcctgacttctggctgttcccaggccattgatctgtgtctggccgtcctggccaaccctggacagaatatccttgtgcctagacccggattctccttgtacaaaacattagccgagtccatggggatcgaagttaaactttataacctcctgcccgagaagagctgggaaattgatctcaagcagctggagtatcttatagacgagaagaccgcgtgccttatcgttaacaatccctcaaacccttgtggatcggtattctctaaacgccatttgcagaaaattctggctgtggccgctcgccagtgcgtgcccattctagcagacgagatttatggcgatatggttttctccgactgtaagtacgaacccctcgctacattgtcgactgacgtgcccatactgtcctgtggcgggttagctaaaaggtggctggtgcccgggtggaggctgggatggatacttatccacgataggcgcgatatttttggcaatgagattcgagacgggctcgtaaagttgtcccagaggatcctcggtccatgcaccatcgtccagggtgccctcaagagtatactctgtagaactcccggcgaattctaccacaacaccctctcgtttctcaaaagcaacgcggacctttgttatggggccttagcagctatccctggcctgagaccagttagacctagcggagctatgtatttgatggtgggcatcgagatggagcacttccccgaattcgaaaacgacgtggagtttacggaaagacttgtggccgagcagtctgtccactgtctccccgccacttgctttgagtatcctaatttcatcagagtcgttattacggtcccagaggtgatgatgctggaagcctgtagcaggattcaagaattttgcgagcagcattaccattgcgccgaaggaagccaggaagagtgcgataag

SEQ ID NO: 7562 - DNA, 1362 bp, Artificial Sequence
  derived and/or modified sequence
atggacccctatatgatccaaatgtctagcaaaggcaatctgccgtcaatccttgacgtgcatgtcaatgttgggggtcgttcctcagtcccgggtaagatgaaggggagaaaggctcgttggtctgtgcggccgagcgacatggcgaaaaaaactttcaatccgattcgagcaattgtggacaatatgaaagttaagccaaatcctaataaaacaatgatttccctaagtattggcgatccgacagtatttggtaatctgccgacggatcctgaagtcacgcaagcgatgaaagatgcattggactcgggaaaatacaatggatatgccccgtctataggttttttatcttctcgtgaggaaatcgcctcatattatcactgcccggaagctcctcttgaggcgaaggatgtcatacttactagcggttgttctcaagcaatagacctgtgcttggcggtcttagccaacccggggcagaacattttagtcccgcgccctggtttttctttatataaaactcttgcggaatccatgggaattgaagtaaaactatacaatttattgcctgagaaaagctgggaaatcgatcttaaacaattggaatatctgattgacgagaagactgcttgcctcattgtaaacaaccctagtaatccgtgcggctcggtgttttctaagagacacttacaaaaaattttagctgtcgcagctagacaatgcgtgcctatcctggctgacgagatctatggagatatggtgttttccgattgcaaatatgaacctttggcgactctctcaacggatgtgccaattctaagctgtggaggccttgctaaacgatggctcgttccgggctggcgcctgggctggattctcattcatgatagaagagatattttcgggaacgaaatccgagatggcttggtgaagctttcacaaagaattcttggcccgtgtaccatagtacagggagcgctgaaatctatcctatgtcgcacgcctggagaattttaccataatacattatcctttctgaaaagcaatgcagatctttgctatggagctttagcagcaatccctggtttacgccctgttagaccctccggggcgatgtacttgatggtgggaattgagatggaacactttcccgaatttgagaatgatgttgaattcacggaacgcttagtggcggagcagtcagtgcattgcttaccggctacatgctttgagtatcctaattttatacgtgtcgttatcacggttccggaagtcatgatgttagaggcatgctcgcgtatccaagagttttgtgagcagcattatcattgtgcagagggctcacaggaagagtgcgacaag

SEQ ID NO: 7563 - DNA, 1362 bp, Artificial Sequence
  derived and/or modified sequence
atggatccatatatgatccagatgtcctccaaggggaaccttcccagcatcctggatgtgcacgtaaatgtgggagggaggtctagcgtccccggcaagatgaagggccgtaaggcacggtggtctgtgagaccttccgacatggcgaagaaaacgttcaaccctatccgagccatcgttgataatatgaaagtaaagcctaatcctaacaagacaatgatttctctctccatcggagatccaacagtattcggaaatctgcctacggaccctgaagttactcaggcaatgaaggacgcactggattcaggcaagtataacgggtatgccccctctatcggattccttagctctcgcgaagaaatcgcctcctattaccattgtcctgaggcacccctggaggcaaaagatgtaatacttacatctggatgttcgcaggctatcgatttgtgcttggccgtccttgccaaccccggtcaaaatatcctggtgccccgtccagggttttcactgtataagactttggccgagagtatgggcatcgaggtgaaactgtacaatcttctgccggaaaaatcgtgggaaattgatttgaaacagctggagtacctcattgacgaaaagacagcgtgtctgatagtcaacaatcccagcaacccctgtgggtctgtgttttctaaaaggcacctgcagaagattcttgccgttgccgcccgtcaatgcgtccccatcctggccgacgagatttacggggacatggttttttctgactgcaaatatgaacctttagctacactcagcaccgatgtgccgattctatcctgtggcggcttagccaagcgctggctggtccctggctggcggctcggatggattctgatccatgacagacgggatatattcgggaatgaaataagagatggcctcgttaagctgagccagcgcatcctgggcccatgtaccatcgtgcagggcgccctgaaatcaattctgtgtaggacacctggggagttctatcacaacaccctgagtttcctgaagtctaatgcagacctgtgctacggcgctctggcggcaattccaggactgagacccgtgcggcccagcggtgccatgtaccttatggtcggcattgaaatggagcactttcccgagttcgagaatgacgtggaattcaccgaaagactggtggccgaacaatccgtgcactgcttgcccgctacatgttttgaatatcctaattttattagagtggtcattacagtgcccgaggtgatgatgctggaagcttgttccaggatccaagagttttgcgaacaacactatcactgtgccgaaggctcccaggaagaatgcgacaaa

SEQ ID NO: 7564 - DNA, 1362 bp, Artificial Sequence
  derived and/or modified sequence
atggatccatatatgatccaaatgtccagcaagggcaatctgccctccatcctggacgtacacgttaacgtcggcggccgttcttcggtgccggggaaaatgaagggacggaaggccaggtggtccgtgcgcccttctgatatggccaagaagacttttaatcctattcgtgccatcgtggataatatgaaggtgaagcctaatccaaataagactatgatttccctatcaattggcgaccccaccgtcttcggtaacctgcctacagatcccgaagtgacccaggcgatgaaggacgccctcgatagcggcaagtacaacggctacgctcccagtattggctttctgagttcgagagaagagattgcttcttactaccattgcccggaggctcctcttgaggcaaaagacgtgatccttacctctgggtgctcacaggctattgacttgtgtctggctgtgctggccaatccagggcaaaacattttagtgccccgacccgggttttccctttataaaactctagctgaatcaatgggcattgaagtgaagctttataacctgctgcccgagaagagctgggagattgacctgaagcagttggagtacctgatagatgaaaaaacggcttgcctcatcgtcaacaatccctccaacccatgcgggtccgtcttcagcaaaagacacttacaaaagatcctggctgtggctgcgcgtcaatgcgtccctatccttgcagacgagatctacggcgatatggtttttagtgactgcaagtatgaaccactcgctaccctgtccacagatgtacccatcctcagctgcggagggctggcgaaaagatggttggttcctggatggaggcttggctggatcctcatccatgacagacgcgatattttcggtaacgaaatcagggacgggctcgtcaagctttctcagagaattctgggcccttgtaccatagtgcaaggggctttgaaaagtattttatgcaggacacccggcgaattctaccacaacactctgtcgtttttaaaatcgaacgcggatctttgttatggcgccctcgccgctatccccggccttcgcccagtgaggccatcaggagccatgtacctaatggtaggtattgaaatggagcacttcccagagttcgagaatgatgtggagttcaccgaaaggctggtggcggaacaaagcgtgcattgcctgcctgcgacatgtttcgaatatcctaatttcatccgggtggtaataacggtgccagaggtaatgatgttagaggcgtgctctcgcatccaggagttctgcgaacagcactatcactgtgcagagggttcccaggaggaatgtgacaaa

SEQ ID NO: 7565 - DNA, 1362 bp, Artificial Sequence
  derived and/or modified sequence
atggatccttatatgattcagatgtcatctaagggcaacttgccaagcatcctggatgtccacgtcaatgtcggtggccgcagcagcgtgcccggcaagatgaagggccgcaaggctaggtggtctgtgaggccttctgacatggcaaaaaaaactttcaaccccatcagagcaatcgtagataatatgaaagtgaagcctaatcctaacaagacgatgatctctctgagtattggcgaccccactgtgttcggaaacctgccgactgatcctgaggtcacccaggccatgaaggatgccctcgactccggcaaatataacggatacgcaccctctatcggatttcttagctccagagaggagatagcatcttactaccattgtcctgaggcccctttggaggccaaagacgtcattctgacatccggctgttcccaggcgatcgacctgtgtctcgctgtgctcgctaatcccggtcagaatatcctggtccctagacccggcttcagtctgtataagaccctcgcagagtctatgggcattgaggtaaaactctataacctgctgcctgaaaagagttgggagattgatctcaagcagttggagtacctgatcgacgaaaagaccgcgtgcctcatcgttaataaccccagtaatccatgtggctccgtcttcagcaaaagacacctccagaagatacttgctgtcgctgccagacagtgtgtccctatcctggcggacgagatatacggcgacatggtgttcagcgactgcaagtacgaaccactggccacgctgagtactgatgtacccatcctttcctgcggtggcctcgccaagagatggttggtgcccggctggagactcggctggatcctcattcacgaccgccgcgatatttttggcaatgagatcagagacggccttgttaagctgtcacagaggattctcggtccttgtacaatagttcaaggagccttgaaaagcatactttgccgcacgcctggagagttctaccacaacaccctgtctttcttgaaatctaacgctgacctctgttacggagcactcgccgcaattccaggcctgaggccagtgaggccatctggcgcaatgtacttgatggttggtatcgaaatggagcattttccagagtttgagaacgatgttgaatttaccgaaaggctcgtcgccgaacaatccgtgcactgtctgccagccacttgtttcgaataccctaacttcatccgcgtcgtgatcacggtgccagaggtcatgatgcttgaagcttgctcccgcatccaggagttctgtgaacagcattaccactgtgctgaaggttcccaagaagagtgcgataaa

SEQ ID NO: 7566 - DNA, 1362 bp, Artificial Sequence
  derived and/or modified sequence
atggacccatacatgatccagatgtcctccaaaggaaacctgccaagcatacttgacgtacacgtcaacgtcggaggccggtcctccgtgccaggcaagatgaagggccggaaagcccgttggtccgtgcggccttccgatatggcaaaaaagactttcaatccaattagggcaatcgtggacaatatgaaagtgaaacccaaccccaataagacgatgatttcccttagcataggcgatcccaccgtgtttgggaatctcccgaccgatcctgaagttactcaggccatgaaggatgcactggatagtggaaaatataacggttacgccccctctattggcttcctgtcctcgagagaagagatagcatcttactaccactgccccgaggctcccctggaagccaaggacgtgatcctgacttccggttgttcgcaggccatagatttatgtctcgctgtgctggcaaaccctgggcagaacattctggttccgaggccggggttttccctatataaaacactggcagagtccatggggatagaagtcaaactatacaatctgctacctgagaaatcatgggaaatcgacttgaagcaacttgaatatctgatcgacgaaaagaccgcatgtctgattgtgaacaatccatcaaatccttgtggctcagtcttcagcaagcgccacttacagaaaatcctggccgtggcagcgcgccagtgtgtgcctatattggctgatgaaatctacggtgacatggtcttttcagactgtaaatacgagcccctggccacactctctactgatgtgcctatcctgtcctgcggtgggcttgcgaaacggtggctggtaccgggatggaggctcgggtggatactgattcatgatcggcgggatatcttcggcaatgaaatccgagacgggctggtgaaactctcccagcggatcctgggcccttgtacaatagtgcaaggggctttgaaaagtatcctgtgccggaccccgggagaattttatcacaacactctgagctttcttaagtctaatgccgacttgtgctacggagcgttggcagccatcccggggctccggcctgtgcgcccatcgggggcaatgtacttaatggtggggatcgagatggaacattttccagagttcgagaatgatgtggaatttaccgaaaggctggtggccgaacagagcgtccactgtctgccagccacttgcttcgagtacccaaatttcatccgagttgtaatcaccgttcctgaagttatgatgctcgaggcctgttcgcggatccaagagttttgcgagcaacactaccattgcgccgagggttcccaggaggagtgtgacaag

SEQ ID NO: 7567 - DNA, 1362 bp, Artificial Sequence
  derived and/or modified sequence
atggatccctacatgattcaaatgagttcgaaggggaacctgcccagtatcttggatgtccacgtgaacgtgggcggccgctcgtcagtgccgggaaaaatgaagggaaggaaggctcgttggagcgtgcgcccaagcgatatggcgaagaagactttcaaccccatccgtgccatcgttgacaatatgaaggtcaaacccaacccaaacaagaccatgatttccctgtcaattggggatcccaccgtgtttggtaacttgcctacggatcccgaggtgactcaggcaatgaaggacgccctggacagcggcaagtataatggatatgcacccagcataggatttttgtcctcccgagaggagatcgcgagctactaccactgccccgaggcccccctggaagccaaagacgtgatcttgactagcggctgcagccaggctatcgacttatgcctggcagtgctggccaatccgggccaaaatatcctggtgccaaggcctgggttcagtctctacaagacactggcggaatctatgggcatcgaggtcaaactgtacaacctgctccctgagaagtcctgggaaatagacttgaaacagctcgaatacctgatagatgagaagacagcctgtttgattgttaataaccctagcaatccttgtggcagcgtgttctcaaagcgacacctccagaagattctcgccgtagcggcaaggcaatgcgtgccaattctcgccgatgagatctacggcgatatggtgttttcagattgcaaatacgagcccctagccactttaagtacagatgtgccaatcctgtcatgcgggggactggccaagagatggctggtgccaggctggcgcttgggttggatcctgattcatgaccggagggacatcttcggaaacgaaatcagagatggccttgttaagctgtctcagaggattctgggtccctgtactattgtccagggtgcactgaaaagcattctgtgcagaactccaggagaattctatcacaatacgctgtctttcctgaaatctaacgccgatttatgttacggtgctctagccgccattccaggcctgaggccagtcaggcccagtggcgctatgtatctgatggtgggcatagagatggaacatttccccgaattcgaaaacgatgtggagttcacagaacggcttgtggccgagcagtcagtccactgcctcccagctacctgtttcgagtaccccaattttatccgggtcgtaatcacagtgcccgaggtgatgatgcttgaggcttgctccagaatacaggagttttgcgagcagcactaccattgtgccgaagggagtcaggaagagtgtgataag

SEQ ID NO: 7568 - DNA, 1362 bp, Artificial Sequence
  derived and/or modified sequence
atggacccctatatgatccagatgtcctccaagggaaatctgccatcaatcttagacgttcacgtgaatgttgggggccgcagctctgttccagggaagatgaaggggcggaaggcccggtggagcgtccgcccttcagacatggccaagaaaacattcaaccctatacgagcgatcgttgacaatatgaaggtcaaaccgaaccctaacaaaactatgatcagtctgtcaattggagacccgactgtcttcggcaacctgccaacagatcccgaggtaacacaggccatgaaagacgcgctggattctgggaaatataacggctatgctccgtccattgggttcttgagttctagagaggaaattgcgtcatactatcattgtcccgaagcacccctggaggcaaaggatgttatccttacctcagggtgctcccaggctattgacttgtgtctggctgtgctggccaatccgggacaaaacatcctggtccccaggcccggcttttcactctataagactctggcagagtccatggggatagaggttaaactttataatctgctgcccgaaaagtcttgggaaatcgatctcaaacagcttgagtacttgatcgatgaaaagacagcttgcttaatcgtaaacaatccctctaacccctgtggctcagtcttctccaaacggcatttacagaaaatccttgccgtagcagccaggcaatgtgttcccatcctggcagatgagatatatggagatatggtcttctcagactgcaagtacgaaccactagcaaccctaagcactgacgtaccaatactgtcctgcggcggcctggccaaaagatggttggtgcccgggtggagactgggctggatattgatccatgatcgacgcgacatctttggcaacgaaattagggacggactggtgaagctgtctcagcggatactgggaccctgtacaatagtgcagggcgctttgaaaagtatcctgtgccggacgccaggcgaattttaccataatacgctcagttttctgaagtcgaacgcagatctttgttatggtgctctcgccgctatccctggactgcgccctgtacggccatccggggccatgtacctgatggtgggaatcgagatggagcactttcctgagttcgaaaacgacgtggagttcacagaacgcctggtggcagagcagtctgtgcattgtctgcctgctacctgcttcgaatacccaaacttcatccgggtggtaattactgtcccggaggtcatgatgctagaagcatgctccaggattcaggaattttgcgagcagcactaccattgtgctgagggatcacaggaggagtgcgacaag

SEQ ID NO: 7569 - DNA, 1362 bp, Artificial Sequence
  derived and/or modified sequence
atggatccttatatgattcagatgtccagtaaaggtaaccttcccagcattctcgatgtgcatgtaaacgtgggaggtcgttcaagtgtccctggcaagatgaagggcagaaaagccagatggagtgtgaggccctcagacatggctaagaagaccttcaatcctatcagggccatcgtcgacaacatgaaagtcaaaccgaaccctaacaaaaccatgatctccctatcaatcggggacccgaccgtgtttggcaacctccccaccgacccagaagttacacaggccatgaaagatgcccttgactcgggcaagtacaatggctacgctccttcaatcggcttcctgagtagccgcgaggagatagcctcatactaccattgcccagaggctcccctcgaagccaaggatgtgattcttacctctggctgtagccaagccatcgacctctgcctagccgtactcgctaacccagggcagaatatcttagtgcctcgtccggggttctccctgtataagacactggccgagagtatgggaattgaggttaagttgtacaatctgctccctgaaaagtcgtgggaaatcgacttaaagcaactggaatacttgattgacgaaaagacagcttgcctgatcgtgaacaaccctagcaacccgtgcggctccgtgttcagcaaacgccacctgcagaagatactggctgtagcggcccggcagtgtgttccaatcctggctgacgagatctacggcgatatggtcttctctgattgcaagtacgaaccgctcgcaactctgagtacagacgtgcctatcctgagctgcggagggctggcaaaacggtggttggttcccggctggcggcttggatggatcctgatccacgacagacgggacatttttggtaatgagatccgggatggcctcgtcaaactgtcccagaggattctcggcccctgtactattgtacagggcgccctgaagtctattctgtgtcgcactccaggcgaattttaccataacacactgtcgtttctcaaatctaacgcagacctttgttacggagctttagctgcgatccctggattgcggcctgtaagaccttctggggcaatgtacctgatggtgggaatcgaaatggagcacttccccgaatttgagaacgacgtggagtttacagagcggctcgttgccgaacagtctgtgcactgcctgcccgcaacttgctttgagtatcctaattttattcgagttgtgattactgtgcctgaagtgatgatgctcgaggcatgctccagaatacaggagttttgtgagcagcactaccattgtgccgaaggtagccaggaggagtgcgacaaa

SEQ ID NO: 7570 - DNA, 1362 bp, Artificial Sequence
  derived and/or modified sequence
atggatccgtacatgattcaaatgtcgtcaaaaggaaatttgccgtcgatccttgatgtgcatgttaatgttggaggaaggtcctcggtgccgggaaaaatgaaaggccgaaaagcacgttggagcgtacgtccgagtgatatggcgaaaaaaactttcaatcccatacgggctattgttgataacatgaaagttaagcccaacccaaacaagacaatgatttcacttagtattggagatccaacagtgttcggaaatttgccgacggatccggaagtgactcaggctatgaaagatgctctggattcgggtaagtacaacggttatgcaccttcaataggattcttgtcatcacgcgaagaaattgcttcctattatcattgtcctgaggctccactggaagcgaaagacgtcatactcacttctggatgctcacaagcaatagacctttgtctcgccgtcctcgccaatccaggacagaatattttggtcccaaggccaggattttcgctttacaagacactcgctgaaagtatgggaatcgaggtcaaattgtataatttactcccagaaaagtcatgggaaattgacctaaaacagctggagtatcttattgatgaaaagaccgcttgtcttatagtcaataaccctagcaacccatgtgggtcagtatttagtaaacgtcatctacaaaaaatccttgcggtagctgccagacagtgtgtacccatccttgcagatgaaatttatggtgatatggtgttttctgattgcaagtacgagccactggcaaccctcagcaccgacgtgccaattctttcttgtggtggactagctaaacgatggcttgtgccgggatggcgtcttgggtggatcttgattcacgatagacgagatatttttggcaacgaaatacgagatggactcgttaagctttcacaaagaatcttgggaccttgtactattgtacagggagctttaaagtcaattctttgcagaacccctggagagttttaccataatacattatcattcttaaagtcaaacgccgatttgtgttatggagctctcgcggcaatcccaggcttaaggccggtacgaccgagcggagcgatgtacttgatggtcggtattgagatggaacatttcccagagtttgaaaacgatgtggaatttactgagagacttgtggctgagcagtcagtccactgtcttccagctacgtgttttgaatatccaaatttcatacgagttgttatcacagttcctgaagttatgatgctagaggcatgctcaagaatacaagagttttgcgagcaacactaccattgtgctgagggttcgcaagaagagtgtgataaa

SEQ ID NO: 7571 - DNA, 1362 bp, Artificial Sequence
  derived and/or modified sequence
atggatccctacatgatccaaatgtcatccaaagggaatctcccatcaattttggacgttcacgtaaacgtgggggggcgaagttctgtgcccggaaagatgaagggccgaaaagcgcgctggtcagttcggcccagcgatatggctaagaaaacttttaacccaataagggccatcgtcgacaacatgaaagtcaagccgaatcccaataaaacgatgatctcactgagtataggagatccaaccgtctttggcaacctccccacggacccagaggttactcaggccatgaaagatgcgttggactctgggaaatacaacggctacgctccgagtattggattcctctcttcacgggaagaaatagcatcatactaccactgccccgaggccccactggaggcaaaggacgtcatactgacttccggatgcagtcaggcgatcgacttgtgcctcgccgtgctcgccaacccaggacagaacattctggtacccaggcctggtttttctctgtataagacattagctgaatccatgggcatcgaagtgaaactgtacaatcttctgcctgagaaaagctgggaaatagacctgaaacaactcgaataccttatagacgaaaaaacagcatgcctgatcgtgaataatccatcaaacccctgcggaagtgttttctctaagcgccaccttcagaaaatcttggccgtggcggccagacaatgtgtaccaattctcgccgacgagatctacggagacatggtgttttcagactgtaagtacgaacccctggccactcttagtactgacgtaccgatcttaagctgcggcgggctggcgaaacggtggttggtcccaggatggaggctcgggtggatcctcattcatgatagaagagacatttttggaaacgagattcgggatgggctcgtcaagctctcccaacggatcttgggcccttgcacaatcgtccagggggccctgaagtccattctctgtaggacgccaggtgagttctaccacaatactttgagttttctgaaaagtaacgccgacctatgttatggcgcactggccgccatccctggtctgaggcctgttaggcccagcggcgctatgtatctgatggtgggtatcgagatggagcatttcccggagtttgaaaatgatgtggaattcacagagcgcctggtggccgaacagtctgtccattgtctgccagccacttgttttgaatatcctaatttcataagggtagtcatcacggttcctgaagtcatgatgttggaggcctgcagtcgcattcaagagttctgcgagcagcattaccactgtgcagagggatcccaagaagaatgtgataag

SEQ ID NO: 7572 - DNA, 1362 bp, Artificial Sequence
  derived and/or modified sequence
atggatccgtatatgatacaaatgtcgtcgaaaggtaatctaccgtcgatactagatgtacatgttaatgtaggtggtcgttcgtcggttccgggtaaaatgaaaggtcgtaaagcgcgttggtcggtacgtccgtcggatatggcgaaaaaaacgtttaatccgatacgtgcgatagttgataatatgaaagtaaaaccgaatccgaataaaacgatgatatcgttatcgataggtgatccgacggtttttggtaatttaccgacggatccggaagttacgcaagcgatgaaagatgcgctagattcgggtaaatataatggttatgcgccgtcgataggttttttatcgtcgcgtgaagaaatagcgtcgtattatcattgtccggaagcgccgttagaagcgaaagatgtaatattaacgtcgggttgttcgcaagcgatagatttatgtctagcggtattagcgaatccgggtcaaaatatattagtaccgcgaccgggtttttcgttatataaaacgctagcggaatcgatgggtatagaagtaaaattatataatctattaccggaaaaatcgtgggaaatagatttaaaacaactagaatatttaatagatgaaaaaacggcgtgtttaatagtaaataatccgtcgaatccgtgtggttcggttttttcgaaacgtcatctacaaaaaatactagcggttgcggcgcgtcaatgtgttccgatattagcggatgaaatatatggtgatatggttttttcggattgtaaatatgaaccgctagcgacgttatcgacggatgtaccgatactatcgtgtggtggtctagcgaaacgttggttagtaccgggttggcgtttaggttggatactaatacatgatcgtcgagatatatttggtaatgaaatacgtgatggtttagtaaaattatcgcaacgtatattaggtccgtgtacgatagttcaaggtgcgctaaaatcgatattatgtcgtacgccgggtgaattttatcataatacgttatcgtttctaaaatcgaatgcggatctatgttatggtgcgctagcggcgataccgggtttacgaccggttcgaccgtcgggtgcgatgtatttaatggttggtatagaaatggaacattttccggaatttgaaaatgatgtagaatttacggaacgtctagttgcggaacaatcggttcattgtctaccggcgacgtgttttgaatatccgaattttatacgagtagtaataacggttccggaagtaatgatgttagaagcgtgttcgcgtatacaagaattttgtgaacaacattatcattgtgcggaaggttcgcaagaagaatgtgataaa

SEQ ID NO: 7573 - DNA, 1362 bp, Artificial Sequence
  derived and/or modified sequence
atggacccgtacatgattcagatgagctctaaaggcaatctgcccagcatcctggacgtgcatgtgaacgttggcggacgaagtagtgtaccagggaagatgaaaggccgcaaagccaggtggagcgttcgcccgtccgatatggcaaaaaagacctttaatccaattcgtgcgatcgttgataacatgaaggtcaaacccaacccgaacaaaacaatgattagccttagcattggggaccccacagtcttcgggaacctgccgacagatcccgaggtcacacaggcgatgaaagacgctcttgatagtggcaagtataacggctacgcgccgtccattggatttctgtcctcccgcgaggaaatcgcctcatactaccactgcccagaggcacccttggaggcaaaagacgtgatcttgaccagcggctgctcacaggcaatcgatctttgtcttgccgttctggcaaaccccggtcaaaacattctggtccctagacctggattttcgttgtataagactttggccgagtctatgggcattgaggtcaaactctacaacctgttgcctgaaaagagctgggagattgatctgaagcaattggagtacctgatcgatgaaaaaacagcgtgccttatcgttaacaacccaagtaacccctgcggcagcgtcttcagcaagcgccaccttcagaagatcctggccgtggctgcccgccagtgtgtgccaatccttgcagacgagatctacggtgatatggtgttctctgactgtaagtacgaacccctagctacattgtctaccgatgtccccatcctctcatgtggtgggttggctaagagatggttggtgcccggatggcgcctcggatggatactgattcacgatcggagggatatctttggaaacgagatccgcgacggactggtgaagttgtcacagagaattctcgggccatgcacaatcgttcaaggagctctcaaaagtatcctgtgccgaacgcccggagaattttaccataacaccttatccttcttaaagagcaacgcagatttgtgctatggggccctcgcagctatcccgggcctgcgcccagtaaggcctagtggagctatgtatctcatggtggggatcgagatggagcactttccggagttcgagaacgatgtggaatttactgagagactagtggccgagcagtctgttcactgtctgccagctacctgctttgaatacccaaactttatcagagttgtgatcacagtcccagaagtgatgatgctcgaggcttgctctcgtatccaggagttttgtgagcagcactatcattgcgcagaaggcagtcaggaagaatgcgacaag

SEQ ID NO: 7574 - DNA, 1362 bp, Artificial Sequence
  derived and/or modified sequence
atggacccctacatgattcagatgagtagcaaagggaacctcccaagcatattggatgtgcacgtaaacgtgggcggacggtcttccgtccccgggaaaatgaaagggagaaaagcccgatggtcagtccgcccctccgacatggctaaaaagaccttcaacccgattagagccattgtggacaatatgaaggtaaagccaaacccgaataagaccatgatctccctgagcattggcgatcctaccgtgtttgggaacctccctacagaccccgaggtgacgcaagccatgaaggatgccttggattctggcaaatataatggatatgccccctcaataggcttcctgtcctcccgcgaagagattgctagctactatcactgccccgaagctcccctggaggccaaagacgtgatcctgacaagtggatgttcccaggcgatcgatctctgcctggcagtgctggcgaaccccgggcagaatattctggtgccgagacctggcttctcactgtacaaaaccctggcagagtccatgggcatcgaagtgaagctgtataacctgctgccagagaagtcttgggagatagacctgaagcagctggagtatttgatcgacgagaagaccgcatgcctcatagtgaataatccatctaatccttgtggatcagtcttctccaaaagacacttgcagaagattctggcggtagccgcaaggcagtgtgtacccattttggctgacgagatctacggcgatatggtcttctcagactgcaagtacgagccccttgctacacttagtacagacgtcccgatcctgagctgtgggggactggccaagagatggctggtgcccggatggcgcctgggttggatactgatacatgatcggcgcgacattttcggaaatgagattagggacgggctggtgaagctgtcccagcgcatcctcgggccatgtacgattgtccagggtgccctgaagtccatcttgtgtcgaactcccggggagttctaccataacactctttcctttttgaaaagcaacgcggacctttgctatggcgcgctggcagccattcctggcttgcggcctgtacgccccagtggcgctatgtacctcatggttggcattgagatggaacactttccggaatttgagaatgacgtggagttcacagaaaggctggtggccgagcaatctgtccactgcctgccagccacctgcttcgagtatcccaattttatcagagttgtgatcacagtgccagaggttatgatgctcgaggcctgctccagaattcaggaattctgtgaacagcattaccactgtgccgaaggcagtcaagaggaatgtgataag

SEQ ID NO: 7575 - DNA, 1362 bp, Artificial Sequence
  derived and/or modified sequence
atggacccttatatgatacaaatgtcgtctaagggcaatcttccatcgattctcgacgttcatgttaacgttgggggacggagctccgtgcctggtaaaatgaaaggtaggaaggctagatggagcgttcgccctagcgatatggcaaaaaagacatttaatccaatacgtgcaattgtagataacatgaaggtgaagcctaatccaaataaaacaatgatttcgctttcgattggtgaccctaccgtctttggcaacctacctactgacccagaagttactcaagccatgaaagatgctctcgactccggaaaatacaacggatatgctcctagtatcggtttcctttcaagccgggaggaaatagcttcatactaccattgcccggaggcacctctggaggcaaaggatgtgattttgaccagtggatgcagccaagctatcgatctttgccttgctgtccttgctaatcctggtcaaaacatactggtaccccgacctggattttctctttataagacccttgctgaaagcatgggaattgaagttaaactgtacaacttactcccagagaagagttgggagatcgatttgaaacaactagagtatttaattgacgagaagactgcgtgcttgattgtgaacaacccatctaacccatgtggaagcgtctttagtaagcgtcatctgcagaagatcctcgctgtggccgctagacagtgtgtcccaatcctggccgatgagatctatggtgatatggtgttttctgactgcaagtatgaacctttagctaccctgagcactgatgttcctatcttgagctgtggtggattagctaagaggtggttagttcccggttggcgcctcggatggatccttattcacgatcgtcgggatattttcgggaatgagattagggatggtctggttaagttgtcccaacgtattctggggccatgtacgattgttcagggggctctgaagtctatattatgtagaactcctggcgagttttaccataatactctttccttcttgaagtctaacgcagacctctgttacggcgctttggccgctattccagggctcaggccagttagaccaagtggggctatgtatcttatggtgggaatcgaaatggaacactttcctgaatttgagaatgatgtggaattcaccgagcgacttgtagctgaacaatcagttcattgtttgcctgctacttgtttcgagtacccaaatttcatccgtgtagtgattactgttcctgaagtcatgatgttggaggcctgttcgcggattcaggaattctgtgagcagcactatcactgcgctgaagggtcacaagaggagtgtgataag

SEQ ID NO: 7576 - DNA, 1362 bp, Artificial Sequence
  derived and/or modified sequence
atggacccttacatgatccagatgtcctccaagggcaacctgccctccatcctcgacgttcatgtcaacgttggagggaggtcttcggtccccggcaagatgaaaggaaggaaggctagatggagcgttcggccaagcgatatggctaagaaaacatttaaccctatcagagctatcgtggataacatgaaagtaaaacccaacccaaataaaactatgatctctctttcaataggtgacccgacagtatttgggaacctccctactgaccctgaagtcacccaagccatgaaggatgcactggattccggcaaatacaacgggtacgccccatccataggtttcctgagttccagggaagaaatcgccagttactaccactgtcctgaggcccctctggaggctaaggatgtgattctgacgtcaggctgcagtcaagcgatcgacttgtgcttggctgttcttgctaatcccggccaaaacatcctggtccctcggcccggttttagcttgtataagaccttggcagaaagcatggggatcgaggtgaagctgtacaatctcctgcctgagaagagttgggagattgatctgaaacagctggaatacttgatcgatgagaagacagcatgtttaatcgtcaataacccctcaaacccttgcgggtctgtgtttagcaaaaggcaccttcagaagattcttgccgtggctgctaggcagtgcgtgcctatcttggcagatgaaatttacggagacatggttttttctgattgtaaatacgaaccactggcaacgctctccacagatgtgccaatactcagctgcggagggttagcaaagcgttggcttgtacctggatggagacttggctggatacttatccacgataggagagatattttcggcaatgaaattagagacggacttgtgaaactgtcacaaagaatcctgggcccctgtactatagtccagggagctctgaaaagtattctctgccgcacacctggggaattctatcataatacattgagtttcttgaaatcaaatgccgatctttgttatggtgccttggccgccatccccgggctgaggcctgtgagaccttcaggagctatgtacttgatggtgggaatcgaaatggaacactttccagagttcgagaacgacgttgagtttaccgaaaggctcgtcgcagagcaaagcgtccactgcttgccagcaacttgctttgaataccctaacttcatcagagtcgtgataaccgtccctgaagttatgatgctggaggcgtgttcaaggattcaggagttctgtgagcagcattaccactgcgctgaggggagccaggaagagtgcgataaa

SEQ ID NO: 7577 - DNA, 1362 bp, Artificial Sequence
  derived and/or modified sequence
atggacccctacatgattcagatgtcatccaaaggaaacctgccctcaattctcgatgtccatgtgaatgtgggcggcaggtcctctgttcctggtaagatgaagggaagaaaggcccggtggtctgttagaccgtccgacatggctaaaaaaacattcaatcctatcagagccatcgtcgataacatgaaagtgaaaccgaacccgaacaagaccatgatttccttgagcatcggtgatccaacagttttcgggaacctccctactgacccggaggtcacgcaggcaatgaaggacgccttggactctggtaagtacaatggatacgccccctctattggcttcctgtcaagccgcgaggagatcgcttcttactaccactgccccgaagctcccctggaagctaaggacgtcatcctgacttctggctgctctcaggctatcgatctgtgcctcgccgtactggccaacccaggacagaatatcctcgtgccaaggcctggattttctctgtataagaccctggctgagagcatggggatcgaagtgaagctgtacaatctgttgcccgagaaatcttgggagatcgatctcaaacaactggagtatttgattgacgaaaagacagcatgcctgattgtaaataatccgtctaatccctgcggaagtgtcttttctaagaggcatctgcaaaaaatacttgcggtcgccgcacggcagtgcgtgcctatactggcggatgagatttatggcgatatggtcttttccgattgtaagtatgagccattggctaccctgtccactgacgttccaatattgagttgcggaggcctggccaaaagatggctggtgccagggtggcgcctgggctggattctgattcatgacaggagggacatcttcgggaatgagattagagatgggctggtcaaactgtcccagcgcatattgggaccctgcacgatagtccaaggtgcactgaaatctatactgtgtcgcaccccgggagagttctaccacaatactctgagcttccttaagtctaacgctgatctgtgttacggagcacttgccgcaatcccaggtctccggcccgtgaggccctctggtgctatgtacctcatggtagggatcgagatggagcatttcccagaattcgagaacgacgtggagtttactgaaagacttgttgcggaacagtcagttcactgtcttcccgccacctgtttcgaataccccaacttcatccgggtcgtgatcactgtgcctgaagtcatgatgctggaagcctgcagcaggatccaggagttctgtgagcagcattatcattgtgccgagggtagccaggaagaatgtgataag

SEQ ID NO: 7578 - DNA, 1362 bp, Artificial Sequence
  derived and/or modified sequence
atggacccttacatgattcagatgtcctccaagggtaacctgccgtctatcctggacgtccacgtcaacgtcggcggtcggtcatctgtgcctggcaaaatgaagggtcgcaaagcacgctggagcgtccgcccaagcgacatggccaaaaaaacgttcaatcctataagggcgattgtcgataacatgaaggtgaaaccgaatccaaacaaaactatgattagcctgtcgatcggcgacccaactgtcttcggtaacctgcctacggaccctgaggttacgcaagccatgaaggatgctctggatagtggaaaatacaatggatatgccccaagtatcggattcttgagctcccgcgaggagatcgcctcctactatcactgcccagaggctccactggaggcgaaagacgtcatactcacctctggatgcagccaagcaatagatctgtgtctggcagtgctcgctaatccaggtcagaacatcctggttcctcgcccggggttttccctgtacaaaacgctggcggaatcgatggggattgaggtgaagctgtataatctcctgcctgagaaatcttgggaaatagaccttaaacagctcgagtatttgatcgatgaaaaaaccgcgtgcctaatcgtgaacaatccatcgaatccttgtggaagtgtttttagcaaaagacatctgcaaaagatcctggctgtggcggcacgccagtgcgtccctatcctggcggacgagatctacggcgacatggtcttttcggattgtaaatatgagccgctggcaacgttgtcaaccgacgttcccattctgagctgcggtggtctggccaagaggtggttggtgcccggatggcgattgggttggatcctgattcacgatagacgcgatatattcgggaatgagattcgcgatggcctcgtcaaactgagtcagcgtattctgggcccgtgcaccatagtccaaggtgcactgaaatcaattctgtgcagaaccccaggcgaattttaccacaataccttgtcttttctgaagagcaacgccgatctgtgttatggagcgctggccgcaatcccaggtctgcgtccggttaggccatcgggagctatgtatttgatggtcggcatagagatggagcactttcccgaatttgagaacgacgtcgaatttaccgagagattggtggcggaacagtctgtgcattgtctgccagctacttgctttgagtatcctaatttcataagagtggtcatcactgtccccgaagttatgatgctagaagcctgcagccgaattcaagagttttgcgagcagcattaccattgcgccgagggcagccaggaggagtgtgacaaa

SEQ ID NO: 7579 - DNA, 1362 bp, Artificial Sequence
  derived and/or modified sequence
atggatccttatatgattcagatgtcttctaaagggaacttgccatctatactcgacgttcatgttaatgtgggagggagatcctcagtgccagggaaaatgaaagggcgcaaagcacgctggtctgtgcgcccttccgatatggcaaaaaagactttcaaccctattcgcgccatagtggataatatgaaagtaaaacctaacccgaacaaaacaatgatctctctcagtataggggatcccactgttttcggaaacctccctacggatcccgaggtgactcaggccatgaaagatgccttagattcaggaaaatataatggatacgcaccatctattggatttctttcaagtcgggaagaaatcgcaagttattaccattgcccagaagctcccctggaagccaaagacgttatacttacatccgggtgctcccaagcaatcgatttatgtctcgccgttcttgcaaaccccgggcagaacatactagtgccccggcctggattctccctttataaaactctcgccgaatccatggggatagaagtgaaactctataatctcctacctgaaaaatcctgggaaatagatctgaagcagctcgaatatttaatagatgaaaaaactgcttgcctcatagtgaacaacccttcgaacccatgtggaagtgtgtttagtaagagacacctgcagaaaatcttagccgtcgcagcccggcagtgtgtgcccatcctggccgacgagatttatggagacatggtgttctcagactgtaaatatgagcctctggcaacactgtctacagacgtgcccatcctctcctgtggaggactcgctaagcgttggttagttcccggatggcggttaggatggatcctcatccacgatagaagagatatattcgggaacgaaattcgggatgggttggtgaaactatcccagcggatacttgggccttgcacaatcgttcagggggccctcaaatcaatactctgccgcactcccggagaattttatcataatactctctcattcctaaaaagtaacgcagatctgtgctacggggccttagctgctattccaggactgaggcccgtgcggccatcaggggctatgtacctcatggtgggaatcgaaatggaacattttccagagttcgaaaacgatgtagaatttacagaaaggctggtcgccgaacagtctgtgcactgcctccctgccacttgttttgaatatcccaattttatacgggttgtgataacagtacccgaggttatgatgctcgaagcctgctcgaggattcaggaattctgtgaacagcactatcactgcgccgaggggtcccaggaggagtgcgacaaa

SEQ ID NO: 7580 - DNA, 1362 bp, Artificial Sequence
  derived and/or modified sequence
atggatccgtacatgattcagatgtcctcaaagggcaatcttccttccattctagacgtgcatgtgaacgtcggaggtaggtcaagtgtgcccggtaagatgaaaggacgtaaggctaggtggtctgtgcggccaagtgatatggcgaagaagaccttcaaccccattcgtgcaatcgtcgataacatgaaagtcaaacctaacccgaataaaacgatgattagtctgagtataggggaccctactgtctttggtaatcttccaacagatccggaggtgactcaggctatgaaagacgcactcgatagcggcaagtacaacggatacgccccctccataggcttcctctcctctcgtgaagagatcgcgagctattatcattgtccagaggccccactggaggcaaaggacgttatcctgacatctggctgtagccaggctatcgacctttgtctggcggttctggctaatcccgggcagaatatccttgttccccgacccggtttcagtctctataaaacattggcagagtctatgggcatcgaggtcaaactgtataacctgctgcccgagaagtcttgggagatcgatctgaaacagctggagtacttgatagacgagaaaaccgcgtgtcttatcgtgaataatcctagcaatccctgtggtagcgtgtttagtaagcggcacttgcaaaagatacttgcggtggccgcgaggcaatgtgtgccaatcctcgccgatgaaatatacggagacatggtcttctcagattgtaagtacgagcctctggcaactctgagcactgatgttcccatcctttcttgtggagggctcgctaaacgctggctggtccctgggtggcggctgggttggatcctcatccatgatagaagggacattttcggcaacgaaatcagagatggcttagttaagctgagtcagaggattctgggaccttgcacgatcgtgcagggagctttgaagagcattttatgtagaaccccgggggaattttaccacaacaccctgagctttctgaagtctaacgctgatttgtgttacggcgctcttgcggcaattccgggactacgtccggtcagaccatccggtgccatgtacctgatggttgggattgagatggaacattttccagagtttgaaaacgacgtcgaatttacagagcgcctggtagccgagcaatcagtgcactgcctgcctgcaacctgcttcgaataccctaatttcattagggtagttataactgtgcctgaagtgatgatgttggaggcctgttctcggattcaggagttctgcgagcagcactatcactgcgcggagggcagccaggaagagtgcgataag

SEQ ID NO: 7581 - DNA, 1362 bp, Artificial Sequence
  derived and/or modified sequence
atggatccatacatgatacaaatgagctccaagggaaatctgccctccattctagacgtgcatgtgaacgtaggtggtagatctagtgttcccggaaagatgaaggggcgaaaggccagatggagcgttagaccaagtgacatggcaaaaaagacatttaaccctatccgggcaattgtggataacatgaaggtaaagccaaatcctaataagaccatgatctccttgtccattggagatcccaccgtgttcgggaaccttccaaccgatcctgaggttacccaggcgatgaaggatgccctggattctggaaagtataatggatatgcccccagcatcggctttctttctagtagggaggaaatagcttcttactaccactgccctgaggcgccgctcgaggccaaggatgtcattctcactagtggttgctcccaggccatagatctctgcctggccgtcttggccaaccctggccagaatatactagtcccaagacccggcttcagcctttacaagacactggccgagtccatgggcatcgaagttaaactgtacaatctgttacccgagaagagttgggaaatcgacctaaaacagcttgagtatctcattgatgagaagaccgcgtgtctgattgtcaacaaccccagcaacccttgcggatcggttttttccaagagacatctccagaagattctcgccgtcgcagccaggcagtgcgtaccgatactggcggacgaaatttatggcgatatggtgttttcagattgcaaatacgagcccctcgccaccctgtctaccgatgttcctattctgtcttgcggcggtctggcgaaacgatggttggttccaggatggaggctggggtggatccttatccacgatagaagagatattttcggtaacgagatccgagatggcttagtcaaattgtctcagcgtatccttggcccttgcaccattgttcagggcgcactgaagtctatcctgtgcaggacgcccggagagttttaccacaatacgttgtccttcttgaagtctaacgcagacctttgctatggggccctcgccgccatcccaggcttgaggccagtccggccaagcggggcaatgtacctcatggtcggaatcgagatggagcacttccccgaatttgagaatgatgtggaattcacagagagattagtagccgagcagtccgtgcactgtctgcctgcgacatgtttcgaatatccaaatttcattagggtagtgattacagtgccagaagttatgatgctcgaagcctgctcgaggattcaggaattctgcgaacaacactaccactgtgccgagggttcccaggaagaatgcgacaaa

SEQ ID NO: 7582 - DNA, 1362 bp, Artificial Sequence
  derived and/or modified sequence
atggacccatacatgatccagatgagttccaagggcaacctgccgtctattttggacgtgcatgtgaacgtgggaggaaggtccagcgtcccagggaagatgaagggaaggaaggctcgatggtccgtgaggccctcagacatggccaaaaagacatttaaccctattagggctatcgtcgataacatgaaggttaagccaaacccaaacaaaacaatgatcagtctttcgatcggagacccgacagttttcggaaacctgcccaccgatccagaggttactcaggctatgaaagacgccctggacagcggcaagtataatggttatgccccttccatcggtttcctgtcgagtcgcgaagaaatcgcatcatactatcactgtccagaagcacccctggaggctaaagatgttatcctgacgtcgggatgttcccaggccatcgacttgtgcctcgcagttctcgccaatcccggtcagaatatattggttcctaggcccggttttagcctttataaaaccttggctgagagcatgggcattgaggttaagctctacaacctcttacccgagaagagctgggaaatcgatttgaagcagctagaatatttaatagatgaaaagacagcgtgtctgatagtgaacaacccatccaatccctgcggctcggtgttcagtaagcgtcacctccagaaaattctcgctgtagccgctcgacagtgcgtgcccatactcgcggatgaaatttatggtgacatggtgttcagtgactgtaaatacgagcctctagctaccttatccacagacgtccccattctgtcttgtgggggtctggcaaagcggtggttggtccctggctggagattagggtggattttaatccatgatcgcagagacattttcggtaatgaaatccgggacggactggtaaagctgtcccagaggatcctgggcccctgtactattgttcaaggagctctgaagtctattctgtgtcggacaccaggcgaattctatcacaacacgctgtctttcctgaaatccaacgctgacctgtgttatggcgcgttagctgccatccctggtctacgccctgtccggccatcgggcgcaatgtatcttatggtcggtatcgagatggaacattttccagagttcgagaacgacgtggaatttacagagcggcttgtagcagagcagtctgttcactgtctgcccgcgacttgttttgagtatcccaatttcattcgggtggtgataacagtgcccgaagtcatgatgctggaagcctgttcaagaatccaggaattctgcgaacaacattaccattgtgcggagggatcacaggaagagtgtgacaaa

SEQ ID NO: 7583 - DNA, 1362 bp, Artificial Sequence
  derived and/or modified sequence
atggacccttatatgatccagatgtcttcgaagggcaacctcccctccatccttgacgttcacgtaaacgtgggcgggcgaagttccgtccccgggaaaatgaaagggaggaaagcaagatggagtgtgaggccctcggacatggctaaaaaaaccttcaatcccattagggcgatcgtggacaacatgaaggtgaagccaaaccccaacaagacaatgatctctctctcaattggggacccaactgtgtttggaaacctaccaaccgacccggaagttactcaggctatgaaagatgctctggacagcggcaaatacaatggctacgctccatcaattgggtttctcagctctcgggaggagattgcaagctattaccactgccctgaggctccgttggaggcaaaagatgtgattctgactagcggatgttcccaggctatcgacctgtgtctggctgtcctagctaatcctggccagaatatactggtcccaagaccaggcttctccctgtacaagaccttggccgagagcatgggaattgaggtgaagctgtataacctcttgccagaaaaatcctgggaaatagacctgaagcagcttgaatatctaattgacgagaaaactgcatgtctgattgtcaacaacccaagcaacccctgtggcagtgtgtttagtaaaagacacctgcagaaaatccttgctgtggctgctaggcagtgtgtcccgattctagctgacgagatttatggagacatggtgttcagtgattgcaaatacgagccgctggctacactctcaaccgatgtgcccatactgtcatgtggcggacttgccaagcggtggctggttccaggctggcgcttgggctggatccttattcacgacagacgcgacatcttcggcaacgagatccgagacggcctggttaagctgagccagagaatcttaggcccatgcacgattgtacagggggcactgaagagcattctgtgccgcactccgggagagttctaccacaacactctgagctttctgaagtcgaacgcagatctgtgttacggtgcgctggctgccatccctgggctgaggcccgttagaccttctggtgccatgtatctgatggtgggcatagaaatggagcactttcccgaattcgagaatgacgtcgaattcacagaacgcctagtagcagaacagagcgttcattgcctccccgcgacctgcttcgagtacccaaatttcatccgcgtggtcattacagtacctgaagtaatgatgctcgaagcatgttcgcgaatccaggagttctgcgagcagcactatcattgcgcggagggaagtcaagaagaatgtgacaag

SEQ ID NO: 7584 - DNA, 1362 bp, Artificial Sequence
  derived and/or modified sequence
atggacccttacatgatccaaatgtcctcgaaagggaacctcccaagtattttggacgttcacgtcaatgttggagggcgtagttctgtgccaggtaagatgaaagggcgaaaggcaagatggtccgtgaggcccagcgatatggccaagaaaacgtttaatcctatccgggcgatcgtcgacaatatgaaagtgaagcccaatcctaataaaacaatgatatccctttctatcggagacccaacagtgtttggtaacctgcccacagaccccgaagtgactcaggctatgaaagacgcactggactcaggtaagtacaatggttatgcacctagtatcggcttcctcagctcgcgcgaggaaattgcatcatattatcactgcccggaggctccgcttgaggcaaaggacgtgatcttgactagtgggtgttctcaggccattgacctctgcctggccgtcctggctaatcctgggcagaatatattggtgccacgccccggcttcagtctatacaagacactagcagaatcaatgggcattgaagtaaaactgtacaacctgctacccgagaagagctgggagatcgacctaaaacagctggagtacctgatcgatgaaaaaacagcttgcctgatcgtgaataatccatccaacccttgtggctcagtatttagcaagcggcatctgcagaaaatactggccgtggcggccaggcaatgtgtacccatactggcagatgagatttacggagacatggtcttttctgattgtaagtacgagccactggccacgctttcgaccgatgtcccaatactgtcttgcggtggtctggccaagcggtggttggtgcctggatggcgcctgggatggatcttgattcacgatcgtagggacatttttgggaacgagatccgcgatgggctggtcaaactcagtcagaggattctaggtccttgcaccatagtccagggggctctgaaatctatcctctgtcgaaccccaggcgagttctaccacaacactctatcattcctgaaatcgaatgccgacctgtgttatggcgctttagcagctatacccggactgcgaccggtgcggccttcaggagccatgtacctgatggtcggcattgagatggagcatttccccgagttcgaaaatgacgtggagttcaccgagaggctcgtcgccgagcagagcgtgcactgtctccctgccacttgttttgaataccctaatttcatcagagtggtcatcacagtgcctgaagttatgatgctagaggcttgttcccgcattcaggagttttgcgaacagcattaccattgcgccgaggggagccaagaagaatgtgataag

SEQ ID NO: 7585 - DNA, 1362 bp, Artificial Sequence
  derived and/or modified sequence
atggacccatacatgattcagatgtctagtaagggcaatctgccaagcatcctggacgtccacgtgaacgtgggtggtagatctagtgtgcctggaaagatgaaggggcggaaagctcgctggagtgtaagaccttcagacatggcaaagaagaccttcaaccccattcgcgctatcgtcgataatatgaaagttaaaccgaaccccaataagacaatgatatcactttccatcggtgacccaaccgtcttcggcaacttgccaaccgacccagaagtcactcaggccatgaaagatgctctagacagcggtaaatacaacgggtacgcccccagtattggatttctctcttcccgcgaagagattgcctcttactaccattgcccagaggcgccactggaagctaaggacgttattctgaccagcggatgctcacaggccatcgacttgtgtctagcagtcctggccaatcccggccagaacattctggtgccacggcccggcttctcattatataaaacactggccgagtccatgggtatcgaagtgaagctgtataatctgcttcctgagaaatcttgggagattgacttgaagcagctcgaatatcttatagatgaaaagacggcctgtttaattgtgaataaccctagcaacccatgcgggtcagtgttcagcaagcgccacttgcagaagattttggcggtcgctgcgagacagtgcgtacccatcttggccgacgaaatatacggagacatggttttctccgattgtaagtacgaacctctggctactctaagcaccgatgtgccaatcctctcatgcggtgggctcgccaaacgctggctcgtgcccggctggaggctgggttggattctcattcatgaccgacgtgacatttttggcaatgagattcgcgacggactggtcaagctgtctcagaggatcctgggcccctgtaccatcgtgcaaggcgctctgaagtccatcctatgcagaacacccggcgaattttatcataataccctcagctttctgaagagcaacgcggatctatgctacggcgctctcgctgccatccccggtctgcggcccgtccgcccatcgggagcgatgtacctaatggtgggtatagaaatggagcactttcctgagtttgagaacgacgtcgagtttacggagaggctcgtcgcagagcagagtgtacattgcctgccagccacatgctttgagtaccccaactttattcgggttgtgatcactgttccagaggttatgatgttggaagcttgttcccgaatccaggaattttgtgagcagcattaccattgcgccgagggcagccaggaggagtgcgacaag

SEQ ID NO: 7586 - DNA, 1362 bp, Artificial Sequence
  derived and/or modified sequence
atggacccctacatgattcagatgtcttcaaagggaaacctgccctccatcttggacgtacacgtcaatgtcggtggcaggagcagcgttcctgggaaaatgaaaggccgcaaagcgcgctggagcgtcagacccagcgatatggccaagaagactttcaatcccattcgcgcaatcgtggataatatgaaggtgaagcccaaccctaataagacgatgattagtcttagcattggtgacccaacagtgttcggcaatctaccgaccgaccccgaggtcacacaggccatgaaagacgccctcgacagcggcaaatacaacgggtacgctcccagcatcggttttctgagtagcagggaggaaattgcctcctactatcactgtccagaagctcccctggaggcaaaagatgtgatcctaacctccggctgttctcaggccatcgacttatgtttagctgtgttggctaaccccggtcaaaatattctcgtgccgaggcctgggtttagcctgtacaagaccctggcggagtccatgggcatcgaggttaagctttataacttgctgccggaaaagagttgggagatcgatctgaagcagctcgaatatctgatcgatgagaagacagcttgccttattgtgaataacccctcaaacccgtgtggtagcgtgttttccaagaggcatctgcagaagattctagccgtcgccgcgcgccagtgtgtgcccatcctggcagatgagatctacggcgatatggtgttctcagattgtaagtacgagccactggcgaccctgtcaactgatgtaccaatacttagttgcggtgggttggctaagcggtggttggtgccaggctggcggctgggttggattttgatacacgataggcgagatattttcggcaacgagattcgcgacgggttagttaagctgtctcagaggatactggggccgtgtaccatagtgcagggtgccctaaagtccatcctctgtaggactcccggcgaattttaccacaatacccttagctttcttaaaagcaatgccgatctgtgttatggcgccctcgccgccattccgggcctaaggcccgtccgtccttcaggggctatgtatctgatggtaggcattgagatggaacacttccccgaatttgagaacgacgtggagtttaccgaaagattggtggccgaacagagcgtccattgtctgcccgccacatgttttgagtatccgaactttattcgcgtggtgattaccgtgccggaggtgatgatgctagaggcctgttcgcgcattcaggaattttgtgagcagcattaccactgcgcagaaggttctcaagaggaatgcgataag

SEQ ID NO: 7587 - DNA, 1362 bp, Artificial Sequence
  derived and/or modified sequence
atggacccctacatgattcaaatgtctagcaagggcaacttgccctctatcttggacgtccacgtgaatgtgggcgggcgatcttcagttccaggcaagatgaagggacggaaggcacgatggtctgtacgcccgagcgatatggcgaagaagacgttcaaccccattcgtgcgatcgtggacaacatgaaggttaaacctaaccctaacaagacgatgatttcactgtcgatcggcgatccgacggtgttcggaaacctgcccaccgaccctgaggttacgcaagctatgaaggatgcactcgactctggaaaatacaacgggtatgctccgtctatcggcttcctttcttcgcgcgaagagattgccagctactaccactgtcctgaggcgccccttgaggccaaggatgtcatccttacgtccggttgcagccaggccatcgatctgtgtctcgccgtcttggctaaccccggccagaacatcttggtccctcgcccggggttcagcctgtacaagacgcttgcggagtctatgggtatcgaggtcaagctctacaatctgctccctgaaaagtcctgggagattgatcttaagcagctagagtatttgattgatgagaagaccgcctgtcttattgttaacaatccgagcaatccttgtggtagcgtgttcagcaagcgtcatttgcagaagattcttgccgtcgcagcccgacaatgcgtcccgatactggccgatgaaatctacggagacatggtgttctccgattgtaaatacgaacccctggcgactttgagtaccgacgtcccgatcctgagctgtggtggcctcgctaagcgatggcttgttcctggctggcggctaggctggatattgatccacgacaggcgagatatcttcggtaacgagatcagggacggactagtgaagctgtcgcaacgtattctgggtccgtgtacaatcgtgcagggggcgcttaagtctattttatgccgcacccccggtgagttctaccacaataccctgtcctttcttaaatccaacgccgatttgtgctacggcgcccttgccgcgatccctggccttcgccctgtccgcccctcgggtgccatgtacctcatggtggggatcgagatggagcactttccggaattcgagaacgacgttgaattcactgagcgacttgtcgccgagcagagcgtgcattgccttccagccacttgttttgagtaccccaactttatccgggtagtcatcacggtgccggaagtcatgatgttagaggcctgcagccgcatccaggagttctgcgagcagcactatcactgtgctgaaggcagccaggaggagtgcgataag

SEQ ID NO: 7588 - DNA, 1362 bp, Artificial Sequence
  derived and/or modified sequence
atggatccttatatgatccagatgtcatccaagggcaatctaccgtctatcttggacgtgcacgtgaatgttggcggcaggtcctctgtgccgggaaagatgaaagggaggaaggccaggtggtcagtgcgtccctctgacatggccaaaaaaacctttaatcccattagggcaatcgtggacaatatgaaggttaagcctaaccccaataaaacaatgatttctctttccataggagaccccaccgtgttcggaaacctcccgacagaccccgaagtgactcaagcaatgaaagatgcactggactccggaaagtataatggctatgcaccatctatcggtttcctgtcttcaagggaagagatagcttcttattaccactgccctgaggctcccctggaagcgaaggacgttatcctgactagtggctgttcacaggccatcgatctctgtctcgccgtgctggcaaatccaggtcaaaacatcctggtgcctcgcccgggcttttctctatataagactctcgctgagtccatggggatcgaggtgaagctgtacaatttgctcccagagaaatcttgggagattgacctaaaacagctagagtacctgatagacgaaaagaccgcctgcctcatcgtgaataatccaagtaacccttgcggttccgtgttctccaagagacatcttcagaagatcctggcggtggccgcgcgacagtgcgtcccaattctcgcagacgaaatatacggcgacatggttttttctgactgcaagtatgaacccctggccactctatccacagatgtccccatcttgtcttgcggcggtctggctaaaaggtggctagtcccaggctggcgtctaggctggatactgatccatgacagacgagacatcttcggcaatgaaatcagggacggcctggtgaagctgtcccaacgtatcctcgggccttgtactatcgtgcaaggagccctgaagagtatcctctgcaggacacccggagaattctatcataacacactgtccttcctgaagtctaacgcagatctatgctatggagcactcgccgctattcctggtctaaggccagtgcgtccaagcggagccatgtatttgatggttggcatcgaaatggagcattttccagagtttgaaaacgatgtcgaatttactgaaaggttggtcgccgagcagtctgttcattgtttaccggccacatgttttgaataccctaactttattagggtagtgataaccgtaccagaggtgatgatgctggaagcgtgctccagaattcaagaattttgcgaacagcattaccactgtgccgaaggatctcaggaagaatgcgacaaa

SEQ ID NO: 7589 - DNA, 1362 bp, Artificial Sequence
  derived and/or modified sequence
atggatccttatatgattcaaatgagttctaagggaaatttaccatcaattttggatgtgcatgttaatgtgggaggtagatcatcagttccaggaaaaatgaaaggaagaaaagctagatggagtgtcagaccatcagatatggcaaaaaaaacattcaatcctataagagcaattgttgataatatgaaagttaagccaaatccaaataaaactatgatctctttaagtataggagatccaacagtttttggaaatcttccaactgatcctgaagttacacaagcaatgaaagatgcattagattctggaaaatataatggatatgcaccatctattggatttttatcttcaagagaggaaattgcttcatattatcattgtccagaagcaccattagaagctaaagatgtaattttaacttctggatgttcacaagctatagatttatgtttagcagttttagcaaatccaggacaaaatattttagttccaagacctggattctctttatataaaactcttgctgaaagtatgggtattgaagttaaattatataatttattaccagaaaagtcttgggaaattgatttaaaacaattagaatacttgattgatgagaaaactgcatgtttaattgttaataatccaagtaatccatgtggatctgtattctcaaaaagacatcttcaaaaaattttagctgtcgcagctaggcaatgtgtacctattttggctgatgaaatttatggagatatggtattctctgattgtaaatatgaaccacttgccacgttatctactgatgttcctatattatcttgtggtggtcttgcaaaaagatggcttgttccaggttggaggttaggatggattttgatccatgatcgtagagacatatttgggaatgaaattagagatggacttgttaaactttctcaaagaatcttgggtccatgtactattgtacaaggagcacttaaatcaatcttatgcaggacacctggagaattttatcataatacactttctttcttaaaatctaatgctgatttatgttacggagcacttgcagcaattccaggtctcagaccagttagacctagtggagctatgtatttaatggtaggaattgaaatggaacattttccagaatttgagaatgatgttgaatttactgaaagattagtagcagaacaatctgttcattgtttaccagctacatgttttgaatatccaaattttattagagttgtgatcacagtcccagaagttatgatgcttgaagcttgttcaagaattcaagaattttgtgaacaacattatcattgtgcagaaggttcacaagaagaatgtgataaa

SEQ ID NO: 7590 - DNA, 1362 bp, Artificial Sequence
  derived and/or modified sequence
atggatccgtacatgatccaaatgtcctcgaaggggaatctgccgtcaatcctggatgtgcacgtcaacgtcggcggacggagcagcgtgcctggtaaaatgaagggtcgcaaggcccggtggtcggtcagaccaagcgacatggcaaagaaaaccttcaatcctatccgcgccattgttgataatatgaaggtgaagccgaatcctaacaaaactatgatctccctcagcattggagatcccaccgtgttcggaaacctcccgaccgatccagaggtgactcaggcaatgaaggacgcactggactccggaaagtataacggatacgctccttccatcggtttcctgtcgtcacgggaagaaatcgcgtcatactaccattgtccagaggctccgctggaggccaaggacgtgatccttacttctggatgctcgcaagcgatcgacctttgtctggccgtgctggctaaccctggacagaatatcctggtcccaagaccagggttctcactgtacaaaactctcgcagaaagcatgggcatcgaagttaagttgtacaatctcctccctgagaaatcctgggagatcgacctgaagcagctggagtacctcatcgacgaaaagacggcctgcctcatcgtgaacaacccatccaacccctgtggatcagtgttcagcaaacgtcatctgcagaagatactggccgtcgccgcccgccaatgcgtgccgatcttggcggatgagatctacggtgacatggtctttagcgactgcaagtacgaaccgctcgcgaccctctccaccgatgtgccgattctttcgtgcggaggccttgccaagcggtggctcgtgccaggatggcgcctgggctggatcctgatccacgacagacgagacatcttcggaaatgaaatccgcgatgggttggtcaaactgagccagcgcattctggggccgtgcactatcgtgcagggggccctgaaatcgatcctctgtcggacccctggcgaattctatcataacaccctgtcgtttctgaagtcgaacgctgatctgtgctacggagcgttggccgcaattccgggccttagacccgtgaggccctcaggcgcgatgtacctcatggtgggaatcgagatggaacatttcccagaatttgaaaacgacgtggagttcactgagaggttggtagcagaacagtccgtccactgcctgccggctacgtgcttcgaatacccgaactttatccgcgtcgtgatcaccgtgccggaagtgatgatgctggaggcgtgctcgcggattcaagaattctgcgaacaacactaccactgtgccgagggaagtcaggaggagtgcgacaag

SEQ ID NO: 7591 - DNA, 1508 bp, Artificial Sequence
  derived and/or modified sequence
gggaaataagagagaaaagaagagtaagaagaaatataagagccaccatggacccctacatgattcagatgtccagcaagggaaaccttccctcgatcctcgatgtccacgtgaatgtcggaggacgctcatccgtacccgggaagatgaagggccggaaggcccgctggagcgtcagaccttccgacatggccaaaaagacgtttaatccgatcagggcgattgtggacaatatgaaggtcaaaccgaacccaaacaaaacgatgattagcctgtccatcggggacccgacagtgtttgggaatctccccactgatccagaagtgacacaggcgatgaaggatgcgttggattccggaaagtacaacggttatgcgccgagcattgggttcctgtcaagccgggaggagattgcaagctattatcactgccccgaagcgccgctggaggccaaagacgtgattttgacgtcgggttgcagccaagcgattgacctctgccttgcggtactggccaatcctggtcagaacatcttggtgcccagaccgggtttttcgctctacaaaacactggccgaatcgatgggtatcgaggtcaaactctacaacctgttgcccgagaagtcatgggaaattgatctgaaacagcttgaatatcttatcgatgaaaagacagcctgtcttattgtaaacaatccgtcgaatccttgtgggtcggtattctcgaaaaggcacctccaaaagatccttgcggtcgcagcgaggcaatgcgtgcctatcctggcggatgagatctacggagacatggtattctccgactgcaaatatgagccgctggctacgttgtcgacggatgtgccaatcctctcgtgtggtggattggcgaagcggtggctcgtgccggggtggcgactcggatggattcttatccacgaccgcagagatatctttggaaacgagatccgagatggcctggtcaaactgtcgcagaggatcttggggccttgtacgattgtacagggtgcattgaagtccatcttgtgccgcactcccggagagttctatcataataccctctcattcttgaaatcaaacgcggatctctgctatggcgcacttgctgcgatccccggattgaggcccgtcagaccgagcggagcgatgtacttgatggtagggatcgaaatggaacattttcccgaatttgagaatgacgtcgagttcaccgagcggcttgtggccgaacagtcagtgcattgtctgccggccacctgtttcgaataccccaacttcatccgggtggtcatcactgtgcctgaggtcatgatgttggaggcatgctcgcgcatccaagagttttgcgagcagcattaccactgcgctgagggaagccaggaagagtgtgacaagtgataagctgccttctgcggggcttgccttctggccatgcccttcttctctcccttgcacctgtacctcttggtctttgaataaagcctgagtaggaag

SEQ ID NO: 7592 - DNA, 1365 bp, Artificial Sequence
  derived and/or modified sequence
atggacccctacatgatccagatgagcagcaagggcaacctgcccagcatcctggacgtgcacgtgaacgtgggcggcagaagcagcgtgcccggcaagatgaagggcagaaaggccagatggagcgtgagacccagcgacatggccaagaagaccttcaaccccatcagagccatcgtggacaacatgaaggtgaagcccaaccccaacaagaccatgatcagcctgagcatcggcgaccccaccgtgttcggcaacctgcccaccgaccccgaggtgacccaggccatgaaggacgccctggacagcggcaagtacaacggctacgcccccagcatcggcttcctgagcagcagagaggagatcgccagctactaccactgccccgaggcccccctggaggccaaggacgtgatcctgaccagcggctgcagccaggccatcgacctgtgcctggccgtgctggccaaccccggccagaacatcctggtgcccagacccggcttcagcctgtacaagaccctggccgagagcatgggcatcgaggtgaagctgtacaacctgctgcccgagaagagctgggagatcgacctgaagcagctggagtacctgatcgacgagaagaccgcctgcctgatcgtgaacaaccccagcaacccctgcggcagcgtgttcagcaagagacacctgcagaagatcctggccgtggccgccagacagtgcgtgcccatcctggccgacgagatctacggcgacatggtgttcagcgactgcaagtacgagcccctggccaccctgagcaccgacgtgcccatcctgagctgcggcggcctggccaagagatggctggtgcccggctggagactgggctggatcctgatccacgacagaagagacatcttcggcaacgagatcagagacggcctggtgaagctgagccagagaatcctgggcccctgcaccatcgtgcagggcgccctgaagagcatcctgtgcagaacccccggcgagttctaccacaacaccctgagcttcctgaagagcaacgccgacctgtgctacggcgccctggccgccatccccggcctgagacccgtgagacccagcggcgccatgtacctgatggtgggcatcgagatggagcacttccccgagttcgagaacgacgtggagttcaccgagagactggtggccgagcagagcgtgcactgcctgcccgccacctgcttcgagtaccccaacttcatcagagtggtgatcaccgtgcccgaggtgatgatgctggaggcctgcagcagaatccaggagttctgcgagcagcactaccactgcgccgagggcagccaggaggagtgcgacaagtag

SEQ ID NO: 7593 - DNA, 1365 bp, Artificial Sequence
  derived and/or modified sequence
atggatccctacatgattcaaatgtctagcaagggcaacctccctagcattttggacgtacatgtgaatgtgggcggtagatctagcgtgccagggaagatgaaagggagaaaagcacgttggagcgtgcgaccgtcggacatggccaaaaagacgttcaacccaatccgagctatcgtggataatatgaaagttaaacccaatcccaacaagacaatgatatccctgtcaattggggatcccacggtgttcgggaacctgcccaccgatccagaagtgacacaagcgatgaaggatgccctggattcaggcaaatacaacggctacgcccctagcatcggcttcctgtcatctcgagaggagattgcctcctactaccactgcccagaggccccactcgaagccaaagatgtgattctcacctccggatgttctcaggccattgacttgtgcttagcagttctggctaacccggggcagaacattttggtgcccaggcctggattcagtctgtataagaccctggccgagtcaatggggatcgaagtaaaactgtacaatctcctgccggagaagtcctgggagattgacctcaaacagttagaatatctgatagacgaaaaaaccgcctgcctgatcgttaataaccccagcaatccatgtggatccgtgttctccaagcgtcacttgcaaaaaatcttggccgtggcggccaggcagtgtgtaccaatactggctgacgaaatttatggggacatggtattctcggattgcaaatatgaacctttagctaccctcagtaccgacgtgcccatcctgtcatgcggaggactggcgaagcgctggctcgttccaggatggcgcctgggctggattctgatccatgatcgcagggacatttttgggaacgagattagagacggtctggtgaagctgagccaacggatcctgggtccctgtaccatagtccagggcgccctgaagtctatactctgtagaaccccaggggagttctaccataatacactaagttttttgaaaagcaacgccgatctttgttatggtgccctagccgccattcccggcctgcgcccagtgagaccttctggcgcgatgtacctcatggtgggtatagagatggagcactttccagagttcgagaacgatgttgagtttacagagcgcctcgtcgcagaacagagtgtacactgcctccccgctacctgcttcgagtaccccaactttatccgagttgtcattactgtcccggaggtaatgatgcttgaggcttgcagcaggatacaggagttttgcgaacaacactaccattgcgccgaaggctcgcaggaggaatgtgataaatag

SEQ ID NO: 7594 - DNA, 1365 bp, Artificial Sequence
  derived and/or modified sequence
atggacccctacatgatccagatgagcagcaaaggaaacctgcccagcatcctggatgtgcacgtgaatgtgggcggccgcagctctgtgcctgggaagatgaagggcaggaaggcccgctggagcgtgcggcccagcgacatggccaagaagaccttcaaccccatccgggccatcgtggacaacatgaaggtgaagcccaaccccaacaagaccatgatcagcctgagcatcggggaccccaccgtgtttggaaacctgcccacagatcctgaggtgacccaggccatgaaggatgccctggacagcggcaagtacaacggctacgcccccagcatcggcttcctgagcagccgggaggagatcgccagctactaccactgcccagaggcccccctggaggccaaggatgtgatcctgaccagcggctgcagccaggccatcgacctgtgcctggccgtgctggccaaccctggccagaacatcctggtgcccaggcctggcttcagcctgtacaagaccctggccgagagcatgggcatcgaggtgaagctgtacaacctgctgcctgagaagtcctgggagattgacctgaagcagctggagtacctgattgatgagaagacagcctgcctgattgtgaacaaccccagcaacccctgtggctctgtgttcagcaagaggcacctgcagaagatcctggccgtggccgcccggcagtgtgtgcccatcctggctgatgagatctacggggacatggtgttcagtgactgcaagtatgagcccctggccaccctgagcacagatgtgcccatcctgagctgtggcggcctggccaagcgctggctggtgcccggctggaggctgggctggatcctgattcatgacagaagagacatctttggaaatgagatcagagatggcctggtgaagctgagccagaggatcctgggcccctgcaccatcgtgcagggcgccctgaagagcatcctgtgcaggaccccaggagagttctaccacaacaccctgtccttcctgaagagcaatgctgacctgtgctacggggccctggccgccatccctggcctgcggcctgtgcggcccagcggggccatgtacctgatggtgggcatcgagatggagcacttccctgagtttgaaaatgatgtggagttcacagagcggctggtggccgagcagagcgtgcactgcctgcctgccacctgctttgagtaccccaacttcatccgggtggtgatcaccgtgcctgaggtgatgatgctggaggcctgcagccgcatccaggagttctgtgagcagcactaccactgtgccgagggcagccaggaggagtgtgacaagtag

SEQ ID NO: 7595 - DNA, 1365 bp, Artificial Sequence
  derived and/or modified sequence
atggacccctacatgatccagatgagcagcaagggcaacctgccctccatactggacgtgcacgtgaatgtgggcggacgctctagtgtaccgggaaaaatgaagggacggaaagcacgctggtctgtaaggccctctgacatggccaaaaagacatttaatcccattcgcgccattgtcgataacatgaaagtgaagcccaatcctaataaaaccatgataagcttaagtattggagacccaactgtgttcggcaacctacccaccgaccccgaggtgacccaggctatgaaggatgcattggactcagggaagtacaacggctacgcaccttctatcggcttcctgtcctctcgagaggaaatcgccagctactatcactgtcccgaagctcctctagaagccaaagacgtaatcctgacaagcggatgttcccaagcgatcgacttatgtctcgctgtgctcgccaacccaggacagaatatcctggtgccaagacctggatttagcctctataagaccctggctgagtctatgggtattgaagttaaactgtacaatctacttccggagaagagttgggaaatcgatttaaagcagctggagtatcttatcgatgagaaaactgcttgtctaattgtgaataacccttctaacccatgcggatctgtgtttagcaaaaggcatttgcagaagatactggctgtcgccgcgcggcaatgcgtgccaatcctcgctgacgaaatctacggtgacatggttttttctgattgtaagtacgaacccctagcaaccttgtccacagacgttcccatcctgagctgtggtggcctagccaagcgatggctcgtaccaggatggcggctgggatggatcctgattcacgacaggcgagacatctttggcaacgagattagagacggtttagtgaaattaagtcagcgtatcctcggcccttgcaccatcgtacagggggcactcaagtccattctctgtagaacccctggcgagttctatcacaatacattgtcttttcttaagagcaacgcagacctgtgttacggtgcgctcgctgcaatccccggactgagaccagtacggccaagcggcgccatgtacctgatggtgggcattgagatggagcatttccctgaatttgagaatgatgttgagttcacggagaggctggtcgccgaacagtccgtgcattgtctcccagcaacttgtttcgagtatccaaatttcattagggttgtgattacagtgccagaagtgatgatgctggaggcctgcagcagaattcaggagttctgcgagcagcactatcattgcgcggagggcagccaggaggagtgcgacaaatag

SEQ ID NO: 7596 - DNA, 1365 bp, Artificial Sequence
  derived and/or modified sequence
atggacccttatatgattcaaatgtcttccaagggcaatctccccagcatcctcgacgtccatgtgaatgtggggggtcggtccagcgtgcccggaaaaatgaaggggcgaaaagcacgctggtcagtccgacctagcgacatggccaagaagaccttcaatcccatacgggcaatcgtagacaacatgaaagttaagcccaatccaaacaaaaccatgatatcgttgtctatcggcgatccaacagtgttcggtaatctaccaaccgaccctgaagttactcaggccatgaaggacgcgctcgacagcggtaaatacaatgggtacgcaccatcaattggatttctgagttctcgtgaagagatagccagctattatcactgcccggaggcccctctggaagcaaaggacgtaatcctcacatccggctgtagtcaagccatcgacctatgcctggcagtgttggcaaatccaggacaaaacatcttggttccacgcccaggcttctccctctacaagacacttgcagagtccatggggatagaggtgaaactgtacaacctgcttcccgaaaagtcatgggagatcgatctgaaacagctggagtacctgatcgatgagaagacggcctgtctgatcgtaaataatccttcgaatccatgtggaagtgtgtttagcaagaggcacctgcagaaaattctggccgtggcagcaaggcagtgcgtaccaattctggccgatgagatctacggagacatggtcttttccgattgcaagtacgaaccccttgccactctatctacagatgtgcctatcttgagctgtggaggccttgccaaaaggtggctggtgccgggttggcggctgggctggatcctcatacacgatcgaagagatatcttcggcaatgaaatacgcgacggattagtcaaactctcccagcgcatcctcggcccttgtactatagtccagggcgctctcaagagcattctttgccgtacccccggtgagttctatcacaacactctcagcttcttgaagagtaatgcagacctgtgctatggggcactcgccgcaattcccggactgaggcccgtcaggccgagcggggctatgtatttaatggtgggtattgagatggaacattttccagagttcgaaaacgacgtcgagtttacggaacgtctagtcgccgagcagtccgttcactgcctgcccgcaacgtgctttgaatatcccaacttcatcagagtcgtgatcaccgtgcctgaagttatgatgctggaggcttgttcccgaatacaggagttctgtgaacagcattatcactgcgccgaaggctcacaggaagaatgcgacaagtag

SEQ ID NO: 7597 - DNA, 3983 bp, Artificial Sequence
  derived and/or modified sequence
ggagactatttcaggagttaggatttgcatctgagttcattgcccctgtaacctgtcaaagaagagctaagggagctttcggggttggcttcttggaggctgctttctcctttacttggaaggcttcgctagtgatggacccatacatgattcagatgagcagcaaaggcaacctcccctcaattctggacgtgcatgtcaacgttggtgggagaagctctgtgccgggaaaaatgaaaggcagaaaggccaggtggtctgtgaggccctcagacatggccaagaaaactttcaaccccatccgagccattgtggacaacatgaaggtgaaaccaaatccaaacaaaaccatgatttccctgtccattggggaccctactgtgtttggaaacctgcctacagaccctgaagttacccaggcaatgaaagatgccctggactcgggcaaatataatggctatgccccatccatcggcttcctatccagtcgggaggagattgcttcttattaccactgtcctgaggcacccctagaagctaaggacgtcattctgacaagtggctgcagccaagctattgacctttgtttagctgtgttggccaacccagggcaaaacatcctggttccaagacctggtttctctctctacaagactctggctgagtctatgggaattgaggtcaaactctacaatttgttgccagagaaatcttgggaaattgacctgaaacaactggaatatctaattgatgaaaagacagcttgtctcattgtcaataatccatcaaacccctgtgggtcagtgttcagcaaacgtcatcttcagaagattctggcagtggctgcacggcagtgtgtccccatcttagctgatgagatctatggagacatggtgttttcggattgcaaatatgaaccactggccaccctcagcaccgatgtccccatcctgtcctgtggagggctggccaagcgctggctggttcctggctggaggttgggctggatcctcattcatgaccgaagagacatttttggcaatgagatccgagatgggctggtgaagctgagtcagcgcattttgggaccctgtaccattgtccagggagctctgaaaagcatcctatgtcgcaccccgggagagttttaccacaacactctgagcttcctcaagtccaatgctgatctctgttatggggcgttggctgccatccctggactccggccagtccgcccttctggggctatgtacctcatggttggaattgagatggaacatttcccagaatttgagaacgatgtggagttcacggagcggttagttgctgagcagtctgtccactgcctcccagcaacgtgctttgagtacccgaatttcatccgagtggtcatcacagtccccgaggtgatgatgctggaggcgtgcagccggatccaggagttctgtgagcagcactaccattgtgctgaaggcagccaggaggagtgtgataaataggcctgcatccattctcctgaggatgtgtcccatctagggaaggctggactaggccttgcggctcctcagggactcaggtggccctactgggagaggggcctcaaatgcaccatgtcaagggttcaagattgttcctgcttttccccaagtacaaccacacccacactcagatcctcctcattcacatcgcagattctcccttgctctgcgctgctagagtgactcactaattcattaatctgcctccctctcgtaagatttccttctttttttcttgaaagtaccaggtgaacaaagtttaccagaaagcagttgagacaagaaaataagagctcaggatgagggaaaagaaaaagattgagagaatttgtgcccccaaccatttcctcagactctaagaaagaacacgctctctccaggcaggtctgaagctcaactctcttattgcctcacttcaggtatacctcactttacacaatagaattataactggaaagaagttggggacacatgtatttggtgattacattttaaacacattaggaaaagttgctatttgaactttttattgatttttggggggagtaaagaattattttgtgatgcaaataaatatcctttaattgatcgacttgccaaatttagatttgtgtgcatcaggctttcttttttttctttttttagagaagttcaatataagcttttcttttctttgtttctttctttctttattttgagatggagtcttgctctgtcgcccatgctggagtgcagtggcgcgatctcggctcactgcaacctccacctcctgggttcaagcgattctcttgcctcaacctcccaagcagttgggactacaggcgtgagccaccatgcccggctaatttttgtatttttagtagagacagggtttcaccatgttagccaggctggtctcaaactcctgacctcaggcaatctgcccgcctgggtctcctaaagtactgggattacaggcgtgagccacctcgcccagcggcatcaggctttcttaaagtgagagcacgcctgtactagagcaagcaggaatcagagaccttccagaaatactactgtgtaagggccagaaatatcttcacttgtcattgttatataatcattattacttttgctgtaatgttaatattgatttattaatatatattatcttttcatacattttctaagaaacatttatattgataagatcttttattttgccaagggcataaattattgtttttctttttttttttttaataaatttcaccaagtatggctcttctgtgatgtgtttttttctccgtttgggaatttctaatcccaggcactcctcagtctcattgtttcattacctatgaggtttcatttacttctttgtaaatgtactgacttttggagttacttaagaaccacagttcctaaaacattttatttgggagctcaacttctggcttcctacttaccaagaggcagtaagttataacctctggcctttgtctttacattttcaactttctggatccctaacctctggtcccaagttactacgcttgcctatatccactaaccactcactaggtcacaaagttgatggctctggcttgacccagtgaatgagaagtgtcctagatgtttttttttttttttttttttcgcaaatcttcataggcacagttgcctgtttaattttttcttcagcccttcccttagaggagggagccttaagttacctttcaaggttgggggttaggaatctatcataactagtctagagatttctcaccaagggaaattttccttatctaaaagaggaacttcaggtctcaaccctgccagtcacacccaattaatgtccttcacaaaaataaacagcatatgttccctttcaatttgagttcagtgagctcacagcaaaatttaccttttaattttcttcagcaaatccaagacgaatatacaaaggatgagattagataaagatttcagtttcccgtatgccaccgctgccgccaattttccaaaaaagcctggctcctcttttcctgttcctccatccaagcccccaaagatctctaaccagaaataaacaggaagactcagtgatttacaaaagacattttagttttacacgtacagaaaattctacccagcattacagaattcttagacttcttaaattcctgattttccttggtatttacattttgataagggagccaatggttcttcaaacatttgaaaagaacacatacacactggacaatttcaaacgatacaaacaaacgcaactgtccttctttctcattcctgtccttcagccacccagtttcttctcccctgagggaatcagttatcatttgctggtcatacttccagattatactgtgcctatgtaagtgtgtgtgtgtgtgtgtgtgtgtgcacttttcattttttcaaataaagtattactcaactttgtaa

SEQ ID NO: 7598 - RNA, 1508 nt, Artificial Sequence
  derived and/or modified sequence
gggaaauaagagagaaaagaagaguaagaagaaauauaagagccaccauggaccccuacaugauucagauguccagcaagggaaaccuucccucgauccucgauguccacgugaaugucggaggacgcucauccguacccgggaagaugaagggccggaaggcccgcuggagcgucagaccuuccgacauggccaaaaagacguuuaauccgaucagggcgauuguggacaauaugaaggucaaaccgaacccaaacaaaacgaugauuagccuguccaucggggacccgacaguguuugggaaucuccccacugauccagaagugacacaggcgaugaaggaugcguuggauuccggaaaguacaacgguuaugcgccgagcauuggguuccugucaagccgggaggagauugcaagcuauuaucacugccccgaagcgccgcuggaggccaaagacgugauuuugacgucggguugcagccaagcgauugaccucugccuugcgguacuggccaauccuggucagaacaucuuggugcccagaccggguuuuucgcucuacaaaacacuggccgaaucgauggguaucgaggucaaacucuacaaccuguugcccgagaagucaugggaaauugaucugaaacagcuugaauaucuuaucgaugaaaagacagccugucuuauuguaaacaauccgucgaauccuugugggucgguauucucgaaaaggcaccuccaaaagauccuugcggucgcagcgaggcaaugcgugccuauccuggcggaugagaucuacggagacaugguauucuccgacugcaaauaugagccgcuggcuacguugucgacggaugugccaauccucucgugugguggauuggcgaagcgguggcucgugccgggguggcgacucggauggauucuuauccacgaccgcagagauaucuuuggaaacgagauccgagauggccuggucaaacugucgcagaggaucuuggggccuuguacgauuguacagggugcauugaaguccaucuugugccgcacucccggagaguucuaucauaauacccucucauucuugaaaucaaacgcggaucucugcuauggcgcacuugcugcgauccccggauugaggcccgucagaccgagcggagcgauguacuugaugguagggaucgaaauggaacauuuucccgaauuugagaaugacgucgaguucaccgagcggcuuguggccgaacagucagugcauugucugccggccaccuguuucgaauaccccaacuucauccggguggucaucacugugccugaggucaugauguuggaggcaugcucgcgcauccaagaguuuugcgagcagcauuaccacugcgcugagggaagccaggaagagugugacaagugauaagcugccuucugcggggcuugccuucuggccaugcccuucuucucucccuugcaccuguaccucuuggucuuugaauaaagccugaguaggaag

SEQ ID NO: 7599 - protein, 415 aa, Artificial Sequence
  derived and/or modified sequence
MSPFLYLVLLVLGLHATIHCASPEGKVTACHSSQPNATLYKMSSINADFAFNLYRRFTVETPDKNIFFSPVSISAALVMLSFGACCSTQTEIVETLGFNLTDTPMVEIQHGFQHLICSLNFPKKELELQIGNALFIGKHLKPLAKFLNDVKTLYETEVFSTDFSNISAAKQEINSHVEMQTKGKVVGLIQDLKPNTIMVLVNYIHFKAQWANPFDPSKTEDSSSFLIDKTTTVQVPMMHQMEQYYHLVDMELNCTVLQMDYSKNALALFVLPKEGQMESVEAAMSSKTLKKWNRLLQKGWVDLFVPKFSISATYDLGATLLKMGIQHAYSENADFSGLTEDNGLKLSNAAHKAVLHIGEKGTEAAAVPEVELSDQPENTFLHPIIQIDRSFMLLILERSTRSILFLGKVVNPTEA

SEQ ID NO: 7600 - DNA, 1248 bp, Artificial Sequence
  derived and/or modified sequence
atgtcaccatttttgtatttagttttgctggtattaggcctccacgctactatccactgtgccagccctgaaggcaaagtcacagcttgccacagctcccagcctaacgccacgctctacaagatgagctctattaacgcagatttcgccttcaatctataccgccgattcacggtcgagactcccgacaaaaatatcttcttctcacctgtatcgatctctgccgcactagtgatgctgtccttcggcgcttgctgcagtacgcaaactgagatcgtggaaacccttgggttcaatctcaccgacacgcccatggttgaaatccagcacggctttcagcatctgatctgtagtctcaactttccaaaaaaggaattggaacttcaaatcgggaatgctctcttcatcgggaaacaccttaagcccctggccaaattcctgaacgacgttaagacactatatgaaacagaggtcttcagcaccgatttttcgaacatctctgctgcaaagcaggagatcaactcccatgtggaaatgcaaactaaaggtaaagtggtgggcctgatacaggatctgaaaccgaacactatcatggtgctcgtcaattatattcatttcaaggcccagtgggccaacccgttcgatcctagcaagaccgaggacagctccagttttctgatcgataaaaccactacagtgcaggtccccatgatgcaccagatggaacagtactatcacctggtggatatggagcttaattgtacggtcctgcaaatggactacagtaagaacgcgctggctcttttcgttctcccaaaagagggccagatggaatcagtagaggcggcaatgtcgtcaaaaaccctgaaaaagtggaatcgactcctgcagaaaggatgggtcgatctttttgtgcctaaattctctatctccgctacgtacgatcttggtgctactttgttgaaaatggggatccaacatgcctattccgaaaatgcagacttttctgggctgaccgaagacaatggcctcaaactctctaacgcggctcataaagccgtcctgcatattggcgaaaaaggcaccgaagctgcagccgtgccagaggtggaactctccgatcagcccgaaaacacgttcctgcatccgatcatccagatagataggtccttcatgctgctgatcttggaaaggagcacacgctccattctgtttttagggaaggtggtgaaccccaccgaggcttag

SEQ ID NO: 7601 - DNA, 1248 bp, Artificial Sequence
  derived and/or modified sequence
atgtcaccctttctgtatttagtcttgctcgtcctgggactgcacgccacaatacattgcgcatcccctgaaggtaaggtgacagcctgtcactcctctcagccgaatgccacactgtataaaatgagtagcattaatgcagattttgcttttaacctgtatcggagatttacggtcgagacccccgataagaatatcttcttcagccctgtgagcatctccgcagcactggttatgctgtcattcggagcctgctgcagcacacaaacagaaatcgtggaaacacttgggttcaatctaaccgacacccccatggttgagatccaacatgggttccagcacttgatatgctctctcaatttccctaagaaggagctggaactccagattggcaatgcgctctttataggcaaacatctcaaaccgctggctaaattcttgaatgatgtgaaaacactttacgagaccgaggtgttttctaccgacttcagcaatataagcgcagcaaagcaagagatcaacagccatgtagagatgcaaaccaaagggaaggtcgtggggctaatccaggacttgaaaccgaatacgatcatggtcctggtcaactatattcatttcaaagctcagtgggccaatccctttgatcccagcaagactgaggactcatctagtttcctgattgataagacaaccaccgttcaggtgcccatgatgcaccaaatggaacagtactaccatctcgtggacatggagctcaactgcactgtgctccaaatggactattcaaagaacgccttagcgctgtttgtgctaccaaaggaaggtcagatggaatctgtggaagctgccatgtcctccaaaacactcaagaagtggaatcgcctcctgcaaaaaggctgggttgacctctttgtgcccaagttctccattagtgccacatacgacctgggagccactctccttaaaatgggcattcagcacgcatattcggagaacgctgatttcagtggtctgacagaagacaacggcttgaaactttctaatgctgcccacaaggctgtgctgcacatcggagagaaagggacagaagccgctgccgtgcccgaggtagagctcagtgaccaaccggagaatacatttctgcaccccattattcaaattgaccgctcattcatgctcctcatacttgaaagatcaacccgctccatcctgttcctcggaaaagtcgtgaatcctactgaggcttag

SEQ ID NO: 7602 - DNA, 1248 bp, Artificial Sequence
  derived and/or modified sequence
atgtcgccgtttctttatctagtgctgctagtactcggattacatgccacaatccactgcgcttcaccggaagggaaggttacagcttgccattcctcccagcctaatgcaactctgtacaagatgtcttctatcaatgccgatttcgcatttaatctgtatcggcgattcactgttgagacccctgataagaatattttcttttccccagtgagtatttccgctgccctggtaatgctatcctttggcgcgtgttgtagcacacagaccgaaatcgttgagaccctggggttcaatcttaccgacactcctatggtggagattcagcacgggtttcaacacttaatttgtagtctgaatttcccaaagaaggaactggagcttcaaatcggaaacgctctttttataggtaagcacctgaagccgttagccaagtttctcaacgatgttaaaacgttgtacgaaactgaggtattttccaccgatttctctaacatcagcgccgctaaacaggagatcaacagccatgtagagatgcagaccaagggaaaagtcgtcggtctgatccaagacctgaaaccaaataccatcatggtgctcgttaattatatccactttaaagctcaatgggccaacccgtttgatccttctaagaccgaggactcatctagctttctgatcgataagacaacaaccgtacaggtgcccatgatgcatcagatggaacagtactatcatctagtagacatggaattgaattgtaccgtcctgcagatggactactctaagaacgccctcgctctctttgtgctgcccaaggaaggacagatggaatcggtagaggcagctatgtcatccaagacactgaaaaaatggaatcggttgttgcaaaagggatgggttgatctttttgtgcccaaattttctataagcgctacctatgaccttggggcaacactgttaaagatgggtatccagcacgcttactccgagaatgcagacttcagcgggcttaccgaggacaacggcttgaaactgtctaacgcggctcataaagcagtcctccatataggggaaaagggaaccgaagcagcagcagttcctgaggtagagctttctgatcagcctgagaatacctttctgcacccaattatccagatcgataggtcttttatgctcttgatcctcgagaggtctacacgatccatcctcttcctgggcaaagtcgttaaccccaccgaagcctag

SEQ ID NO: 7603 - DNA, 1248 bp, Artificial Sequence
  derived and/or modified sequence
atgagcccatttctgtacctagtcttgttagtattaggcttacatgccacgatccactgtgcctctccagagggcaaggttaccgcgtgtcactcttcccagcccaatgctaccctgtacaaaatgagctccattaatgccgactttgcgtttaacctgtataggcgctttacagtggagacccctgacaaaaacatcttcttctcccccgttagcatcagtgccgccctcgtcatgttgagtttcggggcctgctgttcgacacaaaccgagatagtcgagactctcggatttaacttaaccgatactcccatggtggaaatccagcatggcttccaacaccttatatgtagtcttaattttcctaagaaagaacttgaactccagatcggaaacgctctcttcattggcaagcacctcaagcccctggccaaattccttaacgatgtaaagactctgtacgaaaccgaagtgttctcaactgactttagcaacatctcagcggccaagcaggaaatcaacagccacgtggaaatgcaaactaagggcaaggtggttggcttgatccaggaccttaaaccgaatacaatcatggtactcgtcaactatattcacttcaaggcacagtgggcgaatccatttgatcccagtaaaaccgaagactcgtcatcctttcttatcgataaaactaccacagtgcaggtgccgatgatgcatcagatggaacagtattatcaccttgtggacatggaactaaattgtaccgttctgcagatggattattctaaaaacgcacttgctctgtttgtgctgcccaaggagggccagatggaatccgtagaagctgccatgagcagtaagacactgaaaaagtggaacaggctcttgcagaagggatgggtcgacctctttgtgcctaaatttagcatatctgccacatacgatctaggcgccactctgcttaaaatggggatccagcacgcctattctgagaacgcagattttagcggtctgacagaagataacggcctcaagctatccaatgccgcccataaggccgtgctgcacatcggtgagaagggcacagaggccgcagccgttcccgaggtggaattatcagaccagccagaaaacaccttcttgcaccccatcatccagattgaccgttctttcatgctgcttatcttagaacgctctaccagatccattctgtttttagggaaggtggtcaatccgaccgaagcctag

SEQ ID NO: 7604 - DNA, 1248 bp, Artificial Sequence
  derived and/or modified sequence
atgtcccccttcctctacctggtgcttcttgtcctgggtctgcacgcaaccatacactgcgccagccccgaaggaaaagtgacggcgtgtcactccagtcagccaaacgcaaccttgtacaaaatgtcttctattaatgcagactttgccttcaatctatatcgccgatttacggtcgaaacacccgacaagaatatcttcttttcccccgtctccatttctgccgcccttgtgatgctctcctttggcgcctgttgctcaacccagaccgaaatcgtcgaaaccctagggttcaatctgactgacactccaatggttgaaattcagcacggattccaacatcttatctgtagcctcaattttcccaagaaagagctggagcttcagatcgggaacgctctctttatcggtaagcacttgaaaccacttgccaagttcctcaatgatgtcaaaacgttgtatgaaacagaagttttcagcactgatttctcaaatatctcagcggccaaacaggaaattaacagccacgtagaaatgcaaaccaagggaaaggtggtcggccttattcaggacctgaaacccaacacaatcatggtactagtgaattacattcacttcaaagctcaatgggctaatcctttcgacccatccaaaaccgaagattctagctcattccttatagataaaaccactaccgtgcaagtccctatgatgcatcagatggaacaatattaccaccttgtggacatggaactgaactgcacagtgcttcagatggattattctaaaaacgccctagcactgtttgtacttcccaaggagggacaaatggaatcggtggaagcagccatgagcagtaagacattgaaaaaatggaatcgtctgcttcagaaaggatgggtggacctattcgtccctaaattctcgattagcgcaacttatgaccttggcgcaacgctgctgaaaatggggatccagcacgcatactccgaaaatgccgatttctctgggctgaccgaggataacggcttaaaactatccaatgcagcccacaaagccgtcttacatattggggagaagggaaccgaagccgccgcagtgcccgaggtggaactcagtgaccagcctgaaaataccttcctacatcctataattcagatagatcggagtttcatgttgttaattctggaacgctcgactcgaagtatcttatttcttggaaaagtggtcaatcctacagaagcatag

SEQ ID NO: 7605 - DNA, 1248 bp, Artificial Sequence
  derived and/or modified sequence
atgtctcccttcctataccttgtgctgctggtgttaggactccatgcaaccatacattgcgcatcccccgagggaaaggttacggcctgccacagctctcaacccaacgccactctttataagatgtcttccatcaatgcggatttcgcgtttaatctctatcgccgcttcaccgttgaaacccctgataaaaacatatttttttctcctgtcagcatcagcgccgccctggttatgttgtcgtttggagcctgttgttccactcagaccgaaatagtagaaactctcggatttaatctgactgacacaccaatggtcgaaattcaacacggattccaacacctcatttgttctctgaattttccaaaaaaagaactcgagttgcagatcggaaatgccctttttatcggtaagcacttaaagccattagccaaattcctcaatgatgtgaagaccctctacgagacagaagtcttcagcaccgacttctccaacatttccgccgctaaacaggagatcaatagccacgtagagatgcagacaaaaggcaaggtggttggcctaatccaggacctcaagccaaacacaattatggtcttggttaattatatccacttcaaagcccagtgggcaaacccttttgacccttctaaaacagaagatagctcaagtttcctcattgataaaactaccacggtccaagtgcctatgatgcaccagatggagcagtattaccacctcgtcgacatggagctgaactgtactgtgctacagatggactacagtaagaatgccctagcattgttcgttctgcccaaggaaggccaaatggagtctgtggaggcagctatgtcatctaagacacttaagaaatggaatcgactcctgcagaaaggatgggttgatctcttcgtccccaaattttctattagcgctacatatgacctgggggccacgcttctgaaaatgggcatccaacatgcgtattcagaaaacgctgacttctctgggctaacagaggataacggattgaagctgtccaatgccgcccacaaagctgtgctacacatcggcgaaaagggcaccgaagccgctgctgtgccagaggtcgagttgtccgatcaaccagaaaacacctttctccatccaatcattcagatagaccggtcctttatgctgctcatactggaacgctccacccgttccattctgttcctgggcaaggttgtcaaccccactgaagcatag

SEQ ID NO: 7606 - DNA, 1248 bp, Artificial Sequence
  derived and/or modified sequence
atgagccccttcctgtacctggtgctgctggtgctgggcctgcacgccaccatccactgcgccagccccgagggcaaggtgaccgcctgccacagcagccagcccaacgccaccctgtacaagatgagcagcatcaacgccgacttcgccttcaacctgtacagaagattcaccgtggagacccccgacaagaacatcttcttcagccccgtgagcatcagcgccgccctggtgatgctgagcttcggcgcctgctgcagcacccagaccgagatcgtggagaccctgggcttcaacctgaccgacacccccatggtggagatccagcacggcttccagcacctgatctgcagcctgaacttccccaagaaggagctggagctgcagatcggcaacgccctgttcatcggcaagcacctgaagcccctggccaagttcctgaacgacgtgaagaccctgtacgagaccgaggtgttcagcaccgacttcagcaacatcagcgccgccaagcaggagatcaacagccacgtggagatgcagaccaagggcaaggtggtgggcctgatccaggacctgaagcccaacaccatcatggtgctggtgaactacatccacttcaaggcccagtgggccaaccccttcgaccccagcaagaccgaggacagcagcagcttcctgatcgacaagaccaccaccgtgcaggtgcccatgatgcaccagatggagcagtactaccacctggtggacatggagctgaactgcaccgtgctgcagatggactacagcaagaacgccctggccctgttcgtgctgcccaaggagggccagatggagagcgtggaggccgccatgagcagcaagaccctgaagaagtggaacagactgctgcagaagggctgggtggacctgttcgtgcccaagttcagcatcagcgccacctacgacctgggcgccaccctgctgaagatgggcatccagcacgcctacagcgagaacgccgacttcagcggcctgaccgaggacaacggcctgaagctgagcaacgccgcccacaaggccgtgctgcacatcggcgagaagggcaccgaggccgccgccgtgcccgaggtggagctgagcgaccagcccgagaacaccttcctgcaccccatcatccagatcgacagaagcttcatgctgctgatcctggagagaagcaccagaagcatcctgttcctgggcaaggtggtgaaccccaccgaggcctag

SEQ ID NO: 7607 - DNA, 1878 bp, Artificial Sequence
  derived and/or modified sequence
ttcagaaaaaaagtgattcaatttccataaatttaatttactcacagcgttttcataatgttgctataacatctgaatgacagtccatggcattatttccgtggttgcagcaagccacttctcctactccctgtccatattagatgcatctcctgtttttcaagggagagaaacccctgctcagcccctgatgagcacatcatcaaatatttactattgttttattaatcaatgtgggtggttattatgtgtctctggctcagggagtgtttcatccaactaagctccctcagtggttgtctcacttcatctcttatagattaacttccttccaaaatgtcaccattcctgtatctggttctcttggtacttgggcttcatgctacaatccactgtgcatcacctgaaggcaaagtaacagcctgccattcatcccaaccaaatgccactctctacaagatgtcatccattaatgctgactttgcattcaatctgtaccggaggttcactgtggagaccccagataagaacatcttcttttcccctgtgagcatttctgcagctttggttatgctttcctttggggcctgctgcagcacccaaactgagattgtggagaccttggggttcaacctcacagacactccaatggtagagatccagcatggcttccagcatctgatctgttcactgaattttccaaagaaggaactggaattgcagataggaaatgccctcttcattggcaagcatctgaaaccactggcaaagttcttgaatgatgtcaagaccctctatgagactgaagtcttttctaccgacttctccaacatttctgcagccaagcaggagattaacagtcatgtggagatgcaaaccaaagggaaagttgtgggtctaattcaagacctcaagccaaacaccatcatggtcttagtgaactatattcactttaaagcccagtgggcaaatccttttgatccatccaagacagaagacagttccagcttcttaatagacaagaccaccactgttcaagtgcccatgatgcaccagatggaacaatactatcacctagtggatatggaattgaactgcacagttctgcaaatggactacagcaagaatgctctggcactctttgttcttcccaaggagggacagatggagtcagtggaagctgccatgtcatctaaaacactgaagaagtggaaccgcttactacagaagggatgggttgacttgtttgttccaaagttttccatttctgccacatatgaccttggagccacacttttgaagatgggcattcagcatgcctattctgaaaatgctgatttttctggactcacagaggacaatggtctgaaactttccaatgctgcccataaggctgtgctgcacattggtgaaaagggaactgaagctgcagctgtccctgaagttgaactttcggatcagcctgaaaacactttcctacaccctattatccaaattgatagatctttcatgttgttgattttggagagaagcacaaggagtattctctttctagggaaagttgtgaacccaacggaagcgtagttgggaaaaaggccattggctaattgcacgtgtgtattgcaatgggaaataaataaataatatagcctggtgtgattgatgtgagcttggacttgcattcccttatgatgggatgaagattgaaccctggctgaactttgttggctgtggaagaggccaatcctatggcagagcattcagaatgtcaatgagtaattcattattatccaaagcataggaaggctctatgtttgtatatttctctttgtcagaatacccctcaactcatttgctctaataaatttgactgggttg

SEQ ID NO: 7608 - DNA, 1248 bp, Artificial Sequence
  derived and/or modified sequence
atgtctccctttctgtatcttgtattactggtattgggcctacatgccacaattcattgcgcctccccagaaggcaaagttacagcgtgtcactcctcccagcctaatgcaaccttatacaagatgtcctccataaatgccgatttcgcgttcaatctgtatcgccgattcacagtcgaaacccccgataagaatattttttttagtcccgtttccatatccgccgcccttgttatgctaagctttggggcctgctgctccacacagaccgagatagtagaaactcttggattcaatctaactgatactcctatggtggagatccaacatggcttccagcacctcatctgctccctgaatttccctaagaaggaactagagctacagattgggaatgcattgtttatcggtaagcacctaaagcctctcgccaagtttctgaacgatgttaagacactgtacgagactgaagtgttcagtaccgacttttccaacataagcgctgccaagcaggagataaacagtcacgtggaaatgcaaacaaagggaaaagttgttggtctgattcaagatctgaaacctaacaccattatggtgctggtcaactacatacacttcaaggctcagtgggctaatccttttgacccttctaagaccgaagattccagtagctttctgattgacaaaaccactaccgtgcaggtgccaatgatgcaccaaatggagcagtactaccatctcgtggatatggaactcaattgcaccgtgttgcaaatggactacagcaagaacgcgctggctttgttcgtgctaccaaaggagggccagatggaatctgtagaggcagctatgtcaagcaagaccctcaagaagtggaacaggctgttgcaaaagggatgggtggatctattcgtgcctaaattttccataagcgcaacatacgatctgggcgcgacactgctgaaaatggggatccagcacgcttactcagaaaatgccgacttctcaggcctgactgaagataacggtttgaagctgagtaatgcggcgcataaagccgtgttacacatcggtgaaaagggtactgaggcggccgccgtgccagaggtggaactcagtgatcagccagagaacacttttctccaccctattatccaaatagataggagcttcatgctgctgatcctggaacggtctactaggagcatcctgttcctgggaaaagtggtgaaccccacggaggcttag

SEQ ID NO: 7609 - DNA, 1248 bp, Artificial Sequence
  derived and/or modified sequence
atgagtccgttcttgtaccttgttttgctcgtgctcggcctgcacgccaccattcattgtgcaagccccgaaggtaaagttactgcctgccactcctcccagccgaatgctaccctgtataaaatgtcaagtataaatgccgatttcgccttcaacctatatcgcagattcacggttgaaaccccagacaaaaacatcttttttagcccagtatcaatatctgctgccctggtcatgttgtcttttggcgcatgttgcagcacacaaactgaaattgttgagactttaggtttcaacctcaccgatacccccatggtggagatccagcacggctttcagcacttgatatgttctctgaattttcccaaaaaagagttggaactgcaaatcggaaatgcgctgtttatcggcaaacacttgaagcctctggccaagtttctgaatgacgtgaaaaccctctatgagacagaagtttttagtacagatttctctaatattagcgctgcgaagcaggagatcaactctcatgtggagatgcagacaaaggggaaggtcgtcggcctgatccaggacctgaagcctaacacaatcatggtccttgtgaattatatccattttaaggctcagtgggccaatccctttgacccttctaaaacagaagatagctcatcgtttttaatagacaagacaactacagtacaagttccaatgatgcaccagatggagcagtattatcatctggtagacatggagcttaattgcactgtgcttcagatggattattccaaaaatgcgctagcccttttcgtcctgcctaaggaggggcaaatggaaagtgttgaagccgccatgtcatcaaaaacactcaaaaagtggaataggctgctccaaaagggctgggtcgatctcttcgtgccaaagtttagtatttccgccacatacgatctgggggctaccctgctgaagatgggcattcagcatgcttatagcgaaaacgccgattttagcggtctgactgaagacaacgggcttaagcttagcaatgcggcccacaaggctgtgctgcacattggggaaaaagggaccgaagcagctgcagtacccgaagtggaactctccgatcagcctgagaatactttcttgcatcctatcattcagatagaccgtagttttatgctacttatcctggaacgtagcactcggtctatcctcttcctgggaaaagttgtgaaccccacagaggcttag

SEQ ID NO: 7610 - DNA, 1248 bp, Artificial Sequence
  derived and/or modified sequence
atgagccccttcctgtacctggtgctgctggtgctgggcctgcacgccaccatccactgtgccagccctgagggcaaggtgacagcctgccacagcagccagcccaatgccaccctgtacaagatgagcagcatcaatgctgactttgccttcaacctgtaccgccgcttcaccgtggagaccccagacaagaacatcttcttcagccctgtgtccatctctgctgccctggtgatgctgagctttggagcctgctgcagcacccagacagagatcgtggagaccctgggcttcaacctgacagacacccccatggtggagatccagcacggcttccagcacctgatctgcagcctgaacttccccaagaaggagctggagctgcagattggaaatgccctcttcatcggcaagcacctgaagcccctggccaagttcctgaatgatgtgaagaccctgtatgaaacagaggtgttcagcacagacttcagcaacatctctgctgccaagcaggagatcaacagccacgtggagatgcagaccaagggcaaggtggtgggcctcatccaggacctgaagcccaacaccatcatggtgctggtgaactacatccacttcaaggcccagtgggccaacccctttgaccccagcaagacagaggacagcagcagcttcctgattgacaagaccaccaccgtgcaggtgcccatgatgcaccagatggagcagtactaccacctggtggacatggagctgaactgcaccgtgctgcagatggactacagcaagaatgccctggccctgtttgtgctgcccaaggagggccagatggagagcgtggaggccgccatgagcagcaagaccctgaagaagtggaaccggctgctgcagaagggctgggtggacctgtttgtgcccaagttcagcatcagcgccacctatgacctgggcgccaccctgctgaagatgggcatccagcacgcctacagtgaaaatgctgacttcagcggcctgacagaggacaatggcctgaagctgagcaatgctgcccacaaggctgtgctgcacatcggggagaagggcacagaggccgctgctgtgcctgaggtggagctgagtgaccagcctgagaacaccttcctgcaccccatcatccagattgacaggagcttcatgctgctgatcctggagaggagcaccaggagcatcctcttcctgggcaaggtggtgaaccccacagaggcctag

SEQ ID NO: 7611 - DNA, 1600 bp, Artificial Sequence
  derived and/or modified sequence
ttgctttctgagagatgcaggtggattcttgggcatttgctattaacttccttccaaaatgtcaccattcctgtatctggttctcttggtacttgggcttcatgctacaatccactgtgcatcacctgaaggcaaagtaacagcctgccattcatcccaaccaaatgccactctctacaagatgtcatccattaatgctgactttgcattcaatctgtaccggaggttcactgtggagaccccagataagaacatcttcttttcccctgtgagcatttctgcagctttggttatgctttcctttggggcctgctgcagcacccaaactgagattgtggagaccttggggttcaacctcacagacactccaatggtagagatccagcatggcttccagcatctgatctgttcactgaattttccaaagaaggaactggaattgcagataggaaatgccctcttcattggcaagcatctgaaaccactggcaaagttcttgaatgatgtcaagaccctctatgagactgaagtcttttctaccgacttctccaacatttctgcagccaagcaggagattaacagtcatgtggagatgcaaaccaaagggaaagttgtgggtctaattcaagacctcaagccaaacaccatcatggtcttagtgaactatattcactttaaagcccagtgggcaaatccttttgatccatccaagacagaagacagttccagcttcttaatagacaagaccaccactgttcaagtgcccatgatgcaccagatggaacaatactatcacctagtggatatggaattgaactgcacagttctgcaaatggactacagcaagaatgctctggcactctttgttcttcccaaggagggacagatggagtcagtggaagctgccatgtcatctaaaacactgaagaagtggaaccgcttactacagaagggatgggttgacttgtttgttccaaagttttccatttctgccacatatgaccttggagccacacttttgaagatgggcattcagcatgcctattctgaaaatgctgatttttctggactcacagaggacaatggtctgaaactttccaatgctgcccataaggctgtgctgcacattggtgaaaagggaactgaagctgcagctgtccctgaagttgaactttcggatcagcctgaaaacactttcctacaccctattatccaaattgatagatctttcatgttgttgattttggagagaagcacaaggagtattctctttctagggaaagttgtgaacccaacggaagcgtagttgggaaaaaggccattggctaattgcacgtgtgtattgcaatgggaaataaataaataatatagcctggtgtgattgatgtgagcttggacttgcattcccttatgatgggatgaagattgaaccctggctgaactttgttggctgtggaagaggccaatcctatggcagagcattcagaatgtcaatgagtaattcattattatccaaagcataggaaggctctatgtttgtatatttctctttgtcagaatacccctcaactcatttgctctaataaatttgactgggttg

SEQ ID NO: 7612 - DNA, 1248 bp, Artificial Sequence
  derived and/or modified sequence
atgagccccttcctgtacctggtgctgctggtgctgggcctgcacgccactatccactgcgccagccccgagggtaaagtcaccgcttgccatagcagccagccgaacgcgactttgtataagatgtcatccattaacgcagattttgccttcaacctgtatcgacgcttcacagtcgagactccagataagaatatcttctttagccctgtgagcatcagtgcggcattggtgatgttgtccttcggggcttgttgctccactcaaactgagatagtcgaaaccctcgggtttaacctgacggatacccccatggtggagatccagcacgggttccagcatctgatctgctcactgaacttccccaagaaggagttggagctgcaaataggaaacgctctctttatcgggaaacatctcaaacctctggccaagttcctgaacgacgtgaagactttatacgagaccgaagtctttagcacagacttcagcaatattagtgccgccaagcaggagatcaattcacacgtcgagatgcagaccaagggcaaggtggtgggactcatccaagaccttaagcccaacaccatcatggtgctggtgaattatatccacttcaaagcgcagtgggcaaatccattcgacccttcgaagaccgaagattcctctagtttcctaatcgacaaaacaacaaccgtgcaggtgcccatgatgcaccagatggaacaatactaccacttggtggacatggagctcaactgcacggtccttcagatggattactcaaaaaatgccctggccctgtttgtgctcccgaaagagggacagatggagagcgtggaggcagcaatgtccagcaaaaccttgaaaaagtggaacagattactgcagaaagggtgggtggacctttttgtgccaaaatttagcatcagcgccacatatgatctaggggccaccctgctcaagatgggtatacagcatgcctactccgaaaatgcagacttctccggcttgactgaggataatggattgaagctgtcaaatgctgcccacaaagccgtgctccacatcggcgaaaagggcaccgaggctgcggctgtgccagaagtggaactctcggaccaaccagagaacacgttcctccaccctataatccagatagatagatcctttatgttgctcattctagaacgatcgacaaggagcattctcttcctgggaaaagtcgtgaatcctaccgaggcatag

SEQ ID NO: 7613 - DNA, 1248 bp, Artificial Sequence
  derived and/or modified sequence
atgagccccttcctgtacctggtgctgctggtgctgggcctgcacgcaaccattcactgcgcaagtccagagggaaaagtgactgcttgccattctagccagcccaatgctacactgtacaaaatgagctccattaatgccgacttcgcgtttaacttatacagaaggtttacggtcgagacgccagataagaacatcttttttagccctgtgagcatatcagccgctttggtgatgttgtcatttggggcctgctgtagcacccaaacagagatagtggagacactgggattcaatctgactgatactccaatggttgaaatccagcacggctttcagcacctgatatgctctttaaactttcctaagaaggaactggagctgcagatcggcaatgcactgttcattggcaaacatctcaagccattggccaaatttttaaacgacgtcaagacactgtacgagactgaggtgttctccacagactttagcaacatctctgccgccaaacaggaaataaattcgcacgtcgagatgcaaactaaaggcaaggtagtcggcttgattcaggatctcaaacctaatactatcatggtcctggttaactatatacacttcaaagcccagtgggctaaccctttcgacccatccaaaaccgaagacagtagttcatttctgattgataagacaaccaccgttcaggtgcccatgatgcatcagatggagcaatattaccacttggtcgatatggaattaaactgtaccgtgctgcagatggactatagtaaaaatgctttagcgttgtttgtgctcccaaaggaggggcagatggagagcgtagaagccgccatgagtagtaagaccctcaagaagtggaaccgtctgttacaaaagggctgggtggatctattcgtcccaaagttctcaatcagcgccacatatgacctgggggccactctcctgaagatgggcattcaacacgcctatagcgagaatgctgatttttcgggactgactgaggacaatggcctgaaactttctaatgcggctcataaggctgtactgcacataggcgagaaagggactgaagccgccgccgtcccagaggtggaactctctgatcaacccgaaaacacctttctgcacccaattattcagatcgatcggtcctttatgctgttgattctggagcgttctaccagaagtatcctctttttgggtaaagtcgtaaacccaaccgaggcctag

SEQ ID NO: 7614 - RNA, 1248 nt, Artificial Sequence
  derived and/or modified sequence
augucgccguuucuuuaucuagugcugcuaguacucggauuacaugccacaauccacugcgcuucaccggaagggaagguuacagcuugccauuccucccagccuaaugcaacucuguacaagaugucuucuaucaaugccgauuucgcauuuaaucuguaucggcgauucacuguugagaccccugauaagaauauuuucuuuuccccagugaguauuuccgcugcccugguaaugcuauccuuuggcgcguguuguagcacacagaccgaaaucguugagacccugggguucaaucuuaccgacacuccuaugguggagauucagcacggguuucaacacuuaauuuguagucugaauuucccaaagaaggaacuggagcuucaaaucggaaacgcucuuuuuauagguaagcaccugaagccguuagccaaguuucucaacgauguuaaaacguuguacgaaacugagguauuuuccaccgauuucucuaacaucagcgccgcuaaacaggagaucaacagccauguagagaugcagaccaagggaaaagucgucggucugauccaagaccugaaaccaaauaccaucauggugcucguuaauuauauccacuuuaaagcucaaugggccaacccguuugauccuucuaagaccgaggacucaucuagcuuucugaucgauaagacaacaaccguacaggugcccaugaugcaucagauggaacaguacuaucaucuaguagacauggaauugaauuguaccguccugcagauggacuacucuaagaacgcccucgcucucuuugugcugcccaaggaaggacagauggaaucgguagaggcagcuaugucauccaagacacugaaaaaauggaaucgguuguugcaaaagggauggguugaucuuuuugugcccaaauuuucuauaagcgcuaccuaugaccuuggggcaacacuguuaaagauggguauccagcacgcuuacuccgagaaugcagacuucagcgggcuuaccgaggacaacggcuugaaacugucuaacgcggcucauaaagcaguccuccauauaggggaaaagggaaccgaagcagcagcaguuccugagguagagcuuucugaucagccugagaauaccuuucugcacccaauuauccagaucgauaggucuuuuaugcucuugauccucgagaggucuacacgauccauccucuuccugggcaaagucguuaaccccaccgaagccuag

SEQ ID NO: 7615 - RNA, 1248 nt, Artificial Sequence
  derived and/or modified sequence
augagcccauuucuguaccuagucuuguuaguauuaggcuuacaugccacgauccacugugccucuccagagggcaagguuaccgcgugucacucuucccagcccaaugcuacccuguacaaaaugagcuccauuaaugccgacuuugcguuuaaccuguauaggcgcuuuacaguggagaccccugacaaaaacaucuucuucucccccguuagcaucagugccgcccucgucauguugaguuucggggccugcuguucgacacaaaccgagauagucgagacucucggauuuaacuuaaccgauacucccaugguggaaauccagcauggcuuccaacaccuuauauguagucuuaauuuuccuaagaaagaacuugaacuccagaucggaaacgcucucuucauuggcaagcaccucaagccccuggccaaauuccuuaacgauguaaagacucuguacgaaaccgaaguguucucaacugacuuuagcaacaucucagcggccaagcaggaaaucaacagccacguggaaaugcaaacuaagggcaaggugguuggcuugauccaggaccuuaaaccgaauacaaucaugguacucgucaacuauauucacuucaaggcacagugggcgaauccauuugaucccaguaaaaccgaagacucgucauccuuucuuaucgauaaaacuaccacagugcaggugccgaugaugcaucagauggaacaguauuaucaccuuguggacauggaacuaaauuguaccguucugcagauggauuauucuaaaaacgcacuugcucuguuugugcugcccaaggagggccagauggaauccguagaagcugccaugagcaguaagacacugaaaaaguggaacaggcucuugcagaagggaugggucgaccucuuugugccuaaauuuagcauaucugccacauacgaucuaggcgccacucugcuuaaaauggggauccagcacgccuauucugagaacgcagauuuuagcggucugacagaagauaacggccucaagcuauccaaugccgcccauaaggccgugcugcacaucggugagaagggcacagaggccgcagccguucccgagguggaauuaucagaccagccagaaaacaccuucuugcaccccaucauccagauugaccguucuuucaugcugcuuaucuuagaacgcucuaccagauccauucuguuuuuagggaagguggucaauccgaccgaagccuag

SEQ ID NO: 7616 - RNA, 1248 nt, Artificial Sequence
  derived and/or modified sequence
augucccccuuccucuaccuggugcuucuuguccugggucugcacgcaaccauacacugcgccagccccgaaggaaaagugacggcgugucacuccagucagccaaacgcaaccuuguacaaaaugucuucuauuaaugcagacuuugccuucaaucuauaucgccgauuuacggucgaaacacccgacaagaauaucuucuuuucccccgucuccauuucugccgcccuugugaugcucuccuuuggcgccuguugcucaacccagaccgaaaucgucgaaacccuaggguucaaucugacugacacuccaaugguugaaauucagcacggauuccaacaucuuaucuguagccucaauuuucccaagaaagagcuggagcuucagaucgggaacgcucucuuuaucgguaagcacuugaaaccacuugccaaguuccucaaugaugucaaaacguuguaugaaacagaaguuuucagcacugauuucucaaauaucucagcggccaaacaggaaauuaacagccacguagaaaugcaaaccaagggaaagguggucggccuuauucaggaccugaaacccaacacaaucaugguacuagugaauuacauucacuucaaagcucaaugggcuaauccuuucgacccauccaaaaccgaagauucuagcucauuccuuauagauaaaaccacuaccgugcaagucccuaugaugcaucagauggaacaauauuaccaccuuguggacauggaacugaacugcacagugcuucagauggauuauucuaaaaacgcccuagcacuguuuguacuucccaaggagggacaaauggaaucgguggaagcagccaugagcaguaagacauugaaaaaauggaaucgucugcuucagaaaggauggguggaccuauucgucccuaaauucucgauuagcgcaacuuaugaccuuggcgcaacgcugcugaaaauggggauccagcacgcauacuccgaaaaugccgauuucucugggcugaccgaggauaacggcuuaaaacuauccaaugcagcccacaaagccgucuuacauauuggggagaagggaaccgaagccgccgcagugcccgagguggaacucagugaccagccugaaaauaccuuccuacauccuauaauucagauagaucggaguuucauguuguuaauucuggaacgcucgacucgaaguaucuuauuucuuggaaaaguggucaauccuacagaagcauag

SEQ ID NO: 7617 - RNA, 1248 nt, Artificial Sequence
  derived and/or modified sequence
augucucccuuccuauaccuugugcugcugguguuaggacuccaugcaaccauacauugcgcaucccccgagggaaagguuacggccugccacagcucucaacccaacgccacucuuuauaagaugucuuccaucaaugcggauuucgcguuuaaucucuaucgccgcuucaccguugaaaccccugauaaaaacauauuuuuuucuccugucagcaucagcgccgcccugguuauguugucguuuggagccuguuguuccacucagaccgaaauaguagaaacucucggauuuaaucugacugacacaccaauggucgaaauucaacacggauuccaacaccucauuuguucucugaauuuuccaaaaaaagaacucgaguugcagaucggaaaugcccuuuuuaucgguaagcacuuaaagccauuagccaaauuccucaaugaugugaagacccucuacgagacagaagucuucagcaccgacuucuccaacauuuccgccgcuaaacaggagaucaauagccacguagagaugcagacaaaaggcaaggugguuggccuaauccaggaccucaagccaaacacaauuauggucuugguuaauuauauccacuucaaagcccagugggcaaacccuuuugacccuucuaaaacagaagauagcucaaguuuccucauugauaaaacuaccacgguccaagugccuaugaugcaccagauggagcaguauuaccaccucgucgacauggagcugaacuguacugugcuacagauggacuacaguaagaaugcccuagcauuguucguucugcccaaggaaggccaaauggagucuguggaggcagcuaugucaucuaagacacuuaagaaauggaaucgacuccugcagaaaggauggguugaucucuucguccccaaauuuucuauuagcgcuacauaugaccugggggccacgcuucugaaaaugggcauccaacaugcguauucagaaaacgcugacuucucugggcuaacagaggauaacggauugaagcuguccaaugccgcccacaaagcugugcuacacaucggcgaaaagggcaccgaagccgcugcugugccagaggucgaguuguccgaucaaccagaaaacaccuuucuccauccaaucauucagauagaccgguccuuuaugcugcucauacuggaacgcuccacccguuccauucuguuccugggcaagguugucaaccccacugaagcauag

SEQ ID NO: 7618 - protein, 427 aa, Artificial Sequence
  derived and/or modified sequence
MRHLGAFLFLLGVLGALTEMCEIPEMDSHLVEKLGQHLLPWMDRLSLEHLNPSIYVGLRLSSLQAGTKEDLYLHSLKLGYQQCLLGSAFSEDDGDCQGKPSMGQLALYLLALRANCEFVRGHKGDRLVSQLKWFLEDEKRAIGHDHKGHPHTSYYQYGLGILALCLHQKRVHDSVVDKLLYAVEPFHQGHHSVDTAAMAGLAFTCLKRSNFNPGRRQRITMAIRTVREEILKAQTPEGHFGNVYSTPLALQFLMTSPMRGAELGTACLKARVALLASLQDGAFQNALMISQLLPVLNHKTYIDLIFPDCLAPRVMLEPAAETIPQTQEIISVTLQVLSLLPPYRQSISVLAGSTVEDVLKKAHELGGFTYETQASLSGPYLTSVMGKAAGEREFWQLLRDPNTPLLQGIADYRPKDGETIELRLVSW

SEQ ID NO: 7619 - DNA, 1284 bp, Artificial Sequence
  derived and/or modified sequence
atgaggcaccttggtgctttcctgttcctgctgggagtgctcggtgcacttaccgaaatgtgcgaaatccctgaaatggatagccacctggtggaaaaactgggccaacacctacttccatggatggatagattgagtctggagcatctcaatcctagcatttatgtcggtcttcgattgagtagtctacaggctgggactaaggaggacctatatctccattcacttaaacttggttatcagcagtgcctgctcgggagtgcgttctcggaggatgacggagactgccagggcaagccatcaatggggcagcttgccctgtaccttctggcccttcgagctaattgcgaattcgtgcgcggacataaaggggataggctcgtttcccagctgaagtggttcctggaggacgagaagcgtgccataggacatgaccataagggccatccccacacaagttattatcagtacgggcttgggatccttgccctctgtcttcatcagaagcgagtccacgactccgttgtggacaagctgctgtatgctgttgaaccgtttcaccaaggccaccacagcgtggataccgctgccatggccggcctggcattcacatgtctgaaaagatccaattttaaccccggaaggaggcagagaattactatggccatacgaaccgtaagggaagaaattcttaaagcccagactcctgagggacatttcggtaacgtgtattcaacgcccctggccctgcagtttcttatgacttctcctatgaggggagctgaacttggcacggcttgcttgaaagctagggttgcgttgttagcgtcgctgcaggacggcgcctttcagaacgctctcatgattagccaattacttcctgtcctcaaccacaagacatatatcgatttgatctttcccgactgtctggctccaagagttatgttggaacccgcggctgagacaatcccccagacacaggaaatcatctctgtgacgctgcaggtcctcagtttgttaccaccctatagacagtctatctccgttctggcaggttcaaccgtggaagatgtgctgaagaaggcccatgagctgggtgggttcacctacgagacccaggcctcactatctggcccctatttaacaagcgttatgggtaaagctgccggggagcgcgagttttggcagctgttgagagatcctaatactccactcctccagggtatcgctgactatcgacccaaggatggagagaccatagagctgcgcttggtgtcctggtag

SEQ ID NO: 7620 - DNA, 1284 bp, Artificial Sequence
  derived and/or modified sequence
atgaggcacctgggcgccttcctgttcctgctgggcgtgctgggcgccctgacagagatgtgtgagatccctgagatggacagccacctggtggagaagctgggccagcacctgctgccctggatggaccggctgagcctggagcacctgaaccccagcatctacgtgggcctgcggctgagcagcctgcaggccggcaccaaggaggacctgtacctgcacagcctgaagctgggctaccagcagtgcctgctgggcagcgccttctctgaagatgatggagactgccagggcaagcccagcatgggccagctggccctgtacctgctggccctgcgggccaactgtgaatttgtgcggggccacaagggggaccggctggtgtcccagctgaagtggttcctggaggatgagaagagggccatcggccatgaccacaagggccacccccacaccagctactaccagtatggcctgggcatcctggccctgtgcctgcaccagaagagggtgcatgacagcgtggtggacaagctgctgtatgctgtggagcccttccaccagggccaccacagcgtggacacagctgccatggccggcctggccttcacctgcctgaagaggagcaacttcaaccctggaagacggcagaggatcaccatggccatcagaacagtgcgggaggagatcctgaaggcccagaccccagagggccactttggaaatgtgtacagcacccccctggccctgcagttcctgatgaccagccccatgagaggagctgagctgggcacagcctgcctgaaggcccgggtggccctgctggccagcctgcaggatggagccttccagaatgccctgatgatcagccagctgctgcctgtgctgaaccacaagacctacatcgacctgatcttcccagactgcctggccccccgggtgatgctggagcctgctgctgagaccatcccccagacccaggagatcatctctgtgaccctgcaggtgctgagcctgctgcccccctaccggcagagcatctctgtgctggccggcagcacagtggaggatgtgctgaagaaggcccacgagctgggcggcttcacctatgagacccaggccagcctgagcggcccctacctgacctctgtgatgggcaaggctgctggggagcgggagttctggcagctgctgcgggaccccaacacccccctgctgcagggcattgctgactaccggcccaaggatggagagaccatcgagctgcggctggtgtcctggtag

SEQ ID NO: 7621 - DNA, 1284 bp, Artificial Sequence
  derived and/or modified sequence
atgcggcacctgggcgccttcctgttcctgctgggcgtgctgggcgccctgaccgagatgtgcgagatccctgaaatggatagccacttggttgagaaactcgggcaacatctgctcccctggatggatcggctgtcgttggaacacctgaatccaagcatttacgtggggctgcgcctgagctctctgcaggccggcactaaggaggacctgtacctgcattccctgaagctgggataccagcagtgtttgctagggagcgcatttagcgaggacgatggtgattgccagggcaagccctctatggggcagctggctctctacctgctcgcactgagagccaattgtgagttcgtgagaggacataagggggaccgactcgtcagtcaacttaaatggtttctggaggatgaaaaaagagccatcggacacgatcataagggacaccctcataccagctattaccaatatggattgggcatcttagccctgtgcctgcatcaaaagcgagtacatgactctgtcgtcgacaagctgctttacgctgttgagccattccatcaaggacatcactccgtagacaccgcagccatggctggcctcgcctttacatgtcttaaaaggagtaacttcaacccagggagaaggcagagaatcaccatggccattcggacagtaagagaagagattttaaaagcccagacgcccgaaggacatttcggtaatgtgtactcaactccactggccctgcagttcctcatgacttcacctatgagaggtgccgaattgggtactgcatgtttgaaggccagggttgcactgctggcttctctgcaggatggcgctttccaaaatgcactgatgatctcccagctcctgcccgtgctaaatcacaaaacgtacatcgatctgatctttccagattgcctggctccccgggtgatgctcgagcctgccgccgagacaatcccccaaacccaggagatcatctctgtgacactccaagtcctgtcgttgctcccaccatatcgccaaagtatatctgtgctggctggatcaacagtggaggatgttctcaagaaggctcacgagctgggcggatttacctatgaaactcaggcctctctgtcaggcccatatctcacatccgtcatggggaaagccgcgggcgagcgggaattctggcaactgttaagagaccctaacacccctttgctgcaggggattgctgactaccgaccaaaggacggtgaaacaatcgagctcagactcgtttcatggtag

SEQ ID NO: 7622 - DNA, 1284 bp, Artificial Sequence
  derived and/or modified sequence
atgagacatctgggggcttttctgttccttctcggggtgcttggggctttgacggaaatgtgtgaaatacctgaaatggattcccacttagttgagaaactgggtcagcacctcctcccctggatggaccgcctttccctcgagcacctaaatcctagtatatacgtggggctccgactgtccagtctgcaggccggtactaaggaggacctgtacctgcactccctcaagttaggatatcagcagtgtcttcttggttctgcgtttagtgaagatgatggcgattgccagggaaaaccttctatggggcagcttgcattgtatcttttggccttgagagccaattgcgagttcgtgcggggacataagggagatcggctcgtgtcccaactgaaatggttcctagaagatgagaaaagagctatcgggcacgatcataaaggacaccctcacacatcctattaccagtacggcctcgggatcctggccctgtgcctgcatcagaaacgcgtgcacgactccgtcgtggataagctgctatacgccgtggagccttttcatcagggacatcactctgtcgacactgccgctatggcaggattggccttcacttgtttgaagcgatcaaacttcaatccaggccgaagacaacggatcacaatggctatccgcacagttcgggaagagattctgaaagcccagacaccagaggggcactttggcaatgtatactcaacaccactcgctctccagtttctgatgacctctcctatgcgcggtgccgagctggggacagcctgcttgaaggcccgagtagcactgctggccagcctgcaggatggtgcctttcagaacgctctcatgatctcacagctgctgcccgttcttaatcacaaaacttatattgacctaatttttcccgactgtctggctcctagagttatgcttgagcccgcagccgagactatccctcagacccaggagatcatcagcgtgaccctgcaagtccttagtctgctcccgccatacagacagagtatttcagttctggcgggaagcactgtcgaggatgtcttaaagaaggcccatgaattgggtgggttcacctacgaaacccaagcatccctctctggaccttacttgacctccgtgatggggaaggccgcaggggaacgggagttctggcaactgctgcgtgatcccaacacccctctgctacaagggatcgccgactacaggccaaaggatggggaaaccatcgaactccgcctagtaagttggtag

SEQ ID NO: 7623 - DNA, 2535 bp, Artificial Sequence
  derived and/or modified sequence
actccttgtcctgggctaggtgggcactaccaggggctcctttggtaaggagtaccgggtaggcacccggtcctgccaatccaccactggaacagctggggggacagcagacaggcacggtcggacagacttgacagatcaggcatcaggccctctgcgctggtcccgggctctttaagcaggaacgtgaatggcctcaagatgtctcacatggtcccactagccctcctcctccctttgttccctacctccaggagggctgctctgcccttccttcctctgttctttggccttatgttccccgccaccacagaccttcccccgccccacccctctgcagacttagccgtgcattgcaggcatggaggattaatcagtgacaggaagctgcgtctctcggagcggtgaccagctgtggtcaggagagcctcagcagggccagccccaggagtctttcccgattcttgctcactgctcacccacctgctgctgccatgaggcaccttggggccttcctcttccttctgggggtcctgggggccctcactgagatgtgtgaaataccagagatggacagccatctggtagagaagttgggccagcacctcttaccttggatggaccggctttccctggagcacttgaaccccagcatctatgtgggcctacgcctctccagtctgcaggctgggaccaaggaagacctctacctgcacagcctcaagcttggttaccagcagtgcctcctagggtctgccttcagcgaggatgacggtgactgccagggcaagccttccatgggccagctggccctctacctgctcgctctcagagccaactgtgagtttgtcaggggccacaagggggacaggctggtctcacagctcaaatggttcctggaggatgagaagagagccattgggcatgatcacaagggccacccccacactagctactaccagtatggcctgggcattctggccctgtgtctccaccagaagcgggtccatgacagcgtggtggacaaacttctgtatgctgtggaacctttccaccagggccaccattctgtggacacagcagccatggcaggcttggcattcacctgtctgaagcgctcaaacttcaaccctggtcggagacaacggatcaccatggccatcagaacagtgcgagaggagatcttgaaggcccagacccccgagggccactttgggaatgtctacagcaccccattggcattacagttcctcatgacttcccccatgcgtggggcagaactgggaacagcatgtctcaaggcgagggttgctttgctggccagtctgcaggatggagccttccagaatgctctcatgatttcccagctgctgcccgttctgaaccacaagacctacattgatctgatcttcccagactgtctggcaccacgagtcatgttggaaccagctgctgagaccattcctcagacccaagagatcatcagtgtcacgctgcaggtgcttagtctcttgccgccgtacagacagtccatctctgttctggccgggtccaccgtggaagatgtcctgaagaaggcccatgagttaggaggattcacatatgaaacacaggcctccttgtcaggcccctacttaacctccgtgatggggaaagcggccggagaaagggagttctggcagcttctccgagaccccaacaccccactgttgcaaggtattgctgactacagacccaaggatggagaaaccattgagctgaggctggttagctggtagcccctgagctccctcatcccagcagcctcgcacactccctaggcttctaccctccctcctgatgtccctggaacaggaactcgcctgaccctgctgccacctcctgtgcactttgagcaatgccccctgggatcaccccagccacaagcccttcgagggccctataccatggcccaccttggagcagagagccaagcatcttccctgggaagtctttctggccaagtctggccagcctggccctgcaggtctcccatgaaggccaccccatggtctgatgggcatgaagcatctcagactccttggcaaaaaacggagtccgcaggccgcaggtgttgtgaagaccactcgttctgtggttggggtcctgcaagaaggcctcctcagcccgggggctatggccctgaccccagctctccactctgctgttagagtggcagctccgagctggttgtggcacagtagctggggagacctcagcagggctgctcagtgcctgcctctgacaaaattaaagcattgatggcctgtggacctgctacagtggcctggtgcctcatactcctcaggtgcaggggcagggacaagagaagggggaagtaaccccatcagggaggagtggagggtgcctgagccgccatgtgggcattgggggagtgatgggaatgccagcagtgatgacattgactactgactgagcacccactactatgactgagcactcactcgctagatactatcttgaactgctctgtga

SEQ ID NO: 7624 - DNA, 1284 bp, Artificial Sequence
  derived and/or modified sequence
atgagacacctgggcgccttcctgttcctgctgggcgtgctgggcgccctgaccgagatgtgcgagatccccgagatggacagccacctggtggagaagctgggccagcacctgctgccctggatggacagactgagcctggagcacctgaaccccagcatctacgtgggcctgagactgagcagcctgcaggccggcaccaaggaggacctgtacctgcacagcctgaagctgggctaccagcagtgcctgctgggcagcgccttcagcgaggacgacggcgactgccagggcaagcccagcatgggccagctggccctgtacctgctggccctgagagccaactgcgagttcgtgagaggccacaagggcgacagactggtgagccagctgaagtggttcctggaggacgagaagagagccatcggccacgaccacaagggccacccccacaccagctactaccagtacggcctgggcatcctggccctgtgcctgcaccagaagagagtgcacgacagcgtggtggacaagctgctgtacgccgtggagcccttccaccagggccaccacagcgtggacaccgccgccatggccggcctggccttcacctgcctgaagagaagcaacttcaaccccggcagaagacagagaatcaccatggccatcagaaccgtgagagaggagatcctgaaggcccagacccccgagggccacttcggcaacgtgtacagcacccccctggccctgcagttcctgatgaccagccccatgagaggcgccgagctgggcaccgcctgcctgaaggccagagtggccctgctggccagcctgcaggacggcgccttccagaacgccctgatgatcagccagctgctgcccgtgctgaaccacaagacctacatcgacctgatcttccccgactgcctggcccccagagtgatgctggagcccgccgccgagaccatcccccagacccaggagatcatcagcgtgaccctgcaggtgctgagcctgctgcccccctacagacagagcatcagcgtgctggccggcagcaccgtggaggacgtgctgaagaaggcccacgagctgggcggcttcacctacgagacccaggccagcctgagcggcccctacctgaccagcgtgatgggcaaggccgccggcgagagagagttctggcagctgctgagagaccccaacacccccctgctgcagggcatcgccgactacagacccaaggacggcgagaccatcgagctgagactggtgagctggtag

SEQ ID NO: 7625 - protein, 1411 aa, Artificial Sequence
  derived and/or modified sequence
MAEARKRRELLPLIYHHLLRAGYVRAAREVKEQSGQKCFLAQPVTLLDIYTHWQQTSELGRKRKAEEDAALQAKKTRVSDPISTSESSEEEEEAEAETAKATPRLASTNSSVLGADLPSSMKEKAKAETEKAGKTGNSMPHPATGKTVANLLSGKSPRKSAEPSANTTLVSETEEEGSVPAFGAAAKPGMVSAGQADSSSEDTSSSSDETDVEVKASEKILQVRAASAPAKGTPGKGATPAPPGKAGAVASQTKAGKPEEDSESSSEESSDSEEETPAAKALLQAKASGKTSQVGAASAPAKESPRKGAAPAPPGKTGPAVAKAQAGKREEDSQSSSEESDSEEEAPAQAKPSGKAPQVRAASAPAKESPRKGAAPAPPRKTGPAAAQVQVGKQEEDSRSSSEESDSDREALAAMNAAQVKPLGKSPQVKPASTMGMGPLGKGAGPVPPGKVGPATPSAQVGKWEEDSESSSEESSDSSDGEVPTAVAPAQEKSLGNILQAKPTSSPAKGPPQKAGPVAVQVKAEKPMDNSESSEESSDSADSEEAPAAMTAAQAKPALKIPQTKACPKKTNTTASAKVAPVRVGTQAPRKAGTATSPAGSSPAVAGGTQRPAEDSSSSEESDSEEEKTGLAVTVGQAKSVGKGLQVKAASVPVKGSLGQGTAPVLPGKTGPTVTQVKAEKQEDSESSEEESDSEEAAASPAQVKTSVKKTQAKANPAAARAPSAKGTISAPGKVVTAAAQAKQRSPSKVKPPVRNPQNSTVLARGPASVPSVGKAVATAAQAQTGPEEDSGSSEEESDSEEEAETLAQVKPSGKTHQIRAALAPAKESPRKGAAPTPPGKTGPSAAQAGKQDDSGSSSEESDSDGEAPAAVTSAQVIKPPLIFVDPNRSPAGPAATPAQAQAASTPRKARASESTARSSSSESEDEDVIPATQCLTPGIRTNVVTMPTAHPRIAPKASMAGASSSKESSRISDGKKQEGPATQVSKKNPASLPLTQAALKVLAQKASEAQPPVARTQPSSGVDSAVGTLPATSPQSTSVQAKGTNKLRKPKLPEVQQATKAPESSDDSEDSSDSSSGSEEDGEGPQGAKSAHTLGPTPSRTETLVEETAAESSEDDVVAPSQSLLSGYMTPGLTPANSQASKATPKLDSSPSVSSTLAAKDDPDGKQEAKPQQAAGMLSPKTGGKEAASGTTPQKSRKPKKGAGNPQASTLALQSNITQCLLGQPWPLNEAQVQASVVKVLTELLEQERKKVVDTTKESSRKGWESRKRKLSGDQPAARTPRSKKKKKLGAGEGGEASVSPEKTSTTSKGKAKRDKASGDVKEKKGKGSLGSQGAKDEPEEELQKGMGTVEGGDQSNPKSKKEKKKSDKRKKDKEKKEKKKKAKKASTKDSESPSQKKKKKKKKTAEQTV

SEQ ID NO: 7626 - DNA, 4236 bp, Artificial Sequence
  derived and/or modified sequence
atggccgaggccagaaagagaagagagctgctgcccctgatctaccaccacctgctgagagccggctacgtgagagccgccagagaggtgaaggagcagagcggccagaagtgcttcctggcccagcccgtgaccctgctggacatctacacccactggcagcagaccagcgagctgggcagaaagagaaaggccgaggaggacgccgccctgcaggccaagaagaccagagtgagcgaccccatcagcaccagcgagagcagcgaggaggaggaggaggccgaggccgagaccgccaaggccacccccagactggccagcaccaacagcagcgtgctgggcgccgacctgcccagcagcatgaaggagaaggccaaggccgagaccgagaaggccggcaagaccggcaacagcatgccccaccccgccaccggcaagaccgtggccaacctgctgagcggcaagagccccagaaagagcgccgagcccagcgccaacaccaccctggtgagcgagaccgaggaggagggcagcgtgcccgccttcggcgccgccgccaagcccggcatggtgagcgccggccaggccgacagcagcagcgaggacaccagcagcagcagcgacgagaccgacgtggaggtgaaggccagcgagaagatcctgcaggtgagagccgccagcgcccccgccaagggcacccccggcaagggcgccacccccgccccccccggcaaggccggcgccgtggccagccagaccaaggccggcaagcccgaggaggacagcgagagcagcagcgaggagagcagcgacagcgaggaggagacccccgccgccaaggccctgctgcaggccaaggccagcggcaagaccagccaggtgggcgccgccagcgcccccgccaaggagagccccagaaagggcgccgcccccgccccccccggcaagaccggccccgccgtggccaaggcccaggccggcaagagagaggaggacagccagagcagcagcgaggagagcgacagcgaggaggaggcccccgcccaggccaagcccagcggcaaggccccccaggtgagagccgccagcgcccccgccaaggagagccccagaaagggcgccgcccccgccccccccagaaagaccggccccgccgccgcccaggtgcaggtgggcaagcaggaggaggacagcagaagcagcagcgaggagagcgacagcgacagagaggccctggccgccatgaacgccgcccaggtgaagcccctgggcaagagcccccaggtgaagcccgccagcaccatgggcatgggccccctgggcaagggcgccggccccgtgccccccggcaaggtgggccccgccacccccagcgcccaggtgggcaagtgggaggaggacagcgagagcagcagcgaggagagcagcgacagcagcgacggcgaggtgcccaccgccgtggcccccgcccaggagaagagcctgggcaacatcctgcaggccaagcccaccagcagccccgccaagggccccccccagaaggccggccccgtggccgtgcaggtgaaggccgagaagcccatggacaacagcgagagcagcgaggagagcagcgacagcgccgacagcgaggaggcccccgccgccatgaccgccgcccaggccaagcccgccctgaagatcccccagaccaaggcctgccccaagaagaccaacaccaccgccagcgccaaggtggcccccgtgagagtgggcacccaggcccccagaaaggccggcaccgccaccagccccgccggcagcagccccgccgtggccggcggcacccagagacccgccgaggacagcagcagcagcgaggagagcgacagcgaggaggagaagaccggcctggccgtgaccgtgggccaggccaagagcgtgggcaagggcctgcaggtgaaggccgccagcgtgcccgtgaagggcagcctgggccagggcaccgcccccgtgctgcccggcaagaccggccccaccgtgacccaggtgaaggccgagaagcaggaggacagcgagagcagcgaggaggagagcgacagcgaggaggccgccgccagccccgcccaggtgaagaccagcgtgaagaagacccaggccaaggccaaccccgccgccgccagagcccccagcgccaagggcaccatcagcgcccccggcaaggtggtgaccgccgccgcccaggccaagcagagaagccccagcaaggtgaagccccccgtgagaaacccccagaacagcaccgtgctggccagaggccccgccagcgtgcccagcgtgggcaaggccgtggccaccgccgcccaggcccagaccggccccgaggaggacagcggcagcagcgaggaggagagcgacagcgaggaggaggccgagaccctggcccaggtgaagcccagcggcaagacccaccagatcagagccgccctggcccccgccaaggagagccccagaaagggcgccgcccccaccccccccggcaagaccggccccagcgccgcccaggccggcaagcaggacgacagcggcagcagcagcgaggagagcgacagcgacggcgaggcccccgccgccgtgaccagcgcccaggtgatcaagccccccctgatcttcgtggaccccaacagaagccccgccggccccgccgccacccccgcccaggcccaggccgccagcacccccagaaaggccagagccagcgagagcaccgccagaagcagcagcagcgagagcgaggacgaggacgtgatccccgccacccagtgcctgacccccggcatcagaaccaacgtggtgaccatgcccaccgcccaccccagaatcgcccccaaggccagcatggccggcgccagcagcagcaaggagagcagcagaatcagcgacggcaagaagcaggagggccccgccacccaggtgagcaagaagaaccccgccagcctgcccctgacccaggccgccctgaaggtgctggcccagaaggccagcgaggcccagccccccgtggccagaacccagcccagcagcggcgtggacagcgccgtgggcaccctgcccgccaccagcccccagagcaccagcgtgcaggccaagggcaccaacaagctgagaaagcccaagctgcccgaggtgcagcaggccaccaaggcccccgagagcagcgacgacagcgaggacagcagcgacagcagcagcggcagcgaggaggacggcgagggcccccagggcgccaagagcgcccacaccctgggccccacccccagcagaaccgagaccctggtggaggagaccgccgccgagagcagcgaggacgacgtggtggcccccagccagagcctgctgagcggctacatgacccccggcctgacccccgccaacagccaggccagcaaggccacccccaagctggacagcagccccagcgtgagcagcaccctggccgccaaggacgaccccgacggcaagcaggaggccaagccccagcaggccgccggcatgctgagccccaagaccggcggcaaggaggccgccagcggcaccaccccccagaagagcagaaagcccaagaagggcgccggcaacccccaggccagcaccctggccctgcagagcaacatcacccagtgcctgctgggccagccctggcccctgaacgaggcccaggtgcaggccagcgtggtgaaggtgctgaccgagctgctggagcaggagagaaagaaggtggtggacaccaccaaggagagcagcagaaagggctgggagagcagaaagagaaagctgagcggcgaccagcccgccgccagaacccccagaagcaagaagaagaagaagctgggcgccggcgagggcggcgaggccagcgtgagccccgagaagaccagcaccaccagcaagggcaaggccaagagagacaaggccagcggcgacgtgaaggagaagaagggcaagggcagcctgggcagccagggcgccaaggacgagcccgaggaggagctgcagaagggcatgggcaccgtggagggcggcgaccagagcaaccccaagagcaagaaggagaagaagaagagcgacaagagaaagaaggacaaggagaagaaggagaagaagaagaaggccaagaaggccagcaccaaggacagcgagagccccagccagaagaagaagaagaagaagaagaagaccgccgagcagaccgtgtag

SEQ ID NO: 7627 - DNA, 4236 bp, Artificial Sequence
  derived and/or modified sequence
atggccgaggccaggaaaaggagagagcttttgccactaatttatcatcacctgctcagggcaggatatgtgcgagctgctcgtgaggttaaggaacagagtggccagaaatgtttcttggcacagcccgtcacccttctggacatctacacccactggcagcagacgtctgaactgggccggaaacgcaaagctgaggaggatgcagcgcttcaggctaaaaaaacgagggtgtccgatcctatctcgacatccgaatcctcagaggaagaggaagaggctgaggcagaaacagccaaagccactcccaggcttgcaagcacaaatagctcagtgttaggggcggacctccctagttcaatgaaagagaaggctaaagcagaaacagagaaagcagggaagacgggtaattccatgccccaccccgctacaggcaagaccgtagcgaatctgctgtccgggaagtccccaagaaaatccgccgaaccttccgcaaatactaccctcgtgtctgaaaccgaggaggagggttccgtgccggctttcggagcagccgctaaacctgggatggtgtcagctggtcaggctgattcttctagcgaagatacatctagcagctctgacgagacagacgtagaagttaaggcttccgagaaaattctgcaggtgcgggccgcatccgcgcccgctaaggggacccctggaaagggtgcgacaccagcccctcccggaaaggccggagcagtggcttcccagactaaagccggcaagcccgaggaagactctgaatcatcttccgaggaaagcagcgatagtgaggaagaaacaccagctgcaaaggcgcttctccaagctaaagcgtcaggcaagacctcccaagtgggtgccgcctctgctccagccaaggagtctccgagaaagggtgctgcgccggcacctccaggaaagaccgggcctgccgtcgcaaaagctcaggccggaaagagagaggaggactcacagtccagcagtgaagaatccgacagtgaagaagaggctccagctcaagctaaaccgtcagggaaggccccacaggttcgcgccgcttccgccccggcgaaagagtctcctcgtaaaggagctgcaccggcaccacctcgcaaaacaggtcccgcagccgctcaagtgcaggttggaaaacaggaggaggatagcagatcttcttccgaggagagtgatagcgatcgagaggccttggcagctatgaacgctgcacaggttaagcccctgggaaaatctccccaagtcaaaccagcatctacaatgggaatgggcccacttggtaagggggctgggcccgtaccgccggggaaggtcggccccgccacacctagcgctcaggtcggcaaatgggaagaggatagcgagtcctcgtccgaagaaagtagcgatagctctgatggtgaagtgcctacggccgtggcccccgcgcaggagaagtccttagggaatatcctgcaggctaagcccacctcctcaccagccaaggggcctccgcagaaagctggaccagttgctgtccaggttaaggccgagaaaccaatggacaacagcgaaagttctgaggaaagttccgactccgcggactctgaagaggcgccagccgcaatgacagctgcacaagctaagccggcgctcaaaattccgcagactaaagcctgtcccaagaagaccaataccaccgcaagtgctaaggttgctcccgtacgtgttggtacccaggcccccaggaaggccggaaccgccacttcccccgccgggtcaagccccgcagtggccggggggacacagcggcctgcagaggactcatcttcatcggaagagagcgactctgaagaggaaaagacagggctcgctgtaactgtcggccaggctaagtcagtgggtaagggcctccaggttaaagccgcctccgtgcccgtaaaagggtctcttggccagggcacggcacctgtcctgcccggtaaaactggcccgactgtcacccaggtcaaagctgagaaacaggaagacagcgaatcttccgaagaggaaagtgacagcgaggaggccgctgcgtccccagcccaagtcaaaacttcggtgaagaagacccaagccaaggcaaatccagccgcggcccgcgctcccagtgccaaaggcacaatatccgcacccggtaaggtggttaccgctgccgcccaagctaaacagagatccccctctaaggtgaagccccccgtccggaacccccaaaatagtacagttctggctcgcggcccggcatccgttccatcagtgggaaaagctgtcgcgacagccgcacaggctcaaaccggaccggaggaagattccggaagttcagaggaagaaagcgactcggaagaagaggccgaaacattggcgcaggtcaagccatcggggaaaactcaccagattagggccgccctggcacccgctaaggaatcacccagaaagggtgctgcacccacacctcctggcaagaccggaccgtctgctgcacaggccggaaagcaagacgacagtgggtcatcatcagaagagtcggacagtgacggggaggctcccgctgccgtaacttccgcccaagtgattaaaccccctctcattttcgttgaccccaaccgctccccagcaggacctgctgcaactcctgcccaagcacaagccgccagcacccccagaaaggctcgggcctcagaaagcactgcccggtcatcctcatccgagtctgaagacgaggatgtaattccagcaactcaatgcttaacaccaggcatacggaccaacgtcgtgacaatgcccactgcccaccctcgcatcgcaccaaaagctagcatggctggcgcgtcaagcagtaaagagagtagccggattagtgacggcaagaaacaggaagggcccgctacacaggtgagcaaaaagaaccccgccagtcttcctttgactcaggcagcactgaaggtgttggcacagaaggccagcgaggcgcagcccccggtggcccgcacacagccgagtagtggcgtggattccgccgtcgggacccttccagctaccagcccacagtcaaccagtgtccaggcgaaaggtaccaacaagttgcgaaagcctaagctgcccgaggtccagcaagcaactaaggcaccagagagtagtgacgactcagaagacagcagcgatagcagctccggcagtgaggaagacggcgagggtccccagggtgctaagtccgcccacaccctgggccccactccctcccgcaccgagaccctggttgaggaaactgctgccgaaagttcagaggacgacgttgtggctcccagccagtcccttctctccgggtatatgacacccgggctgacgcctgcgaacagtcaagcctccaaggccacacctaaactggactcctcccctagtgtgagcagcactctcgctgccaaagatgacccagatggaaaacaggaagccaaaccccagcaggccgctggcatgttaagcccgaagacagggggtaaggaggcggccagcggaacaacaccccaaaagtctaggaaaccaaagaaaggggctgggaaccctcaggcttccacactggcactgcagtcaaatattacgcaatgcctgctgggccagccatggccactgaacgaggcccaggttcaggcttctgtggtaaaggtgctcaccgaactgcttgagcaggaacgcaaaaaggtggtggacaccaccaaagaaagctccagaaagggttgggaatcccggaagaggaaattgagcggcgatcaacccgcggccaggacccccagatccaaaaagaagaaaaaactgggcgctggtgaaggcggcgaagcttcagtgtcccctgaaaagacaagcactactagtaagggcaaagcaaaacgcgacaaggctagcggtgatgtcaaagagaagaagggcaagggcagtcttggatcccaaggcgccaaggatgaacctgaggaagaactccagaagggtatgggaaccgtcgaggggggagaccagagcaacccgaaaagtaagaaggaaaaaaagaagtccgacaaacgtaagaaggacaaggaaaagaaggagaagaaaaaaaaggctaagaaggccagtacaaaagacagcgagagccctagtcagaagaagaagaagaaaaaaaagaaaactgcagagcaaacagtctag

SEQ ID NO: 7628 - DNA, 4236 bp, Artificial Sequence
  derived and/or modified sequence
atggccgaggccaggaagagaagagagctgctgcccctcatctaccaccacctgctgcgggccggctacgtgcgggccgcccgggaggtgaaggagcagagcggccagaagtgcttcctggcccagcctgtgaccctgctggacatctacacccactggcagcagaccagcgagctgggcaggaagaggaaggccgaggaggatgctgccctgcaggccaagaagaccagggtgtctgaccccatcagcaccagcgagagcagcgaggaggaggaggaggccgaggccgagacagccaaggccaccccccggctggccagcaccaacagctctgtgctgggcgctgacctgcccagctccatgaaggagaaggccaaggccgagacagagaaggccggcaagacaggcaacagcatgccccacccagccaccgggaagacagtggccaacctgctgagcggcaagagccccaggaagtctgctgagcccagcgccaacaccaccctggtgtctgaaacagaggaggagggctctgtgcctgccttcggggctgctgccaagccaggcatggtgtctgctggccaggccgacagcagcagcgaggacaccagcagcagcagtgatgaaacagatgtggaggtgaaggccagcgagaagatcctgcaggtgcgggccgccagcgccccagccaagggcacccctgggaagggggccaccccagcccctcctgggaaggccggggctgtggccagccagaccaaggccggcaagccagaggaggacagcgagagcagcagcgaggagagcagtgacagcgaggaggagaccccagctgccaaggccctgctgcaggccaaggccagcggcaagaccagccaggtgggcgccgccagcgccccagccaaggagagccccaggaaaggagctgccccagcccctcctgggaagacaggccctgctgtggccaaggcccaggccggcaagcgggaggaggacagccagagcagcagcgaggagagtgacagcgaggaggaggccccagcccaggccaagcccagcggcaaggccccccaggtgcgggccgccagcgccccagccaaggagagccccaggaagggggccgccccagccccacccaggaagacaggccctgctgctgcccaggtgcaggtgggcaagcaggaggaggacagccgcagcagcagcgaggagagtgacagcgaccgggaggccctggccgccatgaatgctgcccaggtgaagcccctgggcaagagcccccaggtgaagccagccagcaccatgggcatgggccccctgggcaagggggccggccctgtgcccccaggcaaggtgggccctgccacccccagcgcccaggtgggcaagtgggaggaggacagcgagagcagcagcgaggagagcagtgacagcagtgatggagaggtgcccacagctgtggccccagcccaggagaagagcctgggcaacatcctgcaggccaagcccaccagcagccctgccaagggccccccccagaaggccggccctgtggccgtgcaggtgaaggccgagaagcccatggacaacagcgagagcagcgaggagagcagtgacagcgctgacagcgaggaggccccagctgccatgacagctgcccaggccaagccagccctgaagatcccccagaccaaggcctgccccaagaagaccaacaccacagccagcgccaaggtggcccctgtgcgggtgggcacccaggcccccaggaaggccggcacagccaccagccctgctggcagcagccctgctgtggccggcggcacccagaggcctgctgaggacagcagcagcagcgaggagagtgacagcgaggaggagaagacaggcctggccgtgacagtgggccaggccaagtctgtgggcaagggcctgcaggtgaaggccgcctctgtgcctgtgaagggcagcctgggccagggcacagcccctgtgctgcccgggaagacaggccccaccgtgacccaggtgaaggccgagaagcaggaggacagcgagagcagcgaggaggagagtgacagcgaggaggccgccgccagccctgcccaggtgaagacctctgtgaagaagacccaggccaaggccaacccagctgctgcccgggcccccagcgccaagggcaccatcagcgcccctgggaaggtggtgacagctgctgcccaggccaagcagaggagccccagcaaggtgaagccccctgtgaggaacccccagaacagcacagtgctggcccggggccctgcctctgtgcccagcgtgggcaaggctgtggccacagctgcccaggcccagacaggcccagaagaagattctggcagcagcgaggaggagagtgacagcgaggaggaggccgagaccctggcccaggtgaagcccagcggcaagacccaccagatccgggccgccctggccccagccaaggagagccccaggaagggggccgcccccaccccacctgggaagacaggccccagcgctgcccaggccggcaagcaggatgattctggcagcagcagcgaggagagtgacagtgatggagaggccccagctgctgtgaccagcgcccaggtgatcaagccacccctcatctttgtggaccccaacagaagccctgctggccctgctgccaccccagcccaggcccaggccgccagcacccccaggaaggcccgggccagcgagagcacagcccggagcagcagcagcgagagtgaagatgaagatgtgatcccagccacccagtgcctgaccccaggcatccgcaccaacgtggtgaccatgcccacagcccacccccgcatcgcccccaaggcctccatggccggggccagcagcagcaaggagagcagccgcatcagtgatggcaagaagcaggagggccctgccacccaggtgtccaagaagaacccagccagcctgcccctgacccaggccgccctgaaggtgctggcccagaaggccagcgaggcccagccccctgtggcccggacccagcccagcagtggagtggacagcgctgtgggcaccctgcctgccaccagcccccagagcacctctgtgcaggccaagggcaccaacaagctgaggaagcccaagctgcctgaggtgcagcaggccaccaaggcccctgagagcagtgatgattctgaggacagcagtgacagcagcagcggctctgaagaagatggagagggcccccagggcgccaagagcgcccacaccctgggccccacccccagcaggacagagaccctggtggaggagacagctgctgagagcagtgaagatgatgtggtggcccccagccagagcctgctgagcggctacatgaccccaggcctgaccccagccaacagccaggccagcaaggccacccccaagctggacagcagccccagcgtgagcagcaccctggccgccaaggatgatcctgatggcaagcaggaggccaagccccagcaggccgccggcatgctgagccccaagacaggaggcaaggaggccgccagcggcaccaccccccagaagagcaggaagcccaagaagggggccggcaacccccaggccagcaccctggccctgcagagcaacatcacccagtgcctgctgggccagccctggcccctgaatgaggcccaggtgcaggcctctgtggtgaaggtgctgacagagctgctggagcaggagaggaagaaggtggtggacaccaccaaggagagcagcaggaagggctgggagagcaggaagaggaagctgagcggggaccagcctgctgcccggacccccaggagcaagaagaagaagaagctgggcgctggggagggcggggaggcctctgtgtccccagagaagaccagcaccaccagcaagggcaaggccaagagggacaaggccagcggagatgtgaaggagaagaagggcaagggcagcctgggcagccagggcgccaaggatgagcctgaggaggagctgcagaagggcatgggcaccgtggagggcggggaccagagcaaccccaagagcaagaaggagaagaagaagagtgacaagaggaagaaggacaaggagaagaaggagaagaagaagaaggccaagaaggccagcaccaaggacagcgagagccccagccagaagaagaagaagaagaagaagaagacagctgagcagacagtgtag

SEQ ID NO: 7629 - DNA, 4236 bp, Artificial Sequence
  derived and/or modified sequence
atggccgaggcccggaagcggcgggagctgctgcccctgatctaccatcacctcctcagggctggatatgtcagggctgcgagagaggtaaaggagcagtctggtcaaaaatgttttctggcacagcccgtcactctactggatatctatactcactggcaacaaactagcgagttgggtaggaagaggaaggccgaggaggatgctgcgctgcaggccaaaaagacacgagttagtgatccaataagtaccagtgagtcgtccgaagaggaagaggaggcagaggccgaaactgcaaaggctacacctcggctggccagcaccaactcctcggtcttgggtgctgacctgccttctagcatgaaggaaaaagccaaggcagaaaccgaaaaagcaggcaagacaggaaatagcatgcctcatcccgctacaggcaagactgtagccaatctgctgagcggaaaaagtcctagaaagtctgcagagccaagcgccaatacaaccttggtgtctgagacagaggaggagggaagcgtgcccgctttcggcgcggcagcaaaaccaggcatggttagcgccggacaggccgactcctcgagcgaggacaccagctcatcatccgatgaaacagacgtggaggtgaaagcctctgagaaaatcctgcaggttcgagccgccagcgctcctgcaaaaggaacaccgggtaagggagcaacacccgccccacccgggaaagccggggccgtggcaagccagaccaaggcaggcaagccggaggaggattccgaatccagtagcgaagagagtagtgactccgaggaggaaactccggccgccaaagcactgttgcaggcaaaagccagcgggaagacatcgcaggtaggcgcagccagcgcccccgcaaaggaatcccctagaaagggagccgcaccagccccgcctggaaagacaggtcccgctgtcgccaaagctcaggccggcaaaagggaggaagatagtcaatccagctcagaagaaagtgactcagaggaggaggctcctgcacaggctaagcccagcggtaaggctcctcaagtcagagctgccagcgctccggccaaggaaagtccacgtaagggtgcagccccagcccctccgcgcaagactgggcctgcagctgctcaggtccaggtggggaagcaagaggaagactctcggagctcttccgaggagtccgattccgatcgagaagctctggcagccatgaacgctgcccaggtcaagccactaggcaagagcccccaggtcaaacccgcatcaaccatgggaatgggtccgctgggcaagggcgctggccccgttcctcctggcaaagtcggcccagccacaccatccgctcaggtgggcaagtgggaggaagattccgagagcagttccgaagagagcagtgattctagcgacggtgaggtcccgactgcagttgccccagcccaggagaagtcactgggaaatatcctccaagcgaaaccaacgtctagtcccgccaaaggcccccctcaaaaggcgggcccagttgccgtgcaggtgaaggctgagaaacctatggacaattcagagtctagcgaggagtcaagcgattccgctgactctgaagaggcccctgcagccatgactgctgctcaggctaagcctgctcttaaaattccacagaccaaggcatgtccaaaaaaaacaaacacgactgcttctgccaaggtagcacccgtccgggtgggaacccaggccccgcgcaaggctggaaccgctacatcacctgctgggtccagccctgcggtagccggggggacccagaggccggctgaggactcttccagttccgaggagagcgactccgaagaggagaagaccggactcgcggtgaccgtggggcaggccaagtctgttggcaagggcttacaggtaaaggccgccagtgtgcctgtgaagggctccctgggtcagggcacagctccagtccttccagggaagactgggcccaccgtgacacaggtgaaagcagaaaagcaggaggactcagaatctagcgaagaagaaagtgacagcgaagaagctgccgcttctccagcgcaggtcaagacctcagtgaaaaaaacccaggccaaagctaacccagccgcagcccgcgccccgtcagctaagggcacgattagcgccccaggtaaggtggtaaccgccgctgctcaggctaagcaacggagccctagcaaagtgaagccaccagttcgcaatccacagaactctacggtgttggctaggggacccgcatcagtaccctcagttggcaaggcagtcgctaccgccgctcaagctcagaccggccctgaggaggattcagggtcttccgaagaggagtctgacagcgaggaagaggctgaaacactcgctcaggtgaaacctagcggaaagactcaccaaattcgcgccgcgcttgctcctgccaaggagtccccacgaaaaggggccgctcctactccacccggtaagaccggcccttcggcagcacaggccggtaagcaagacgatagtggttcttccagcgaggaaagcgactcagatggggaagcaccggctgcggtcacctctgcccaggtaataaagccacccctgatcttcgtggaccccaatcggtctccggccgggcccgccgccactcccgctcaagcccaggcagcctcaactccacgaaaagccagagcctcagagagcactgctcgatcatctagtagcgagtccgaagacgaagacgtcatccccgctacccagtgtttgacacccgggattagaactaatgtggtaacaatgcccaccgcccacccccggattgcgccgaaagccagcatggccggggcatcctcctctaaagaaagcagccggattagcgacgggaagaagcaggaagggcccgcaactcaagttagtaagaaaaacccagcttccctgcctttgactcaggctgccctcaaagtgcttgctcagaaagcgtctgaggcacaaccaccagtagctaggacccagccgagcagtggtgtcgattccgccgtgggcacgttaccagcaacatccccacaatccacctccgtgcaagcaaaaggtaccaataagctcaggaagcccaagttgccagaagtccagcaggcaactaaggctccagagtccagcgatgattctgaagattcaagtgattccagcagcggttctgaagaagatggggaggggccccagggtgcaaaaagtgcccacaccctgggcccaaccccaagtaggactgaaactctggtggaggagacagccgccgagagttcggaggacgacgtggtcgctccatcgcagagcctcctctccggttatatgactcccggactgactccagccaactcacaggcctccaaggctaccccaaagctagatagctctccttctgtaagcagcaccttggccgctaaggatgaccccgatgggaagcaggaggcaaagccccaacaggccgcagggatgttgagccctaagactggcgggaaagaagctgcatccggaacaacaccccagaagagccggaagcctaagaaaggcgctggtaatcctcaggcctcgaccttggctctgcagagcaacataacacagtgcttgctgggccagccttggccattgaatgaggctcaagttcaggcatcagtggtcaaagtgttaacagagctgttagaacaggagcgaaagaaagtggttgacaccactaaagagagtagccggaaagggtgggagtccagaaaaaggaagttaagtggggaccaacccgccgcacggacccctcgatccaagaagaagaagaaactgggggctggtgagggaggcgaggcgtccgtctcccctgaaaaaacaagtacaaccagcaagggtaaagccaaacgtgacaaggcttcaggagatgtcaaggaaaaaaagggcaaaggctccctaggaagccaaggggctaaagacgaaccagaggaggaacttcagaaggggatgggcacggtcgagggaggagatcagagcaatccgaagtctaagaaggaaaaaaagaagagcgataagagaaagaaggacaaggagaagaaggagaagaagaaaaaagctaagaaagctagcactaaggattccgaaagcccgtcacagaagaaaaaaaagaagaaaaaaaagactgcagaacagacggtatag

SEQ ID NO: 7630 - DNA, 4236 bp, Artificial Sequence
  derived and/or modified sequence
atggcagaagccaggaagaggagggagctcctccctctgatctaccatcatcttctgagagctgggtatgtgcgggctgctcgcgaagtcaaagaacaaagtggccaaaagtgcttcctggcccagcccgtcacccttctggacatatatacccactggcaacagacctccgagctcggccgtaagaggaaggccgaggaggatgctgcactccaggcaaagaagaccagggtttccgaccccatatccacctccgagtcatcggaggaggaggaagaggctgaggcagaaacagcaaaggctaccccacgactcgcaagcactaatagctccgttttgggcgctgacttgccaagctctatgaaggaaaaagccaaggccgagaccgaaaaggccggtaagaccggaaactctatgccccaccctgcaacaggaaaaaccgtggccaaccttctgagtggaaagtcccccaggaagtcggcggagcctagcgctaacaccactctcgtgtccgagaccgaggaggagggctctgtgcccgcatttggtgccgctgcaaagccaggaatggtgtccgccggacaagccgactccagttccgaggacactagctctagcagcgatgagacggacgtggaggttaaagccagcgagaagatactccaggtccgggctgcaagcgctccagccaaggggacccctgggaagggcgcaacaccagctccacccggtaaagccggtgctgtagcatctcagaccaaggctggaaagccagaggaggactccgaatccagtagcgaggagtccagcgacagtgaggaagaaacgcccgcagccaaggccttactgcaggctaaggccagtggaaaaacatctcaggtgggtgccgcaagcgccccagctaaagaatccccacgaaaaggcgcagctcctgccccaccaggaaaaactggaccggcagtcgccaaagctcaggccggaaaacgcgaggaagattcccaaagcagcagcgaagagagtgactccgaagaagaggccccagcacaagctaaaccttccggcaaggcccctcaggtgcgggcagcctcagcacccgctaaggaaagtcccaggaaaggagccgctccagcacctccccgaaagactggccctgctgctgcccaggtccaagtcggcaagcaggaagaggattcccggagttccagcgaggagtctgactctgatcgagaggcgctggccgctatgaatgcggctcaggtcaagcccttggggaagtccccacaggtcaagcccgcttccactatggggatgggacccctcggaaaaggtgcaggccctgttccacccggtaaggtggggccagccacgcccagcgcacaggtgggaaaatgggaggaggacagcgaatcgagcagcgaggaatctagcgacagttccgacggggaggtgccaacagcggtggcgccagcccaagagaaatcactgggaaacattctacaggctaaacctacatcgtccccagccaaggggcctccccagaaagctggcccagtggccgtgcaggtgaaggctgagaagccaatggacaactccgagtcgtcggaagagtcgtccgacagcgcggactcagaggaggcgcctgcggctatgaccgctgcccaggccaaaccagctctcaaaatcccacagacgaaagcctgtcccaagaaaaccaatactaccgccagcgctaaagttgctccggtgagggtgggaacacaggctccaagaaaggctgggactgcgacttctcctgcgggatcttcgccagctgttgccggtggtacccagcgcccagccgaagacagctcctctagcgaggaaagtgacagtgaagaggagaaaactgggctggccgtcacagttggccaggcgaagagtgtggggaagggcctgcaagtgaaggcagcatcggtccctgtcaaggggtccttggggcagggaacagcccctgtgctacctggcaaaacaggccctaccgtgacacaggtgaaggcagaaaagcaggaggactccgagtccagcgaagaggagagcgacagcgaggaggccgctgctagcccagctcaggtgaagacctctgtgaagaaaactcaggccaaagccaacccagcagctgcaagggccccatccgcgaaaggcacgattagcgctcctggcaaagtagtgactgcggctgcacaggcgaaacagcgctctccttctaaagttaagccccctgtgaggaatccccagaactcaactgttctggcaagagggccagcttccgttccctccgtcggcaaagccgtggcaacagcagcacaggcccagaccggcccagaggaagactctggctcatccgaagaagaatcagattccgaggaagaggccgaaactctcgcgcaggtgaagcccagcggaaaaactcaccaaatccgcgcagcattagcgcctgccaaggagagcccaaggaagggagcagctcccacacctccagggaaaaccggcccttccgctgcccaggctgggaaacaagatgactcaggctcctcaagtgaagagagtgacagtgacggcgaggctcccgctgcagtcacttccgcgcaggttatcaagccccctcttatcttcgtggatcccaaccggagccctgccggtccagccgcaacccctgcacaggcacaggccgcaagcacaccaaggaaggctagagcgagcgagagcaccgccaggtcgtcgtcttccgaaagcgaggatgaagacgtgatccctgcaactcagtgtttaacccccggtatcaggactaatgtggtaactatgcccacagcccatccgcgtattgcacctaaggcctcaatggccggagccagctccagcaaggagtccagccgcattagtgatggcaaaaaacaggagggacctgcgacacaggtgagcaagaaaaaccctgcatctctcccgttgacccaagccgctcttaaggttctggcacagaaagcaagcgaagctcagccccctgtggcacgtacccagccaagctccggggtggacagcgccgtcggcacactgccagccacatcgccccaatctacaagcgttcaggccaaggggactaataaactccggaaacctaaactgcccgaggtgcagcaggcaacgaaggctccagagtcttccgatgacagcgaggactccagcgatagttcaagtggtagcgaggaagatggagaggggccacagggtgccaagtcagcacataccctggggcctacgccgagcaggaccgaaacgctggtcgaagaaactgctgccgaatcttctgaggacgacgtcgtagcccctagccagagcctgcttagcggatacatgacaccagggctgacacccgcaaatagccaggcctctaaggctacaccaaagctggatagctccccaagtgtgtctagtacgctggccgctaaggacgatcccgatgggaaacaggaagctaagccgcagcaggccgcaggaatgttatcacccaaaaccggcggtaaggaggcagctagcgggactacaccccagaagtctagaaagccaaagaagggggcaggtaatccccaagcctccactctggcgctgcagagtaacataactcagtgcctgctcgggcagccatggcccctgaacgaagcccaggtgcaggcatcggtggtgaaggtgttgacagagctgctggaacaggagagaaagaaggtggtcgatactaccaaggagagctctcgaaagggctgggagtcacgcaagcgtaaactctctggcgaccaacccgctgctcggactcctcggtctaaaaagaagaagaagttgggcgcaggggaaggcggtgaggcttctgtgtccccggagaagacaagcaccaccagcaaaggaaaggcaaagcgggataaggcgtcaggcgatgtgaaggaaaagaagggcaagggctctctgggtagccaaggtgcaaaggacgagcccgaagaggagctgcagaagggcatggggaccgtggagggaggcgaccagtctaatccaaagagtaaaaaagagaaaaagaaatccgataagaggaaaaaggataaggaaaaaaaagaaaagaagaagaaagctaaaaaggcctccaccaaagattcggaatcccctagccagaaaaaaaagaaaaaaaagaagaaaacagccgagcagactgtgtag

SEQ ID NO: 7631 - DNA, 4816 bp, Artificial Sequence
  derived and/or modified sequence
taagggcgcgagggaagtggcgggcggggactaaggcggggcgtgcaggtagccggccggccgggggtcgcgggtatggccgaggccaggaagcggcgggagctacttcccctgatctaccaccatctgctgcgggctggctatgtgcgtgcggcgcgggaagtgaaggagcagagcggccagaagtgtttcctggctcagcccgtaacccttctggacatctatacacactggcaacaaacctcagagcttggtcggaagcggaaggcagaggaagatgcggcactgcaagctaagaaaacccgtgtgtcagaccccatcagcacctcggagagctcggaagaggaggaagaagcagaagccgaaaccgccaaagccaccccaagactagcatctaccaactcctcagtcctgggggcggacttgccatcaagcatgaaagaaaaagccaaggcagagacagagaaagctggcaagactgggaattccatgccacaccctgccactgggaagacggtggccaaccttctttctgggaagtctcccaggaagtcagcagagccctcagcaaatactacgttggtctcagaaactgaggaggagggcagcgtcccggcctttggagctgctgccaagcctgggatggtgtcagcgggccaggccgacagctccagcgaggacacctccagctccagtgatgagacagacgtggaggtaaaggcctctgaaaaaattctccaggtcagagctgcctcagcccctgccaaggggacccctgggaaaggggctaccccagcaccccctgggaaggcaggggctgtagcctcccagaccaaggcagggaagccagaggaggactcagagagcagcagcgaggagtcatctgacagtgaggaggagacgccagctgccaaggccctgcttcaggcgaaggcctcaggaaaaacctctcaggtcggagctgcctcagcccctgccaaggagtcccccaggaaaggagctgccccagcgccccctgggaagacagggcctgcagttgccaaggcccaggcggggaagcgggaggaggactcgcagagcagcagcgaggaatcggacagtgaggaggaggcgcctgctcaggcgaagccttcagggaaggccccccaggtcagagccgcctcggcccctgccaaggagtcccccaggaaaggggctgccccagcacctcctaggaaaacagggcctgcagccgcccaggtccaggtggggaagcaggaggaggactcaagaagcagcagcgaggagtcagacagtgacagagaggcactggcagccatgaatgcagctcaggtgaagcccttggggaaaagcccccaggtgaaacctgcctctaccatgggcatggggcccttggggaaaggcgccggcccagtgccacccgggaaggtggggcctgcaaccccctcagcccaggtggggaagtgggaggaggactcagagagcagtagtgaggagtcatcagacagcagtgatggagaggtgcccacagctgtggccccggctcaggaaaagtccttggggaacatcctccaggccaaacccacctccagtcctgccaaggggccccctcagaaggcagggcctgtagccgtccaggtcaaggctgaaaagcccatggacaactcggagagcagcgaggagtcatcggacagtgcggacagtgaggaggcaccagcagccatgactgcagctcaggcaaaaccagctctgaaaattcctcagaccaaggcctgcccaaagaaaaccaataccactgcatctgccaaggtcgcccctgtgcgagtgggcacccaagccccccggaaagcaggaactgcgacttctccagcaggctcatccccagctgtggctgggggcacccagagaccagcagaggattcttcaagcagtgaggaatcagatagtgaggaagagaagacaggtcttgcagtaaccgtgggacaggcaaagtctgtggggaaaggcctccaggtgaaagcagcctcagtgcctgtcaaggggtccttggggcaagggactgctccagtactccctgggaagacggggcctacagtcacccaggtgaaagctgaaaagcaggaagactctgagagcagtgaggaggaatcagacagtgaggaagcagctgcatctccagcacaggtgaaaacctcagtaaagaaaacccaggccaaagccaacccagctgccgccagagcaccttcagcaaaagggacaatttcagcccctggaaaagttgtcactgcagctgctcaagccaagcagaggtctccatccaaggtgaagccaccagtgagaaacccccagaacagtaccgtcttggcgaggggcccagcatctgtgccatctgtggggaaggccgtggctacagcagctcaggcccagacagggccagaggaggactcagggagcagtgaggaggagtcagacagtgaggaggaggcggagacgctggctcaggtgaagccttcagggaagacccaccagatcagagctgccttggctcctgccaaggagtcccccaggaaaggggctgccccaacacctcctgggaagacagggccttcggctgcccaggcagggaagcaggatgactcagggagcagcagcgaggaatcagacagtgatggggaggcaccggcagctgtgacctctgcccaggtgattaaaccccctctgatttttgtcgaccctaatcgtagtccagctggcccagctgctacacccgcacaagcccaggctgcaagcaccccgaggaaggcccgagcctcggagagcacagccaggagctcctcctccgagagcgaggatgaggacgtgatccccgctacacagtgcttgactcctggcatcagaaccaatgtggtgaccatgcccactgcccacccaagaatagcccccaaagccagcatggctggggccagcagcagcaaggagtccagtcggatatcagatggcaagaaacaggagggaccagccactcaggtgtcaaagaagaacccagcttccctcccactgacccaggctgccctgaaggtcctcgcccagaaagccagtgaggctcagcctcctgttgccaggacccagccttcaagtggggttgacagtgctgtgggaacactccctgcaacaagtccccagagcacctccgtccaggccaaagggaccaacaagctcagaaaacctaagcttcctgaggtccagcaggccaccaaagcccctgagagctcagatgacagtgaggacagcagcgacagttcttcagggagtgaggaagatggtgaagggccccagggggccaagtcagcccacacgctgggtcccaccccctccaggacagagaccctggtggaggagaccgcagcagagtccagcgaggatgatgtggtggcgccatcccagtctctcctctcaggttatatgacccctggactaaccccagccaattcccaggcctcaaaagccactcccaagctagactccagcccctcagtttcctctactctggccgccaaagatgacccagatggcaagcaggaggcaaagccccaacaggcagcaggcatgttgtcccctaaaacaggtggaaaagaggctgcttcaggcaccacacctcagaagtcccggaagcccaagaaaggggctgggaacccccaagcctcaaccctggcgctgcaaagcaacatcacccagtgcctcctgggccaaccctggcccctgaatgaggcccaggtgcaggcctcagtggtgaaggtcctgactgagctgctggaacaggaaagaaagaaggtggtggacaccaccaaggagagcagcaggaagggctgggagagccgcaagcggaagctatcgggagaccagccagctgccaggacccccaggagcaagaagaagaagaagctgggggccggggaaggtggggaggcctctgtttccccagaaaagacctccacgacttccaaggggaaagcaaagagagacaaagcaagtggtgatgtcaaggagaagaaagggaaggggtctcttggctcccaaggggccaaggacgagccagaagaggagcttcagaaggggatggggacggttgaaggtggagatcaaagcaacccaaagagcaagaaggagaagaagaaatccgacaagagaaaaaaagacaaagaaaaaaaagaaaagaagaagaaagcaaaaaaggcctcaaccaaagattctgagtcaccgtcccagaagaaaaagaagaaaaagaagaagacagcagagcagactgtatgacgagcaccagcaccaggcacagggatttcctagccgagcagtggccatccccatgcctctgacctccaccgacctctgcccaccatgggttggaactaaactgttaccttccctcgctccacagaagaagacagccagcttcaggggtccctgtgctggccaagccagtgagcctgcggggaggctggtccaaggagaaagtggaccagctcccatgacctcaccccactcccccaacacaggacgcttcatatagatgtgtacagtatatgtatttttttaagtgacctcctctccttccacagaccccacatgcccaaaggcctcgggacttcccaccaccttgctccacagatccagctaggcctgacctgtgcctcatcccgtgccgctcggtctctggctgatcccgaggctttgtcttcctctcgtcagttcttttggttgtgttttttgttttttttttaataactcaaaaaaaaaataaaagacttggaggaagggt

SEQ ID NO: 7632 - protein, 683 aa, Artificial Sequence
  derived and/or modified sequence
MALFVRLLALALALALGPAATLAGPAKSPYQLVLQHSRLRGRQHGPNVCAVQKVIGTNRKYFTNCKQWYQRKICGKSTVISYECCPGYEKVPGEKGCPAALPLSNLYETLGVVGSTTTQLYTDRTEKLRPEMEGPGSFTIFAPSNEAWASLPAEVLDSLVSNVNIELLNALRYHMVGRRVLTDELKHGMTLTSMYQNSNIQIHHYPNGIVTVNCARLLKADHHATNGVVHLIDKVISTITNNIQQIIEIEDTFETLRAAVAASGLNTMLEGNGQYTLLAPTNEAFEKIPSETLNRILGDPEALRDLLNNHILKSAMCAEAIVAGLSVETLEGTTLEVGCSGDMLTINGKAIISNKDILATNGVIHYIDELLIPDSAKTLFELAAESDVSTAIDLFRQAGLGNHLSGSERLTLLAPLNSVFKDGTPPIDAHTRNLLRNHIIKDQLASKYLYHGQTLETLGGKKLRVFVYRNSLCIENSCIAAHDKRGRYGTLFTMDRVLTPPMGTVMDVLKGDNRFSMLVAAIQSAGLTETLNREGVYTVFAPTNEAFRALPPRERSRLLGDAKELANILKYHIGDEILVSGGIGALVRLKSLQGDKLEVSLKNNVVSVNKEPVAEPDIMATNGVVHVITNVLQPPANRPQERGDELADSALEIFKQASAFSRPEQPQVLCSPVYQKLLERMKH

SEQ ID NO: 7633 - protein, 416 aa, Artificial Sequence
  derived and/or modified sequence
MLEGNGQYTLLAPTNEAFEKIPSETLNRILGDPEALRDLLNNHILKSAMCAEAIVAGLSVETLEGTTLEVGCSGDMLTINGKAIISNKDILATNGVIHYIDELLIPDSAKTLFELAAESDVSTAIDLFRQAGLGNHLSGSERLTLLAPLNSVFKDGTPPIDAHTRNLLRNHIIKDQLASKYLYHGQTLETLGGKKLRVFVYRNSLCIENSCIAAHDKRGRYGTLFTMDRVLTPPMGTVMDVLKGDNRFSMLVAAIQSAGLTETLNREGVYTVFAPTNEAFRALPPRERSRLLGDAKELANILKYHIGDEILVSGGIGALVRLKSLQGDKLEVSLKNNVVSVNKEPVAEPDIMATNGVVHVITNVLQPPANRPQERGDELADSALEIFKQASAFSRASQRSVRLAPVYQKLLERMKH

SEQ ID NO: 7634 - protein, 683 aa, Artificial Sequence
  derived and/or modified sequence
MALFVRLLALALALALGPAATLAGPAKSPYQLVLQHSRLRGRQHGPNVCAVQKVIGTNRKYFTNCKQWYQRKICGKSTVISYECCPGYEKVPGEKGCPAALPLSNLYETLGVVGSTTTQLYTDRTEKLRPEMEGPGSFTIFAPSNEAWASLPAEVLDSLVSNVNIELLNALRYHMVGRRVLTDELKHGMTLTSMYQNSNIQIHHYPNGIVTVNCARLLKADHHATNGVVHLIDKVISTITNNIQQIIEIEDTFETLRAAVAASGLNTMLEGNGQYTLLAPTNEAFEKIPSETLNRILGDPEALRDLLNNHILKSAMCAEAIVAGLSVETLEGTTLEVGCSGDMLTINGKAIISNKDILATNGVIHYIDELLIPDSAKTLFELAAESDVSTAIDLFRQAGLGNHLSGSERLTLLAPLNSVFKDGTPPIDAHTRNLLRNHIIKDQLASKYLYHGQTLETLGGKKLRVFVYRNSLCIENSCIAAHDKRGRYGTLFTMDRVLTPPMGTVMDVLKGDNRFSMLVAAIQSAGLTETLNREGVYTVFAPTNEAFRALPPRERSRLLGDAKELANILKYHIGDEILVSGGIGALVRLKSLQGDKLEVSLKNNVVSVNKEPVAEPDIMATNGVVHVITNVLQPPANRPQERGDELADSALEIFKQASAFSRASQRSVRLAPVYQKLLERMKH

SEQ ID NO: 7635 - DNA, 2052 bp, Artificial Sequence
  derived and/or modified sequence
atggccctgttcgtgagactgctggccctggccctggccctggccctgggccccgccgccaccctggccggccccgccaagagcccctaccagctggtgctgcagcacagcagactgagaggcagacagcacggccccaacgtgtgcgccgtgcagaaggtgatcggcaccaacagaaagtacttcaccaactgcaagcagtggtaccagagaaagatctgcggcaagagcaccgtgatcagctacgagtgctgccccggctacgagaaggtgcccggcgagaagggctgccccgccgccctgcccctgagcaacctgtacgagaccctgggcgtggtgggcagcaccaccacccagctgtacaccgacagaaccgagaagctgagacccgagatggagggccccggcagcttcaccatcttcgcccccagcaacgaggcctgggccagcctgcccgccgaggtgctggacagcctggtgagcaacgtgaacatcgagctgctgaacgccctgagataccacatggtgggcagaagagtgctgaccgacgagctgaagcacggcatgaccctgaccagcatgtaccagaacagcaacatccagatccaccactaccccaacggcatcgtgaccgtgaactgcgccagactgctgaaggccgaccaccacgccaccaacggcgtggtgcacctgatcgacaaggtgatcagcaccatcaccaacaacatccagcagatcatcgagatcgaggacaccttcgagaccctgagagccgccgtggccgccagcggcctgaacaccatgctggagggcaacggccagtacaccctgctggcccccaccaacgaggccttcgagaagatccccagcgagaccctgaacagaatcctgggcgaccccgaggccctgagagacctgctgaacaaccacatcctgaagagcgccatgtgcgccgaggccatcgtggccggcctgagcgtggagaccctggagggcaccaccctggaggtgggctgcagcggcgacatgctgaccatcaacggcaaggccatcatcagcaacaaggacatcctggccaccaacggcgtgatccactacatcgacgagctgctgatccccgacagcgccaagaccctgttcgagctggccgccgagagcgacgtgagcaccgccatcgacctgttcagacaggccggcctgggcaaccacctgagcggcagcgagagactgaccctgctggcccccctgaacagcgtgttcaaggacggcaccccccccatcgacgcccacaccagaaacctgctgagaaaccacatcatcaaggaccagctggccagcaagtacctgtaccacggccagaccctggagaccctgggcggcaagaagctgagagtgttcgtgtacagaaacagcctgtgcatcgagaacagctgcatcgccgcccacgacaagagaggcagatacggcaccctgttcaccatggacagagtgctgaccccccccatgggcaccgtgatggacgtgctgaagggcgacaacagattcagcatgctggtggccgccatccagagcgccggcctgaccgagaccctgaacagagagggcgtgtacaccgtgttcgcccccaccaacgaggccttcagagccctgccccccagagagagaagcagactgctgggcgacgccaaggagctggccaacatcctgaagtaccacatcggcgacgagatcctggtgagcggcggcatcggcgccctggtgagactgaagagcctgcagggcgacaagctggaggtgagcctgaagaacaacgtggtgagcgtgaacaaggagcccgtggccgagcccgacatcatggccaccaacggcgtggtgcacgtgatcaccaacgtgctgcagccccccgccaacagaccccaggagagaggcgacgagctggccgacagcgccctggagatcttcaagcaggccagcgccttcagcagacccgagcagccccaggtgctgtgcagccccgtgtaccagaagctgctggagagaatgaagcactag

SEQ ID NO: 7636 - DNA, 1251 bp, Artificial Sequence
  derived and/or modified sequence
atgctggagggcaacggccagtacaccctgctggcccccaccaacgaggccttcgagaagatccccagcgagaccctgaacagaatcctgggcgaccccgaggccctgagagacctgctgaacaaccacatcctgaagagcgccatgtgcgccgaggccatcgtggccggcctgagcgtggagaccctggagggcaccaccctggaggtgggctgcagcggcgacatgctgaccatcaacggcaaggccatcatcagcaacaaggacatcctggccaccaacggcgtgatccactacatcgacgagctgctgatccccgacagcgccaagaccctgttcgagctggccgccgagagcgacgtgagcaccgccatcgacctgttcagacaggccggcctgggcaaccacctgagcggcagcgagagactgaccctgctggcccccctgaacagcgtgttcaaggacggcaccccccccatcgacgcccacaccagaaacctgctgagaaaccacatcatcaaggaccagctggccagcaagtacctgtaccacggccagaccctggagaccctgggcggcaagaagctgagagtgttcgtgtacagaaacagcctgtgcatcgagaacagctgcatcgccgcccacgacaagagaggcagatacggcaccctgttcaccatggacagagtgctgaccccccccatgggcaccgtgatggacgtgctgaagggcgacaacagattcagcatgctggtggccgccatccagagcgccggcctgaccgagaccctgaacagagagggcgtgtacaccgtgttcgcccccaccaacgaggccttcagagccctgccccccagagagagaagcagactgctgggcgacgccaaggagctggccaacatcctgaagtaccacatcggcgacgagatcctggtgagcggcggcatcggcgccctggtgagactgaagagcctgcagggcgacaagctggaggtgagcctgaagaacaacgtggtgagcgtgaacaaggagcccgtggccgagcccgacatcatggccaccaacggcgtggtgcacgtgatcaccaacgtgctgcagccccccgccaacagaccccaggagagaggcgacgagctggccgacagcgccctggagatcttcaagcaggccagcgccttcagcagagccagccagagaagcgtgagactggcccccgtgtaccagaagctgctggagagaatgaagcactag

SEQ ID NO: 7637 - DNA, 2052 bp, Artificial Sequence
  derived and/or modified sequence
atggccctgttcgtgagactgctggccctggccctggccctggccctgggccccgccgccaccctggccggccccgccaagagcccctaccagctggtgctgcagcacagcagactgagaggcagacagcacggccccaacgtgtgcgccgtgcagaaggtgatcggcaccaacagaaagtacttcaccaactgcaagcagtggtaccagagaaagatctgcggcaagagcaccgtgatcagctacgagtgctgccccggctacgagaaggtgcccggcgagaagggctgccccgccgccctgcccctgagcaacctgtacgagaccctgggcgtggtgggcagcaccaccacccagctgtacaccgacagaaccgagaagctgagacccgagatggagggccccggcagcttcaccatcttcgcccccagcaacgaggcctgggccagcctgcccgccgaggtgctggacagcctggtgagcaacgtgaacatcgagctgctgaacgccctgagataccacatggtgggcagaagagtgctgaccgacgagctgaagcacggcatgaccctgaccagcatgtaccagaacagcaacatccagatccaccactaccccaacggcatcgtgaccgtgaactgcgccagactgctgaaggccgaccaccacgccaccaacggcgtggtgcacctgatcgacaaggtgatcagcaccatcaccaacaacatccagcagatcatcgagatcgaggacaccttcgagaccctgagagccgccgtggccgccagcggcctgaacaccatgctggagggcaacggccagtacaccctgctggcccccaccaacgaggccttcgagaagatccccagcgagaccctgaacagaatcctgggcgaccccgaggccctgagagacctgctgaacaaccacatcctgaagagcgccatgtgcgccgaggccatcgtggccggcctgagcgtggagaccctggagggcaccaccctggaggtgggctgcagcggcgacatgctgaccatcaacggcaaggccatcatcagcaacaaggacatcctggccaccaacggcgtgatccactacatcgacgagctgctgatccccgacagcgccaagaccctgttcgagctggccgccgagagcgacgtgagcaccgccatcgacctgttcagacaggccggcctgggcaaccacctgagcggcagcgagagactgaccctgctggcccccctgaacagcgtgttcaaggacggcaccccccccatcgacgcccacaccagaaacctgctgagaaaccacatcatcaaggaccagctggccagcaagtacctgtaccacggccagaccctggagaccctgggcggcaagaagctgagagtgttcgtgtacagaaacagcctgtgcatcgagaacagctgcatcgccgcccacgacaagagaggcagatacggcaccctgttcaccatggacagagtgctgaccccccccatgggcaccgtgatggacgtgctgaagggcgacaacagattcagcatgctggtggccgccatccagagcgccggcctgaccgagaccctgaacagagagggcgtgtacaccgtgttcgcccccaccaacgaggccttcagagccctgccccccagagagagaagcagactgctgggcgacgccaaggagctggccaacatcctgaagtaccacatcggcgacgagatcctggtgagcggcggcatcggcgccctggtgagactgaagagcctgcagggcgacaagctggaggtgagcctgaagaacaacgtggtgagcgtgaacaaggagcccgtggccgagcccgacatcatggccaccaacggcgtggtgcacgtgatcaccaacgtgctgcagccccccgccaacagaccccaggagagaggcgacgagctggccgacagcgccctggagatcttcaagcaggccagcgccttcagcagagccagccagagaagcgtgagactggcccccgtgtaccagaagctgctggagagaatgaagcactag

SEQ ID NO: 7638 - DNA, 2052 bp, Artificial Sequence
  derived and/or modified sequence
atggccctgttcgtgagattgctcgctctagccctagcgctcgccctggggccagccgcaacactggcagggcctgcaaaatcgccatatcagttggttctgcagcacagccgtctgcggggcagacaacatgggcccaatgtatgtgcagttcaaaaagtgatcggcacaaaccgtaaatacttcacaaactgcaagcagtggtatcaaagaaagatatgcggcaagtccactgtcatcagctacgagtgctgtcctggatatgaaaaagtacccggcgagaagggttgccccgcagctctaccactgagcaatctgtacgagactttgggagtggttggctctactacaacccagttgtacaccgatcgaactgagaagctgcgccccgagatggaaggtcctggctcttttacaatcttcgcccctagcaatgaggcgtgggcttcccttcccgctgaagtgctcgattctctcgtgagtaacgtgaatattgagctgctgaatgccctgaggtaccatatggtaggtcggcgcgtgctgaccgacgagctgaagcacggcatgaccctcaccagcatgtaccagaatagcaacatccagatccaccactaccccaatggcatagtcacagtgaattgtgcccggctcctgaaagcggaccatcacgccaccaatggcgtcgtgcatctgatcgataaagtcataagcactataaccaacaatattcagcagatcatcgaaatcgaagatacttttgaaacactgcgcgccgctgtagcggcttccgggctcaatactatgctcgagggaaatggccaatataccttactggctcctactaacgaggccttcgaaaaaatacctagtgagactctgaacagaattctcggagaccctgaggcactaagggatcttctcaataatcacattttaaagtcagccatgtgcgccgaggctattgtcgctggactttctgttgagaccttggagggcactacactcgaggttggctgttccggcgatatgctgacaattaatgggaaggcaatcatatcaaacaaagacatccttgccaccaatggcgtaatccactacatcgatgagctgttgatcccagactcggccaaaacgctgttcgaactggcggcagagagcgatgttagcaccgccattgacttatttcggcaggcaggcctggggaatcatctgagcggatcagaacgattgactcttctggctccgctgaacagcgtgttcaaggacgggacaccacctatcgatgcccatactcgcaacctgctcagaaaccacattattaaagaccagctggctagtaagtacctataccacggacagaccctggaaacactgggcggcaaaaagctgagagtcttcgtgtaccgcaatagcctgtgtattgagaactcatgcattgccgctcacgataagcggggccggtacggcaccctgtttactatggaccgtgtgctgaccccacctatgggtaccgtgatggacgtactcaaaggagataaccgttttagcatgcttgtggccgccatccaatccgccggtcttactgagacattgaacagagaaggagtgtacactgtgtttgccccaactaacgaggccttccgcgcattacctcctcgtgaacgtagtaggctgctgggcgacgccaaggaattggccaatatcttaaagtaccacatcggcgatgaaatactggtgtccggagggattggtgctctagttaggttgaaatcattgcagggagacaaattggaagtgtcactcaagaataacgtggtgtcagttaataaagaacccgtcgcggagccagacatcatggctaccaacggagtggtgcacgtaattactaacgtgcttcagccaccagcaaaccgaccacaggagcggggcgacgaattagctgatagcgctctggagatttttaagcaggcgtccgcattctcaagaccagaacagccccaggtgctgtgcagccccgtgtaccagaagcttcttgagcgtatgaagcattag

SEQ ID NO: 7639 - DNA, 1251 bp, Artificial Sequence
  derived and/or modified sequence
atgctcgagggcaatggccaatacactcttttggcgccaacaaacgaggctttcgagaaaattccctcagagaccttgaataggatcctgggcgaccccgaggccctccgcgacctgttgaataaccacatcttgaaatccgcgatgtgtgccgaagcaatcgtcgctgggcttagtgttgagactcttgaaggaactacgcttgaagtcggctgcagcggcgatatgcttactataaatggaaaagcaatcatatcaaataaagatattttggcaacgaatggcgttatccattacatcgatgagctcctgattcctgattcggccaaaacccttttcgagttggccgcggaaagcgacgtttccaccgccatagacctttttcgtcaggctgggctgggtaaccacctgtccggctcggagcggcttacactattagcccccctcaactccgtgttcaaagatggcacacctccaattgacgcacatacacgaaacctgttgagaaatcatatcatcaaggaccaactggcctctaaatacttataccatggccagactctcgagacgttaggggggaaaaaacttagggtctttgtttatcggaacagcctttgcatcgaaaatagttgcattgccgcccatgacaagagagggagatacggtacgctgttcacaatggatcgggttttgaccccgcctatggggaccgtgatggacgtattgaagggagataaccggttctcaatgcttgttgccgccattcagagcgccggccttaccgagactctgaatagggagggcgtctatacggtctttgcacctaccaacgaggcctttagagcactcccccccagggagaggagtcgcctgctgggggatgcaaaggagttggcgaacattttaaaatatcacattggcgacgagatcttggtttcgggggggatcggggctctcgtccgcctgaagagtctgcagggagacaaattggaggtttctctcaaaaataatgttgtgtccgttaataaggaacctgtggctgaacccgatatcatggctaccaatggcgtcgtccatgtcataactaacgtgctgcagccacccgcgaaccggccacaggagcgcggagacgagctcgccgacagcgccctggaaatcttcaaacaggcctcggctttctcacgcgcatcgcagcgctccgtaagattggcacccgtgtatcaaaagctgttggagcgcatgaaacactag

SEQ ID NO: 7640 - DNA, 2052 bp, Artificial Sequence
  derived and/or modified sequence
atggcactgttcgttagactcctggccctcgctctcgcactcgcactcgggcccgccgcaacactggccgggcctgctaagtccccatatcagctggtgttgcagcactcgaggctgcgggggcggcaacatgggcctaacgtgtgtgcagttcagaaggttataggaaccaacagaaagtactttactaactgtaaacagtggtaccaaagaaagatttgcgggaaaagcaccgtgatttcgtacgaatgttgtcccggatacgagaaggtgccgggcgaaaaggggtgtcccgccgccctgcccctgagcaatttgtatgaaacattaggagtggtaggatctacaacaacgcaactctacaccgaccgaactgagaaacttaggccagagatggaagggcccgggtcctttacaattttcgcccccagcaatgaagcatgggcgagtctgcctgccgaggttcttgatagcctcgtttccaacgtcaatatcgagctacttaatgccctgcgctatcacatggtgggccgccgcgtgcttaccgacgaactcaagcatggcatgactctgactagtatgtaccaaaacagcaatatccagatccaccactaccccaacggaatcgtgactgtcaattgcgccaggctcctgaaggctgaccaccatgcaaccaatggagtggttcacttaattgacaaggtgattagtacaattactaacaacattcagcagataatcgaaatagaagacacgtttgagaccctgagggctgcagtggctgctagcgggctgaatactatgttggaaggaaacggccaatacacactgttagcccccacaaacgaggcattcgaaaagattccctccgaaaccttgaacaggatccttggagaccctgaggctctgcgggacctcctgaataatcacatcctgaagagtgccatgtgcgcagaagccatcgttgcaggactgtctgtggagacactggaagggactactcttgaggttggctgttcgggggacatgctcactattaacggtaaagcaattatttccaataaagatatactggcaaccaacggcgtgattcattacatcgacgagctgcttattcccgactccgccaaaacactgttcgagctcgcagccgaatctgacgtgagtacagcgattgacttgtttaggcaggctggattgggaaaccacctgagtggaagcgagaggttgaccctcctggcccctcttaactcagtatttaaggatgggacgccgccgatagacgctcacacgaggaacttgctgcgcaatcacatcatcaaagatcagctcgcctctaagtacctctatcatgggcagaccctggagaccctcggcggaaaaaagttgcgcgtctttgtttaccggaatagtctttgtatagaaaatagctgtatagctgcccacgacaaacggggacggtatggtacactttttacgatggaccgggttttgaccccccctatgggtacggtgatggatgttctgaagggtgataaccgctttagcatgctcgtggctgcaatccagtcggcgggactgactgagactctcaatagggaaggagtgtataccgtgttcgcacctaccaatgaagcattccgcgccttgccgccacgggaacgctcaagattattgggggatgccaaagagctcgctaacattctgaagtatcacatcggtgacgaaatcttagtgtcagggggtataggagcgttggttagactgaaatctctgcagggcgataagctggaagtgagtctcaaaaacaatgtggtgtcagtgaataaggagccagttgcggagcccgacataatggcaacaaatggggtggttcatgtcatcacaaacgttctgcagcctcctgcaaatcggcctcaggaaaggggtgatgaactggcggactctgctctggaaatctttaaacaggcgtccgcattctcaagggcttcccagcggtctgtcagactcgccccagtgtaccaaaagctccttgaacggatgaaacattag

SEQ ID NO: 7641 - DNA, 2052 bp, Artificial Sequence
  derived and/or modified sequence
atggccctgtttgtgcggctgctggccctggccctggccctggccctgggccctgctgccaccctggccggccctgccaagagcccctaccagctggtgctgcagcacagccggctgcggggccggcagcacggccccaacgtgtgtgctgtgcagaaggtgattggcaccaacaggaagtacttcaccaactgcaagcagtggtaccagaggaagatctgtgggaagagcaccgtcatctcctatgagtgctgccccggctatgagaaggtgcctggagagaagggctgcccagctgccctgcccctgagcaacctgtatgagaccctgggcgtggtgggcagcaccaccacccagctgtacacagacagaacagagaagctgcggcctgagatggagggccctggcagcttcaccatctttgcccccagcaatgaggcctgggccagcctgcctgctgaggtgctggacagcctggtgtccaatgtgaacatcgagctgctgaatgccctgcgctaccacatggtgggccggcgggtgctgacagatgagctgaagcacggcatgaccctgacctccatgtaccagaacagcaacatccagatccaccactacccaaatggaattgtgacagtgaactgtgcccggctgctgaaggctgaccaccacgccaccaacggggtggtgcacctgattgacaaggtgatcagcaccatcaccaacaacatccagcagatcattgaaattgaggacacctttgagaccctgcgggctgctgtggccgccagcggcctgaacaccatgctggagggcaatggccagtacaccctgctggcccccaccaatgaggcctttgagaagatccccagcgagaccctgaaccgcatcctgggggaccctgaggccctgcgggacctgctgaacaaccacatcctgaagagcgccatgtgtgccgaggccatcgtggccggcctgtctgtggagaccctggagggcaccaccctggaggtgggctgcagcggggacatgctgaccatcaatggcaaggccatcatcagcaacaaggacatcctggccaccaatggagtcatccactacattgatgagctgctgatcccagattctgccaagaccctgtttgagctggccgctgagagtgatgtgtccacagccatcgacctcttccggcaggccggcctgggcaaccacctgagcggcagcgagcggctgaccctgctggcccccctgaacagcgtcttcaaggatggcaccccacccattgatgcccacaccaggaacctgctgaggaaccacatcatcaaggaccagctggccagcaagtacctgtaccacggccagaccctggagaccctgggcggcaagaagctgcgggtgtttgtgtacagaaacagcctgtgcatcgagaacagctgcatcgccgcccatgacaagaggggccgctatggcaccctcttcaccatggacagagtgctgaccccacccatgggcaccgtgatggatgtgctgaagggggacaaccgcttctccatgctggtggccgccatccagagcgctggcctgacagagaccctgaaccgggagggcgtgtacacagtgtttgcccccaccaatgaggccttccgggccctgcccccccgggagaggagccggctgctgggagatgccaaggagctggccaacatcctgaagtaccacatcggagatgagatcctggtgtctgggggcattggagccctggtgcggctgaagagcctgcagggcgacaagctggaggtgtccctgaagaacaacgtggtgtctgtgaacaaggagcctgtggccgagccagacatcatggccaccaacggggtggtgcacgtgatcaccaacgtgctgcagcccccagccaaccggccccaggagagaggagatgagctggccgacagcgccctggagatcttcaagcaggccagcgccttcagcaggcctgagcagccccaggtgctgtgcagccctgtgtaccagaagctgctggagaggatgaagcactag

SEQ ID NO: 7642 - DNA, 1251 bp, Artificial Sequence
  derived and/or modified sequence
atgctggagggcaatggccagtacaccctgctggcccccaccaatgaggcctttgagaagatccccagcgagaccctgaaccgcatcctgggggaccctgaggccctgcgggacctgctgaacaaccacatcctgaagagcgccatgtgtgccgaggccatcgtggccggcctgtctgtggagaccctggagggcaccaccctggaggtgggctgcagcggggacatgctgaccatcaacgggaaggccatcatcagcaacaaggacatcctggccaccaacggggtcatccactacattgatgagctgctgatcccagacagcgccaagaccctgtttgagctggccgctgagagtgatgtgtccacagccatcgacctcttccggcaggccggcctgggcaaccacctgagcggcagcgagcggctgaccctgctggcccccctgaacagcgtcttcaaggatggcaccccacccattgatgcccacaccaggaacctgctgaggaaccacatcatcaaggaccagctggccagcaagtacctgtaccacggccagaccctggagaccctgggcggcaagaagctgcgggtgtttgtgtacagaaacagcctgtgcatcgagaacagctgcatcgccgcccatgacaagaggggccgctatggcaccctcttcaccatggacagagtgctgaccccacccatgggcaccgtgatggatgtgctgaagggggacaaccgcttctccatgctggtggccgccatccagagcgctggcctgacagagaccctgaaccgggagggcgtgtacacagtgtttgcccccaccaatgaggccttccgggccctgcccccccgggagaggagccggctgctgggagatgccaaggagctggccaacatcctgaagtaccacatcggagatgagatcctggtgtctgggggcatcggggccctggtgcggctgaagagcctgcagggcgacaagctggaggtgtccctgaagaacaacgtggtgtctgtgaacaaggagcctgtggccgagccagacatcatggccaccaatggagtggtgcacgtgatcaccaacgtgctgcagcccccagccaaccggccccaggagagaggagatgagctggccgacagcgccctggagatcttcaagcaggccagcgccttcagccgggccagccagaggtctgtgcggctggcccctgtgtaccagaagctgctggagaggatgaagcactag

SEQ ID NO: 7643 - DNA, 2052 bp, Artificial Sequence
  derived and/or modified sequence
atggccctgtttgtgcggctgctggccctggccctggccctggccctgggccctgctgccaccctggccggccctgccaagagcccctaccagctggtgctgcagcacagccggctgcggggccggcagcacggccccaacgtgtgtgctgtgcagaaggtgattggcaccaacaggaagtacttcaccaactgcaagcagtggtaccagaggaagatctgtgggaagagcaccgtcatctcctatgagtgctgccccggctatgagaaggtgcctggagagaagggctgcccagctgccctgcccctgagcaacctgtatgagaccctgggcgtggtgggcagcaccaccacccagctgtacacagacagaacagagaagctgcggcctgagatggagggccctggcagcttcaccatctttgcccccagcaatgaggcctgggccagcctgcctgctgaggtgctggacagcctggtgtccaatgtgaacatcgagctgctgaatgccctgcgctaccacatggtgggccggcgggtgctgacagatgagctgaagcacggcatgaccctgacctccatgtaccagaacagcaacatccagatccaccactacccaaatggaattgtgacagtgaactgtgcccggctgctgaaggctgaccaccacgccaccaacggggtggtgcacctgattgacaaggtgatcagcaccatcaccaacaacatccagcagatcattgaaattgaggacacctttgagaccctgcgggctgctgtggccgccagcggcctgaacaccatgctggagggcaatggccagtacaccctgctggcccccaccaatgaggcctttgagaagatccccagcgagaccctgaaccgcatcctgggggaccctgaggccctgcgggacctgctgaacaaccacatcctgaagagcgccatgtgtgccgaggccatcgtggccggcctgtctgtggagaccctggagggcaccaccctggaggtgggctgcagcggggacatgctgaccatcaatggcaaggccatcatcagcaacaaggacatcctggccaccaatggagtcatccactacattgatgagctgctgatcccagattctgccaagaccctgtttgagctggccgctgagagtgatgtgtccacagccatcgacctcttccggcaggccggcctgggcaaccacctgagcggcagcgagcggctgaccctgctggcccccctgaacagcgtcttcaaggatggcaccccacccattgatgcccacaccaggaacctgctgaggaaccacatcatcaaggaccagctggccagcaagtacctgtaccacggccagaccctggagaccctgggcggcaagaagctgcgggtgtttgtgtacagaaacagcctgtgcatcgagaacagctgcatcgccgcccatgacaagaggggccgctatggcaccctcttcaccatggacagagtgctgaccccacccatgggcaccgtgatggatgtgctgaagggggacaaccgcttctccatgctggtggccgccatccagagcgctggcctgacagagaccctgaaccgggagggcgtgtacacagtgtttgcccccaccaatgaggccttccgggccctgcccccccgggagaggagccggctgctgggagatgccaaggagctggccaacatcctgaagtaccacatcggagatgagatcctggtgtctgggggcattggagccctggtgcggctgaagagcctgcagggcgacaagctggaggtgtccctgaagaacaacgtggtgtctgtgaacaaggagcctgtggccgagccagacatcatggccaccaacggggtggtgcacgtgatcaccaacgtgctgcagcccccagccaaccggccccaggagagaggagatgagctggccgacagcgccctggagatcttcaagcaggccagcgccttcagccgggccagccagaggtctgtgcggctggcccctgtgtaccagaagctgctggagaggatgaagcactag

SEQ ID NO: 7644 - DNA, 2052 bp, Artificial Sequence
  derived and/or modified sequence
atggccctgttcgtgcggctgctggccctggccctggccctggccctcgggcctgccgccacgctcgccggtccagccaagagtccctatcaattggtcctgcagcactcaagactccggggccgccaacacggccctaacgtttgtgctgtgcagaaggtaatcggcacaaatcggaaatactttaccaattgcaaacagtggtatcaaaggaaaatctgtgggaagtctacagtcatctcttacgaatgctgcccgggatatgagaaggtccctggggaaaaaggctgcccagctgctctgccactcagcaacctatatgagacgctaggagtagtgggtagcacaaccacccagctgtacaccgatcgcaccgagaagctccggccagaaatggaaggccctggcagttttaccatctttgcaccctccaatgaggcatgggcatcactaccagccgaagtgctggactcgttggtttccaacgttaatattgaattgttgaatgctctccgctaccacatggttggtcgtagggtgctgactgatgagcttaagcatgggatgacattaacatcgatgtatcagaattcgaatatacaaatccatcactatccgaatggaattgtcaccgtgaactgcgcccgtcttctgaaggcagatcaccacgctacgaatggggttgtccatctaatcgacaaagtcatcagcacaattacaaacaatatccagcagattattgagatagaggatacatttgagactctgagggccgcagtcgccgcaagtggcctgaataccatgttggagggcaatggtcagtacaccctgctcgctccaacaaatgaggcatttgagaagattcctagtgagactctgaaccgcatcctcggcgatccagaagcacttcgcgacttgcttaacaaccatatcctaaagagcgccatgtgcgccgaagctattgtcgcagggttatcagttgagacactagagggcacgaccctggaagttgggtgttccggggacatgctgaccattaatggaaaagctattatctccaacaaggacatactggccaccaatggggtgatccattacattgacgagctgttgattccagattcggccaaaacactctttgagcttgctgcggaatcagatgtatctaccgcaattgatctgttcagacaggcaggcctgggaaatcacctctcagggtcagaacgtttgacgcttctggccccgctgaactcagtgttcaaggacggaactcctcctattgatgctcacaccagaaacttattacggaatcatattataaaagaccaactagcttctaaatatttgtatcacggtcaaactttggagaccctgggcggcaagaaattgcgcgtgtttgtgtacaggaattcactgtgcatcgagaactcttgcattgctgctcacgacaagcggggacgatatgggactctgttcacaatggacagagttcttactcctcctatggggacagtcatggacgtactcaagggcgataaccgcttttccatgctcgtggctgccatccagtccgccgggctcaccgagaccctgaatagggagggagtttacacagtgttcgccccgacgaatgaggctttccgcgccctaccccctagagaaagatcaaggctattgggtgacgccaaggaattggcaaacattctgaaataccacataggagatgaaatcctggtgtctggcggaatcggcgccctggtgaggctgaagtctctccagggtgacaagttggaggtgtcgctgaagaataatgtggtgtctgttaataaagaacccgtggctgaacccgatattatggcaaccaacggagtggtgcacgtgattaccaatgtactccaacctcccgctaatcgcccccaggagagaggagatgagctcgctgacagtgctctggagatttttaagcaggctagtgcattcagcaggccggagcaaccgcaagtgttgtgctcaccagtctaccaaaagctcctcgaacggatgaagcactag

SEQ ID NO: 7645 - DNA, 1251 bp, Artificial Sequence
  derived and/or modified sequence
atgctggagggcaacggccagtacaccctgctggcccccaccaacgaggctttcgaaaaaatcccttctgaaaccttgaacaggatccttggcgacccagaggccctcagggacctccttaacaatcatatactcaagagtgccatgtgtgctgaagccatcgttgcagggctctctgtagagacgttagaaggtaccaccctcgaagtgggctgctctggggatatgctcaccatcaatgggaaggcaataatatcaaataaagacattttagcaacaaacggcgtgatacactacatcgatgaattgctgataccagacagtgcaaagactttattcgaactagctgccgagtcagacgtgtccactgctattgatttgttcaggcaagctggactcgggaatcacctgtccggctcggagcggctgaccctgttggctccacttaattccgtgttcaaggatggcactccccctatcgatgctcatacacggaatctattgaggaatcatatcatcaaagatcagctggcctccaagtacctctatcatggccaaaccctcgagacactcggcggaaagaagttgagagtcttcgtgtaccgaaactctctctgcatagagaactcctgcattgccgctcacgataagaggggtcgctatggtacactgttcaccatggaccgggtcctaactccgcctatgggcactgtaatggatgtgctgaaaggcgacaaccgcttcagcatgcttgtggccgcaatacagtctgctggattgacagagacacttaatcgcgagggcgtgtatacagtattcgcaccaaccaacgaagcttttcgcgcacttccaccgcgcgaaaggtctcggttgctgggtgacgcgaaagaattggctaacatcctaaagtatcacatcggggacgaaatactggtgtccggcggaattggtgccctagttcggctcaagtcccttcagggagacaagctggaggtctccctcaagaataatgtggtgagtgtcaataaggagccagtggccgagccagatatcatggctactaatggcgtggtgcatgtcattacgaatgttctccaaccacccgccaacaggcctcaagagagaggcgatgaactcgccgactccgctcttgagatcttcaaacaggctagcgccttctcgcgggccagccagagatccgtcaggttagctccagtgtatcagaagctcctcgagcgcatgaaacactag

SEQ ID NO: 7646 - DNA, 2052 bp, Artificial Sequence
  derived and/or modified sequence
atggccctgttcgtgcggctgctggccctggccctggccctggccctcgggcctgcagccacactagccggacccgccaagtctccctatcagctggtgttgcagcactcccggttgcggggccgtcagcatggcccaaacgtgtgtgctgtccaaaaagtcattggaactaatcgtaagtattttactaactgcaaacaatggtatcagagaaagatttgtggaaaatctacagttattagctacgagtgctgtcccggctacgaaaaggtacccggggaaaaaggatgccctgctgccctgcccctgagtaatctctatgagacgcttggcgtggtcgggagtacaaccacgcaactgtacacagacagaacagagaaacttcggcctgaaatggagggtccaggctccttcacaatcttcgcaccttctaacgaggcttgggcaagcctgccagcagaggtgctggacagcctggtctccaacgtgaacattgagctcctgaatgccctgagatatcacatggtgggccggcgggtgctgaccgacgaattaaaacacggcatgaccctgaccagtatgtaccagaatagtaatattcagatccaccattacccgaacggtattgtgaccgtcaattgtgccaggcttctcaaggcggaccatcatgccactaatggagtggtccatctgatagacaaggtgataagcacaatcaccaataatattcaacaaatcattgagattgaagacactttcgaaactttaagagctgcggtggctgcaagcggactgaatactatgcttgagggcaatggccaatatactctcctcgcccccacgaatgaggccttcgaaaagattcctagcgagacgctgaaccgcatcctgggggatcctgaagctctgcgggatttactgaacaatcacatcttaaagtcagcaatgtgcgctgaagccattgtggctggactgtccgtcgaaacccttgaggggactaccctggaagtgggctgttccggcgacatgctaaccataaacgggaaggctataataagcaacaaggacatcctcgccactaacggtgtaattcactacatagacgaattgcttattccggacagcgccaaaactctgttcgaactagcagccgagagcgacgtgagcaccgctatagatctttttcgccaggcaggtttgggaaaccacctgtccggaagcgaaaggctgacactgctagcgccgttaaatagcgttttcaaggatggtacgcctccaatcgacgctcacacccgaaacctcctgcgcaaccatatcatcaaagaccagctggcaagtaagtatctttatcatgggcagactctggagacactgggagggaagaagctgagggtcttcgtctaccgaaattctctgtgcatcgagaactcatgcatcgctgctcacgataagaggggccgttacggcacacttttcaccatggatcgtgtccttacaccacccatgggaaccgtgatggacgttttgaaaggagataacaggttttctatgttggtggcagccatacagtccgctggactgaccgagacactaaaccgtgagggagtgtatacagtgttcgctcccacgaacgaggcctttcgagccctccctccaagagagcgtagccggctcctcggcgacgccaaagagctggctaatattctgaagtaccatattggcgatgaaattctcgtttctggaggcataggcgcactagtcaggctgaaatcactccagggagacaaacttgaggtctctttgaagaataatgttgtatctgtcaacaaggaacctgtagctgaacctgatatcatggctactaatggagttgttcacgtcattacaaacgtgctgcagcctcccgccaaccgcccccaggaacgcggagacgaactggccgattctgctctcgaaatcttcaaacaggcctctgcattttctcgcgcatctcagcggtccgtgagacttgcccccgtgtatcagaagctgcttgaaagaatgaagcactag

SEQ ID NO: 7647 - DNA, 2052 bp, Artificial Sequence
  derived and/or modified sequence
atggcgctgttcgttcggcttttggccctggccctggccttggccctcgggccagccgctactttggccggtccagccaagtcaccgtatcagctggtgttgcagcatagtcggctgagggggaggcaacatggtccgaacgtatgcgcagtacagaaggtaataggaacgaatcggaagtattttaccaactgcaagcagtggtatcaaaggaagatttgcggaaagagcacagtgatctcatacgagtgctgccctggctatgaaaaggtgcctggagagaagggctgcccagccgctttgcctctgagcaacctgtatgagaccctgggagtggtaggatctaccactacacaattatatacagatagaacagagaaattaagaccagaaatggagggcccagggagttttacaatatttgcgccaagtaacgaggcgtgggccagcctgcccgctgaggttctggactctctggtgagcaatgttaacattgagctgctcaatgcccttagataccatatggtgggccgtcgagtgctgactgacgagctgaagcatgggatgactctgactagcatgtaccaaaatagcaatatacagattcaccactaccccaatggaattgttactgtaaattgtgccaggctcttgaaggcggatcaccacgccaccaacggagtggtccacttgattgacaaggtaatttctaccatcacgaataacatccaacagattatagagattgaggatacgtttgaaactctccgtgccgctgtggccgcatctgggctgaataccatgctggagggcaatggacagtacactctgcttgcccctacgaacgaggcatttgaaaagattcctagtgagacccttaaccgaatattgggcgaccctgaagcgttgcgtgacctcctgaataaccacatcttaaagtctgcaatgtgtgccgaggcaattgtcgctggactgtcggtggaaaccctggaagggacaaccctggaggtggggtgctccggggacatgctgacaatcaatggcaaggccattattagcaataaagatatactggcaaccaacggcgtcatccactacatagatgagttgctgattcccgactcggctaaaaccctgtttgagctggccgcagaaagcgatgtgtccactgcgatcgatctgttcagacaagctggcctcgggaatcaccttagtggctctgaacggctgacgctgctggctcctctgaactctgttttcaaagatgggacaccacctattgatgctcacacaagaaatctgctgcgaaaccacattattaaggaccagttggcctctaagtacctctatcatggccagacactggaaacactcggcggaaagaaactccgggttttcgtgtacaggaactctttatgtattgaaaattcctgcattgccgcacacgataagagaggcaggtacggcaccctgttcactatggaccgggtcctgacgcccccaatgggcactgtgatggacgtgctgaagggggacaacagattctcaatgctcgttgctgccattcaatctgctggactcacagaaacattgaaccgggaaggggtatatacagtatttgccccaactaacgaagcatttcgggcactccccccacgcgagcggtctcgcctactcggggatgcaaaagagctggccaacatcctgaaatatcacatcggcgacgagattttagtatccggtgggataggagcactggtacgcctgaagtccctgcagggtgacaagctggaagtgagcctgaagaacaacgtagtgtcagtgaacaaggagcctgtagcagaacctgacatcatggccacaaatggtgtggtccacgtgatcactaatgtgctgcaaccacccgcaaatcgcccacaggagagaggagatgagctcgccgactctgccttggagatttttaaacaggcctccgcgttctctagaccggagcagcctcaggttctgtgcagtcctgtctaccagaaattgctggagcgtatgaaacactag

SEQ ID NO: 7648 - DNA, 1251 bp, Artificial Sequence
  derived and/or modified sequence
atgctagagggcaacgggcaatatacactgcttgctcccactaacgaggccttcgagaagataccatctgagactttgaaccgcatcctgggcgatcctgaggctctgagagatctgttaaacaatcatattctgaaatctgcgatgtgcgctgaggcaattgttgctgggttgagcgtggagacattagagggcacaaccttagaggtggggtgctctggggacatgctcaccatcaacggcaaagcaatcatttcaaataaggatatattggccacaaacggcgtgattcattatatcgatgagcttctcatcccggatagcgcaaaaacactgtttgagctcgctgccgaatccgacgtctcaaccgctattgaccttttccggcaggctggcctgggtaaccacttatccggatcagagcgactcacactgttggcacccctaaacagcgtatttaaggatggcacccctcctatcgatgcgcacacaagaaacctgctgaggaatcatattatcaaggatcagcttgcaagtaagtacctgtatcatggacaaacccttgaaacgctcgggggaaagaagctccgagtttttgtatatcgcaacagcctgtgtatagagaactcttgcattgccgcacacgacaaaagaggacgctacgggaccttatttacgatggacagggtgctcacaccaccaatgggaactgttatggacgtgttgaagggcgacaaccgcttctcaatgctggtggcagcaatccagtcagcgggattgaccgagacgttgaatagggagggggtgtataccgttttcgcacctacaaatgaggcttttagggcattgccaccccgagagcgaagccgcctgctgggcgacgcaaaggagctggcgaatatcttaaagtaccacatcggcgacgagattctggtttctggtggaataggggctctggttcgcttgaagtctctgcagggggataaactggaagtatcgctgaaaaacaatgtggtgtcagtgaataaggaacccgtggcggagcctgatattatggcaaccaatggagtcgtgcatgtgattaccaatgtgcttcagccgccagccaacaggccccaggagagaggggatgagctggccgattccgcacttgagatatttaaacaggccagcgcctttagcagggcatctcagaggagcgtccgcctcgcccctgtgtaccagaagctgttggagagaatgaaacactag

SEQ ID NO: 7649 - DNA, 2052 bp, Artificial Sequence
  derived and/or modified sequence
atggcgttgtttgttcggttgctggcgcttgccctggctctggctctaggaccagcagcaacactggcaggccctgccaaatccccttatcaattggttctgcagcactccagattgcggggacgacaacacggacctaatgtatgtgccgtccagaaagttatcggtactaatcgcaagtatttcaccaattgtaagcagtggtatcagaggaagatatgtggcaagagcaccgtgatcagctacgaatgttgcccaggatacgagaaagtacccggtgagaaagggtgccccgcagccctccctctgagcaacctttacgagaccctgggtgtcgttggaagcactacaacccagctgtatacagatcgaacagagaagctccgcccagaaatggaggggcctggatcatttactatcttcgcaccatccaacgaagcttgggcgagcctccctgcagaagttttggactccctggtgtctaacgttaatatcgagctgctgaacgcattgcgatatcacatggttggcagacgggtgctgactgatgagctgaagcacggtatgacactgacaagcatgtatcaaaacagtaacatccagattcaccactacccaaacggcattgtgactgtgaattgtgctcggctacttaaggctgatcaccacgctacgaatggggtcgtccacctgatagacaaggtgatcagcacaataacgaataacatacagcaaatcatagagattgaggacacttttgaaaccctgagggctgcggtggcagcctctggcctgaacaccatgttggagggcaatgggcagtacacccttctggcccctaccaacgaagccttcgagaagattccaagtgaaactctcaaccgcatccttggtgacccagaagcgctgcgtgacttactcaataatcacatcttaaaaagtgctatgtgcgccgaagctattgtggccggtctgtctgtggagaccctcgagggcaccactcttgaggtgggttgctctggcgatatgctaactatcaatggtaaagctatcataagtaacaaggatatcttagctacaaacggcgttatccactacattgacgaacttctaatacccgattcagccaagacacttttcgaactggccgcagagtctgatgtctcaaccgctatcgacctgtttcggcaagctgggctgggcaaccacctttcaggtagcgagaggttaaccctgctggccccactgaatagtgtttttaaagatggcactccaccaatcgacgcccatacgagaaacttgttgcgtaaccacatcatcaaggaccagctggcctcgaagtacttataccatggacagacattggagactctggggggaaaaaagcttagagtgttcgtgtatcggaattccctgtgtatcgagaactcctgtattgccgctcacgataaaagaggtcgctatggcactctgtttactatggatcgggtactgacgcctccaatgggtacagtgatggatgtgttgaagggggataataggttctcaatgctggtcgctgccatccagtccgcgggtctgaccgagactctcaatcgtgagggcgtctatactgtcttcgctccaaccaatgaggcctttcgcgctttaccacctagggagaggtccaggcttctgggcgacgccaaggagctggccaatatactgaagtatcacatcggggatgagatattggtctctggagggattggagcactggtcagactcaaaagcctacagggagataagcttgaggtgagcctcaaaaacaacgtggtatccgtaaacaaggaaccagttgctgagcctgatatcatggctaccaacggggtagtccatgttatcaccaacgtgctgcagcccccagctaaccgtcctcaggaacgcggtgatgaactggccgatagtgcccttgagatatttaagcaggctagcgcctttagccgcgcttcccagcgttcagtgcggctggccccagtctaccaaaagctgttggaaaggatgaaacactag

SEQ ID NO: 7650 - DNA, 2695 bp, Artificial Sequence
  derived and/or modified sequence
gccgcccgcttgcccgtcggtcgctagctcgctcggtgcgcgtcgtcccgctccatggcgctcttcgtgcggctgctggctctcgccctggctctggccctgggccccgccgcgaccctggcgggtcccgccaagtcgccctaccagctggtgctgcagcacagcaggctccggggccgccagcacggccccaacgtgtgtgctgtgcagaaggttattggcactaataggaagtacttcaccaactgcaagcagtggtaccaaaggaaaatctgtggcaaatcaacagtcatcagctacgagtgctgtcctggatatgaaaaggtccctggggagaagggctgtccagcagccctaccactctcaaacctttacgagaccctgggagtcgttggatccaccaccactcagctgtacacggaccgcacggagaagctgaggcctgagatggaggggcccggcagcttcaccatcttcgcccctagcaacgaggcctgggcctccttgccagctgaagtgctggactccctggtcagcaatgtcaacattgagctgctcaatgccctccgctaccatatggtgggcaggcgagtcctgactgatgagctgaaacacggcatgaccctcacctctatgtaccagaattccaacatccagatccaccactatcctaatgggattgtaactgtgaactgtgcccggctgctgaaagccgaccaccatgcaaccaacggggtggtgcacctcatcgataaggtcatctccaccatcaccaacaacatccagcagatcattgagatcgaggacacctttgagacccttcgggctgctgtggctgcatcagggctcaacacgatgcttgaaggtaacggccagtacacgcttttggccccgaccaatgaggccttcgagaagatccctagtgagactttgaaccgtatcctgggcgacccagaagccctgagagacctgctgaacaaccacatcttgaagtcagctatgtgtgctgaagccatcgttgcggggctgtctgtagagaccctggagggcacgacactggaggtgggctgcagcggggacatgctcactatcaacgggaaggcgatcatctccaataaagacatcctagccaccaacggggtgatccactacattgatgagctactcatcccagactcagccaagacactatttgaattggctgcagagtctgatgtgtccacagccattgaccttttcagacaagccggcctcggcaatcatctctctggaagtgagcggttgaccctcctggctcccctgaattctgtattcaaagatggaacccctccaattgatgcccatacaaggaatttgcttcggaaccacataattaaagaccagctggcctctaagtatctgtaccatggacagaccctggaaactctgggcggcaaaaaactgagagtttttgtttatcgtaatagcctctgcattgagaacagctgcatcgcggcccacgacaagagggggaggtacgggaccctgttcacgatggaccgggtgctgacccccccaatggggactgtcatggatgtcctgaagggagacaatcgctttagcatgctggtagctgccatccagtctgcaggactgacggagaccctcaaccgggaaggagtctacacagtctttgctcccacaaatgaagccttccgagccctgccaccaagagaacggagcagactcttgggagatgccaaggaacttgccaacatcctgaaataccacattggtgatgaaatcctggttagcggaggcatcggggccctggtgcggctaaagtctctccaaggtgacaagctggaagtcagcttgaaaaacaatgtggtgagtgtcaacaaggagcctgttgccgagcctgacatcatggccacaaatggcgtggtccatgtcatcaccaatgttctgcagcctccagccaacagacctcaggaaagaggggatgaacttgcagactctgcgcttgagatcttcaaacaagcatcagcgttttccaggcctgagcagcctcaggtcctctgttcccctgtctatcaaaagttattagagaggatgaagcattagcttgaagcactacaggaggaatgcaccacggcagctctccgccaatttctctcagatttccacagagactgtttgaatgttttcaaaaccaagtatcacactttaatgtacatgggccgcaccataatgagatgtgagccttgtgcatgtgggggaggagggagagagatgtactttttaaatcatgttccccctaaacatggctgttaacccactgcatgcagaaacttggatgtcactgcctgacattcacttccagagaggacctatcccaaatgtggaattgactgcctatgccaagtccctggaaaaggagcttcagtattgtggggctcataaaacatgaatcaagcaatccagcctcatgggaagtcctggcacagtttttgtaaagcccttgcacagctggagaaatggcatcattataagctatgagttgaaatgttctgtcaaatgtgtctcacatctacacgtggcttggaggcttttatggggccctgtccaggtagaaaagaaatggtatgtagagcttagatttccctattgtgacagagccatggtgtgtttgtaataataaaaccaaagaaac

SEQ ID NO: 7651 - DNA, 1942 bp, Artificial Sequence
  derived and/or modified sequence
tctcacttccctggagccgcccgcttgcccgtcggtcgctagctcgctcggtgcgcgtcgtcccgctccatggcgctcttcgtgcggctgctggctctcgccctggctctggccctgggccccgccgcgaccctggcgggtcccgccaagtcgccctaccagctgcatcagggctcaacacgatgcttgaaggtaacggccagtacacgcttttggccccgaccaatgaggccttcgagaagatccctagtgagactttgaaccgtatcctgggcgacccagaagccctgagagacctgctgaacaaccacatcttgaagtcagctatgtgtgctgaagccatcgttgcggggctgtctgtagagaccctggagggcacgacactggaggtgggctgcagcggggacatgctcactatcaacgggaaggcgatcatctccaataaagacatcctagccaccaacggggtgatccactacattgatgagctactcatcccagactcagccaagacactatttgaattggctgcagagtctgatgtgtccacagccattgaccttttcagacaagccggcctcggcaatcatctctctggaagtgagcggttgaccctcctggctcccctgaattctgtattcaaagatggaacccctccaattgatgcccatacaaggaatttgcttcggaaccacataattaaagaccagctggcctctaagtatctgtaccatggacagaccctggaaactctgggcggcaaaaaactgagagtttttgtttatcgtaatagcctctgcattgagaacagctgcatcgcggcccacgacaagagggggaggtacgggaccctgttcacgatggaccgggtgctgacccccccaatggggactgtcatggatgtcctgaagggagacaatcgctttagcatgctggtagctgccatccagtctgcaggactgacggagaccctcaaccgggaaggagtctacacagtctttgctcccacaaatgaagccttccgagccctgccaccaagagaacggagcagactcttgggagatgccaaggaacttgccaacatcctgaaataccacattggtgatgaaatcctggttagcggaggcatcggggccctggtgcggctaaagtctctccaaggtgacaagctggaagtcagcttgaaaaacaatgtggtgagtgtcaacaaggagcctgttgccgagcctgacatcatggccacaaatggcgtggtccatgtcatcaccaatgttctgcagcctccagccaacagacctcaggaaagaggggatgaacttgcagactctgcgcttgagatcttcaaacaagcatcagcgttttccagggcttcccagaggtctgtgcgactagcccctgtctatcaaaagttattagagaggatgaagcattagcttgaagcactacaggaggaatgcaccacggcagctctccgccaatttctctcagatttccacagagactgtttgaatgttttcaaaaccaagtatcacactttaatgtacatgggccgcaccataatgagatgtgagccttgtgcatgtgggggaggagggagagagatgtactttttaaatcatgttccccctaaacatggctgttaacccactgcatgcagaaacttggatgtcactgcctgacattcacttccagagaggacctatcccaaatgtggaattgactgcctatgccaagtccctggaaaaggagcttcagtattgtggggctcataaaacatgaatcaagcaatccagcctcatgggaagtcctggcacagtttttgtaaagcccttgcacagctggagaaatggcatcattataagctatgagttgaaatgttctgtcaaatgtgtctcacatctacacgtggcttggaggcttttatggggccctgtccaggtag

SEQ ID NO: 7652 - DNA, 2804 bp, Artificial Sequence
  derived and/or modified sequence
ctccttgcacgggccggcccagcttccccgcccctggcgtccgctccctcccgctcgcagcttacttaacctggcccgggcggcggaggcgctctcacttccctggagccgcccgcttgcccgtcggtcgctagctcgctcggtgcgcgtcgtcccgctccatggcgctcttcgtgcggctgctggctctcgccctggctctggccctgggccccgccgcgaccctggcgggtcccgccaagtcgccctaccagctggtgctgcagcacagcaggctccggggccgccagcacggccccaacgtgtgtgctgtgcagaaggttattggcactaataggaagtacttcaccaactgcaagcagtggtaccaaaggaaaatctgtggcaaatcaacagtcatcagctacgagtgctgtcctggatatgaaaaggtccctggggagaagggctgtccagcagccctaccactctcaaacctttacgagaccctgggagtcgttggatccaccaccactcagctgtacacggaccgcacggagaagctgaggcctgagatggaggggcccggcagcttcaccatcttcgcccctagcaacgaggcctgggcctccttgccagctgaagtgctggactccctggtcagcaatgtcaacattgagctgctcaatgccctccgctaccatatggtgggcaggcgagtcctgactgatgagctgaaacacggcatgaccctcacctctatgtaccagaattccaacatccagatccaccactatcctaatgggattgtaactgtgaactgtgcccggctgctgaaagccgaccaccatgcaaccaacggggtggtgcacctcatcgataaggtcatctccaccatcaccaacaacatccagcagatcattgagatcgaggacacctttgagacccttcgggctgctgtggctgcatcagggctcaacacgatgcttgaaggtaacggccagtacacgcttttggccccgaccaatgaggccttcgagaagatccctagtgagactttgaaccgtatcctgggcgacccagaagccctgagagacctgctgaacaaccacatcttgaagtcagctatgtgtgctgaagccatcgttgcggggctgtctgtagagaccctggagggcacgacactggaggtgggctgcagcggggacatgctcactatcaacgggaaggcgatcatctccaataaagacatcctagccaccaacggggtgatccactacattgatgagctactcatcccagactcagccaagacactatttgaattggctgcagagtctgatgtgtccacagccattgaccttttcagacaagccggcctcggcaatcatctctctggaagtgagcggttgaccctcctggctcccctgaattctgtattcaaagatggaacccctccaattgatgcccatacaaggaatttgcttcggaaccacataattaaagaccagctggcctctaagtatctgtaccatggacagaccctggaaactctgggcggcaaaaaactgagagtttttgtttatcgtaatagcctctgcattgagaacagctgcatcgcggcccacgacaagagggggaggtacgggaccctgttcacgatggaccgggtgctgacccccccaatggggactgtcatggatgtcctgaagggagacaatcgctttagcatgctggtagctgccatccagtctgcaggactgacggagaccctcaaccgggaaggagtctacacagtctttgctcccacaaatgaagccttccgagccctgccaccaagagaacggagcagactcttgggagatgccaaggaacttgccaacatcctgaaataccacattggtgatgaaatcctggttagcggaggcatcggggccctggtgcggctaaagtctctccaaggtgacaagctggaagtcagcttgaaaaacaatgtggtgagtgtcaacaaggagcctgttgccgagcctgacatcatggccacaaatggcgtggtccatgtcatcaccaatgttctgcagcctccagccaacagacctcaggaaagaggggatgaacttgcagactctgcgcttgagatcttcaaacaagcatcagcgttttccagggcttcccagaggtctgtgcgactagcccctgtctatcaaaagttattagagaggatgaagcattagcttgaagcactacaggaggaatgcaccacggcagctctccgccaatttctctcagatttccacagagactgtttgaatgttttcaaaaccaagtatcacactttaatgtacatgggccgcaccataatgagatgtgagccttgtgcatgtgggggaggagggagagagatgtactttttaaatcatgttccccctaaacatggctgttaacccactgcatgcagaaacttggatgtcactgcctgacattcacttccagagaggacctatcccaaatgtggaattgactgcctatgccaagtccctggaaaaggagcttcagtattgtggggctcataaaacatgaatcaagcaatccagcctcatgggaagtcctggcacagtttttgtaaagcccttgcacagctggagaaatggcatcattataagctatgagttgaaatgttctgtcaaatgtgtctcacatctacacgtggcttggaggcttttatggggccctgtccaggtagaaaagaaatggtatgtagagcttagatttccctattgtgacagagccatggtgtgtttgtaataataaaaccaaagaaacat

SEQ ID NO: 7653 - protein, 817 aa, Artificial Sequence
  derived and/or modified sequence
MMDGPRSDVGRWGGNPLQPPTTPSPEPEPEPDGRSRRGGGRSFWARCCGCCSCRNAADDDWGPEPSDSRGRGSSSGTRRPGSRGSDSRRPVSRGSGVNAAGDGTIREGMLVVNGVDLLSSRSDQNRREHHTDEYEYDELIVRRGQPFHMLLLLSRTYESSDRITLELLIGNNPEVGKGTHVIIPVGKGGSGGWKAQVVKASGQNLNLRVHTSPNAIIGKFQFTVRTQSDAGEFQLPFDPRNEIYILFNPWCPEDIVYVDHEDWRQEYVLNESGRIYYGTEAQIGERTWNYGQFDHGVLDACLYILDRRGMPYGGRGDPVNVSRVISAMVNSLDDNGVLIGNWSGDYSRGTNPSAWVGSVEILLSYLRTGYSVPYGQCWVFAGVTTTVLRCLGLATRTVTNFNSAHDTDTSLTMDIYFDENMKPLEHLNHDSVWNFHVWNDCWMKRPDLPSGFDGWQVVDATPQETSSGIFCCGPCSVESIKNGLVYMKYDTPFIFAEVNSDKVYWQRQDDGSFKIVYVEEKAIGTLIVTKAISSNMREDITYLYKHPEGSDAERKAVETAAAHGSKPNVYANRGSAEDVAMQVEAQDAVMGQDLMVSVMLINHSSSRRTVKLHLYLSVTFYTGVSGTIFKETKKEVELAPGASDRVTMPVAYKEYRPHLVDQGAMLLNVSGHVKESGQVLAKQHTFRLRTPDLSLTLLGAAVVGQECEVQIVFKNPLPVTLTNVVFRLEGSGLQRPKILNVGDIGGNETVTLRQSFVPVRPGPRQLIASLDSPQLSQVHGVIQVDVAPAPGDGGFFSDAGGDSHLGETIPMASRGGA

SEQ ID NO: 7654 - protein, 375 aa, Artificial Sequence
  derived and/or modified sequence
MKRPDLPSGFDGWQVVDATPQETSSGIFCCGPCSVESIKNGLVYMKYDTPFIFAEVNSDKVYWQRQDDGSFKIVYVEEKAIGTLIVTKAISSNMREDITYLYKHPEGSDAERKAVETAAAHGSKPNVYANRGSAEDVAMQVEAQDAVMGQDLMVSVMLINHSSSRRTVKLHLYLSVTFYTGVSGTIFKETKKEVELAPGASDRVTMPVAYKEYRPHLVDQGAMLLNVSGHVKESGQVLAKQHTFRLRTPDLSLTLLGAAVVGQECEVQIVFKNPLPVTLTNVVFRLEGSGLQRPKILNVGDIGGNETVTLRQSFVPVRPGPRQLIASLDSPQLSQVHGVIQVDVAPAPGDGGFFSDAGGDSHLGETIPMASRGGA

SEQ ID NO: 7655 - protein, 135 aa, Artificial Sequence
  derived and/or modified sequence
MMDGPRSDVGRWGGNPLQPPTTPSPEPEPEPDGRSRRGGGRSFWARCCGCCSCRNAADDDWGPEPSDSRGRGSSSGTRRPGSRGSDSRRPVSRGSGVNAAGDGTIREGMLVVNGVDLLSSRSDQNRREHHTDEYE

SEQ ID NO: 7656 - protein, 42 aa, Artificial Sequence
  derived and/or modified sequence
MMDGPRSDVGRWGGNPLQPPTTPSPEPEPEPDGRSRRGGGRS

SEQ ID NO: 7657 - protein, 65 aa, Artificial Sequence
  derived and/or modified sequence
MMDGPRSDVGRWGGNPLQPPTTPSPEPEPEPDGRSRRGGGRSFWARCCGCCSCRNAADDDWGPEP

SEQ ID NO: 7658 - protein, 50 aa, Artificial Sequence
  derived and/or modified sequence
MMDGPRSDVGRWGGNPLQPPTTPSPEPEPEPDGRSRRGGGRSFWARCCGC

SEQ ID NO: 7659 - DNA, 2454 bp, Artificial Sequence
  derived and/or modified sequence
atgatggacggccccagaagcgacgtgggcagatggggcggcaaccccctgcagccccccaccacccccagccccgagcccgagcccgagcccgacggcagaagcagaagaggcggcggcagaagcttctgggccagatgctgcggctgctgcagctgcagaaacgccgccgacgacgactggggccccgagcccagcgacagcagaggcagaggcagcagcagcggcaccagaagacccggcagcagaggcagcgacagcagaagacccgtgagcagaggcagcggcgtgaacgccgccggcgacggcaccatcagagagggcatgctggtggtgaacggcgtggacctgctgagcagcagaagcgaccagaacagaagagagcaccacaccgacgagtacgagtacgacgagctgatcgtgagaagaggccagcccttccacatgctgctgctgctgagcagaacctacgagagcagcgacagaatcaccctggagctgctgatcggcaacaaccccgaggtgggcaagggcacccacgtgatcatccccgtgggcaagggcggcagcggcggctggaaggcccaggtggtgaaggccagcggccagaacctgaacctgagagtgcacaccagccccaacgccatcatcggcaagttccagttcaccgtgagaacccagagcgacgccggcgagttccagctgcccttcgaccccagaaacgagatctacatcctgttcaacccctggtgccccgaggacatcgtgtacgtggaccacgaggactggagacaggagtacgtgctgaacgagagcggcagaatctactacggcaccgaggcccagatcggcgagagaacctggaactacggccagttcgaccacggcgtgctggacgcctgcctgtacatcctggacagaagaggcatgccctacggcggcagaggcgaccccgtgaacgtgagcagagtgatcagcgccatggtgaacagcctggacgacaacggcgtgctgatcggcaactggagcggcgactacagcagaggcaccaaccccagcgcctgggtgggcagcgtggagatcctgctgagctacctgagaaccggctacagcgtgccctacggccagtgctgggtgttcgccggcgtgaccaccaccgtgctgagatgcctgggcctggccaccagaaccgtgaccaacttcaacagcgcccacgacaccgacaccagcctgaccatggacatctacttcgacgagaacatgaagcccctggagcacctgaaccacgacagcgtgtggaacttccacgtgtggaacgactgctggatgaagagacccgacctgcccagcggcttcgacggctggcaggtggtggacgccaccccccaggagaccagcagcggcatcttctgctgcggcccctgcagcgtggagagcatcaagaacggcctggtgtacatgaagtacgacacccccttcatcttcgccgaggtgaacagcgacaaggtgtactggcagagacaggacgacggcagcttcaagatcgtgtacgtggaggagaaggccatcggcaccctgatcgtgaccaaggccatcagcagcaacatgagagaggacatcacctacctgtacaagcaccccgagggcagcgacgccgagagaaaggccgtggagaccgccgccgcccacggcagcaagcccaacgtgtacgccaacagaggcagcgccgaggacgtggccatgcaggtggaggcccaggacgccgtgatgggccaggacctgatggtgagcgtgatgctgatcaaccacagcagcagcagaagaaccgtgaagctgcacctgtacctgagcgtgaccttctacaccggcgtgagcggcaccatcttcaaggagaccaagaaggaggtggagctggcccccggcgccagcgacagagtgaccatgcccgtggcctacaaggagtacagaccccacctggtggaccagggcgccatgctgctgaacgtgagcggccacgtgaaggagagcggccaggtgctggccaagcagcacaccttcagactgagaacccccgacctgagcctgaccctgctgggcgccgccgtggtgggccaggagtgcgaggtgcagatcgtgttcaagaaccccctgcccgtgaccctgaccaacgtggtgttcagactggagggcagcggcctgcagagacccaagatcctgaacgtgggcgacatcggcggcaacgagaccgtgaccctgagacagagcttcgtgcccgtgagacccggccccagacagctgatcgccagcctggacagcccccagctgagccaggtgcacggcgtgatccaggtggacgtggcccccgcccccggcgacggcggcttcttcagcgacgccggcggcgacagccacctgggcgagaccatccccatggccagcagaggcggcgcctag

SEQ ID NO: 7660 - DNA, 1128 bp, Artificial Sequence
  derived and/or modified sequence
atgaagagacccgacctgcccagcggcttcgacggctggcaggtggtggacgccaccccccaggagaccagcagcggcatcttctgctgcggcccctgcagcgtggagagcatcaagaacggcctggtgtacatgaagtacgacacccccttcatcttcgccgaggtgaacagcgacaaggtgtactggcagagacaggacgacggcagcttcaagatcgtgtacgtggaggagaaggccatcggcaccctgatcgtgaccaaggccatcagcagcaacatgagagaggacatcacctacctgtacaagcaccccgagggcagcgacgccgagagaaaggccgtggagaccgccgccgcccacggcagcaagcccaacgtgtacgccaacagaggcagcgccgaggacgtggccatgcaggtggaggcccaggacgccgtgatgggccaggacctgatggtgagcgtgatgctgatcaaccacagcagcagcagaagaaccgtgaagctgcacctgtacctgagcgtgaccttctacaccggcgtgagcggcaccatcttcaaggagaccaagaaggaggtggagctggcccccggcgccagcgacagagtgaccatgcccgtggcctacaaggagtacagaccccacctggtggaccagggcgccatgctgctgaacgtgagcggccacgtgaaggagagcggccaggtgctggccaagcagcacaccttcagactgagaacccccgacctgagcctgaccctgctgggcgccgccgtggtgggccaggagtgcgaggtgcagatcgtgttcaagaaccccctgcccgtgaccctgaccaacgtggtgttcagactggagggcagcggcctgcagagacccaagatcctgaacgtgggcgacatcggcggcaacgagaccgtgaccctgagacagagcttcgtgcccgtgagacccggccccagacagctgatcgccagcctggacagcccccagctgagccaggtgcacggcgtgatccaggtggacgtggcccccgcccccggcgacggcggcttcttcagcgacgccggcggcgacagccacctgggcgagaccatccccatggccagcagaggcggcgcctag

SEQ ID NO: 7661 - DNA, 408 bp, Artificial Sequence
  derived and/or modified sequence
atgatggacggccccagaagcgacgtgggcagatggggcggcaaccccctgcagccccccaccacccccagccccgagcccgagcccgagcccgacggcagaagcagaagaggcggcggcagaagcttctgggccagatgctgcggctgctgcagctgcagaaacgccgccgacgacgactggggccccgagcccagcgacagcagaggcagaggcagcagcagcggcaccagaagacccggcagcagaggcagcgacagcagaagacccgtgagcagaggcagcggcgtgaacgccgccggcgacggcaccatcagagagggcatgctggtggtgaacggcgtggacctgctgagcagcagaagcgaccagaacagaagagagcaccacaccgacgagtacgagtag

SEQ ID NO: 7662 - DNA, 129 bp, Artificial Sequence
  derived and/or modified sequence
atgatggacggccccagaagcgacgtgggcagatggggcggcaaccccctgcagccccccaccacccccagccccgagcccgagcccgagcccgacggcagaagcagaagaggcggcggcagaagctag

SEQ ID NO: 7663 - DNA, 198 bp, Artificial Sequence
  derived and/or modified sequence
atgatggacggccccagaagcgacgtgggcagatggggcggcaaccccctgcagccccccaccacccccagccccgagcccgagcccgagcccgacggcagaagcagaagaggcggcggcagaagcttctgggccagatgctgcggctgctgcagctgcagaaacgccgccgacgacgactggggccccgagccctag

SEQ ID NO: 7664 - DNA, 153 bp, Artificial Sequence
  derived and/or modified sequence
atgatggacggccccagaagcgacgtgggcagatggggcggcaaccccctgcagccccccaccacccccagccccgagcccgagcccgagcccgacggcagaagcagaagaggcggcggcagaagcttctgggccagatgctgcggctgctag

SEQ ID NO: 7665 - DNA, 30 bp, Artificial Sequence
  derived and/or modified sequence
atgatggacggccccagaagcgacgtgtag

SEQ ID NO: 7666 - DNA, 2454 bp, Artificial Sequence
  derived and/or modified sequence
atgatggatggtcctcggtccgacgtaggccggtggggagggaacccccttcagccacccaccaccccttcacctgagccggagccagagccagatgggaggagtagaagaggggggggtagaagtttctgggcccggtgctgtggctgctgtagttgcaggaacgccgcagatgacgactggggaccagagccctcagatagtaggggaagagggtcctcaagtggcacccgcaggcccggtagtcgcggctctgatagtaggaggccagtgagcaggggatctggagtgaatgcggctggggacggaacaatacgggaaggcatgctcgtagttaatggcgtagatctgctctcttcccggagcgaccaaaatcgcagggaacatcataccgatgaatacgaatatgacgagctgatcgttcggagagggcagccattccacatgctgctgctactgtctcggacatatgaatcttccgaccgtatcactctggagctacttatcgggaacaatcctgaggtggggaagggtacacatgtcataattcccgtgggcaagggaggctccggggggtggaaggcccaagtggtgaaggcctcaggtcagaatctaaacctccgcgttcatacatctcctaacgcaattatcgggaaatttcagttcactgttaggacccaatccgatgcaggagaattccagctgccttttgaccctcgaaacgagatctatattctcttcaatccgtggtgtcctgaagacatcgtttatgtggaccatgaggactggcgccaggagtatgtcttgaatgagtcaggccgtatatactatggcacagaggctcagattggtgagcgcacctggaactacggccagtttgaccatggcgtactcgacgcctgtctgtatatcttagatcgccggggcatgccatatggagggcgcggtgacccagtgaacgtgagtcgagtcatctccgccatggtcaattctttggatgacaatggagtgctgattgggaattggagcggcgattatagtcgaggaacaaacccgagcgcatgggtgggttccgttgagatcctcctttcttatctgcggacaggctacagcgtaccatacggccaatgctgggttttcgccggtgtcacaaccaccgtgctccgttgcctgggactagcaacacggactgtgaccaattttaacagtgcccatgataccgacacttcactcacgatggatatttatttcgacgagaacatgaaaccccttgagcacctaaaccatgattcagtgtggaattttcacgtgtggaacgactgttggatgaaacgccccgatcttccatcaggtttcgacgggtggcaggtcgtcgatgccaccccacaggaaacctcatctggcattttttgttgtggaccttgttcggtggagtcgattaaaaacggacttgtctacatgaaatacgatacgcctttcattttcgcagaggtcaactcagataaggtgtactggcagcgacaggacgatggctcattcaaaatagtttatgtagaagagaaagccatcggtacattaatcgtgaccaaggctataagcagcaatatgagggaagacattacttatctctataaacatcctgaaggctcggacgctgaacgcaaggccgtagaaaccgcggcggcccacgggagcaagccaaatgtttatgccaatcggggctctgctgaagatgttgccatgcaggtggaagcccaggatgctgtgatggggcaagatctaatggtctcagtgatgctcatcaaccactcatcttctaggagaaccgtcaaacttcacctctacctgtccgtgacattctatactggagtgagtggcacaatctttaaagaaacgaagaaggaggtcgagttggcacctggcgcctccgaccgggtcactatgcctgtggcttacaaagagtaccgcccccacctagtggatcaaggtgccatgctactcaatgtgagcgggcacgttaaggaatctggccaggtgctcgccaaacagcacaccttccggctccggacccccgacttaagcctaacgttactcggagctgctgtggttggccaagaatgcgaagtgcagatcgtcttcaaaaatcctctccccgtgactctcactaatgttgtgttcaggctcgagggctcaggtttacagaggccaaaaatcttgaatgtgggtgacattggcggtaacgagaccgttacacttcgccagtcattcgtacccgtgcgccccggacctcgccagctgatcgcctctctggacagcccgcagttaagtcaggttcacggtgtgattcaagtagatgtcgcaccagcgccaggagatggcggcttttttagcgacgcagggggcgactcccaccttggtgagacaatacctatggcctcaagaggcggagcatag

SEQ ID NO: 7667 - DNA, 1128 bp, Artificial Sequence
  derived and/or modified sequence
atgaaacgtccagatcttcctagcggatttgacggttggcaggtcgttgatgctaccccccaagaaacctcatctggcattttttgttgcggcccctgttcagtcgagtctatcaaaaacggattggtgtatatgaagtacgacaccccatttatctttgctgaggtgaattcagataaagtttactggcagagacaggacgacggaagctttaagatcgtctacgtggaagaaaaagcaatcggaacccttattgtgaccaaggcaatctcctctaacatgcgcgaagacataacttacctctacaagcacccagaagggagtgacgcagaacggaaggcagtcgagactgccgcggcccatgggtccaagccgaatgtttatgcaaacagaggtagcgccgaggacgttgcaatgcaggttgaagctcaggacgcggtgatgggccaagatctgatggtgagtgtaatgctcatcaaccactcatctagccggcgtacagtgaagctgcacctgtacctatctgtcactttctatacgggtgttagcggcacgatctttaaagaaaccaagaaagaggtcgagctcgcacctggcgcttccgaccgcgtgaccatgccagtggcgtataaagaatatcgccctcacttggtggatcagggggctatgcttctcaatgtgtccggacatgtcaaggagagtggtcaagttctggctaagcagcatacctttcggctgagaacacccgacctctcccttacgcttctgggcgctgcagtggttggacaggagtgtgaggtccaaattgtgtttaaaaaccctcttcctgtcacacttaccaatgtagtattccgcttggaaggctctggattacaacgcccaaagatattgaatgtgggtgatattggtggaaacgagactgtgacccttagacagtcctttgtgcctgtgcgccctgggccccgccaactaatcgccagccttgatagtccccagctctctcaggtgcatggagtcattcaggtggatgtcgcacctgcccccggagatgggggattctttagcgacgccggaggagattctcacttgggggaaaccattcccatggccagcagaggaggtgcttag

SEQ ID NO: 7668 - DNA, 408 bp, Artificial Sequence
  derived and/or modified sequence
atgatggatggaccccggtctgatgttggccgctgggggggcaacccactccaaccaccaaccactccttcccctgagcctgagcccgaacccgatggccgctcgagacgcgggggcggacgtagtttttgggcgcgctgctgtggatgttgctcttgtcgcaacgccgcggatgatgattggggacccgagcccagtgattctcggggacggggcagcagttccggaactaggcggcccggctcaagggggtccgactccaggcggcccgtgtcacgcggaagcggagtgaacgccgcaggagacgggaccatccgggagggcatgctggtagtgaatggcgtggatctgttgtcatctagatccgaccaaaatcgaagagagcaccacactgacgagtacgagtag

SEQ ID NO: 7669 - DNA, 129 bp, Artificial Sequence
  derived and/or modified sequence
atgatggacggccctcggagcgacgtcggccgatggggaggcaaccctctgcagccccctacaaccccgtcccctgagccagaacctgaaccagacggaagatctcgccggggcggtggtagatcctag

SEQ ID NO: 7670 - DNA, 198 bp, Artificial Sequence
  derived and/or modified sequence
atgatggacgggcctaggtcggatgtgggaaggtgggggggaaatccattgcagccccccactactccttcacccgaacccgagcctgagccagatggccgatctagacgaggcggcggccgatcattttgggcacgatgttgtggctgttgttcctgccgcaatgccgctgacgatgactggggaccagaaccctag

SEQ ID NO: 7671 - DNA, 153 bp, Artificial Sequence
  derived and/or modified sequence
atgatggacggtcctcggtccgacgtgggcaggtggggcggcaacccactgcagccccccacaacgccctcaccggagcccgaaccagaacctgacggtcgctcccgccgtggcggtggccgaagtttctgggcacgttgctgtggctgttag

SEQ ID NO: 7672 - DNA, 30 bp, Artificial Sequence
  derived and/or modified sequence
atgatggatggacctagatccgacgtctag

SEQ ID NO: 7673 - DNA, 2454 bp, Artificial Sequence
  derived and/or modified sequence
atgatggatggccccaggagtgatgtgggccgctggggcggcaaccccctgcagccccccaccacccccagccctgagcctgagcctgagccagatggccgcagccggcggggcggcggccgctccttctgggcccgctgctgcggctgctgcagctgcagaaatgctgctgatgatgactggggccctgagcccagcgacagccggggccggggcagcagcagcggcacccggcggcccggcagccggggcagtgacagccggcggcctgtgtcccggggcagcggcgtgaatgctgctggagatggcaccatccgggagggcatgctggtggtgaatggagtggacctgctgagcagcagaagtgaccagaacagaagagagcaccacacagatgaatatgaatatgatgagctgattgtgcggcggggccagcccttccacatgctgctgctgctgagcaggacctatgagagcagtgaccgcatcaccctggagctgctgattggcaacaaccctgaggtgggcaagggcacccacgtgatcatccctgtgggcaaaggaggcagcggcggctggaaggcccaggtggtgaaggccagcggccagaacctgaacctgcgggtgcacaccagccccaatgccatcatcggcaagttccagttcaccgtgaggacccagagtgatgctggggagttccagctgccctttgaccccagaaatgagatctacatcctcttcaacccctggtgcccagaagatattgtgtatgtggaccacgaggactggaggcaggagtatgtgctgaatgaaagtggccgcatctactatggaacagaggcccagattggagagaggacctggaactacggccagtttgaccatggagtgctggatgcctgcctgtacatcctggacagaagaggcatgccctacggcggccgcggggaccctgtgaatgtgtccagggtcatcagcgccatggtgaacagcctggatgacaatggagtgctgattggcaactggagcggggactacagccggggcaccaaccccagcgcctgggtgggctctgtggagatcctgctgagctacctgaggacaggctacagcgtgccctacggccagtgctgggtgtttgctggggtgaccaccaccgtgctgcgctgcctgggcctggccaccaggacagtgaccaacttcaacagcgcccatgacacagacaccagcctgaccatggacatctactttgatgagaacatgaagcccctggagcacctgaaccatgattctgtgtggaacttccacgtgtggaatgactgctggatgaagaggccagacctgcccagcggctttgatggctggcaggtggtggatgccaccccccaggagaccagcagcggcatcttctgctgcggcccctgcagcgtggagagcatcaagaatggcctggtgtacatgaagtatgacacccccttcatctttgctgaggtgaacagcgacaaggtgtactggcagaggcaggatgatggcagcttcaagatcgtgtatgtggaggagaaggccatcggcaccctgattgtgaccaaggccatcagcagcaacatgagggaggacatcacctacctgtacaagcaccctgagggcagtgatgctgagaggaaggctgtggagacagctgctgcccacggcagcaagcccaacgtgtatgccaacagaggcagcgcagaagatgtggccatgcaggtggaggcccaggatgctgtgatgggccaggacctgatggtgtctgtgatgctgatcaaccacagcagcagcagaagaacagtgaagctgcacctgtacctgtctgtgaccttctacacaggagtgtctggcaccatcttcaaggagaccaagaaggaggtggagctggcccctggggccagtgacagagtgaccatgcctgtggcctacaaggagtaccggccccacctggtggaccagggcgccatgctgctgaatgtgtctggccacgtgaaggagagcggccaggtgctggccaagcagcacaccttccggctgcggaccccagacctgagcctgaccctgctgggcgctgctgtggtgggccaggagtgtgaggtgcagatcgtgttcaagaaccccctgcctgtgaccctgaccaacgtggtgttccggctggagggcagcggcctgcagaggcccaagatcctgaatgtgggggacatcggcggcaatgaaacagtgaccctgcggcagagctttgtgcctgtgcggcccggcccccggcagctgattgccagcctggacagcccccagctgagccaggtgcatggagtcatccaggtggatgtggccccagcccctggagatggcggcttcttcagtgatgctggaggagacagccacctgggggagaccatccccatggccagcagaggaggagcctag

SEQ ID NO: 7674 - DNA, 1128 bp, Artificial Sequence
  derived and/or modified sequence
atgaagaggccagacctgcccagcggctttgatggctggcaggtggtggatgccaccccccaggagaccagcagcggcatcttctgctgcggcccctgcagcgtggagagcatcaagaatggcctggtgtacatgaagtatgacacccccttcatctttgctgaggtgaacagcgacaaggtgtactggcagaggcaggatgatggcagcttcaagatcgtgtatgtggaggagaaggccatcggcaccctgattgtgaccaaggccatcagcagcaacatgagggaggacatcacctacctgtacaagcaccctgagggcagtgatgctgagaggaaggctgtggagacagctgctgcccacggcagcaagcccaacgtgtatgccaacagaggcagcgcagaagatgtggccatgcaggtggaggcccaggatgctgtgatgggccaggacctgatggtgtctgtgatgctgatcaaccacagcagcagcagaagaacagtgaagctgcacctgtacctgtctgtgaccttctacacaggagtgtctggcaccatcttcaaggagaccaagaaggaggtggagctggcccctggggccagtgacagagtgaccatgcctgtggcctacaaggagtaccggccccacctggtggaccagggcgccatgctgctgaatgtgtctggccacgtgaaggagagcggccaggtgctggccaagcagcacaccttccggctgcggaccccagacctgagcctgaccctgctgggcgctgctgtggtgggccaggagtgtgaggtgcagatcgtgttcaagaaccccctgcctgtgaccctgaccaacgtggtgttccggctggagggcagcggcctgcagaggcccaagatcctgaatgtgggggacatcggcggcaatgaaacagtgaccctgcggcagagctttgtgcctgtgcggcccggcccccggcagctgattgccagcctggacagcccccagctgagccaggtgcatggagtcatccaggtggatgtggccccagcccctggagatggcggcttcttcagtgatgctggaggagacagccacctgggggagaccatccccatggccagcagaggaggagcctag

SEQ ID NO: 7675 - DNA, 408 bp, Artificial Sequence
  derived and/or modified sequence
atgatggatggccccaggagtgatgtgggccgctggggcggcaaccccctgcagccccccaccacccccagccctgagcctgagcctgagccagatggccgcagccggcggggcggcggccgctccttctgggcccgctgctgcggctgctgcagctgcagaaatgctgctgatgatgactggggccctgagcccagcgacagccggggccggggcagcagcagcggcacccggcggcccggcagccggggcagtgacagccggcggcctgtgtcccggggcagcggcgtgaatgctgctggagatggcaccatccgggagggcatgctggtggtgaatggagtggacctgctgagcagcagaagtgaccagaacagaagagagcaccacacagatgaatatgaatag

SEQ ID NO: 7676 - DNA, 129 bp, Artificial Sequence
  derived and/or modified sequence
atgatggatggccccaggagtgatgtgggccgctggggcggcaaccccctgcagccccccaccacccccagccctgagcctgagcctgagccagatggccgcagccggcggggcggcggccgctcctag

SEQ ID NO: 7677 - DNA, 198 bp, Artificial Sequence
  derived and/or modified sequence
atgatggatggccccaggagtgatgtgggccgctggggcggcaaccccctgcagccccccaccacccccagccctgagcctgagcctgagccagatggccgcagccggcggggcggcggccgctccttctgggcccgctgctgcggctgctgcagctgcagaaatgctgctgatgatgactggggccctgagccctag

SEQ ID NO: 7678 - DNA, 153 bp, Artificial Sequence
  derived and/or modified sequence
atgatggatggccccaggagtgatgtgggccgctggggcggcaaccccctgcagccccccaccacccccagccctgagcctgagcctgagccagatggccgcagccggcggggcggcggccgctccttctgggcccgctgctgcggctgctag

SEQ ID NO: 7679 - DNA, 30 bp, Artificial Sequence
  derived and/or modified sequence
atgatggatggccccaggagtgatgtgtag

SEQ ID NO: 7680 - DNA, 2454 bp, Artificial Sequence
  derived and/or modified sequence
atgatggacggcccccggagcgacgtgggccggtggggcggcaaccccttacagcctcccacaactccctcccctgagcctgagcccgagcctgacgggcggtcacgtcgcggaggcggcaggtccttttgggctcgctgttgtggctgctgttcgtgccggaatgccgccgacgatgattggggcccagaaccttccgacagtaggggaaggggctcgtcaagcggaactcgacgtccagggagtagaggctcagattcgcggagacctgtgtcacggggcagcggcgttaatgctgccggcgatggaacaatcagagagggcatgttggtggtgaacggcgtggacttactttcctccagatccgaccaaaatcggcgtgagcaccacacggatgagtacgagtacgatgaactgatcgtgagacgcgggcagcctttccatatgttgcttcttctgtcccgaacctacgaatcttccgacagaattactcttgaattgctgattggcaacaaccccgaagtcggcaagggtacccacgtgatcatcccggttggcaagggaggatcaggcggctggaaagcgcaagtagtaaaagcaagtgggcagaatctgaacctgcgggtccatacctcacctaacgctataatcggcaagtttcaatttacggtccgcacccaaagtgacgctggggagtttcagctcccttttgaccccagaaatgaaatttatatactttttaacccttggtgccctgaggacatcgtgtacgtggaccacgaggattggcgacaggagtatgtgctaaacgagagcggccgcatctattatggaaccgaagcccagatcggcgagaggacctggaattatggacagttcgatcatggcgtgcttgacgcatgcctctatatcctggacagaaggggtatgccctatggtggacggggggatccagttaatgtgagccgtgtaatctcagcaatggttaactccctggatgataatggcgtgctgatagggaattggagtggcgattatagtcgcggaacaaacccttcggcttgggtaggaagcgtcgagatactgctctcttatctgcggaccggttatagtgttccttacggtcagtgctgggtcttcgctggagtaaccactaccgtgctgcggtgtttaggactggccacgagaacagtcacgaactttaactcagcacacgatacagatacaagcctcaccatggatatttatttcgatgagaacatgaagcccctcgagcatctgaatcacgattccgtctggaactttcacgtgtggaacgactgttggatgaaaagacccgacctcccgtcggggttcgatggatggcaggttgtcgacgcaactccgcaggaaacctcctctggtattttttgctgcggaccttgcagtgttgaaagcatcaagaacggcctcgtctacatgaaatacgataccccatttatctttgccgaagtgaatagtgacaaggtgtactggcagagacaggacgatggcagcttcaagattgtgtatgtcgaagagaaggcgataggaaccctcatagtaactaaggcgattagtagcaacatgcgggaggacatcacttatctctacaaacacccggaaggatctgacgccgagaggaaagccgtggaaaccgctgctgctcatggatccaagcccaacgtgtatgcaaacagagggagtgcagaggatgtcgctatgcaggtggaggcgcaggatgccgttatggggcaggacttgatggtttctgtgatgctcatcaaccacagcagcagccgccgaactgttaagcttcacctttacctgtccgtgacattctatacaggagtatccggcacaatatttaaagagacgaaaaaagaggttgagcttgcaccaggcgccagtgatagagtgacaatgcccgtagcatataaggagtaccgccctcaccttgttgaccaaggagcaatgttactcaacgtctccggccatgtgaaagaaagcggacaagtcttggcaaagcagcatacatttagacttagaacaccagacctgagtctgacgctgctgggcgcagcagtggtcggtcaggagtgtgaggtgcagattgtgttcaagaatcctcttccggttacgctcacgaacgtggtgtttagactggaagggtcagggctgcaaaggcctaaaattttaaacgtgggcgacatagggggaaacgaaactgtcacattgagacagtcctttgtgccagtgaggcccggccctcgacagctgatagcaagcctggactcgccccagctatcacaggtgcatggtgtcatccaggtggacgtggcacccgcccccggggacgggggattctttagtgacgccggaggagacagccatctaggggagacaattcctatggcatctaggggcggggcctag

SEQ ID NO: 7681 - DNA, 1128 bp, Artificial Sequence
  derived and/or modified sequence
atgaagcggcccgacctgcccagcggcttcgacggctggcaggtggtagatgcaacccctcaggagacctctagcgggattttttgttgtggcccctgcagcgtggagtcaattaaaaatggtttggtatatatgaagtatgacactccatttatcttcgcagaggtgaacagcgataaggtgtattggcaacggcaggacgacggttcattcaaaattgtgtatgtggaagaaaaagcaatcgggaccctgatagtcaccaaagctatctcatctaacatgcgcgaggacatcacatacttgtacaagcatcctgaagggagcgacgcagaacggaaagcagtcgagactgccgctgcacacggatcaaaaccgaatgtctacgccaacaggggcagcgctgaggacgtcgccatgcaagtggaggcacaggatgccgtgatggggcaagatctaatggtgtctgtgatgctgatcaaccacagttccagcagacgaactgtcaaattacacctctatttgagcgtgaccttctacacaggagtgagtgggactatctttaaagagaccaaaaaggaggtagagctagcacctggagccagtgacagagtgactatgcccgtcgcctataaggagtatcggccacacctggtcgatcagggcgcaatgctactgaacgttagtgggcacgtcaaagaaagtgggcaggtgttggctaagcagcacacctttcgcctgaggaccccggacttgtctctcaccctgctcggtgccgccgtggtgggccaggagtgcgaagtgcagatcgtttttaagaacccacttccagtcaccctgaccaatgttgtctttaggctcgaaggctcagggcttcaacgcccaaaaattttgaacgtgggtgacatcggcgggaatgagaccgtgactcttagacaaagtttcgtgcctgtgaggcccggcccaagacagctgatcgcttctctggactcaccacagctctctcaggtccacggcgtcatacaggttgatgtggccccagcccccggtgatggaggattcttctcggatgccggtggcgactctcatctaggagaaactattcctatggcttccagaggaggagcctag

SEQ ID NO: 7682 - DNA, 408 bp, Artificial Sequence
  derived and/or modified sequence
atgatggacggcccccggagcgacgtgggccggtggggcggcaaccctctgcagcctcccacgaccccctctccagaacccgaaccagaacccgacggaaggtctcgtcggggcggagggaggtccttctgggcgcgctgttgcggttgttgctcgtgccgaaatgccgccgacgacgactggggtccagagccctctgactctaggggcagagggtcctcatctggcacccggaggcctggcagtcgaggctcagacagcaggcgccccgtgtcccgagggtctggagtgaacgctgctggggacgggactattcgagagggaatgttggttgttaatggggtggacctcctgtcgagccgcagtgatcagaaccgcagggagcaccacaccgatgagtacgagtag

SEQ ID NO: 7683 - DNA, 129 bp, Artificial Sequence
  derived and/or modified sequence
atgatggacggcccccggagcgacgtgggccggtggggcggcaaccccctgcagccacccactacccctagtcccgagcccgagccagaaccagacggtcggtcgcgccgagggggcggccgcagctag

SEQ ID NO: 7684 - DNA, 198 bp, Artificial Sequence
  derived and/or modified sequence
atgatggacggcccccggagcgacgtgggccggtggggcggcaacccccttcagcccccaacaaccccctccccggagccggaacccgaacccgatggtagatccaggagaggaggtgggaggagcttctgggcacgctgctgcggctgctgctcttgcaggaacgcagctgacgatgactggggcccggaaccctag

SEQ ID NO: 7685 - DNA, 153 bp, Artificial Sequence
  derived and/or modified sequence
atgatggacggcccccggagcgacgtgggccggtggggcggcaacccactgcaacctcccacaactcccagcccagaaccagaacctgagccagatggccgctcccgtcggggcggaggccgatccttctgggctagatgttgtggttgttag

SEQ ID NO: 7686 - DNA, 30 bp, Artificial Sequence
  derived and/or modified sequence
atgatggacggcccccggagcgacgtgtag

SEQ ID NO: 7687 - DNA, 2454 bp, Artificial Sequence
  derived and/or modified sequence
atgatggacgggcctcggtccgatgttggccgatggggcggaaacccactgcagcccccaaccactcctagccctgagcctgagcccgagcccgatggccgaagtaggagaggtggcggtcgttccttctgggcgagatgctgcggttgctgctcttgcaggaacgcagctgatgatgactggggcccagagccctccgatagccgtggtaggggctcaagctccggcactcgtagaccaggcagtcgaggctctgactcccggaggcctgtgtcaaggggaagcggggtgaatgcggcaggtgacggcacaatcagggaggggatgcttgtcgtaaacggagttgacctactgtcatcaaggtccgaccagaatagaagggaacaccacacggatgaatacgaatatgatgagctcatcgtacgtagaggacagccctttcatatgctactattactttcacgtacctacgaaagttccgacagaattaccctcgagctgcttatcggaaacaaccctgaggtcggaaagggcacccacgtaattatcccggtggggaaaggtggctcggggggttggaaagcacaggttgtgaaggcctctggccagaacctgaatttaagggtccacacaagtcctaatgccataatcggaaagttccagtttactgtgcggacacaatctgacgccggtgagtttcagctgccattcgaccctcgcaacgaaatctatatactcttcaatccttggtgcccagaagacattgtgtacgtagaccacgaggactggcgccaggaatatgtgcttaacgagagcggtagaatctactacggcaccgaggcccaaatcggcgagcgcacctggaattacggccagttcgaccacggagtgttggacgcttgcctgtacatcttagaccgaagaggcatgccatatggtgggcgaggggatccggttaacgttagcagagtaatcagcgcaatggtcaactcattagatgataacggagtgctcataggaaattggagtggcgactacagcagagggaccaatccctcagcttgggtcgggtccgtcgaaattctcttgtcttatttgagaactggctacagcgtgccatacggtcagtgctgggtcttcgctggagtcacaacaaccgtcctgcggtgcctcgggcttgctactcgaacagtgacaaacttcaatagtgcccacgatactgatactagcctgactatggacatatactttgacgagaacatgaagccattggagcacctgaatcacgatagtgtttggaacttccatgtctggaacgactgttggatgaagaggcctgacctgccctccggttttgatgggtggcaggtcgttgacgccaccccccaggagacttcttcggggatcttctgctgcgggccttgtagcgtggagtctatcaaaaatggtttagtgtacatgaagtatgacaccccctttatatttgcagaggtgaacagcgataaggtgtattggcagcgtcaggatgacgggtcatttaagatagtctatgtggaggagaaagctatcggcacactgatcgtcactaaggccatttcctctaacatgagggaggatatcacatatttgtataagcatcccgaaggcagcgatgccgaacgaaaagccgtggaaactgcggcagcacacggttctaagccgaacgtgtatgctaatcgagggagtgcagaggacgtcgctatgcaagtggaggcccaggacgccgtaatgggtcaagatctcatggtgtccgtgatgctcattaaccactcttcttccaggaggaccgtgaaactccatctgtacctgagtgtaaccttttataccggggtatcgggtaccatttttaaggaaaccaagaaggaagttgagctggcacctggggcttccgacagggtaacaatgccagtggcttataaagaatatcgacctcacctggttgatcaaggggcaatgctgctaaacgtgagtgggcacgttaaggagagtggccaagtgctggccaagcagcacacatttcgattgcgaactcctgatctatctctaactttgctgggtgcagccgtcgttgggcaagagtgcgaggttcagattgtgtttaaaaaccccctgcctgtgacactaactaacgtggtatttcgactcgaaggttccggactacaacgacccaaaattctgaacgttggtgacattgggggtaatgagactgtgacgttacgacagagcttcgtgccagtccggcctggacctcgccagctaattgcctcactcgattcacctcaactgagtcaggtgcatggagttatacaggtggatgttgcccctgcccctggagatgggggatttttttctgacgccggaggggacagccacctcggagagacaattccaatggcctctaggggtggagcatag

SEQ ID NO: 7688 - DNA, 1128 bp, Artificial Sequence
  derived and/or modified sequence
atgaaacgaccagatttgccttctggttttgatgggtggcaggttgttgatgccactccccaggagacttctagcggaattttctgctgtggaccatgcagcgtagagtccataaaaaatgggttggtatacatgaagtacgacacgcctttcattttcgccgaagtcaatagcgacaaggtgtattggcaaaggcaggacgacggttcatttaagatcgtgtatgtggaggagaaagctatcggcaccctgatcgttacaaaagccattagtagtaacatgcgagaggatatcacctatttatacaaacacccggaaggttcagatgccgagagaaaagcagtggagaccgccgcagctcacggcagtaagccgaatgtttacgcaaacagaggatccgccgaggacgtagctatgcaggttgaggcccaggacgccgtcatggggcaggacctcatggtttcagtcatgttaataaatcacagctcatcgagacgcactgtgaagctgcatctctacctcagcgttaccttttacactggtgtgagtggcacaatatttaaagaaacaaagaaagaggtggagttagcgccaggcgcatccgaccgcgtgacaatgcccgtagcttacaaggaatatcgccctcatctggtggatcagggggctatgttgttgaacgtcagtggccacgtgaaagagagcggacaggtcctggcaaagcagcacacatttagactgcgtacccctgacttaagtctaactttgttaggcgctgcggtagttggccaggagtgcgaagtgcagatagtgtttaagaacccactaccagtcaccctgacaaatgtggtttttcggctcgaaggaagtggtcttcagagacccaaaatcctcaacgttggtgatatcggaggtaacgagactgtaactttgcgccaatcattcgtgcctgtgaggccgggaccaaggcagcttattgctagcctggacagcccacagttatcccaagttcatggtgtgattcaggtagacgtagccccagccccaggggatgggggatttttcagtgatgcaggcggagactcacacctgggagaaacaattcctatggcttctcgaggtggcgcatag

SEQ ID NO: 7689 - DNA, 408 bp, Artificial Sequence
  derived and/or modified sequence
atgatggatggcccacgaagcgatgtcggaagatggggtggcaatcctctgcagccacctaccacgccctctccagagccagaaccagaacccgacggcaggtcgcgacggggagggggacgtagcttttgggcccgatgctgcggttgctgcagctgcagaaacgccgcagatgacgattgggggccagagccgtcagattctcggggtcgaggcagcagttccggcactcggcgtcctggctctaggggcagtgactccaggcggcctgttagcaggggtagcggcgtcaatgccgctggtgacgggacaattcgtgagggaatgttggttgtgaatggggtggacctgctgtccagccgcagcgaccagaacaggagagagcatcatacagacgagtacgagtag

SEQ ID NO: 7690 - DNA, 129 bp, Artificial Sequence
  derived and/or modified sequence
atgatggacggaccgagatctgatgtgggaagatggggtgggaacccactgcaacctcctacaaccccttctccagaaccggaacccgagccagacggacgatcacgcagaggtggtggcagatcttag

SEQ ID NO: 7691 - DNA, 198 bp, Artificial Sequence
  derived and/or modified sequence
atgatggatggcccacggtccgacgtcggtagatggggcggtaatccgctgcagcctccaacgacccctagcccagagcctgagccggagccagacggaaggagtcgtcggggtggcggaaggtctttctgggcaagatgctgcgggtgttgttcctgccggaatgctgcggacgatgactggggtcccgagccttag

SEQ ID NO: 7692 - DNA, 153 bp, Artificial Sequence
  derived and/or modified sequence
atgatggacggcccaaggtccgacgtggggaggtggggcggaaatcctctacaaccccctaccacccctagcccagagcctgaaccagagcccgacggcagatctcgaagaggaggtggtagatccttctgggcacgttgttgcggatgttag

SEQ ID NO: 7693 - DNA, 30 bp, Artificial Sequence
  derived and/or modified sequence
atgatggacggacccaggagcgatgtatag

SEQ ID NO: 7694 - DNA, 2777 bp, Artificial Sequence
  derived and/or modified sequence
acataagtcacttaccaggtctgtccctgcggcatccagtctgtgggtcctgtcccatccatcctgacctgttccatctcagccccaggactcagtactgcggttgccaacactgctgccaggcatgatggatgggccacgttccgatgtgggccgttggggtggcaaccccttgcagccccctaccacgccatctccagagccagagccagagccagacggacgctctcgcagaggaggaggccgttccttctgggctcgctgctgtggctgctgttcatgccgaaatgcggcagatgacgactggggacctgaaccctctgactccaggggtcgagggtccagctctggcactcgaagacctggctcccggggctcagactcccgccggcctgtatcccggggcagcggtgtcaatgcagctggagatggcaccatccgagagggcatgctagtagtgaacggtgtggacttgctgagctcgcgctcggaccagaaccgccgagagcaccacacagacgagtatgagtacgacgagctgatagtgcgccgcgggcagcctttccatatgctcctcctcctgtcccggacctatgaatcctctgatcgcatcacccttgagttactcatcggaaacaaccccgaggtgggcaagggcacgcacgtgatcatcccagtgggcaaggggggcagtggaggctggaaagcccaggtggtcaaggccagtgggcagaatctgaacctgcgggtccacacttcccccaacgccatcatcggcaagtttcagttcacagtccgcacacaatcagacgctggggagttccagttgccctttgacccccgcaatgagatctacatcctcttcaacccctggtgcccagaggacattgtgtacgtggaccatgaggattggcggcaggagtatgttcttaatgagtctgggagaatttactacgggaccgaagcacagattggtgagcggacctggaactacggccagtttgaccacggggtgctggatgcctgcttatacatcctggaccggcgggggatgccatatggaggccgtggagacccagtcaatgtctcccgggtcatctctgccatggtgaactccctggatgacaatggagtcctgattgggaactggtctggtgattactcccgaggcaccaacccatcagcgtgggtgggcagcgtggagatcctgcttagctacctacgcacgggatattccgtcccctatggccagtgctgggtctttgctggcgtgaccaccacagtgctgcgctgcctgggtctggccacccgtactgtcaccaacttcaactccgcccacgacacagacacatcccttaccatggacatctacttcgacgagaacatgaagcccctggagcacctgaaccatgattctgtctggaacttccatgtgtggaacgactgctggatgaagaggccggatctgccctcgggctttgatgggtggcaggtggtggatgccacaccccaagagactagcagtggcatcttctgctgcggcccctgctctgtggagtccatcaagaatggcctggtctacatgaagtacgacacgcctttcatttttgctgaggtgaatagtgacaaggtgtactggcagcggcaggatgatggcagcttcaagattgtttatgtggaggagaaggccatcggcacactcattgtcacaaaggccatcagctccaacatgcgggaggacatcacctacctctataagcacccagaaggctcagacgcagagcggaaggcagtagagacagcagcagcccacggcagcaaacccaatgtgtatgccaaccggggctcagcggaggatgtggccatgcaggtggaggcacaggacgcggtgatggggcaggatctgatggtctctgtgatgctgatcaatcacagcagcagccgccgcacagtgaaactgcacctctacctctcagtcactttctatactggtgtcagtggtaccatcttcaaggagaccaagaaggaagtggagctggcaccaggggcctcggaccgtgtgaccatgccagtggcctacaaggaataccggccccatcttgtggaccagggggccatgctgctcaatgtctcaggccacgtcaaggagagcgggcaggtgctggccaagcagcacaccttccgtctgcgcaccccagacctctccctcacgttactgggagcagcagtggttggccaggagtgtgaagtacagattgtcttcaagaacccccttcccgtcaccctcaccaatgtcgtcttccggctcgaaggctctgggttacagaggcccaagatcctcaacgttggggacattggaggcaatgaaacagtgacactgcgccagtcgtttgtgcctgtgcgaccaggcccccgccagctcattgccagcttggacagcccacagctctcccaggtgcacggtgtcatccaggtggatgtggccccagcccctggggatgggggcttcttctcagacgctggaggtgacagtcacttaggagagaccatccctatggcatctcgaggtggagcttagccccgtgccaggagcaatgggactggagtcagatgagcaaggacattgccccaagataggggcacactacagagcagctccccaggagctcaggtggggagtccagggctcccggagggggagtccagggctcccggagagggagtcagtcttcacttgcactgggggaacagatgctaataaactgttttttaatgaa

SEQ ID NO: 7695 - DNA, 1581 bp, Artificial Sequence
  derived and/or modified sequence
ggcatccagtctgtgggtcctgtcccatccatcctgacctgttccatctcagccccaggactcagtactgcggttgccaacactgctgccaggcatgatggatgggccacgttccgatgtgggccgttggggtggcaaccccttgcagccccctaccacgccatctccagagccagagccagagccagacggacgctctcgcagaggaggaggccgttccttctgggctcgctgctgtggctgctgttcatgccgaaatgcggcagatgacgactggggacctgaaccctctgactccaggggtcgagggtccagctctggaacttccatgtgtggaacgactgctggatgaagaggccggatctgccctcgggctttgatgggtggcaggtggtggatgccacaccccaagagactagcagtggcatcttctgctgcggcccctgctctgtggagtccatcaagaatggcctggtctacatgaagtacgacacgcctttcatttttgctgaggtgaatagtgacaaggtgtactggcagcggcaggatgatggcagcttcaagattgtttatgtggaggagaaggccatcggcacactcattgtcacaaaggccatcagctccaacatgcgggaggacatcacctacctctataagcacccagaaggctcagacgcagagcggaaggcagtagagacagcagcagcccacggcagcaaacccaatgtgtatgccaaccggggctcagcggaggatgtggccatgcaggtggaggcacaggacgcggtgatggggcaggatctgatggtctctgtgatgctgatcaatcacagcagcagccgccgcacagtgaaactgcacctctacctctcagtcactttctatactggtgtcagtggtaccatcttcaaggagaccaagaaggaagtggagctggcaccaggggcctcggaccgtgtgaccatgccagtggcctacaaggaataccggccccatcttgtggaccagggggccatgctgctcaatgtctcaggccacgtcaaggagagcgggcaggtgctggccaagcagcacaccttccgtctgcgcaccccagacctctccctcacgttactgggagcagcagtggttggccaggagtgtgaagtacagattgtcttcaagaacccccttcccgtcaccctcaccaatgtcgtcttccggctcgaaggctctgggttacagaggcccaagatcctcaacgttggggacattggaggcaatgaaacagtgacactgcgccagtcgtttgtgcctgtgcgaccaggcccccgccagctcattgccagcttggacagcccacagctctcccaggtgcacggtgtcatccaggtggatgtggccccagcccctggggatgggggcttcttctcagacgctggaggtgacagtcacttaggagagaccatccctatggcatctcgaggtggagcttagccccgtgccaggagcaatgggactggagtcagatgagcaaggacattgccccaagataggggcacactacagagcagctccccaggagctcaggtggggagtcca

SEQ ID NO: 7696 - DNA, 555 bp, Artificial Sequence
  derived and/or modified sequence
agaactcggcagcaggagcctgtgagagcagagtcacttaccaggtctgtccctgcggcatccagtctgtgggtcctgtcccatccatcctgacctgttccatctcagccccaggactcagtactgcggttgccaacactgctgccaggcatgatggatgggccacgttccgatgtgggccgttggggtggcaaccccttgcagccccctaccacgccatctccagagccagagccagagccagacggacgctctcgcagaggaggaggccgttccttctgggctcgctgctgtggctgctgttcatgccgaaatgcggcagatgacgactggggacctgaaccctctgactccaggggtcgagggtccagctctggcactcgaagacctggctcccggggctcagactcccgccggcctgtatcccggggcagcggtgtcaatgcagctggagatggcaccatccgagagggcatgctagtagtgaacggtgtggacttgctgagctcgcgctcggaccagaaccgccgagagcaccacacagacgagtatgag

SEQ ID NO: 7697 - DNA, 580 bp, Artificial Sequence
  derived and/or modified sequence
acagaactcggcagcaggagcctgtgagagcagaggtaggcagcctaagcttgggaccagaaggtcggccagacagggctgtgggtggaagggcctgcctgccccactgcccttgcagcttcttcatccgggagaaggggctcctcacatgcccagtctggtaggaatcagcctggtgccaggggccatcacagcggtggctcccaccaaagcccagcctaagcccccagacctcacccctgctccctccctagcatcttctccccatttcccgcccagaggcctggcctcttctctccgccccctacagcagtttggcccctccctcccacataagtcacttaccaggtctgtccctgcggcatccagtctgtgggtcctgtcccatccatcctgacctgttccatctcagccccaggactcagtactgcggttgccaacactgctgccaggcatgatggatgggccacgttccgatgtgggccgttggggtggcaaccccttgcagccccctaccacgccatctccagagccagagccagagccagacggacgctctcgcagaggaggaggccgttcc

SEQ ID NO: 7698 - DNA, 527 bp, Artificial Sequence
  derived and/or modified sequence
gtcggcctgtttttactgtcttctgctaggcggcccatgggcagagctgggacactagtgggaaggaaggaaagaaggaagaaggccctggctgacgggcctgaggacaagacccaaggagagcctccctgaagatgcctagcctcctcctctctaccttgggatcgccttggtgccatcctcagtgtttccccagtgacggggtggagtaaggatgcacacagcacaggtgcctgagccggttggtctggattcccaggaagaattccaggttggagaaaagggaatcctctagtccaactgagcagagactcctctcagtgagagaaaggcatgatggatgggccacgttccgatgtgggccgttggggtggcaaccccttgcagccccctaccacgccatctccagagccagagccagagccagacggacgctctcgcagaggaggaggccgttccttctgggctcgctgctgtggctgctgttcatgccgaaatgcggcagatgacgactggggacctgaacc

SEQ ID NO: 7699 - DNA, 562 bp, Artificial Sequence
  derived and/or modified sequence
taggcggcccatgggcagagctgggacactagtgggaaggaaggaaagaaggaagaaggccctggctgacgggcctgaggacaagacccaaggagagcctccctgaagatgcctagcctcctcctctctaccttgggatcgccttggtgccatcctcagtgtttccccagtgacggggtggagtaaggatgcacacagcacaggtgcctgagccggttggtctggattcccaggaagaattccaggttggagaaaagggaatcctctagtccaactgagcagagactcctctcagtgagagaaaggtctgtccctgcggcatccagtctgtgggtcctgtcccatccatcctgacctgttccatctcagccccaggactcagtactgcggttgccaacactgctgccaggcatgatggatgggccacgttccgatgtgggccgttggggtggcaaccccttgcagccccctaccacgccatctccagagccagagccagagccagacggacgctctcgcagaggaggaggccgttccttctgggctcgctgctgtggctgct

SEQ ID NO: 7700 - protein, 497 aa, Artificial Sequence
  derived and/or modified sequence
MPTPDATTPQAKGFRRAVSELDAKQAEAIMSPRFIGRRQSLIEDARKEREAAVAAAAAAVPSEPGDPLEAVAFEEKEGKAVLNLLFSPRATKPSALSRAVKVFETFEAKIHHLETRPAQRPRAGGPHLEYFVRLEVRRGDLAALLSGVRQVSEDVRSPAGPKVPWFPRKVSELDKCHHLVTKFDPDLDLDHPGFSDQVYRQRRKLIAEIAFQYRHGDPIPRVEYTAEEIATWKEVYTTLKGLYATHACGEHLEAFALLERFSGYREDNIPQLEDVSRFLKERTGFQLRPVAGLLSARDFLASLAFRVFQCTQYIRHASSPMHSPEPDCCHELLGHVPMLADRTFAQFSQDIGLASLGASDEEIEKLSTLYWFTVEFGLCKQNGEVKAYGAGLLSSYGELLHCLSEEPEIRAFDPEAAAVQPYQDQTYQSVYFVSESFSDAKDKLRSYASRIQRPFSVKFDPYTLAIDVLDSPQAVRRSLEGVQDELDTLAHALSAIG

SEQ ID NO: 7701 - DNA, 1494 bp, Artificial Sequence
  derived and/or modified sequence
atgcccacccccgacgccaccaccccccaggccaagggcttcagaagagccgtgagcgagctggacgccaagcaggccgaggccatcatgagccccagattcatcggcagaagacagagcctgatcgaggacgccagaaaggagagagaggccgccgtggccgccgccgccgccgccgtgcccagcgagcccggcgaccccctggaggccgtggccttcgaggagaaggagggcaaggccgtgctgaacctgctgttcagccccagagccaccaagcccagcgccctgagcagagccgtgaaggtgttcgagaccttcgaggccaagatccaccacctggagaccagacccgcccagagacccagagccggcggcccccacctggagtacttcgtgagactggaggtgagaagaggcgacctggccgccctgctgagcggcgtgagacaggtgagcgaggacgtgagaagccccgccggccccaaggtgccctggttccccagaaaggtgagcgagctggacaagtgccaccacctggtgaccaagttcgaccccgacctggacctggaccaccccggcttcagcgaccaggtgtacagacagagaagaaagctgatcgccgagatcgccttccagtacagacacggcgaccccatccccagagtggagtacaccgccgaggagatcgccacctggaaggaggtgtacaccaccctgaagggcctgtacgccacccacgcctgcggcgagcacctggaggccttcgccctgctggagagattcagcggctacagagaggacaacatcccccagctggaggacgtgagcagattcctgaaggagagaaccggcttccagctgagacccgtggccggcctgctgagcgccagagacttcctggccagcctggccttcagagtgttccagtgcacccagtacatcagacacgccagcagccccatgcacagccccgagcccgactgctgccacgagctgctgggccacgtgcccatgctggccgacagaaccttcgcccagttcagccaggacatcggcctggccagcctgggcgccagcgacgaggagatcgagaagctgagcaccctgtactggttcaccgtggagttcggcctgtgcaagcagaacggcgaggtgaaggcctacggcgccggcctgctgagcagctacggcgagctgctgcactgcctgagcgaggagcccgagatcagagccttcgaccccgaggccgccgccgtgcagccctaccaggaccagacctaccagagcgtgtacttcgtgagcgagagcttcagcgacgccaaggacaagctgagaagctacgccagcagaatccagagacccttcagcgtgaagttcgacccctacaccctggccatcgacgtgctggacagcccccaggccgtgagaagaagcctggagggcgtgcaggacgagctggacaccctggcccacgccctgagcgccatcggctag

SEQ ID NO: 7702 - DNA, 1494 bp, Artificial Sequence
  derived and/or modified sequence
atgccgacacccgacgcaaccacaccccaggctaaggggttccggagagccgtttcggagctcgatgccaaacaggcagaagccatcatgtcaccgagatttattgggcggaggcagtccctgattgaagatgccagaaaagagagggaagctgcagtcgctgcagctgccgcagccgttccttcggaacccggagatcctttagaggctgtggcctttgaggagaaagagggtaaagccgtcctcaaccttctgttttccccaagggcaacaaagccctccgctctttctagagcagtgaaagtgttcgagacatttgaggctaagattcatcacctggaaacacggcctgcacagagaccacgagctggcgggccacatctggaatacttcgttcgcttagaggtgaggaggggtgatctggccgccctcttgtccggggtaagacaagtctccgaggacgtaagaagcccagccggtccaaaggtgccatggttccccagaaaggtgtcagagctcgataagtgccaccacttagtgaccaaattcgatcccgacctagaccttgatcatcccggcttcagtgatcaagtctaccgacagagaagaaaactgatcgccgagatagccttccagtaccggcatggggatcccatccctagagtggagtatactgccgaagaaatcgcaacatggaaagaagtgtacaccacgctgaagggcctttatgccacgcacgcatgcggtgagcacttggaggccttcgctctgctagaaagattttctggctatagggaagacaacatccctcagctcgaagatgtgagtcgctttctcaaagaaagaacaggatttcagctgagacctgtggccgggttgttaagcgcccgagatttcctcgcctctctggcttttcgagtattccagtgcacccagtatattaggcacgctagcagtcctatgcatagtccagaacccgactgctgccacgaactgcttggccacgtgcccatgctggcagaccgcacgttcgcacaattttctcaggatattggattggcttccctcggcgcttccgacgaggagatcgaaaagctctccacactgtattggttcactgtggagttcggcttatgtaaacaaaatggggaggtaaaggcctatggagccggactcctgtccagctacggagagcttctgcattgcttgtcggaagagcctgagatccgggcttttgacccagaagctgccgccgtacagccataccaggatcagacgtatcaaagcgtatatttcgtctccgaatcgttcagtgatgcgaaggacaagctccgctcctatgccagtcgcatccagaggccattttccgtgaagttcgatccctataccctggcaattgacgtcctcgatagcccccaggcggtcagacgatcccttgagggcgtgcaggatgagttggatacgctggcccacgctctaagcgcaattggctag

SEQ ID NO: 7703 - DNA, 1494 bp, Artificial Sequence
  derived and/or modified sequence
atgcccaccccagatgccaccaccccccaggccaagggcttcagaagagctgtgtctgagctggatgccaagcaggccgaggccatcatgagcccccgcttcatcggccggcggcagagcctgattgaagatgccaggaaggagcgggaggccgctgtggccgctgctgctgctgctgtgcccagcgagcccggggaccccctggaggccgtggcctttgaggagaaggagggcaaggctgtgctgaacctgctcttcagcccccgggccaccaagcccagcgccctgagcagagctgtgaaggtgtttgagacctttgaggccaagatccaccacctggagaccaggcctgcccagaggcccagggctgggggcccccacctggagtactttgtgcggctggaggtgagaagaggagacctggccgccctgctgagcggcgtgcggcaggtgtctgaagatgtgcgcagccctgctggccccaaggtgccctggttccccaggaaggtgtctgagctggacaagtgccaccacctggtgaccaagtttgatcctgacctggacctggaccaccctggcttcagtgaccaggtgtaccggcagaggaggaagctgattgctgagatcgccttccagtacagacatggagaccccatcccccgggtggagtacacagctgaggagatcgccacctggaaggaggtgtacaccaccctgaagggcctgtatgccacccacgcctgtggggagcacctggaggcctttgccctgctggagcgcttcagcggctaccgggaggacaacatcccccagctggaggatgtgagccgcttcctgaaggagaggacaggcttccagctgcggcctgtggccggcctgctgagcgcccgggacttcctggccagcctggccttccgggtcttccagtgcacccagtacatcagacatgccagcagccccatgcacagccctgagccagactgctgccacgagctgctgggccacgtgcccatgctggccgacaggacctttgcccagttcagccaggacatcggcctggccagcctgggcgccagtgatgaggagattgagaagctgagcaccctgtactggttcaccgtggagtttggcctgtgcaagcagaatggagaggtgaaggcctacggggccggcctgctgagcagctatggagagctgctgcactgcctgtctgaggagcctgagatccgggcctttgatcctgaggccgctgctgtgcagccctaccaggaccagacctaccagagcgtgtactttgtgtctgagagcttcagtgatgccaaggacaagctgcggagctatgccagccgcatccagaggcccttctctgtgaagtttgacccctacaccctggccattgatgtgctggacagcccccaggccgtgcggcgcagcctggagggcgtgcaggatgagctggacaccctggcccacgccctgagcgccatcggctag

SEQ ID NO: 7704 - DNA, 1494 bp, Artificial Sequence
  derived and/or modified sequence
atgcccacccccgacgccaccaccccccaggccaagggcttccggcgtgctgtgtccgagctggatgctaaacaggccgaggcaatcatgagcccccggtttattggacgtaggcagtcccttatcgaggacgcccggaaggagagagaggcagccgtcgctgctgctgcggctgcagtgccttctgaaccgggtgacccactggaagctgtggccttcgaggagaaggagggaaaggcagtgttgaatttgctgttttccccccgcgccaccaagccgagcgcactcagccgggccgtcaaggtttttgaaacttttgaagcgaaaatccatcatttagaaacccggcccgctcagcgaccaagggctgggggcccccaccttgagtactttgtgaggctcgaggtgcgccggggcgacttggcagccttactatctggggttcgacaggtatccgaggatgtgcgctctcccgctggccccaaagtaccctggtttcctcgcaaggtaagtgaattagataaatgccaccaccttgtgactaagttcgaccctgacttggatctagatcatcccggattttctgaccaggtgtaccgccagcggcgaaaactgatagccgagatcgcattccagtaccgtcatggtgaccctattcctagggtcgagtacaccgcagaagaaatcgccacttggaaagaggtgtacaccaccttgaaaggcctgtacgccacacacgcctgcggcgagcaccttgaggcttttgccctgttggagcggttttctggctacagggaggataacatcccccagctggaagacgttagccggttcttaaaggaacggacgggctttcagctgaggcctgttgccggcttactctccgcacgcgactttctggcatctctggctttcagggtcttccagtgtacacagtacataagacatgcctctagtccgatgcatagccccgagcccgattgttgccatgaactcctaggtcatgtgccaatgctggcagacaggacgttcgcccaattctctcaggacataggccttgccagtctgggagctagcgatgaagagatcgaaaaattgtcaacactgtattggttcacagttgagttcggcctgtgtaagcagaatggggaagtgaaggcctacggggcagggctgctctcctcttatggggaacttctgcactgtctcagcgaagaaccggagatcagggctttcgaccccgaagccgccgccgtgcagccataccaggaccagacataccaatcagtgtacttcgtatccgaaagtttttctgatgcaaaggacaagctgcgcagttatgcctcaaggattcagaggcccttttccgttaaatttgacccttacactctcgcaatcgacgtcctggatagtccgcaggcagtgagacgttctcttgagggcgtgcaggacgagctggatacgcttgcccatgccctgtcagccatcggctag

SEQ ID NO: 7705 - DNA, 1494 bp, Artificial Sequence
  derived and/or modified sequence
atgcctacacccgacgcaaccacaccacaagccaagggattccggagggcggtcagtgagctcgacgccaagcaggcagaggccatcatgtccccacggttcattggaaggcgtcaaagtctgatagaagacgctcgaaaggagagagaagccgctgttgcggcagccgctgcagcagttcctagtgaaccaggcgatcccctagaggcagtcgcctttgaggagaaagaaggaaaggcggtccttaacctgctcttttcccccagggcgacgaagcccagtgctctgtctagggcagtaaaggtgtttgagacattcgaggctaaaattcatcaccttgaaaccagaccggctcaaagaccgagggccggagggcctcaccttgaatacttcgttagacttgaggtgcgtcgaggtgatcttgccgctcttctgtctggtgtacgtcaggtatcagaagatgttcgctcgccagctggcccaaaggtcccctggtttccacgaaaggtgagtgagcttgacaaatgtcatcaccttgtgaccaagttcgaccctgatctcgacctggaccacccgggtttcagtgatcaggtgtatagacagcgcaggaagctgatcgctgagatcgcttttcagtacagacacggcgaccccatccctagagtggaatacaccgccgaagagatcgccacatggaaggaggtttacaccactcttaaaggcttatatgccacccacgcctgcggagaacatttggaggcctttgcattgcttgagaggttcagcggctatcgggaagataacattccacaacttgaggatgtctctagattcttgaaggagaggacaggattccagcttcgccctgtggcaggattactttccgctagggattttttagcctccctggccttccgggtgttccaatgcacccagtacatccgccatgcgtcctcaccaatgcactcccccgagcccgattgttgccacgagctactcggacatgtgcctatgctggccgaccgaacgttcgcccagtttagccaggatatcggccttgcttcactgggtgcgagtgacgaggaaatcgaaaagctgagtacactgtattggttcaccgtggaatttggcctgtgcaagcagaacggagaagtgaaagcttatggagccggtctactctccagctatggcgagctccttcactgtttgtcagaagaaccggagattcgcgcttttgaccctgaagctgccgctgttcagccctaccaagaccagacttatcaaagcgtgtatttcgtgtcggaaagcttcagtgacgcaaaggacaagttacgcagttacgcttcccgtattcagcgtcctttctccgttaagtttgacccatacacacttgccatagatgtcctggattctccccaagccgtgaggaggagcctggagggcgtgcaagatgagctagatacgcttgctcacgcgctgagtgcaatcggctag

SEQ ID NO: 7706 - DNA, 1889 bp, Artificial Sequence
  derived and/or modified sequence
ggacccagagggggctttgacgtcagctcagcttataagaggctgctgggccagggctgtggagacggagcccggacctccacactgagccatgcccacccccgacgccaccacgccacaggccaagggcttccgcagggccgtgtctgagctggacgccaagcaggcagaggccatcatgtccccgcggttcattgggcgcaggcagagcctcatcgaggacgcccgcaaggagcgggaggcggcggtggcagcagcggccgctgcagtcccctcggagcccggggaccccctggaggctgtggcctttgaggagaaggaggggaaggccgtgctaaacctgctcttctccccgagggccaccaagccctcggcgctgtcccgagctgtgaaggtgtttgagacgtttgaagccaaaatccaccatctagagacccggcccgcccagaggccgcgagctgggggcccccacctggagtacttcgtgcgcctcgaggtgcgccgaggggacctggccgccctgctcagtggtgtgcgccaggtgtcagaggacgtgcgcagccccgcggggcccaaggtcccctggttcccaagaaaagtgtcagagctggacaagtgtcatcacctggtcaccaagttcgaccctgacctggacttggaccacccgggcttctcggaccaggtgtaccgccagcgcaggaagctgattgctgagatcgccttccagtacaggcacggcgacccgattccccgtgtggagtacaccgccgaggagattgccacctggaaggaggtctacaccacgctgaagggcctctacgccacgcacgcctgcggggagcacctggaggcctttgctttgctggagcgcttcagcggctaccgggaagacaatatcccccagctggaggacgtctcccgcttcctgaaggagcgcacgggcttccagctgcggcctgtggccggcctgctgtccgcccgggacttcctggccagcctggccttccgcgtgttccagtgcacccagtatatccgccacgcgtcctcgcccatgcactcccctgagccggactgctgccacgagctgctggggcacgtgcccatgctggccgaccgcaccttcgcgcagttctcgcaggacattggcctggcgtccctgggggcctcggatgaggaaattgagaagctgtccacgctgtactggttcacggtggagttcgggctgtgtaagcagaacggggaggtgaaggcctatggtgccgggctgctgtcctcctacggggagctcctgcactgcctgtctgaggagcctgagattcgggccttcgaccctgaggctgcggccgtgcagccctaccaagaccagacgtaccagtcagtctacttcgtgtctgagagcttcagtgacgccaaggacaagctcaggagctatgcctcacgcatccagcgccccttctccgtgaagttcgacccgtacacgctggccatcgacgtgctggacagcccccaggccgtgcggcgctccctggagggtgtccaggatgagctggacacccttgcccatgcgctgagtgccattggctaggtgcacggcgtccctgagggcccttcccaacctcccctggtcctgcactgtcccggagctcaggccctggtgaggggctgggtcccgggtgccccccatgccctccctgctgccaggctcccactgcccctgcacctgcttctcagcgcaacagctgtgtgtgcccgtggtgaggttgtgctgcctgtggtgaggtcctgtcctggctcccagggtcctgggggctgctgcactgccctccgcccttccctgacactgtctgctgccccaatcaccgtcacaataaaagaaactgtggtctcta

SEQ ID NO: 7707 - protein, 575 aa, Artificial Sequence
  derived and/or modified sequence
MLGVLVLGALALAGLGFPAPAEPQPGGSQCVEHDCFALYPGPATFLNASQICDGLRGHLMTVRSSVAADVISLLLNGDGGVGRRRLWIGLQLPPGCGDPKRLGPLRGFQWVTGDNNTSYSRWARLDLNGAPLCGPLCVAVSAAEATVPSEPIWEEQQCEVKADGFLCEFHFPATCRPLAVEPGAAAAAVSITYGTPFAARGADFQALPVGSSAAVAPLGLQLMCTAPPGAVQGHWAREAPGAWDCSVENGGCEHACNAIPGAPRCQCPAGAALQADGRSCTASATQSCNDLCEHFCVPNPDQPGSYSCMCETGYRLAADQHRCEDVDDCILEPSPCPQRCVNTQGGFECHCYPNYDLVDGECVEPVDPCFRANCEYQCQPLNQTSYLCVCAEGFAPIPHEPHRCQMFCNQTACPADCDPNTQASCECPEGYILDDGFICTDIDECENGGFCSGVCHNLPGTFECICGPDSALARHIGTDCDSGKVDGGDSGSGEPPPSPTPGSTLTPPAVGLVHSGLLIGISIASLCLVVALLALLCHLRKKQGAARAKMEYKCAAPSKEVVLQHVRTERTPQRL

SEQ ID NO: 7708 - protein, 557 aa, Artificial Sequence
  derived and/or modified sequence
MSEAASQGLRAAARSVWAGTDRRGCRHRRPVPLCSGTALSQCPRFPRRLHAARLGNMLGVLVLGALALAGLGFPAPGCGDPKRLGPLRGFQWVTGDNNTSYSRWARLDLNGAPLCGPLCVAVSAAEATVPSEPIWEEQQCEVKADGFLCEFHFPATCRPLAVEPGAAAAAVSITYGTPFAARGADFQALPVGSSAAVAPLGLQLMCTAPPGAVQGHWAREAPGAWDCSVENGGCEHACNAIPGAPRCQCPAGAALQADGRSCTASATQSCNDLCEHFCVPNPDQPGSYSCMCETGYRLAADQHRCEDVDDCILEPSPCPQRCVNTQGGFECHCYPNYDLVDGECVEPVDPCFRANCEYQCQPLNQTSYLCVCAEGFAPIPHEPHRCQMFCNQTACPADCDPNTQASCECPEGYILDDGFICTDIDECENGGFCSGVCHNLPGTFECICGPDSALARHIGTDCDSGKVDGGDSGSGEPPPSPTPGSTLTPPAVGLVHSGLLIGISIASLCLVVALLALLCHLRKKQGAARAKMEYKCAAPSKEVVLQHVRTERTPQRL

SEQ ID NO: 7709 - DNA, 1725 bp, Artificial Sequence
  derived and/or modified sequence
atgctgggcgtgctggtgctgggcgccctggccctggccggcctgggcttccccgcccccgccgagccccagcccggcggcagccagtgcgtggagcacgactgcttcgccctgtaccccggccccgccaccttcctgaacgccagccagatctgcgacggcctgcgcggccacctgatgaccgtgcgcagcagcgtggccgccgacgtgatcagcctgctgctgaacggcgacggcggcgtgggccgccgccgcctgtggatcggcctgcagctgccccccggctgcggcgaccccaagcgcctgggccccctgcgcggcttccagtgggtgaccggcgacaacaacaccagctacagccgctgggcccgcctggacctgaacggcgcccccctgtgcggccccctgtgcgtggccgtgagcgccgccgaggccaccgtgcccagcgagcccatctgggaggagcagcagtgcgaggtgaaggccgacggcttcctgtgcgagttccacttccccgccacctgccgccccctggccgtggagcccggcgccgccgccgccgccgtgagcatcacctacggcacccccttcgccgcccgcggcgccgacttccaggccctgcccgtgggcagcagcgccgccgtggcccccctgggcctgcagctgatgtgcaccgccccccccggcgccgtgcagggccactgggcccgcgaggcccccggcgcctgggactgcagcgtggagaacggcggctgcgagcacgcctgcaacgccatccccggcgccccccgctgccagtgccccgccggcgccgccctgcaggccgacggccgcagctgcaccgccagcgccacccagagctgcaacgacctgtgcgagcacttctgcgtgcccaaccccgaccagcccggcagctacagctgcatgtgcgagaccggctaccgcctggccgccgaccagcaccgctgcgaggacgtggacgactgcatcctggagcccagcccctgcccccagcgctgcgtgaacacccagggcggcttcgagtgccactgctaccccaactacgacctggtggacggcgagtgcgtggagcccgtggacccctgcttccgcgccaactgcgagtaccagtgccagcccctgaaccagaccagctacctgtgcgtgtgcgccgagggcttcgcccccatcccccacgagccccaccgctgccagatgttctgcaaccagaccgcctgccccgccgactgcgaccccaacacccaggccagctgcgagtgccccgagggctacatcctggacgacggcttcatctgcaccgacatcgacgagtgcgagaacggcggcttctgcagcggcgtgtgccacaacctgcccggcaccttcgagtgcatctgcggccccgacagcgccctggcccgccacatcggcaccgactgcgacagcggcaaggtggacggcggcgacagcggcagcggcgagcccccccccagccccacccccggcagcaccctgaccccccccgccgtgggcctggtgcacagcggcctgctgatcggcatcagcatcgccagcctgtgcctggtggtggccctgctggccctgctgtgccacctgcgcaagaagcagggcgccgcccgcgccaagatggagtacaagtgcgccgcccccagcaaggaggtggtgctgcagcacgtgcgcaccgagcgcaccccccagcgcctg

SEQ ID NO: 7710 - DNA, 1725 bp, Artificial Sequence
  derived and/or modified sequence
atgctgggagtcctggtcctcggcgctctggccctcgccggccttgggtttcccgcgccagccgagccccagccgggcggaagccagtgtgtggaacatgattgcttcgcactctacccgggaccggccactttcctgaacgcatcgcaaatctgcgatgggctcaggggccatctgatgactgtcagatcgagcgtggctgcagacgtcatctcactcctgctgaacggagatggaggggtcggacgtcggcgcctctggatcggactgcagctgcctcctggatgcggcgacccgaaacggctcggtccgttgagagggtttcagtgggtgaccggtgacaataacacttcctactcgaggtgggcacggctcgatcttaatggagctcctctgtgcggcccactgtgcgtggccgtgtccgccgccgaagccacggtgccaagcgagccaatctgggaagaacaacagtgcgaagtgaaggccgacggcttcctttgcgaattccacttccctgcaacttgcaggccactggccgtcgaaccgggagccgcggcagccgccgtatcgatcacttacggaactcctttcgctgctcgcggagcggatttccaggctctgccagtgggtagcagcgccgcagtggcacccctcggactgcaactcatgtgtaccgcccctccgggtgcggtgcagggacactgggccagggaggcccccggggcctgggactgttcagtcgaaaacggcggatgcgagcatgcgtgtaacgccatcccaggggccccgagatgccagtgccccgcaggagccgcactgcaggcagacggacgttcttgcaccgcctctgcgacccaatcctgtaacgacctctgtgaacatttctgtgttcctaacccagatcagccgggtagctactcatgtatgtgtgagacgggctacaggcttgcagcagaccaacaccgctgtgaggacgtggacgactgcatcctggagccgagtccttgtccacagcgctgcgtgaacactcaaggaggcttcgaatgtcactgctacccgaattacgatctggtggacggcgaatgcgtggaaccggtcgacccgtgttttagggccaattgcgagtaccaatgccaaccgctcaaccaaacctcatacctgtgtgtgtgcgccgagggattcgccccgatcccgcatgagccgcaccgctgccagatgttctgtaatcagactgcctgcccagccgactgcgaccctaacacgcaggcctcttgcgaatgcccggaagggtatatcctggacgatggattcatctgtaccgacatcgatgaatgcgaaaacggagggttctgctcgggcgtttgccataatctgccggggaccttcgagtgcatctgcgggccggactcagccttggcccgccatatcgggactgactgcgattccggaaaggtcgacggcggagattccggttccggagagccaccaccgagcccgaccccgggatcgaccttgactccgccagcagtgggattggtccactcgggactgctgatcggaatttccattgcatcgctgtgcctggtcgtcgcgctgctggcacttctgtgtcacctgcggaagaaacagggcgccgcgcgcgccaagatggaatacaaatgcgccgccccctccaaagaagtggtgttgcagcatgtgcggacggaaaggaccccgcaaagactg

SEQ ID NO: 7711 - DNA, 1725 bp, Artificial Sequence
  derived and/or modified sequence
atgctgggggttttagttctgggggctctggccctggcaggacttggcttccctgcccctgccgaaccccagcctggtggctcacagtgcgtggaacatgactgtttcgcattataccctggccccgctaccttcctgaacgcaagtcagatatgcgatggattgcgggggcatctgatgactgtcaggtcctctgtggcagccgatgtgatcagcctactgctcaacggcgacgggggcgtgggccgcaggcgcctgtggataggtttgcagctaccacccggctgtggcgatcccaaaagactcggtcctctaagagggtttcaatgggtaactggcgataataatacaagttactctaggtgggcaaggctggatcttaatggggccccactctgcggtcccctgtgtgtggcagtgtccgcagctgaagccactgtcccctccgaaccaatctgggaagagcagcagtgcgaggttaaagccgatggctttctatgcgagttccacttcccagccacctgtcgccccctcgccgtcgagcccggtgcagccgctgccgcagtgtccatcacctatgggacaccatttgccgcaaggggtgctgatttccaagctctccccgtgggctcttctgcagccgtggcaccccttggtctgcagctcatgtgtactgctccaccaggcgctgtgcaggggcactgggccagagaggccccaggcgcatgggattgctctgttgagaacgggggatgcgaacatgcctgtaatgccatacccggcgctcctaggtgtcagtgccctgccggtgctgcactgcaagccgacggccggtcttgcactgcctcagccacccagtcttgtaatgacttatgcgagcatttctgtgttcctaaccccgaccagccaggctcctatagctgcatgtgcgaaaccggctaccgtctcgcagccgaccaacaccgctgtgaagatgtagatgattgtatcctggagccttctccatgcccccaaaggtgcgtgaacactcagggcggcttcgagtgtcattgctatccaaactatgacttagtggacggcgaatgtgttgagccagtggatccttgcttccgggccaattgtgaataccaatgtcagcccctgaatcaaacatcctacctgtgtgtgtgtgctgagggcttcgcaccaattccccacgagccacatcggtgtcagatgttttgtaatcagacagcttgtcccgcagattgtgaccctaatacccaggcctcatgtgaatgccctgaaggctacattctagatgacggattcatctgcacagatatcgacgagtgcgagaatggcggcttttgcagtggggtatgtcacaacctcccagggactttcgaatgtatctgtggacctgactctgcattagccaggcacataggcactgactgcgattctgggaaggtggatggcggcgacagtggaagcggcgagcctccaccatctcctacccctggctccaccctgactccccccgcagtcggcctcgtgcatagtggcctgctgatcggaatcagtattgccagcctttgtctggttgtggctctgctggcacttctgtgccacctaaggaagaagcaaggggctgcccgagcaaaaatggagtacaagtgcgcagccccaagcaaggaggtggtcctgcagcacgtgagaactgagcgcacaccccagcgacta

SEQ ID NO: 7712 - DNA, 1725 bp, Artificial Sequence
  derived and/or modified sequence
atgctgggggtcctggtcctgggcgcattggctttggccgggctgggctttcccgcacccgctgaaccacaacccggaggaagccagtgtgtggagcacgactgttttgctctctaccccggcccagccactttcctaaacgccagtcagatttgcgacggtctgagaggccatctgatgaccgtccgtagttccgtcgccgcagacgtgatcagcctcctgcttaacggcgatggtggggtaggtagaaggcgactgtggattggcttgcagttaccacctgggtgtggcgatcccaaacggttaggcccgttacgaggcttccagtgggtgacaggtgacaataacactagctactccaggtgggcaagactcgacctaaacggagctcccctgtgtggacccttgtgcgtggccgtttccgccgcagaggctaccgtcccttcggagccgatatgggaagagcagcagtgtgaggtgaaggcagacggctttttatgtgagttccattttccagccacttgccgtcctctggccgtggaaccaggtgctgctgccgccgccgtgtccattacatatggtacaccattcgccgctcgaggagcagatttccaagcgctacctgtcgggtcctccgctgcagtggcacccttaggtctgcagttgatgtgcacagctcctccaggggctgttcaaggccactgggcaagagaagccccgggggcctgggactgctctgtggaaaacggcggctgcgaacatgcatgcaacgccatccccggcgccccaagatgtcaatgccctgctggcgcggctctgcaggcagatggccggtcctgtactgcttctgctacgcagagctgcaatgacctttgtgagcacttttgtgtcccaaaccccgaccaaccaggatcttatagctgtatgtgtgagactggatatcggctggcagcagatcagcaccggtgcgaggatgtagacgactgcatactcgaacccagtccttgtccacaacgttgcgtcaacactcaaggaggatttgaatgtcactgctacccgaactacgatctggtagacggagagtgtgtggaaccggtcgacccttgcttcagggccaactgtgaataccagtgccagcccctgaaccagactagttacctatgcgtttgcgctgaaggatttgctcctataccccatgaaccacatcggtgccagatgttttgcaaccagaccgcctgtccagctgattgcgaccctaatacccaggcttcttgcgaatgccctgaaggctatatcctggacgatggtttcatctgcacggatattgatgagtgcgagaatggcgggttctgttctggcgtttgtcacaatcttcctggaacattcgaatgcatatgtggtcctgattctgcgctggcgaggcacattgggacagattgtgacagtggtaaagtggacgggggcgattccggctccggcgaacctcccccgagtccaactccagggagcacccttaccccacctgccgtcggactggtccattccgggctcttgatcggtattagcatcgccagtctctgcctggtggtggctctgctggctctgctctgccacttaaggaagaagcagggagcagcaagggcgaaaatggagtacaagtgcgccgctccctctaaagaagttgttcttcagcacgttcgcacggagaggaccccacagagactc

SEQ ID NO: 7713 - DNA, 1725 bp, Artificial Sequence
  derived and/or modified sequence
atgctcggcgtgctggtcctgggggctctggccctcgcaggactggggtttccagcgcccgcagagccccagcctggcggttcacagtgcgtcgagcacgattgctttgctctgtaccccggtcctgcaacttttctgaacgcctcacagatctgcgatggcctgagagggcacctgatgacggtccgcagctccgtggctgccgacgtgatcagcctgctcctcaatggtgacgggggtgtgggccggcgccgactctggatcggcttgcagctccctcctggctgtggcgatcccaagcggctgggcccgcttcgaggatttcagtgggtgaccggggacaacaacactagttattctaggtgggctaggctagacctcaatggcgctcctctctgcgggcccctctgcgtggcagtgagtgccgcagaggctaccgtgcctagcgagcccatctgggaagaacagcagtgcgaggtgaaagccgacgggtttctgtgcgagtttcattttccagctacctgccgccccctagctgtagagccaggagctgccgccgccgctgtctccatcacttatggcactccattcgccgcccgtggtgccgacttccaagccttgcccgtgggatctagcgccgctgtggcaccccttggattgcagcttatgtgcacggctccacccggcgcagtacaaggacattgggccagagaggcaccgggcgcctgggattgttccgtggagaacggtggatgcgaacacgcctgtaacgcaattccgggcgcccccagatgtcaatgtcctgccggtgccgctctgcaggcagatggccgcagctgtaccgcttctgctacacagtcatgcaacgacctgtgtgaacatttttgtgtgccgaaccccgatcagccaggctcctatagttgcatgtgtgagaccggctacagacttgctgccgatcagcatagatgtgaagatgtggacgactgtatcttggaaccatccccctgtccacaacgatgtgtaaatactcagggagggtttgagtgtcattgttaccccaactacgatttggttgatggcgagtgtgtggagcccgtcgatccatgttttagagccaattgtgaataccaatgccagccactgaaccagacctcttacttgtgcgtgtgcgcagaggggtttgcgccaattccccacgagccccaccgttgccagatgttctgcaatcagaccgcctgccctgccgactgtgatccaaacacacaggccagctgcgagtgccctgagggatacatcttagacgacgggttcatttgcaccgacatcgacgagtgcgaaaacggcggcttttgctccggcgtctgccataatctgcctggcactttcgaatgtatctgtgggcccgactcggcccttgcgcgccatattggtacggattgcgacagcggcaaggtcgatggtggcgattctggctctggtgagcctcccccgtcgcccacccctgggagcacccttacaccacctgccgtcgggttagttcactcaggcctgctgatagggatttccatcgctagcctgtgtctggtcgttgctttactggctctcttatgtcatctgcgcaagaaacagggcgcagcccgagccaaaatggagtacaaatgcgctgccccttctaaggaagtggtgctccagcacgtgcgcactgagcggaccccgcagcgatta

SEQ ID NO: 7714 - DNA, 1725 bp, Artificial Sequence
  derived and/or modified sequence
atgttaggggtgctcgtcctcggggcactagctctcgctgggctgggctttccggcccccgctgagccccaaccgggtgggtctcaatgcgtagaacatgattgcttcgcactgtatcccggacccgcaacgtttcttaatgcttcgcagatctgtgatggacttcggggtcatttgatgacagttaggtcttccgtagctgccgacgtaatctctcttttacttaacggcgatggcggcgttgggagacggagactatggatagggttgcagctccctcctgggtgcggagacccaaaacgcctggggccgctacgtgggttccagtgggttaccggggataacaatacctcatacagcagatgggcacgactggaccttaacggggcacctctttgcggaccactgtgtgtggccgtgagcgccgccgaagccacggtgccttccgaacccatttgggaagaacagcagtgtgaggtcaaagctgacggtttcttatgcgaatttcacttcccagctacctgccggcccctagctgtggaacccggggccgcagccgctgcagtgtccatcacttacggaaccccttttgctgcacgaggtgctgatttccaggccctgcccgtgggaagctcagccgctgtcgcccctttaggcctgcagctaatgtgtaccgcgccaccaggcgctgttcagggtcattgggcccgtgaggcacccggtgcatgggattgctccgtcgaaaacggtggctgcgagcacgcatgcaacgctatccccggagccccaagatgtcaatgccccgcaggagcggcgttgcaggccgatggccgctcctgtaccgcctcggccactcagagctgtaacgacctgtgtgagcacttctgcgtgcccaaccccgaccagcctgggtcttacagctgcatgtgcgaaaccggctatagactggccgcggatcagcaccggtgtgaggatgtagacgattgtatcctggaaccttccccatgcccacagcggtgcgtaaacacacagggcggctttgaatgccactgctacccaaactacgacctcgttgacggggagtgcgtggagccggtggacccctgtttcagagccaattgcgagtaccagtgtcagcccttgaatcaaacttcctacctctgcgtctgcgccgaagggttcgcccccataccccacgaaccccacaggtgtcagatgttctgtaatcagacagcctgcccagccgactgtgatcccaacacacaggctagttgtgagtgcccggaaggctacatcctagatgacgggtttatatgtacagacatcgacgagtgcgagaacggagggttctgttcaggggtgtgtcataatctccctggcacatttgagtgcatctgtgggcccgattcagccctggcccggcacatagggacggactgcgattcagggaaagtcgatggtggcgactccggatcaggcgagccacccccatcgccaacgccgggctcaacactcacccctcctgctgtggggttggtgcattcaggattattaataggaattagcatcgcttccctttgtttggtggtcgcccttctcgctttactgtgtcatctacggaaaaagcagggcgcagcccgggccaagatggagtataaatgtgccgcacccagcaaagaagtcgtgctgcagcacgtcaggactgagcgaacaccccaaagactg

SEQ ID NO: 7715 - DNA, 1725 bp, Artificial Sequence
  derived and/or modified sequence
atgctaggagtgctggtgctgggggcgcttgcactggctggactgggattcccagctcctgccgagcctcagcccggcggctctcagtgcgtagagcacgattgctttgccttgtatcccggtcctgcgaccttcctgaacgccagccagatttgcgacggacttcgcggccatttgatgacagtaagaagtagcgtggccgccgatgtcatctctttgcttctcaatggcgacggaggcgtgggtagacgccggctctggatcggcttgcaacttccccctggctgcggagatcccaagaggctcggccccctcagagggttccaatgggtcacaggggacaacaatacgtcctacagtcgatgggcgcgtctggacttgaacggcgcacctctgtgcgggccgctgtgcgttgccgtgtctgccgcagaggcgactgtgccatccgagcccatttgggaggagcagcagtgcgaggtcaaggctgatggtttcctttgcgaatttcactttccggccacatgccgccctttggccgtggagcccggcgctgctgccgcagccgttagcataacctatggcaccccattcgctgcacgcggcgcggacttccaggccctgcctgtcgggtcttccgctgccgtggctcctctgggattgcagcttatgtgcacagccccacctggggccgtgcaggggcactgggcgcgcgaggcccccggcgcttgggattgttccgtcgagaacggtgggtgcgagcacgcgtgtaatgccataccgggagcaccacgatgccagtgcccggctggggctgcgttgcaggcggacggccgctcctgcacagccagcgcgacccagagctgtaacgatttgtgcgagcacttctgtgtaccgaaccctgatcagccgggcagttattcttgcatgtgtgagaccggttaccgcctggccgccgaccagcatcggtgtgaggacgtagacgactgtattctggagccatccccatgtccccagcgctgtgtcaacacgcaaggcgggtttgaatgccactgctatcccaactatgacctggtggacggggagtgcgtcgaacccgtggacccgtgcttcagggccaattgcgagtaccagtgtcaacctctgaaccagacgagctacctatgcgtgtgtgctgaggggttcgcgcccatcccgcacgagccccatagatgtcagatgttttgcaatcagactgcgtgcccagcggattgcgacccaaatactcaggcctcttgcgagtgcccggagggctacatcctggacgatggattcatctgtacagacatcgatgaatgtgagaacgggggcttctgttccggagtgtgccacaacttgccaggcacattcgagtgtatctgcgggcccgatagtgctctggcgcggcatattggcacagattgcgactccggaaaagtggatggaggcgacagtggatccggggagcctcctccctccccgactcctgggtcaacccttactccacccgcagtcggcctggtccacagcgggcttctgatcggaatctccatagccagtctttgcctagtggtggccctcctggccttactttgccatctgaggaagaagcaaggcgcggcgagggcaaaaatggagtataagtgcgcagccccgagtaaggaggtggtgctgcagcacgtacgcaccgaaaggactccacagcgactt

SEQ ID NO: 7716 - DNA, 1725 bp, Artificial Sequence
  derived and/or modified sequence
atgctgggagtcctggtcctcggagccctggcactggccgggcttggctttcccgcgccggccgaaccacaaccgggcggtagtcaatgcgtggagcatgactgtttcgcactgtacccaggccctgccacatttttgaatgcgtcacaaatctgcgatggtctgcgcggccacttaatgacggtgaggagtagtgtcgctgccgatgtgatctcattgctgttgaatggagacggtggcgtgggcagaaggcgactgtggatcggcttgcagctgccacctggttgtggcgatccaaagaggctaggccctctccggggttttcagtgggtcacaggcgataataatacttcctacagccgctgggccaggctggaccttaatggtgcgcctctgtgtggcccactatgcgtggcagtgtccgccgctgaagcgacggtcccgtcagagcccatctgggaggagcagcaatgtgaagtgaaggctgacggcttcctgtgtgagttccacttcccagcgacctgccggcccctggccgttgaacctggcgccgcggctgcggccgtgtcaataacatacggaacgcccttcgccgcccggggcgcggatttccaagccttgcctgtcggaagttctgcagctgtggcccctctcggactgcaactcatgtgcaccgccccaccaggggctgtgcaaggccattgggcaagggaagcacccggagcttgggattgcagcgtggagaatggggggtgtgagcacgcatgtaacgctatcccgggggcccctagatgccagtgtccggccggggctgccctacaggccgacggcagaagttgcaccgcaagtgctacccagtcctgtaatgacctatgcgagcacttctgcgtgcctaaccccgatcaaccgggaagctattcctgtatgtgcgagaccggctatagactagcggccgaccagcatcggtgtgaagacgtggatgactgcattctagaacccagtccttgtccccaacggtgcgtcaatacacagggggggttcgaatgtcactgttaccctaactacgatctcgtggatggcgaatgcgtcgaaccggtggacccttgtttcagagcaaattgcgaataccagtgtcagccactgaatcagacttcttatctgtgcgtgtgcgcggagggatttgctcccatacctcatgagccacatcgctgtcagatgttctgcaaccagacagcctgcccagctgactgcgatcctaacacccaggcttcatgcgaatgtcctgagggttatatcctggatgatggattcatttgcactgatattgatgagtgtgagaacggtggcttttgcagcggcgtttgccataacctgcccgggacatttgagtgtatttgtgggcctgacagcgcattagctaggcatatcggaacagattgcgactccggcaaggtggacgggggtgactcaggaagcggggagccccctccctctcccaccccaggtagcactctaactccccccgccgtaggtttggtgcattctggattactgattggaatatccatcgccagcttgtgtctggtagtggcactgttggccctgctctgccacctaagaaagaagcagggagccgcccgcgcgaagatggagtataaatgtgcagccccttccaaagaggtggtcctgcagcatgtccgaacagaacgaacccctcagcgtctt

SEQ ID NO: 7717 - DNA, 1725 bp, Artificial Sequence
  derived and/or modified sequence
atgctgggtgtgcttgtgctcggggccctcgccctggcaggactgggattcccggcacctgccgaacctcagcccggagggagccagtgcgtcgaacacgattgcttcgcgctgtacccgggccccgcaacttttctgaatgccagccaaatctgcgacggcctgcggggacatctcatgaccgtgcggtcctccgtcgcagccgacgtgatcagcctgctcctgaacggagacggaggagtgggccgccggcgcctttggatcggcctgcagttgccgcctggatgtggcgacccaaagaggttggggccactgcgcggctttcaatgggtgaccggagacaataacacttcatactccagatgggcacgcctggatctgaacggcgcaccactgtgtgggccgctgtgtgtggccgtgtcggccgccgaggctaccgtcccgtcagagccaatctgggaggagcaacagtgcgaagtcaaagctgatggattcctgtgcgaatttcactttccggcaacttgccgccctttggctgtggaaccgggagcggcggcggcagctgtctctatcacctacggaactcctttcgcagcgaggggggccgatttccaggccctgcctgtgggctcttcggcagccgtcgctccgttgggactgcagctcatgtgcaccgctccgccgggagcagtgcaaggccactgggcgcgggaggccccaggtgcatgggactgctcggtggaaaatggaggctgtgagcacgcgtgcaacgctatcccaggagccccgcggtgccaatgtcccgctggagcggctctgcaggccgacggccggtcctgcactgcttcagcaactcagagctgtaatgatctgtgtgaacatttctgcgtgcctaatccagatcagccagggtcctactcatgcatgtgcgaaactgggtaccgcctggctgccgatcagcaccgctgcgaagatgtggatgactgtatcctggaaccgtccccgtgtccgcagaggtgcgtgaacactcagggtgggtttgaatgtcactgctacccaaactacgacctcgtcgacggagaatgtgtcgaaccggtggacccgtgctttcgcgcgaactgcgagtaccagtgtcaaccgctcaaccagacctcatacctctgcgtgtgcgccgaaggattcgcacccattccacatgagccacataggtgccagatgttctgcaaccagactgcatgtccggctgactgcgatccgaacacccaagcctcgtgtgagtgccctgaagggtacatcctggacgacggattcatctgcactgacattgacgaatgtgagaacggagggttctgctctggcgtgtgtcataatctgccaggaacctttgaatgtatctgcggtccagactccgcccttgcccgccatattggaaccgattgcgactcaggcaaagtggatggcggtgacagtggatccggagaacctccgccgtcgccaaccccggggagcacgctcactcctccagcggtgggccttgtgcactctggcctgctcatcggaatcagcatcgcgtccctgtgccttgtggtggccctcctcgcccttctgtgccatctgcgtaagaaacagggcgcagccagggctaaaatggaatacaaatgtgcggccccgtcgaaggaagtggtgctccaacatgttagaactgagaggaccccccagagactg

SEQ ID NO: 7718 - DNA, 1725 bp, Artificial Sequence
  derived and/or modified sequence
atgctgggtgtgctggtcctgggggccctcgccctggccggactagggttccctgccccagcagaaccccagccgggaggctctcagtgtgtcgagcatgattgttttgccctctatcctggtccagccacttttttgaacgctagtcagatttgtgacggtcttagggggcacctgatgactgttcgctctagtgtggccgcagatgtgatatcgctgcttctaaatggagatggtggtgtgggacgtcggcgactctggatcggtttacaactccctcctggatgtggcgacccaaagaggcttggacctctcaggggatttcagtgggtcaccggcgataacaacacctcttattcccggtgggcacgcctggaccttaatggggcccctctatgcggtcccctgtgtgttgccgtgtccgctgctgaggcaacggtgccaagcgagcctatatgggaagagcagcagtgcgaggtgaaagccgatggcttcctctgcgaatttcattttccagcgacttgtcgccctctggcagtagaacctggggcagccgctgcagccgtatccattacctacggtaccccctttgccgcacgtggtgctgacttccaagcgttgcctgtagggtcttctgccgcagtcgccccacttggactgcagcttatgtgtactgcgccacccggggccgttcagggtcattgggctcgcgaggccccaggggcatgggactgcagtgtcgaaaatggtggatgtgagcacgcatgtaacgcaatacccggggcgcccagatgccagtgtcccgccggggccgcgctgcaggctgacgggaggtcttgtaccgcttcggctacccagagttgcaacgatttgtgcgagcacttttgcgtgcccaacccagatcagccaggaagctacagttgtatgtgtgaaaccggctaccgccttgcagccgaccagcaccgttgcgaggatgttgacgactgcatcctggaaccaagtccttgtcctcaacgttgcgttaacactcagggcggtttcgagtgtcattgttaccctaattatgatcttgtggacggcgaatgtgtggagcccgtggatccttgttttcgcgctaactgcgagtatcagtgccagcccctgaatcaaaccagttacctctgcgtttgtgccgagggcttcgcacctatcccacacgaaccgcaccgctgccagatgttctgcaaccagacggcatgccctgcagactgtgatccaaatactcaggcctcctgtgaatgccccgagggttacattctggacgacggatttatctgcacggacatcgacgaatgcgaaaacggcggcttttgttctggcgtttgccacaacttgcctggcaccttcgaatgcatctgcggacctgactctgcattggcaagacacattggtaccgactgtgactcaggcaaagtagacgggggtgatagcggatctggagaaccaccgccaagtccaacacccggctcaaccttaactcctccagctgtgggcctggtacattccggcttacttatcgggatcagtatagcctctctgtgtttagtcgtggcgttgctggctctcctctgtcatctgcgaaagaagcagggcgcagctagggcgaagatggaatacaaatgcgcggccccatccaaggaggttgtgttgcagcacgtgaggactgaacgcaccccacagcgactg

SEQ ID NO: 7719 - DNA, 1725 bp, Artificial Sequence
  derived and/or modified sequence
atgttgggagtgcttgtgcttggcgcgttggcgttggcaggactgggatttcccgccccagccgagccccagcctggcggaagccagtgcgttgagcatgactgttttgcactgtaccccgggcctgcaacttttcttaacgcctcacaaatttgcgacgggttgcgcggtcatctgatgactgtgcgcagctcagtggcagcagacgtgatctcgctgctcctcaatggagatggaggtgtgggtagacgcagattgtggattggccttcaattgccgccagggtgtggagatccgaaacgacttggtccacttaggggatttcagtgggtaaccggggacaacaacacctcctactcccgttgggcacgtcttgacctgaacggagcacctctttgcgggcccctctgtgtggccgtgtcggcagcagaagctaccgttcccagcgaaccaatttgggaagagcaacaatgtgaggtaaaggccgatggatttctctgtgaattccactttcctgcgacttgtcggccacttgcagttgaaccaggagctgccgcagcagcagtgtcaataacctatggcacccctttcgccgcaagaggggccgatttccaagcactgcccgtcggaagctcggcggctgtggcacctctggggctgcaacttatgtgtacggcacctcctggggcggttcaaggacattgggcacgtgaagctccgggagcctgggattgttcggtcgaaaacggcgggtgtgaacacgcgtgcaacgcgattccgggcgcccctaggtgtcagtgccccgccggcgccgcactgcaggcagatggacgtagttgtaccgcgtcggcaactcaatcgtgcaatgatctgtgtgaacatttttgtgtgccaaacccagatcaacctggctcctactcttgtatgtgcgagacgggatacaggttggcagccgatcagcacagatgtgaagatgtagatgactgcatcctcgaaccatcgccgtgtcctcagcggtgtgtcaacactcagggcggctttgaatgtcactgttacccaaattacgacctcgtggatggagaatgtgtggaaccggtcgatccctgtttccgagccaattgcgaataccaatgtcaacctctcaaccaaactagctacctgtgcgtgtgtgccgagggttttgcgcccattcctcatgaacctcaccgctgccagatgttctgtaatcagaccgcatgtcccgcagattgcgaccctaacactcaggcctcctgcgagtgccctgaaggatacatcctcgatgacggtttcatatgcaccgacatcgacgaatgtgagaatggaggtttttgttccggtgtgtgccataacctgccggggacttttgagtgtatctgcgggcccgattcagcgctggcgagacacattggtaccgattgtgactcgggaaaggtcgatggtggtgattccgggagcggcgagccaccaccatcgcctacgcctggttcaacgctgaccccaccagctgtgggtcttgtgcattccggtttgcttatcggcattagcattgcttcgctctgcctcgtggtggcactgctcgcacttctgtgtcatcttagaaaaaagcaaggagcagcacgggccaagatggaatacaagtgtgcagcaccatccaaagaagtcgtccttcagcatgtgagaaccgaaaggactccgcaacgactg

SEQ ID NO: 7720 - DNA, 1725 bp, Artificial Sequence
  derived and/or modified sequence
atgttaggggtcctggttctaggtgcccttgcacttgccggcctgggatttcccgcccctgcggagcctcagcccggtggcagtcagtgtgtagagcacgactgtttcgcactctatccgggaccagcaacatttttaaacgccagccagatttgcgatggactgcggggtcacttaatgacggtgaggagtagtgtggcagctgatgtgatttcactcctcctgaacggggatggcggcgtcggccggcggcggctgtggatcgggttacagctcccacctggatgtggtgatcctaaacgcctcgggcccctaagaggattccaatgggtcacaggtgacaacaatacttcttatagtaggtgggccagactcgaccttaatggggcccctctatgtggacctttgtgtgttgcggtttccgctgctgaggccacagtgccttcagagcctatctgggaggaacaacagtgcgaagtgaaggccgatgggttcttatgcgagtttcattttcctgccacatgtcgtcctctggccgtggaacccggcgcagcagctgccgccgtcagtattacatatgggacacccttcgcagcacgcggagcagactttcaagcactgcctgttgggtcctcagctgccgtggcccctctaggactccagctgatgtgtaccgctcccccaggcgccgtgcaaggacactgggctagagaggctccaggcgcctgggattgttcagttgaaaacggtggttgcgagcacgcgtgtaacgccatcccaggagcccctagatgccagtgccccgcaggggccgccttgcaggcggatgggcgatcatgtaccgcaagcgccactcagtcatgcaacgacctgtgtgaacatttttgtgttcctaaccccgatcagccaggctcctattcgtgcatgtgcgagaccggatatcgtctcgccgccgatcagcaccgatgtgaagacgttgacgattgcattcttgaaccatcaccctgcccccagagatgcgtcaatacccagggaggattcgagtgccactgttacccaaattatgacctggtagacggggaatgcgtggagccagtcgacccttgtttccgagcaaactgtgaataccagtgccaaccgctaaaccagaccagctatctctgcgtgtgcgcagagggatttgcgcccatcccccacgagccccacaggtgtcagatgttctgtaaccagacagcatgccccgcagactgtgacccaaacacccaggcctcatgtgaatgccctgaaggttatatcttagatgacggattcatctgtactgacatagacgagtgcgagaacgggggattttgcagcggtgtttgccataatctaccaggcaccttcgaatgcatctgcggacccgacagcgcactggcaagacacatcgggactgactgcgacagtggcaaggtcgatggaggggattcaggcagcggggagcccccaccgagcccgaccccgggatctaccctcaccccaccagcagtcggcttagtgcactccggcctgctcattgggataagcatcgcaagtttgtgtctggtggtggcactgctggctctgttatgccatctacgtaagaaacaaggggccgccagagccaagatggagtacaagtgcgccgcgccctccaaggaggtggtgctccaacacgtccggaccgaacgaacacctcagcggtta

SEQ ID NO: 7721 - DNA, 1725 bp, Artificial Sequence
  derived and/or modified sequence
atgctcggagtgctggtgctgggagctctcgctctggcaggcctgggatttccagcaccagctgaacctcaacccggaggcagccagtgcgtggagcacgattgtttcgcgctttatcccggcccagcaacatttcttaacgcgagtcagatctgtgacgggttgagaggccacctgatgaccgtccggagttccgtcgccgctgacgttatctcactccttctgaacggagatggcggagtgggccggagacggctctggattggcctgcagttgccccctggctgcggggatccaaagcggcttggacctctcagaggattccagtgggtgacaggcgacaacaacaccagttactctagatgggcccgcttggacctgaatggcgcgccactgtgcgggcctctgtgtgtcgcggtgagcgccgcggaggccacagtaccttcggagccaatctgggaagaacagcaatgtgaggtaaaggctgacgggtttctgtgcgaatttcactttcctgctacgtgcaggcccctggcagtggaacccggggctgccgcggctgctgtgagtatcacatatggtaccccatttgcagctcgaggagccgatttccaagcgttgcccgtgggttcaagtgctgctgttgcgcctttagggcttcagttaatgtgtactgccccccccggcgcagtccagggccattgggcccgggaggcacccggggcttgggactgcagcgtcgagaatggtgggtgcgagcacgcttgtaacgcaattcccggcgcacctcggtgtcagtgtcctgcaggagcagcgcttcaggccgatggccggtcgtgtacagcctcggctactcagtcttgtaatgatctgtgcgagcatttttgcgtacccaatccagaccagcctggctcttactcatgcatgtgcgaaaccggctacagactggcggctgatcagcaccgatgtgaggacgtggatgattgtatcctggaaccctctccctgcccccagagatgcgtgaacacacaaggaggctttgagtgccattgctaccccaactacgacctggtggatggcgaatgtgttgaacccgtggatccatgcttcagagccaattgcgagtatcagtgtcagcctctcaatcagacaagctatctgtgtgtgtgtgccgagggatttgccccgatcccacacgaaccgcacaggtgtcagatgttttgtaatcagacggcttgccccgccgattgtgatcccaacacccaggcaagctgcgaatgtcctgagggctatattctggacgatggcttcatatgcacggatattgatgagtgtgagaacggggggttctgttccggagtgtgccacaacctacctggaactttcgagtgcatatgcggcccagattccgctcttgcgcgccatatcggcaccgattgcgactcaggaaaagtggacggtggggacagcggaagtggcgagcccccacccagcccaacgccagggagcactctgactccacctgccgtcggactggtgcattccggcctgcttattggcatatcaatcgcctcactctgcctggtagtggcattactggcactactctgccacctgaggaagaagcagggtgccgccagggccaaaatggagtacaaatgtgccgccccatccaaagaggtggtgctgcaacatgtgcggaccgaacgtaccccgcagcgactg

SEQ ID NO: 7722 - DNA, 1725 bp, Artificial Sequence
  derived and/or modified sequence
atgctgggagtgctggtcctgggcgctctggcgctggcaggactcggcttcccggccccggcagagccgcagccgggagggagtcagtgcgtggaacatgattgctttgccttgtatccgggacccgctactttcctgaacgccagccagatctgtgatggcctcaggggacaccttatgacggtcaggagctccgtcgccgccgatgtgatttcgctcctccttaatggagatggaggtgtgggccggaggcggttgtggatcggactccagttgcctccgggctgcggagatcccaaacgcctgggcccgctgagaggcttccagtgggtgaccggggacaacaacaccagctactcgagatgggctcggctggatctgaacggtgcgccgctgtgcggaccgctgtgcgtcgcggtgtcagccgccgaggctaccgtgccgtctgagccaatctgggaagaacagcaatgtgaagtcaaagcggatggattcctgtgcgagttccacttcccggccacctgccggccattggcggtggagccgggggccgccgccgcagccgtttccattacttacggaaccccattcgccgcccgcggcgcggactttcaggccctgccggtgggcagctcagccgccgtggctccacttgggctgcagttgatgtgcacggcgccaccgggcgccgtgcagggacattgggcgcgcgaggccccaggagcctgggactgttccgtggagaacggtgggtgcgaacacgcatgcaatgcgattccgggagccccgagatgccagtgccccgcaggagctgcgctgcaagcagacggacgcagctgcaccgcctccgccacccagtcctgcaacgatctctgtgaacacttttgtgtaccgaacccggaccaaccaggcagctactcctgcatgtgtgaaaccggataccgcctggcggctgaccaacacagatgcgaggacgtggacgactgtatcctggagccgtctccgtgccctcagaggtgcgtcaacactcagggaggcttcgagtgccactgctacccaaattacgacttggtggatggagaatgtgttgagcctgttgacccgtgcttcagagcgaactgcgaatatcagtgccagcctctcaatcagacttcctacctctgcgtgtgcgctgaaggtttcgcgcctattcctcacgaaccacacaggtgccaaatgttctgcaaccagaccgcctgcccagctgactgcgatcccaatactcaggcgtcgtgcgaatgcccggaaggctacatcttggacgatggtttcatctgtaccgacatcgatgagtgcgagaatggcggattctgctcaggagtgtgccataatctcccaggaactttcgagtgcatctgcggacccgacagcgctctcgcccggcacatcggaaccgactgtgattccggcaaggtggatggcggagactccggcagcggcgagccgccgccgtcaccgactccggggtcaactctgacgccgccagccgtggggcttgtgcattccggactgctgatcggaattagcatcgcttccttgtgtctcgtggtggcgcttctggctctgctgtgccatctgcgcaagaagcagggcgccgcaagagccaaaatggaatacaagtgtgccgccccatccaaagaggtggtcctgcaacacgtccgcaccgaaagaaccccacagcgcttg

SEQ ID NO: 7723 - DNA, 1725 bp, Artificial Sequence
  derived and/or modified sequence
atgctgggagtgctggtgttaggcgcactagcccttgccgggctcggcttccccgcccctgccgaacctcagccaggtggatcacagtgcgtggagcacgactgctttgcactctatccaggccctgctacgttcttgaatgcatctcagatttgtgacgggctcagaggacacctgatgacagtccgttcgtccgtagcggccgacgtgatctccttgcttttgaatggagatgggggagtgggtcgccgaaggctgtggatcggcctgcagcttcctcctgggtgtggagatcctaagagattgggtcccctgcggggctttcagtgggtgaccggagataacaatacaagctactctcggtgggcaagactggatctgaatggagcccccttgtgcgggcctctctgcgtcgccgtgtctgcagcagaggcgaccgtaccatccgaacctatttgggaggagcagcagtgcgaggtgaaagccgacgggtttctgtgcgaattccatttccccgctacttgcagacccctggcggtggaaccaggagctgcagcagccgccgtcagcattacctatggcactccttttgcagccagaggggccgatttccaggctctgccggtgggttcttccgcagctgtggctccgttggggctccagctgatgtgcaccgcacctcccggggctgtccagggacactgggcccgcgaagcccctggagcctgggattgctctgtggagaacgggggttgtgaacatgcctgtaacgcgatccctggagccccacgctgtcagtgtccagcgggtgcggctctgcaggccgacggacgtagctgcaccgcaagcgccacccagagttgcaacgacctgtgcgaacatttttgcgttccgaatcctgaccagcccgggtcttattcgtgcatgtgcgagaccggctatcggcttgctgccgaccaacaccgctgcgaggatgtggacgactgtatccttgaaccctctccatgcccccagcgatgtgtgaatactcaaggtggatttgaatgccattgttatcccaattatgacctggtggatggagagtgtgtggagcccgttgatccttgcttccgggccaattgtgagtatcagtgccagccattgaatcagacgtcatacctttgtgtctgtgccgaaggctttgctcccatcccacatgagccacatagatgtcagatgttttgcaatcagaccgcctgtcctgcggattgtgaccctaatacacaagcctcgtgtgagtgccctgagggttatatacttgacgacggcttcatctgcacagacatcgacgagtgcgagaacgggggcttttgttcgggtgtgtgccacaatctgccggggacatttgagtgtatctgtggccccgacagcgcgctcgcgcggcacattggtacagattgtgattctggcaaagtcgatggtggagatagtggctccggcgagccccctccaagccccacacccgggtccacgctcacgcccccggccgtgggactagtccactctggactgcttattggcatctcgattgcgagcctgtgtctggtagtagcccttttggccctactttgccatctccggaagaaacagggcgccgcgcgggcaaagatggaatacaagtgcgccgcacctagcaaggaagtggtcctgcagcacgtgcggactgaacgaacacctcagcgcctg

SEQ ID NO: 7724 - DNA, 1725 bp, Artificial Sequence
  derived and/or modified sequence
atgcttggagtccttgtgcttggagcgctggcactcgcgggtctggggttccctgcaccagcggaaccacagcctggaggttcccaatgcgtggagcacgattgcttcgcgctctacccggggccagcgaccttccttaacgcatctcaaatctgtgacggtctgagaggccatcttatgactgtccgatcatcggttgcagccgatgtgatttcgctcctgcttaacggtgacggtggtgttggacgcaggcgcctttggatcggactgcaactgccaccgggatgcggtgatccaaagcgcttgggacctctgagaggatttcagtgggtgactggcgataacaacacctcctatagcagatgggcacgtctggaccttaatggagcgcctctgtgtggacctctgtgtgtggcagtgtcggccgcagaggcaactgtcccctccgaacccatttgggaagaacaacagtgtgaggtcaaggcagatggatttctgtgcgaattccatttcccagcaacttgccggcctctcgcagtggagcctggagcagccgcagcagcagtgtctattacgtacggaaccccttttgcagcccgaggtgcggattttcaggcactcccggtgggatcttccgcagcagtcgccccattgggtttgcagctgatgtgtactgcaccacccggggcagtgcaaggtcattgggcaagagaggcaccaggcgcttgggattgttcggtggagaacgggggttgtgaacatgcatgtaacgcaatccctggcgcacctcgatgccaatgtccagccggggcagcgttgcaggcagatggtaggtcatgtactgcaagcgcaacccagtcctgtaatgatctttgtgaacacttttgcgtgcccaaccctgatcaaccgggttcatactcctgcatgtgtgagactggataccggttggcagcagatcagcacagatgtgaggatgtcgacgactgtatcctggaaccctcgccatgtccccagcggtgcgtgaatactcaaggtggatttgaatgtcattgttacccaaattacgatcttgtggatggagaatgtgtcgaaccagtggatccatgtttccgcgcgaattgcgagtaccagtgtcaacctcttaatcagacttcgtacctttgtgtatgtgcggaggggtttgctccaattccgcacgaacctcatcgctgtcagatgttttgtaaccagaccgcatgccccgccgattgtgatccaaacacccaagcatcctgtgagtgcccagagggatacatcctggacgatggattcatctgtacggacatagacgaatgtgaaaacggaggtttctgtagcggcgtgtgccataaccttccaggaacctttgagtgtatttgcggtcccgattctgcgctggcccgccatatcggcaccgactgtgattcgggaaaagtggatgggggtgatagcggcagcggcgaaccccctccatcgccaacccccggatcaacgcttaccccacccgcggtgggactcgtccattcgggacttctcattgggattagcattgcgagcctgtgcctggtggtggcactgcttgcattgctttgccatctgcgtaagaaacaaggcgcagcaagggcaaagatggaatacaagtgtgcagcgccaagcaaggaagtcgttctgcagcatgtgcgcaccgaacgtaccccacaaaggctc

SEQ ID NO: 7725 - DNA, 1725 bp, Artificial Sequence
  derived and/or modified sequence
atgcttggggttcttgttctcggcgccttggcacttgccggccttggatttcctgccccagccgagccccagcctggaggcagtcagtgcgttgagcacgattgttttgctctttatccgggcccagcaacctttttgaatgcatctcagatttgcgatggtctgcggggtcatctgatgactgtcaggagtagcgtagcagccgacgtgatcagcctcttgctcaacggagacggcggcgttgggcgcagacgcctttggataggccttcaactgcccccaggctgtggcgacccaaaaagactgggtcccttgagggggttccaatgggttactggagataacaacacttcttactcacggtgggcgaggctcgatttgaacggggctcccttgtgcggaccgctttgcgtggctgtttccgcggctgaggctactgtaccgagcgaacccatatgggaggaacaacagtgtgaagtgaaggctgacggcttcttgtgtgagttccacttcccagcgacttgtcgcccactggccgtggagcccggggccgcagctgctgcggtaagtataacatatggcactccgtttgccgctcggggcgctgacttccaggccttgcctgtcggctctagcgccgccgtagcacccctggggctgcagctgatgtgcacagcaccaccaggcgctgtgcagggtcattgggctcgcgaggcacctggtgcctgggattgtagtgtggagaacgggggctgtgagcacgcttgcaatgccatacctggcgctccgcggtgccagtgccctgctggggcagccctccaggccgacggtcggtcttgtactgcctctgccactcagagctgcaatgacctttgcgaacatttttgtgttccaaaccctgatcagccaggcagttacagctgtatgtgcgaaaccggatatagactggctgctgatcaacaccgctgcgaggatgtcgacgactgtattctcgagccctcaccttgtccacagagatgtgtcaacacacaaggaggctttgaatgccattgctaccctaattacgacctggtggatggtgagtgcgtggaaccagtagacccatgcttccgcgcgaattgcgagtaccaatgtcagcctctcaaccagacatcatacctttgcgtgtgcgctgaaggtttcgcgcctattcctcatgaaccccacaggtgccagatgttttgtaaccagacagcctgccctgccgattgcgacccgaacacccaggcttcttgcgagtgccccgaaggatacattcttgatgatggctttatttgcacagacatcgatgaatgcgaaaacggaggcttttgtagcggggtatgtcacaatttgccaggcactttcgaatgcatttgcggtcccgattcagcgctcgcacgccatataggcaccgactgtgatagtggaaaggtagacggcggggactctggatccggcgaacctcctcccagccccactcccggcagtacgctcaccccccccgcggtgggccttgtacacagcgggctgctgattgggattagtatagcatccctctgtttggtcgtggccctgctggccctcctctgccacctccgcaaaaagcagggcgccgcacgggctaagatggaatataagtgcgccgctccaagcaaggaagtagtgctgcagcatgtcagaactgagcggaccccccagagactg

SEQ ID NO: 7726 - DNA, 1725 bp, Artificial Sequence
  derived and/or modified sequence
atgctcggagtgcttgtgctcggagctctggcactcgccggacttggctttcctgcacctgcagaaccccagcccggaggctcgcagtgtgtcgagcatgattgttttgccctgtacccgggtcccgcaactttcctgaacgcatcccaaatatgtgatggcctcagaggtcatctgatgactgtccgcagctcagtggctgcggatgtcatatccctgcttcttaacggcgatggaggggtgggtcggcggcgcctttggatcgggctgcagcttccacctggatgcggtgatcctaagcggcttggacccctgaggggatttcagtgggtcaccggggataacaataccagctattctcgttgggcccgtctggacctcaatggagcacctctgtgtggtcctctgtgtgtggcggtgtccgccgcggaagcaaccgtgccgtcagagcccatttgggaggaacaacaatgtgaagtcaaagcggacggttttctttgtgagtttcattttccagcgacctgccgccccttggcagtcgaacccggtgccgccgccgctgcagtctcgatcacttacggcaccccttttgcggcccgtggagccgacttccaggcactccctgttgggagctcggccgcagtggcacctctgggtttgcagctcatgtgtacggcacctcctggggcggttcagggacactgggcacgcgaagcgcctggagcctgggattgttcggtggagaacggaggttgtgaacatgcttgtaatgcaatcccaggggcacctagatgccaatgtccagcaggtgccgccctgcaggcagatggcagatcttgtaccgcttcagcaacccaatcatgtaacgatctctgtgaacatttttgtgtacctaacccagaccaaccaggttcctactcgtgtatgtgcgaaaccgggtaccggcttgcggcagatcaacataggtgcgaagatgtggacgattgtatcctggaaccttcgccttgtccccaacgatgtgtgaatacccagggaggtttcgaatgtcactgctaccctaattacgacttggtggatggagaatgcgtggaaccggtggatccttgttttagagctaattgtgaataccaatgtcaaccactgaatcaaacctcgtacctttgtgtgtgcgcagaaggttttgcaccaatccctcacgaaccacacagatgccagatgttctgtaaccagaccgcctgccccgccgattgtgatcctaatacgcaagcatcctgtgaatgcccagaaggttacatacttgatgacgggttcatttgtactgatatcgatgagtgtgaaaatggaggattttgcagcggagtgtgtcacaatttgccgggtacttttgagtgtatatgcggtccagattccgcacttgcaagacacattgggactgattgtgattccggcaaagtggatggaggcgattcgggttccggagagccccctccctcgccgactcccggatcgactttgacccctccagccgtgggactggtccatagcggactcttgattgggatctcgattgcgtcgctttgtcttgttgtggccctgctggcactgctctgtcatcttcggaaaaagcagggagcagctcgagccaagatggaatacaagtgtgccgcaccttcgaaggaggtggtgctccaacacgtgagaaccgagagaactccccaacggctg

SEQ ID NO: 7727 - DNA, 1725 bp, Artificial Sequence
  derived and/or modified sequence
atgctgggagtgctggtcctgggcgcactcgcgctggctggattgggcttccctgcaccagcagagccgcaaccgggaggatcgcaatgcgtggagcacgactgctttgcactgtacccaggcccagccactttcctgaacgcctcacaaatctgcgacgggctgagaggccacttgatgaccgttcgcagctctgtggccgcagatgtcatctcactcttgctcaatggtgatggcggagtgggaagaaggcgcctgtggataggcctccagctccccccgggatgcggagatcctaaacggttgggcccgctgcggggtttccaatgggtcactggagacaataacacctcgtactcgaggtgggcccggctcgatctcaacggagccccactctgcggaccgctgtgcgtcgccgttagcgccgctgaagcgacggtcccgagcgagcctatctgggaagagcaacagtgcgaagtgaaggccgatggattcttgtgtgagttccactttccggccacctgccgcccgttggcagtggaaccaggagccgctgccgccgccgtgagcataacttacggaactccattcgcagcgcggggagccgacttccaagccttgccggtgggttcatccgctgctgtcgccccactcggactccaactcatgtgcacggcgccaccaggtgcggtgcaggggcactgggcgagagaagcgcccggggcttgggactgctcggtggaaaatggaggttgcgaacatgcgtgtaatgcgatccctggggctccccgctgtcagtgtcctgcgggagcagcgctccaggcggacggaagatcctgcactgcctctgcgactcagtcctgcaatgacctgtgcgagcacttttgtgtgcctaacccagaccagccaggttcatactcatgcatgtgcgagactggataccgtttggccgcggaccagcatcgctgtgaggacgtggacgactgcattctggaaccatcgccttgcccgcagcggtgcgtcaatactcagggaggctttgaatgtcactgctaccccaactatgatcttgtcgacggggaatgcgtggaacccgtcgacccgtgtttccgggccaactgtgaatatcagtgccagcctttgaaccagacctcgtacctctgcgtgtgcgcggagggattcgccccgatcccgcacgaaccgcatagatgccaaatgttctgtaatcagactgcgtgcccggccgactgcgacccgaatacccaagccagctgcgaatgcccggaaggatacatcctggacgacggcttcatctgcaccgacatcgacgaatgcgaaaacggaggattctgcagcggggtttgccataacctgcccggcaccttcgaatgtatttgtggacctgactccgccttggccagacatatcggaaccgactgtgattccggtaaagtcgacggcggagacagcggaagcggagagccgccgccatcccctacccccggctcgaccctgacccctccagcagtcgggctcgtgcattccgggcttctgatcggcatcagcatcgcatccctttgtctcgtcgtcgctcttctggccctcctgtgtcacctgcggaaaaagcagggcgccgccagagctaagatggagtacaagtgcgcagcgccatccaaagaagtggtgttgcagcatgtccggaccgagcggaccccgcagcgcttg

SEQ ID NO: 7728 - DNA, 1725 bp, Artificial Sequence
  derived and/or modified sequence
atgctgggagtgctggtgctgggagccttggcgctggccggtcttggcttccccgctccggcagagccgcaaccaggaggaagccaatgtgtggaacacgactgctttgcgctgtacccaggaccggccacctttctcaacgcctcccaaatctgcgatggtctgcgcgggcacctgatgacggtgcggtcgtcagtcgcagcggatgttatttccctgctgctcaatggtgatggaggagtcggacggcgcagactgtggatcggacttcagctgcccccgggatgcggcgacccaaagagattgggaccgctccgcggcttccagtgggtgactggagataacaacacttcttactcgaggtgggcccggctggacctgaatggagcgccgctgtgcggtcccctgtgtgtggccgtgtccgcggccgaggctactgtgccatcggaaccaatctgggaagagcagcagtgcgaagtcaaggcggacggcttcctgtgcgagttccacttcccggcaacctgtagacccctcgcagtcgagccgggagctgcagcagcagcggtgagcattacctacggcacccccttcgctgcgagaggagcggactttcaagcgctccctgtgggctcgagcgctgcagtcgcacctctgggccttcagctcatgtgcaccgcgcctcccggggccgtgcaagggcactgggccagggaggccccgggagcttgggattgctcagtcgagaacggaggatgtgaacatgcgtgcaatgcaatcccgggtgccccacgctgccagtgcccggcaggagccgcccttcaggcggacggaagatcgtgtaccgctagcgccacgcagagctgcaacgacctgtgcgagcacttctgcgtgccaaatccggatcaaccagggagctactcatgtatgtgtgaaacggggtacaggctggccgcagatcagcaccgctgcgaagacgtcgatgactgcattctggagccttccccgtgcccccagcggtgcgtgaacactcagggaggtttcgagtgccactgctacccgaactacgatctcgtggatggagaatgcgtggagccggtggacccttgttttagagcgaattgtgaatatcagtgtcagccccttaatcaaacttcctacctgtgtgtgtgcgcagagggtttcgccccgatcccacacgaaccgcacagatgtcagatgttctgcaaccaaactgcttgccctgccgactgcgacccaaacactcaagcatcctgtgagtgcccagaaggatacattctcgatgacggctttatctgcacggacatcgacgagtgtgagaatggagggttctgtagcggcgtctgtcacaacctgccgggaaccttcgaatgcatctgcggaccggactccgcgcttgcccgccacattgggactgactgcgattcgggaaaagtagacgggggtgactcaggctcgggagagccgccaccgtcgccaaccccgggatcaactttgactccccccgccgtcggcctggtgcacagcggactgcttattggaatctcaatcgcatcgctgtgccttgtggtggccctccttgctctgctgtgccaccttagaaagaaacagggcgcagctcgcgccaaaatggaatacaagtgcgctgccccaagcaaggaggtggtgctccagcacgttaggactgagaggaccccgcagcggctg

SEQ ID NO: 7729 - DNA, 1725 bp, Artificial Sequence
  derived and/or modified sequence
atgctcggagttttggtcttaggagccctagccctcgcaggtctgggtttccctgctccggcagaaccccagcctggggggagccagtgtgtcgagcacgactgcttcgcgctgtatcccgggccagcaacattcctcaacgcgtcccagatttgtgacggcctccggggacaccttatgactgtccgctcttcagttgccgccgacgtgatctctctcctcttaaatggcgatgggggcgtgggccggcggagactgtggattggcctgcagctgccaccaggatgtggcgatcctaaacgtttaggaccactcagaggattccaatgggtgaccggggataataatacttcgtactctcgctgggctcgcctggatctgaacggtgcacccctgtgcgggcctctgtgtgtggccgtctccgcagcagaagccactgtgccaagcgagccgatttgggaagaacaacagtgcgaagtcaaagccgatgggttcctgtgtgaattccattttccagccacatgcagaccactggccgtggagccaggcgccgcagctgcggccgtctccatcacatacgggaccccctttgccgcccggggcgctgacttccaggcattacccgtcgggtctagtgccgcggtggcgccgctggggttgcagttaatgtgtacagcaccccctggcgcagttcagggacattgggccagggaggcaccaggcgcctgggattgtagcgtcgagaacggaggctgcgaacacgcttgtaatgcaattccaggtgccccacgttgtcagtgccccgctggggccgccctgcaggcggatggcaggtcttgcacggcaagtgcgacacagtcatgcaatgatttgtgcgagcatttttgcgttccaaacccagatcagccggggagctacagctgcatgtgtgagaccggttaccgactggcggccgaccagcacagatgcgaggatgttgacgactgtatcctagagccaagcccctgcccgcagcggtgcgtgaacacacaggggggcttcgagtgccactgttaccccaactacgatctcgtcgatggggaatgcgtcgagcccgtcgacccatgcttccgcgcaaactgcgaatatcagtgccaaccattaaaccagacttcctacctctgtgtctgcgccgaaggcttcgcgccaattccccatgaaccccacagatgccaaatgttctgcaaccaaacagcctgtcctgctgattgcgatccgaatacacaggcttcctgtgagtgtcccgaagggtacatcctcgacgacggctttatatgcactgatatcgacgaatgcgaaaacgggggattctgtagcggagtctgccacaatctccccgggacgtttgagtgcatatgtggtcctgactctgccctggcccggcatataggcaccgactgtgactccggcaaggtcgacgggggcgacagcgggagcggtgagccaccacccagccccaccccaggctctaccctcacgcctcccgcggtaggactggtccactccggtctactcatcggcatctcaattgcttccctctgcttagtagttgctctgctcgctctgctgtgccacctgagaaaaaagcagggcgctgccagggccaagatggagtacaagtgcgcagcaccgtctaaagaagttgtgctccaacatgtgcggacggagcggacaccccagcggctg

SEQ ID NO: 7730 - DNA, 1725 bp, Artificial Sequence
  derived and/or modified sequence
atgcttggagtgctggtgcttggtgcactggctctggccgggctcggatttccagcacctgcggaacctcaaccaggtggatcgcagtgcgtcgaacatgattgttttgcgctttacccaggccctgcaactttcttgaatgcatcccaaatctgtgacgggctgagaggacatttgatgacggtgcggtcctcggtggcagcagacgtgatatcgcttctcctcaacggtgatggaggtgttggccgacgccgcctgtggatcggacttcagctcccgccagggtgtggtgatcccaaacgcctgggacctctgagaggattccagtgggtgaccggtgacaataacacgagctattcaagatgggcacgtctggatttgaatggagccccactttgtggacccctctgtgtcgcagtgtccgcggcagaagccactgtgccttcggagccaatctgggaggaacagcagtgcgaggtcaaggctgacggattcctttgtgaattccacttccctgccacctgtcggccccttgccgttgagccaggagcagcagcggcagcagtgagcattacttacggaacccctttcgctgcaagaggcgccgactttcaagcactcccggtgggctcctccgctgccgtggcacctcttggactccagcttatgtgcaccgcacctccaggggctgttcagggacattgggcaagggaggcaccgggagcgtgggattgtagcgtggaaaacggcggatgtgagcacgcatgtaatgcaatccccggcgcaccgaggtgtcaatgtcccgcaggggcagcacttcaagcagacggtcggagctgtactgcctccgctactcagtcatgtaatgatctgtgcgagcacttctgcgtcccaaaccccgatcaaccaggatcatattcatgcatgtgtgagactggatatagacttgcagcggatcagcataggtgcgaggacgtcgatgattgcatacttgaaccttcaccatgtcctcagcgttgtgtcaacactcagggcggtttcgagtgtcattgttacccaaactacgatcttgtggacggagagtgtgttgagcctgtagacccttgttttcgcgcgaactgtgagtaccaatgtcaacctctgaaccaaacctcctacctctgcgtgtgtgcagaagggtttgcgccgattcctcatgagccccatcgctgtcaaatgttttgtaaccaaaccgcttgtcctgcagattgtgatccaaacacccaagcctcatgtgagtgtccagaaggatacattctcgatgacggttttatctgtactgacattgatgagtgcgaaaacggagggttttgttcgggggtgtgtcacaacctgcctggaacctttgagtgcatttgtggccccgattcagcacttgctcggcatatcggaactgactgtgattcgggtaaagtcgacgggggagatagcggaagcggagaaccgcctccatcgcctacccccgggagcaccttgactccacccgcagttggccttgtccattcaggccttttgattggaatttcaattgcatcgctgtgccttgtcgtggcgctgttggctttgctgtgccatctccgaaaaaagcaaggcgccgccagagcaaagatggagtacaagtgtgcggcaccctcgaaggaagtggtgcttcagcatgtcaggaccgagagaaccccgcagagactt

SEQ ID NO: 7731 - DNA, 1725 bp, Artificial Sequence
  derived and/or modified sequence
atgctgggagtgctcgttctgggcgctttggctctggcaggtctgggctttccggctcccgccgagcctcagcctggcggatcacagtgtgtagagcatgactgttttgctctgtatcctggacccgctaccttcctgaatgcgagccagatatgtgatggacttagaggacatctcatgacggttcgctcttccgttgcagccgacgtgatctcactcctcttgaacggggacggcggtgtgggacggcgacgcctgtggattggtttgcagttgccacccggctgcggggatccgaaaaggttgggtccactcagagggttccagtgggtaactggtgacaacaatacttcatatagtcgatgggctcggcttgacctcaatggagcgcctctgtgcggacctctgtgtgtcgccgtgagcgctgccgaggcaactgtccctagcgagccaatctgggaggaacagcaatgcgaagtgaaggctgacggcttcctctgcgagttccactttcccgccacttgcaggcctttggccgttgaacccggtgctgcagcggcagctgtgagcatcacttatgggacaccattcgccgctcggggcgccgattttcaagcattgcccgttggcagcagcgcagcagtggcaccgttgggacttcagctgatgtgcactgcaccgcctggcgctgtgcagggccattgggcgcgcgaggcacccggtgcatgggattgttccgtggagaacggcggttgtgagcacgcctgtaacgcgatacccggtgcaccccgatgtcagtgccccgccggggccgctctccaagccgacggcagaagctgtactgcgagcgccacccaatcctgtaatgatctctgtgagcacttttgtgtgcccaatccagaccagcctggttcttatagttgtatgtgtgaaactgggtaccgattggcagcggatcagcacaggtgcgaggacgtcgacgattgtatcctggagcccagcccatgcccccagaggtgcgttaatactcagggtggctttgaatgtcactgctacccgaattacgatctcgtcgacggggagtgcgtagagccagtcgatccctgttttcgggctaactgcgaataccaatgccagcctctgaaccaaacctcatatttgtgcgtctgtgcagagggcttcgcgccgataccacacgagccgcacaggtgccagatgttctgtaatcagactgcgtgcccagctgactgtgatccaaacactcaggcctcatgtgagtgcccagagggatatatcctggatgacgggttcatttgcactgacattgatgagtgcgaaaacggcggcttctgcagcggggtgtgtcacaacctgcctgggacattcgagtgtatttgtgggcccgactctgccctcgcacggcacattgggacagactgcgactccggcaaagtggacgggggcgactcaggtagtggggaacccccacctagcccgacgccaggatcaaccctgactccgcctgcagtcggcctggtgcatagcggactcctcattggcatttctattgcgtccctgtgtctggtggtggccctgttggctctgctgtgtcacctgcggaagaagcagggagccgcgcgagccaagatggagtataaatgtgcagcccccagcaaggaggtggtcttgcagcatgtacgaacagagaggacaccccagcgcctg

SEQ ID NO: 7732 - DNA, 1725 bp, Artificial Sequence
  derived and/or modified sequence
atgttgggagtgctggtattgggggcactggctctcgctggtctgggatttccggcaccggcggagccacagccgggaggatcccagtgcgtcgaacacgactgtttcgccctctatccgggcccggcaacctttctgaatgccagccagatctgtgacggcctccgggggcaccttatgaccgtcagatcgtcggtggcggcagatgttatctccctgcttctcaacggagatggaggagtcggaaggaggcgcctgtggatagggctccaactgcctccgggatgcggggaccccaagcggctgggcccgctgcggggattccagtgggtgactggtgataacaacacttcgtactccaggtgggcaaggctcgacctcaatggcgcgccgctttgtggaccgctgtgcgtggcggtttccgccgcggaagcaaccgtgccatccgaaccaatttgggaggagcagcaatgcgaggtgaaggcagacggcttcctgtgtgaattccactttccagccacttgccgacctttggccgttgaacctggtgccgctgccgcagcggtcagtatcacctacggaaccccatttgctgctcgaggagcggacttccaagcgctgccggtggggagctcggctgctgtagcacctctgggtctgcagttgatgtgtacggcaccccctggggccgtgcagggccattgggcccgcgaagctccgggggcgtgggactgctcggtggaaaatggcggttgcgagcatgcatgcaatgcgatcccaggagcgcctcgctgtcagtgtccagcaggagcagcgcttcaggcagatgggcggagctgtaccgccagcgcaacccagtcgtgtaacgacctgtgcgaacatttctgtgtgcctaacccggatcaacccggctcctacagttgcatgtgcgaaaccggataccgcctggccgcagaccagcatcgctgcgaggacgtggacgattgcatcctcgaaccttcgccgtgcccgcagcggtgtgtcaatacccagggtgggttcgaatgccactgctacccaaactacgatctggtcgatggagaatgtgtcgaaccggtcgacccgtgcttccgcgccaactgcgaataccaatgccaaccgctgaaccagacctcatacttgtgcgtctgtgccgaaggattcgcaccgatcccccatgaaccacacagatgccaaatgttctgcaaccagactgcctgtccagcggactgcgaccccaatacgcaggcttcgtgtgagtgcccggaaggctacatcctggacgacggattcatttgcaccgacatcgacgagtgcgagaacggaggattctgcagcggcgtgtgtcacaatctgccaggaacgtttgagtgcatctgcggacccgactctgctctggcgaggcacattgggactgactgcgactccggcaaggtggacggaggggattcagggtccggagaaccgccgcccagccctaccccgggatccaccctgactccaccggcggtgggactggtgcattcagggctcctcattggaatctcgatcgcttccctgtgcttggtggtcgcgctgctcgccctgctgtgccacctgcgcaaaaagcaaggagctgcccgggccaaaatggagtacaagtgcgctgcaccctctaaggaggtcgtgctccagcacgtgcgcactgagagaactccgcaacggctc

SEQ ID NO: 7733 - DNA, 1725 bp, Artificial Sequence
  derived and/or modified sequence
atgctgggggtcctggtccttggtgcactcgctcttgcaggactgggattccctgcacctgcagaaccacagcctggcgggtcccagtgtgtggaacatgactgctttgcactctatcccggtcctgctacttttctcaacgcaagccaaatttgcgatggactccggggacatctgatgaccgtccgatcatcggtggctgcggacgtgattagccttctcctgaacggagatggaggggtcggccggaggcggctgtggatcggtttgcagcttccacctggttgcggtgatcccaagcggcttggaccacttcgtggcttccaatgggtgaccggtgacaacaatacctcgtactctcgctgggcgaggcttgatctcaatggagcccctctgtgcgggcccctttgcgtcgcagtgtcagctgctgaggcgaccgtcccttcggaacccatatgggaagaacaacaatgtgaggtgaaggccgatggttttctgtgtgagtttcattttcctgcaacctgccgacctcttgctgtggaaccaggagcagccgccgcagcagtgagcatcacctacggaaccccttttgcagcacgaggtgcagactttcaagcgcttcccgtgggttcgagtgccgctgtggcaccgttgggcttgcaacttatgtgtaccgccccaccaggagcagtgcaaggacattgggcaagagaagccccaggtgcatgggattgttcagtggagaacggaggatgtgagcatgcttgtaacgcaatcccgggcgctcctcggtgtcaatgtccggcgggcgcagccctccaggcagatggtcgatcgtgtaccgcctcagcaactcaatcgtgcaacgatctttgcgaacacttctgcgtgccaaacccggatcagccaggatcgtacagctgtatgtgcgaaaccggatatcgtctggcagcagaccagcataggtgtgaggatgttgacgactgtatcctcgagccatccccttgtcctcaaagatgtgtgaacactcaaggcggatttgagtgtcattgttaccctaattacgatcttgttgatggcgaatgtgtggaaccagtcgatccatgttttcgagcgaactgcgagtaccagtgtcagccgctgaatcaaacgagctacctgtgcgtctgtgcagaaggattcgcccccattcctcatgagccgcaccggtgtcaaatgttctgcaatcaaactgcctgcccggcagattgtgatcccaacactcaagcatcctgtgaatgtcccgagggatatatcctggatgatggcttcatctgcactgacattgatgaatgtgaaaatgggggattctgttccggtgtgtgtcataacttgcctggaacgtttgaatgtatttgtggtccagactcggcacttgcaagacatatcggaactgactgtgatagcggcaaagtggacgggggagattccggatcgggagaacctcccccatcccctactccaggctctacccttactccgcctgcagtggggctggtccattctggactgctgataggtatttcgatcgcatctctctgtctggttgtggccctcctggcattgctgtgtcaccttagaaaaaagcaaggagccgcaagagcaaagatggaatacaagtgcgctgcgccttctaaggaagtcgtccttcagcatgtgcgcactgagcggacccctcagcggctc

SEQ ID NO: 7734 - DNA, 1725 bp, Artificial Sequence
  derived and/or modified sequence
atgctcggtgtcttggtgcttggtgcactggcactcgcagggctgggattccccgctcccgccgagccacaacctggaggatcccaatgcgtggaacacgattgctttgcactttatcctggacccgcgacctttctcaatgccagccagatttgtgacggtcttagaggtcatctgatgaccgtgagatcgtcagtcgcggccgacgtcatttcgcttttgcttaacggtgatggtggagtcggacggcgcagactttggattggcttgcaactgcctccagggtgtggtgatcccaagagactgggacctctccgcggttttcaatgggtaactggtgataacaacacttcatactccagatgggcacgtcttgatctcaacggagcccctctgtgcggtcctttgtgtgttgcggtgtcagccgcggaggcaactgtcccgtccgaacctatttgggaggaacaacaatgcgaagtgaaggctgacgggtttctgtgcgaatttcatttccctgcgacttgcaggccgcttgccgtggaacctggagcagcggcagcggcggtgtcgattacctacggaacccctttcgccgcacgcggggctgacttccaagcacttcccgtgggtagctccgcggccgtcgcaccactggggctccagcttatgtgcaccgcgccacctggtgcagtgcaggggcattgggcacgcgaggcccccggtgcatgggattgctcagtggaaaacggaggttgcgaacatgcctgcaacgcgatcccgggcgcacccaggtgtcaatgtccagccggggcagcactccaggccgacggaagatcgtgcaccgcatcggccacgcaaagctgtaacgatctttgcgaacatttttgtgtgcctaaccctgatcaaccaggttcttactcctgtatgtgcgaaactggataccggctcgcagccgatcaacacagatgtgaagatgtggatgactgtatactcgaacccagcccatgtccacagcgttgcgtcaacacccaaggcggatttgagtgtcattgttaccctaactacgacctggtcgacggcgaatgtgtggagcccgtcgatccctgctttagagccaattgtgaataccagtgtcagccactgaatcagactagttacctgtgtgtgtgcgcagagggttttgcacctatcccacatgaaccccatcggtgccaaatgttctgtaaccagactgcatgtccagcagactgcgatcctaacactcaagctagctgtgagtgccctgaagggtacattctcgatgatggttttatctgtaccgacatcgatgaatgcgagaacggcggtttttgtagcggagtgtgccacaatttgccaggaaccttcgaatgtatttgtggacccgattccgctctggcccgacatatcggaaccgactgtgatagcggtaaggtggatggcggggactccggaagcggggaaccaccaccttcgccaaccccagggtcgacgttgactccaccagcggtgggacttgtgcattcagggcttcttattggtatttcgatcgccagcctctgcctggtcgtggcacttctggccttgctgtgtcatcttagaaagaagcaaggggcagcgagagcgaagatggaatacaagtgcgcagcaccatcgaaggaagtggtcctgcaacacgtgcgaaccgaaagaactccacagcgcctg

SEQ ID NO: 7735 - DNA, 1725 bp, Artificial Sequence
  derived and/or modified sequence
atgctgggtgtgctcgtgctgggtgctctggccctggcgggcctcggattcccggctccggccgagccgcaaccgggcggctcccaatgcgtggagcatgactgtttcgcactgtacccaggccccgcgaccttcctcaatgcttcgcaaatctgtgacggactccggggacacctgatgactgtgagatcctcagtggccgccgacgtgatcagcctcctgctcaacggcgacggcggagtcggccggcggcggttgtggatcggcctgcaacttccaccgggatgcggcgatccgaaacgcctgggtccattgagaggtttccaatgggtgactggagacaacaatacgagctactcccggtgggccagactggacctgaatggcgcgcccctgtgcggaccgctgtgcgttgccgtatcggccgcagaggcgactgtcccatcagagcccatctgggaggagcagcaatgcgaagtgaaggcagatggatttctctgtgaattccacttcccagcaacctgcagaccgctggcagtggaaccgggggccgccgctgcagccgtgtcgattacgtacggaactccattcgcggccaggggcgccgatttccaggcacttcctgtgggtagctccgcggcggtggcaccgctcgggctgcagttgatgtgcactgccccgccaggagccgtgcaaggacactgggcgcgggaagcacctggtgcctgggactgctcggtcgaaaacggcggatgcgaacacgcgtgcaacgctatcccgggagctccacgctgccaatgcccggcgggggctgccctccaggctgatggcagatcctgcactgcatcggctactcagagctgcaacgacctgtgtgagcatttttgcgtgccgaatccagatcagcctggaagctactcatgtatgtgcgaaaccggctaccggttggcagccgaccaacaccggtgcgaggatgtggatgattgtatcctggaaccgtctccgtgccctcagcggtgtgtgaacacccagggaggattcgaatgccactgctatccgaactacgatctggtggacggtgagtgcgttgagccagtggacccctgctttcgcgcgaactgcgagtaccaatgccagcctctcaaccagacctcctacctctgtgtgtgcgcggagggatttgcacccatcccgcatgagccgcacaggtgccagatgttctgtaaccagactgcgtgtcctgcagactgtgatccgaatacccaggcatcctgtgaatgccctgagggatacatccttgacgatgggttcatttgtaccgacatagacgaatgcgaaaacggaggtttctgctcaggtgtgtgccataacctccctggaactttcgaatgcatctgcggtcctgatagcgcgctggcacgccacatcggcacggattgtgattcgggaaaagtggacgggggagactcgggctccggcgaaccgccgccaagcccgactccaggatcaactctgactccgccggcggtgggcctcgtgcattccgggctgctgatcggcatctccattgcctcgttgtgtctggtggtcgcgctgctggcgctgttgtgtcacctgaggaagaaacaaggagcggcacgtgcgaaaatggagtacaaatgcgccgcccctagcaaggaggttgtcctgcaacacgtgagaaccgagcggacgccacagcggctg

SEQ ID NO: 7736 - DNA, 1725 bp, Artificial Sequence
  derived and/or modified sequence
atgctcggagttctcgtcctgggtgctctggcgctggctggcctcggatttcccgccccagcagaacctcagcccggaggatcacaatgcgtggaacatgattgctttgctttgtaccccggaccagctacctttctgaatgcttctcaaatctgcgatggcctgagaggacacttgatgacagttcgttctagcgttgcggcagacgtgataagcctccttcttaacggggatggaggcgtcggccgccgacggctgtggatcggacttcagttgccccccggatgcggcgaccctaagcggcttggccctctgagagggtttcagtgggtgacaggagataacaataccagttacagcagatgggccaggctcgacctcaatggtgcccccctgtgcgggccactttgcgtcgctgtgtctgcagcagaagctaccgtgccttccgaaccaatctgggaggagcaacagtgcgaggtaaaagctgacggtttcctgtgtgaattccacttccctgccacttgccgaccccttgcagtggagccaggcgctgcagccgctgcagtcagcatcacctatggcaccccattcgctgctaggggcgccgattttcaagctttgccggtcggcagctctgccgcagtcgctcctctgggactccaacttatgtgcaccgcgccacctggagccgtgcagggccattgggctcgggaagcaccaggcgcgtgggattgtagtgttgagaacggcggctgcgagcacgcatgcaatgcgatccctggcgcgcccagatgtcagtgtccagccggagcagcacttcaagctgatggcagaagttgcactgccagcgcaacacaatcttgcaatgacttgtgcgaacacttttgtgttccaaaccctgatcagcccgggtcttacagttgcatgtgcgagaccggatacaggttggccgccgaccagcataggtgtgaggacgtcgacgactgcatcctggaaccctctccatgcccacagagatgtgtgaacactcaaggcggatttgagtgtcattgctacccaaattatgatctcgttgacggcgagtgtgtggagccagtcgacccatgcttccgtgccaattgcgagtaccaatgccagcctctcaatcagacctcgtacctctgcgtttgtgcagagggcttcgctcctattccacacgagccacataggtgccagatgttctgcaaccagactgcttgccccgcagactgcgaccctaacacccaggcatcttgcgagtgccctgaaggatatattctagacgatggcttcatctgtacagacattgacgagtgtgaaaacggcgggttttgcagcggggtctgccacaacttgccaggaacattcgagtgcatctgtggacctgactccgctctggcgcgccacatcgggaccgattgcgactctggaaaagtggacggaggagattccggcagcggtgagcccccaccaagtccgaccccagggtctactctcaccccacccgccgttgggctggtacacagtggactgctgatcggaatatccatcgcctccctgtgtttggtagtcgctctcctcgcactgctttgccaccttagaaagaaacagggcgctgcacgtgctaaaatggagtataaatgtgcggccccctccaaggaggtggttcttcagcacgtcaggaccgagagaaccccgcagcgcctt

SEQ ID NO: 7737 - DNA, 1725 bp, Artificial Sequence
  derived and/or modified sequence
atgctgggagtgcttgtgcttggagcgctggcccttgccggcctcggcttcccagccccagcggaaccacagccgggcggctcccagtgcgtggaacacgattgtttcgccctgtacccagggccggccaccttcctgaacgcctcccagatctgcgacgggctgcggggacacttgatgaccgtccgctcgtcggtggctgctgacgtgatctcattgctgttgaacggtgatgggggagtgggccgccggcgcttgtggatcggactgcaactcccacctggatgtggggatccaaaaagacttggaccactgcgcggtttccagtgggtcactggcgacaacaatacttcttactcgcgctgggcaagactcgatcttaatggagcgccgctctgcggtcctctctgtgtcgcagtgtctgcggctgaagccactgttccgtccgaacccatctgggaagaacagcaatgcgaggtgaaagccgacggctttttgtgcgagttccatttcccggcgacctgccgcccgctcgctgtcgagcctggagctgcagcggccgcggttagcatcacctacgggactcctttcgcagcccggggagccgattttcaagcacttccggtgggaagcagcgcagcagtggcccccctgggcctgcagctgatgtgtactgccccgccgggagctgtccagggacactgggccagagaagcgccaggagcttgggactgctccgtggaaaatggtggatgcgaacacgcgtgcaacgccatcccgggcgccccgaggtgccaatgtccggccggtgcagcactgcaagcagacggccgcagctgtactgcatccgccactcagtcatgcaatgacttgtgcgaacatttctgcgtccctaatcctgaccagccaggatcatactcatgcatgtgcgaaactggataccggctggcagccgaccagcatagatgcgaagatgtcgacgattgtatcctggaaccctccccctgcccccaacggtgtgtcaacacgcaaggtggatttgaatgccattgttaccccaactatgacttggtcgatggggagtgtgtggagccagtggatccgtgcttcagggccaactgcgaataccagtgccagcctctgaaccagactagctacctctgcgtgtgcgctgagggattcgctcccatcccacatgaaccacaccgatgccagatgttctgtaatcaaaccgcctgcccggcggattgtgacccgaacacgcaagcgtcttgcgaatgcccagaggggtacattctggacgacggatttatctgtacggatatcgacgagtgtgaaaacggaggattttgttccggcgtgtgccacaatctgcccgggacgtttgaatgcatttgcggtcctgattcggcactggcgcgacatatcggcactgattgcgactctgggaaggtggatggaggtgatagcgggagcggcgagccgcccccaagcccaaccccaggcagcactcttaccccgccggcggtcggactcgtccactcgggcctgctgatcgggatctcgattgcctcactgtgtctggtggtcgctctgctggcccttctctgccacctgcgtaagaagcaaggagccgcgcgggccaagatggaatacaaatgcgctgcaccgtcgaaggaggtcgtcctccaacatgtgcgcaccgagcggacgcctcagcgcctg

SEQ ID NO: 7738 - DNA, 1725 bp, Artificial Sequence
  derived and/or modified sequence
atgctgggcgtgctcgtgctgggtgccctggcactggcggggctgggtttcccggcgccggccgaaccgcaacctggaggatcacagtgcgtcgaacacgactgtttcgcactgtaccctggcccagcgactttcctcaatgctagccaaatttgtgatggtttgcggggacacctgatgactgtccggtcgtccgtcgccgcggacgtaatcagcctgctcctgaacggagatgggggagtcggccggagaaggctctggatcgggctgcagctgcctccaggatgtggggaccccaagcggctgggtccactgcgcggtttccagtgggtgaccggagacaacaacacttcgtactccagatgggcccggttggacctgaacggcgctccactgtgtggaccactctgcgtggctgtgtcagccgctgaggcgaccgtcccgagcgagccgatctgggaggaacaacaatgtgaagtcaaggcagacggtttcttgtgcgaattccacttccccgccacgtgccgcccattggccgtggaaccgggagccgccgccgcagcagtgagcatcacctacggaacgccattcgcagccagaggcgctgatttccaagcattgccggtcggatcttccgccgcggtcgccccattgggcttgcaattgatgtgcactgcaccacccggagccgtccagggacattgggcgcgcgaggcacctggagcctgggactgttcggtcgagaacggaggctgcgaacacgcctgcaacgccattccgggagcaccaaggtgccagtgcccagcgggtgccgccctccaggcggatggccgttcctgtactgcctcagcgacccagtcatgcaacgatttgtgcgagcacttttgcgtgccgaatcctgatcaaccaggatcctacagctgcatgtgcgagactggatacagactggcggctgaccagcaccgctgcgaggatgtcgatgactgcatcctcgaaccatccccctgcccgcaaagatgcgttaatacccaaggcggcttcgaatgccactgctaccccaattacgatctcgtggatggcgagtgcgtggaacccgtggatccatgttttagagccaactgcgaataccagtgccagcctctgaatcagacctcgtatctgtgcgtgtgtgccgagggattcgctcccatcccacacgaaccgcatcgctgccaaatgttctgtaaccagaccgcctgtcctgccgattgcgacccgaacactcaggcgtcctgcgagtgccctgaaggatacattcttgacgacgggtttatctgcacggatatcgatgaatgcgaaaatggaggtttttgctcgggtgtgtgtcacaatctgccgggaacctttgaatgtatctgtgggccagatagcgcactcgcgcggcatatcgggaccgactgcgattccggtaaggttgatggcggagattccggatctggcgagccccctccgagcccaactccaggatcgactcttactccacctgccgtgggactcgtgcattcaggacttctcatcggcatcagcatcgcatcgttgtgtctggtggtggctctgctcgctttgttgtgccacttgcggaaaaagcaaggagccgcccgcgcaaaaatggagtacaaatgcgcggcgccaagcaaggaagtcgtcctgcagcatgtcaggactgagcgaaccccacagagactg

SEQ ID NO: 7739 - DNA, 1725 bp, Artificial Sequence
  derived and/or modified sequence
atgctcggagtgcttgtgctgggagctctggctttggcaggacttggctttccagcaccagcagaaccacaacctggtggttcgcaatgcgtcgagcacgactgcttcgcactgtaccctggacctgccaccttcctcaacgccagccaaatctgtgacgggctgcgaggacatttgatgaccgtgagatccagcgtggccgcggatgtgatatcacttctcctgaacggggacggtggtgtcggaaggcgcagactttggattggactgcaactgcctccgggctgtggtgacccaaagaggctgggccctctgagaggattccagtgggtgaccggagacaacaatacttcgtactcgcgatgggcaagactggatctcaacggcgcacctctctgtggtcccctttgtgtggcagtgtcggcagcagaggccaccgtgccctcggagcccatatgggaagagcaacaatgtgaagtcaaggcagatggattcctgtgcgaattccatttccctgccacctgccgtccacttgccgtggaaccaggagccgcagcagcagctgtgtccattacctacggaaccccttttgccgcccggggagcggattttcaagccctgccagttggatccagcgcagcagtcgcacccctcggactgcagcttatgtgcactgcaccgcccggcgcagtccaaggtcattgggcaagagaggcaccaggcgcatgggactgcagcgtggaaaacggcggctgtgaacatgcgtgtaacgctattcctggcgcaccccgatgccaatgtccagcgggggccgctctgcaagcggatgggagaagctgtaccgcatccgctacccaatcatgtaacgatctttgtgaacatttttgcgtccccaaccccgaccaacccggtagctactcctgtatgtgcgaaacggggtaccgcctggcggcggaccagcacaggtgtgaagatgtggatgattgtatactcgaaccatcaccctgtccacaaaggtgtgtgaacacccagggcggtttcgaatgtcattgttaccctaattacgatcttgtggatggtgaatgcgtggaacccgtggacccttgtttccgggcaaactgtgaataccaatgtcaaccccttaatcagacctcgtatctttgtgtctgcgcagaaggatttgcacccattccacatgaacctcataggtgccaaatgttttgtaaccagactgcctgtccagcagattgtgacccaaacactcaagcatcgtgtgaatgcccagagggatacatcttggatgatggatttatctgcactgatatcgacgaatgcgaaaatggaggtttctgttcaggtgtttgccataatctgccgggtaccttcgagtgtatctgcgggcccgactcggcccttgctcggcatatcggaactgattgtgattccggcaaggtggatggaggtgacagcggctcaggagaaccacctccatcacccactcctggatcaacgcttacccctccagccgtcggtcttgtgcatagcgggctgctcattgggatctcaattgcatccctttgcctggtcgtggctctcctcgcactgctttgccatcttcgaaagaaacagggtgctgcaagagcaaagatggagtataagtgcgcagcgccttctaaggaggtggtgctccagcatgtcagaactgagcggacccctcagaggctg

SEQ ID NO: 7740 - DNA, 1725 bp, Artificial Sequence
  derived and/or modified sequence
atgcttggagtgctggtgctgggtgcgctggcattggcagggcttggcttccccgcaccggccgagccccagcccggcggatcacagtgcgtcgaacacgattgctttgcgctttaccccggcccagcaacctttctcaacgcctcacagatatgtgatggactgagaggccatctcatgactgtgcggtcgtcggtggcagccgatgtcatttcgcttctcctcaatggtgatgggggagtgggtagacgacgactctggattggactgcaactgccgccaggttgcggtgacccaaagcgactgggacctctcagaggatttcagtgggtcactggtgacaacaatacgagttactccaggtgggccagactcgaccttaatggtgcacccctctgcggtccactttgtgtcgcagtgtccgcggcagaagcgactgtaccgtcggaacctatttgggaggaacaacagtgtgaagtgaaggcggacggattcctttgtgaattccattttccagcaacttgtagacccctggcagttgagcctggagcagcagcagcggctgtcagtattacttacggaaccccctttgccgcacgtggcgcagattttcaagcccttcctgtgggttcctctgctgcagtcgcacctctgggattgcagcttatgtgtaccgccccacctggagccgtgcagggacactgggcgagggaggcccctggtgcatgggattgctcggtggaaaacggcggttgtgaacacgcctgcaatgcaatacctggtgctcctaggtgtcaatgcccagctggagcagcccttcaagctgatggtagaagctgtacggcatctgctactcaatcctgtaacgatctttgtgaacatttctgtgtgccaaaccctgatcagccaggctcttattcctgtatgtgcgaaaccggatacagactggccgctgatcaacatcgatgcgaagatgtggacgattgtatcctcgaaccttccccttgtccacagagatgcgtgaacacgcagggaggatttgagtgccattgttacccgaattacgacctggtcgacggtgagtgtgtggagcccgtcgacccatgcttcagagcaaactgcgaataccagtgtcagccacttaaccaaacctcctacctgtgtgtctgtgcagaggggtttgcacctataccacatgagccgcatagatgccaaatgttctgcaaccagactgcatgtcctgccgactgcgatccgaacacccaggcctcatgcgaatgtcccgaaggatacattctggacgacggttttatctgcaccgacatcgatgaatgtgaaaatggggggttctgctcaggtgtgtgccataacctcccaggtactttcgagtgtatttgtggacccgattcggcactggctaggcatatcggaaccgattgtgattcgggtaaggtggatggaggagatagcggtagcggagaacctcccccaagcccaacccccggctcgacccttactcctcccgcggtgggtttggtgcactcaggcctgttgataggaatctccattgcgtcgttgtgtcttgtggtggccctccttgcgcttctgtgccacctgagaaaaaagcaaggcgcagcgcgagcaaagatggaatacaaatgtgcagcaccctcaaaggaggtggtgcttcagcacgtgcgaacggaacggactccacagcgtctg

SEQ ID NO: 7741 - DNA, 1725 bp, Artificial Sequence
  derived and/or modified sequence
atgctcggggtgttggtgctgggcgcgttggcactcgctggccttggtttcccggcgccggcagagcctcagccggggggaagccagtgcgtggaacacgactgctttgccctgtatcctggtcctgctactttcctcaacgcgtcgcaaatctgtgacggccttcgcggacacctcatgacggtaaggagtagcgtggccgcggacgtgatctcgctgctgttgaacggcgacggcggagtgggccggagacggctgtggatcggcctgcagctgccaccgggttgcggtgatccgaaacggttgggaccactgcgtggattccagtgggtgactggggacaataacacgtcctactcacggtgggcccggctggatctgaacggggccccgctgtgcggaccgctgtgcgtcgctgtgagcgccgccgaagccacggtgccgtccgaaccgatttgggaagaacaacagtgcgaggtcaaggcagatggattcctctgcgaatttcactttcctgccacttgccggccgctggccgtcgaacctggagctgccgcagcagcggtttccatcacctacggaaccccgtttgccgcaaggggggcagatttccaagccctgccggtgggatcgagcgccgcagtggcacccctcgggctgcagcttatgtgcactgcaccccctggagcagttcagggacattgggctagagaggccccaggagcctgggattgctcggtcgagaacggtggctgcgaacatgcctgcaacgcgatccctggcgcaccacggtgccagtgtccggcgggagcggccctgcaggctgacggacgcagttgcacggcatcggccactcagtcgtgtaacgatctttgcgaacacttctgcgttccgaatccagatcaaccgggctcgtactcctgtatgtgcgagactggataccgactcgcagccgaccagcaccgatgcgaggacgttgacgattgcattctcgagccgtcaccgtgcccacagagatgtgtgaacacccaaggaggattcgaatgccactgctaccctaattacgatctcgtcgacggtgaatgtgtcgaaccggtggacccttgtttccgggcaaattgcgaataccaatgccagcccctgaaccagacgagctacctctgcgtgtgcgccgagggatttgcgccaattccacatgagccccatcggtgccaaatgttctgcaaccaaaccgcctgcccagctgactgcgaccctaatacccaagctagctgtgagtgtccagagggctacatcttggacgacgggttcatctgcaccgacatcgacgagtgcgagaacggaggattctgctccggtgtgtgccataacttgcccggtactttcgagtgcatctgcggcccggattcggcgctggcccgccatataggtacggattgtgacagcggaaaggtggacggaggagattcgggtagcggagaaccgccgccgtcgccaaccccgggatcgactctgacccctcccgctgtcggtcttgtgcactcgggcctgctgatcggaatctcaatcgcttccctctgtctcgtcgtggctcttctggcattgctgtgtcacctgcggaaaaagcagggagccgcccgagcgaagatggaatacaaatgcgctgcgccatccaaggaagtcgtgctccagcacgtgaggacggagcgcaccccacagcggttg

SEQ ID NO: 7742 - DNA, 1725 bp, Artificial Sequence
  derived and/or modified sequence
atgttgggagttctggtgctgggagcccttgcactcgccgggctcggattcccagcccctgcagagccacaaccaggaggtagccaatgcgtggagcacgattgttttgcgctctaccccgggcctgcaacttttctgaacgcatcgcagatttgtgacggccttaggggacatcttatgactgttcgaagctccgtggcggcagatgtgatctcactgcttctgaatggtgatggaggagtcggtagacggcgcctgtggatcggattgcagctccccccagggtgcggggacccgaagagactcggtccacttcgtggatttcaatgggtgaccggtgacaacaatacctcctactccaggtgggcaagacttgacctgaacggagcccccctgtgtggtccactttgcgtggctgtctctgcagccgaagccaccgtgccctcagaaccaatatgggaggaacaacaatgcgaagtgaaagcagatggatttctttgcgaatttcatttccctgcgacctgtagacctctggcagtcgaaccaggggcagccgcagcagctgtgtcgatcacttacggtaccccttttgcagctagaggagccgactttcaagcgctgcctgtcggatcctccgccgcggtggcgcctcttggcttgcaactgatgtgcactgccccgcctggcgcagtgcaggggcattgggcacgggaggcacctggagcgtgggactgttcggtcgaaaacggtgggtgcgaacatgcttgtaacgcgatccctggtgcaccaagatgccagtgtccagcaggtgcagcattgcaggcagatggacgcagctgtaccgcgtcggcaactcaatcgtgtaatgacctttgtgaacatttctgcgtaccaaaccctgatcaaccaggatcgtactcctgtatgtgtgagactggataccgccttgcggcagatcagcatcgctgcgaggacgtggatgactgtattcttgaaccaagcccatgcccacagaggtgtgtgaatacgcagggaggattcgaatgccattgctaccctaactacgatctggtggacggggaatgtgtggaacctgtggatccttgttttcgcgcaaactgcgagtatcagtgtcaacctctgaatcagaccagctacttgtgtgtctgtgcagagggttttgcgccaattccacacgagcctcatagatgtcaaatgttttgcaaccaaaccgcatgtcccgccgactgtgatcccaacacccaagcctcctgtgaatgccctgaagggtacattctcgacgatggtttcatttgcactgatatcgatgaatgcgagaacggaggattctgttcaggtgtgtgtcataaccttcctggaaccttcgagtgcatctgcggcccagattccgccctcgcacgccacattggaactgattgcgattcgggaaaggtggatgggggtgattcgggatcaggtgaaccaccaccaagccctactcctggttccacccttacccctcctgcagtgggactggtgcatagcggccttttgatcggtatttcgattgcaagcctttgtttggtcgtggcgctcctggcactcctgtgccatctccgaaaaaagcaaggtgctgcacgcgccaagatggaatacaagtgtgcagcaccatctaaggaagtggtgctgcagcatgtccgcaccgagcgtactccccagcgcctt

SEQ ID NO: 7743 - DNA, 1725 bp, Artificial Sequence
  derived and/or modified sequence
atgctcggagtgctggtgttgggcgcattggcgctggccggcttgggcttccctgccccagcagagccacagcctggggggtctcagtgcgtggagcacgactgcttcgcactttatccaggaccagccacattcctgaacgccagtcagatctgcgacggcctaagaggccacctgatgactgtccgctcttcggtcgccgcagatgttattagccttctcttaaatggggatggaggagtagggaggcggcgtctgtggatcggtctccagctgccacccgggtgcggcgaccctaaacggctgggccctttgcgcggattccagtgggtcaccggcgataataataccagttactctaggtgggctcggctggatcttaatggcgcaccactctgtggacctctttgtgttgctgtctcagctgcagaggccactgtaccatccgagcctatctgggaagagcagcagtgtgaggtaaaagctgatggattcctgtgtgagttccacttcccagcaacctgtcggccattagccgtcgaacctggcgcagccgccgcggccgtctccataacctacggtactccctttgccgccaggggagctgactttcaggcgcttcctgtaggatcatccgctgcagttgctcccctgggacttcagctgatgtgcactgctcctcccggggccgtgcaggggcattgggccagagaggcccccggagcttgggattgttcggttgaaaacggaggatgtgagcacgcctgcaatgctattcccggcgctccccgctgtcagtgccccgccggagcagcgctgcaggcagatggcaggagctgtaccgctagtgccacacagtcgtgcaatgacctatgtgaacatttctgtgtgcctaatcccgatcagccaggctcctatagctgcatgtgcgagaccggttacaggttagcggccgatcagcatagatgtgaagatgttgatgattgtatactcgagccctccccatgcccccaaagatgcgtgaacacacagggcgggttcgaatgtcattgctatccaaactatgacctcgtggatggagagtgcgtcgaaccagtggatccttgctttagggctaactgtgaatatcagtgtcagccgctgaaccagacttcatacctttgcgtgtgtgcagaggggtttgcccccatcccacacgagccccaccgctgccagatgttctgcaaccaaaccgcttgtcctgcagattgcgacccgaacacgcaggcttcttgtgagtgtccagaggggtatatacttgacgatggatttatatgcacggacattgacgaatgtgaaaatggcggtttctgttcgggggtgtgtcacaacctgccagggaccttcgagtgtatatgcggcccagactctgcactggccaggcacatagggacagactgtgattccggaaaggtcgatgggggagacagcggttctggtgagccaccaccctcccccaccccgggaagcactctcactccccctgctgttggtctagtgcatagtggattgctaataggaatatccatcgccagcctgtgcctggtggtggcactccttgcgctgctgtgccacctgcgcaagaaacaaggtgcagcccgggccaagatggagtataagtgcgcagcccctagcaaggaggtcgtactccagcacgtccggaccgagcgcacaccccaaagactt

SEQ ID NO: 7744 - DNA, 1725 bp, Artificial Sequence
  derived and/or modified sequence
atgctgggagtgctggtcctcggtgcactggcactcgccggtctgggtttcccggctccagcagagccgcaaccagggggatcccagtgcgtggaacacgactgcttcgcgctgtatccagggcccgccaccttcctcaacgcctcacaaatttgcgatggactccggggacatctgatgaccgtgcgatcatccgtcgccgccgacgtgatcagcctgctcctcaacggagacggaggcgtgggccggcggcgcttgtggatcggactgcagctgccgcccggctgcggggacccgaagcgcctgggaccccttagaggattccagtgggtgactggagacaacaatacgtcctacagccggtgggccagactggacctgaacggagccccgctgtgtggcccgctgtgtgtcgcggtgtccgccgcagaagccaccgtgccaagcgagcccatctgggaagagcagcaatgtgaggtgaaggcggacggctttctgtgtgaattccatttccccgcaacttgtcgccccctcgcggtcgaaccaggcgcggccgccgcggccgtttccatcacttacggcaccccattcgcagcaagaggagcggactttcaagcgctgcccgtgggctcctcagcggcggtggccccccttgggctgcagctgatgtgcactgccccgccaggcgctgttcagggtcactgggccagagaagccccgggcgcttgggactgctcagtcgaaaacggaggatgcgagcatgcgtgtaatgctatcccaggagctccgcgatgtcaatgccctgccggggccgcgttgcaagccgacggcaggtcctgtacggcctccgccactcagagctgtaacgatctgtgcgagcatttttgtgtacctaaccctgatcagccggggagctactcctgtatgtgcgagactggataccgccttgctgcagatcaacaccggtgcgaagatgtcgacgactgcatcctggagccgtccccatgccctcaacgctgtgtgaacacccagggcggatttgagtgccactgttacccgaattacgatttggtggacggagaatgtgtggaaccggtcgatccatgctttcgcgccaattgcgaataccagtgccagccgctgaatcagacctcgtacctgtgtgtctgcgcggagggcttcgcccctatcccacatgagccgcaccgctgccagatgttctgtaaccagaccgcgtgcccagcagactgcgatccgaacacccaagcgagctgcgaatgtcctgaaggctacatcctggatgatggattcatctgcactgatatagatgagtgcgaaaacggtggattctgttccggagtgtgccacaatctgcccggcaccttcgagtgtatctgcggaccggatagcgcacttgcaaggcacatcggaactgactgcgacagcggcaaagtcgacggtggagatagcggctcgggagaacccccgccgtcaccgactccaggatcgactctgactcccccagctgtcggactggtgcatagcggcctgctgatcggcatctccatcgcgagcctgtgtctggtggtggctttgctcgctctgctgtgccatctgcggaagaagcagggagctgcacgcgccaaaatggaatacaaatgcgctgcgccgagcaaggaagtggtcctgcaacacgtgcgcactgagagaacgcctcaaagactg

SEQ ID NO: 7745 - DNA, 1725 bp, Artificial Sequence
  derived and/or modified sequence
atgctgggtgtgttggtgctgggtgccctggcgctcgcaggactgggcttcccggcaccggctgagccccagccggggggctcgcagtgcgtcgagcatgactgctttgcgctttacccaggaccggcaacttttctcaacgccagccagatttgcgatggactccggggacacctgatgaccgtgagatcctcagtcgccgcagacgtgatcagcttgctcctcaatggagacggaggagtgggacgccggcgcctttggatcggtctgcaactcccaccggggtgcggcgacccaaaaaggctcgggcctttgcgcggatttcagtgggtgaccggagacaataacacgtcgtactcgcggtgggctaggctcgacctgaatggagccccgctgtgtggcccactctgcgtggctgtctccgcggccgaagcgaccgtcccgagcgaaccgatctgggaagagcagcagtgcgaggtgaaggccgacggcttcctgtgcgagtttcacttccccgcaacttgtcgcccgctcgcagttgagccgggagccgccgccgccgcggtgagcattacctatggaactccctttgccgcccgcggcgcggatttccaggcgctgccggtcggatcctccgcggcagtggcccctctcggcctgcagctgatgtgcaccgctccgcccggagctgtgcaggggcattgggcccgggaggccccgggggcgtgggactgctcagtcgaaaacggaggatgtgagcacgcatgcaatgcaattccaggcgctccacgctgccagtgccctgcgggtgcggcccttcaggctgatggacgatcgtgtaccgcaagcgcgactcaatcctgtaatgacctctgcgagcacttttgcgtgccgaacccggatcagccaggaagctactcgtgcatgtgcgagactggatacaggttggcagcggatcaacacagatgcgaggacgttgacgactgcatcctggagccttccccttgcccgcaaagatgtgtgaacacccaggggggcttcgaatgccactgctacccaaattacgacctcgtggacggcgaatgcgtggagccagtcgatccatgtttccgcgccaattgcgagtaccagtgccagccgctcaaccagacttcgtacctgtgcgtctgcgccgaaggtttcgcgccaatccctcacgaaccgcatcgatgccaaatgttctgcaaccagactgcgtgtccggcagattgcgaccctaatactcaggcctcgtgtgaatgtccggagggttatatcctcgatgacggattcatctgcacggacatcgacgagtgcgaaaacggcggattctgctccggagtctgtcacaacctgccgggaaccttcgaatgcatttgcggaccggatagcgcactggcccggcacattggaaccgactgcgacagcggcaaagtcgatggtggtgactcaggttcaggagagccgcctccgtcgccgaccccgggatcgaccctcactcccccggcggtgggtcttgtgcactccggcctgctgatcggcatttccatcgcctctctctgcctcgttgttgcgctgctcgcgttgctgtgccatctccgcaagaagcagggagctgcgcgggcgaaaatggaatacaagtgcgcggctccgtcaaaagaggtcgtgctccaacacgtgcgcacggaacgcaccccgcagcggctg

SEQ ID NO: 7746 - DNA, 1725 bp, Artificial Sequence
  derived and/or modified sequence
atgctgggtgttcttgtactgggagcgttggcactcgctggcctgggtttccctgctcccgcagaaccacaacccggtggtagccagtgcgtagagcacgattgttttgctctgtatcccggacctgctaccttcttgaacgcttcccagatctgtgacggacttcgcggacatctcatgacggttcgcagctcagtcgcggctgacgttataagcctgctcctgaatggagacggcggagtcggtagaaggcgcctttggataggattgcagctgcctcctggttgtggcgacccgaagagactgggtcctcttaggggattccagtgggtcactggtgacaacaacacatcttacagtagatgggccaggttggacctcaatggagctcctctgtgtggtcccctgtgcgtggccgtctccgctgcggaggccaccgtgccctctgaacccatctgggaggagcagcagtgtgaggtaaaagcggatggtttcctgtgtgagttccattttcctgccacatgccgcccccttgcagttgagcccggagcagcagctgctgctgttagcatcacctacggaactccttttgcagccagaggcgccgacttccaggcgcttcccgtgggttccagtgctgcagttgctccgctcggactgcaactgatgtgtacggcaccgcctggagctgtacagggacattgggcgcgcgaggctcccggcgcttgggactgctctgtggagaacggtggctgcgagcacgcatgcaatgctattcccggagctccgaggtgccaatgccccgccggcgctgcacttcaggctgacggtaggagttgtaccgctagcgctacgcaatcttgtaatgacttgtgcgagcacttctgcgtacctaacccagatcaacccggatcctatagttgcatgtgtgagacgggatataggttggcagcagatcagcacaggtgcgaggacgttgacgactgcattcttgagccctctccttgcccacagagatgcgtgaatacgcagggaggcttcgaatgccattgctaccctaactacgaccttgtcgatggagagtgtgtggaaccagtggacccatgttttagagccaactgtgaataccaatgtcagcccctgaaccagacctcatacctgtgtgtttgcgcggagggattcgcgcccatcccacatgaaccccatagatgtcagatgttttgtaaccaaactgcctgccccgcagactgcgatcccaacactcaggcctcctgcgagtgccctgagggatatatcctcgacgatggctttatttgtacagatatcgacgagtgtgagaacggcggattctgctccggcgtgtgtcataacctgcccggcaccttcgagtgcatttgcggaccagactcagcactcgctaggcacatcggcacggactgcgacagcggcaaggtggatggtggcgactcaggttccggcgaacctcccccatccccgacccccggctcaactttgactccccccgcagtaggtttggtgcattccggattgttgattggcatctccattgctagcctgtgcttggtcgtcgcgctcctcgcactgctttgtcatctgcgcaagaagcagggcgctgccagggctaagatggagtataaatgtgccgctcccagtaaggaagtagtgctgcagcacgttaggaccgagcgcacccctcaacgcctg

SEQ ID NO: 7747 - DNA, 1725 bp, Artificial Sequence
  derived and/or modified sequence
atgctcggggttctggtcctgggcgcgctggctctagcgggcttgggcttccccgctcccgctgagcctcagcctggcggaagccagtgtgtggaacacgactgttttgccctgtaccccggtccggcaacgtttctcaacgcttctcaaatttgtgacggcttgcggggccatctcatgacggtgcgctcgtccgtggcggcagacgtcattagcctgctgttaaacggggatggcggggtgggacggaggaggttatggatcgggctacagcttccaccgggatgcggggaccctaaaaggctcggacccctcagaggatttcaatgggtgacgggagacaacaacacctcctatagcaggtgggctcgcctggacttgaatggagcgcccctatgcggcccactgtgtgtggctgtatccgccgccgaggcaaccgtgccaagtgagccaatttgggaggagcaacaatgcgaagtgaaagcagatgggttcctttgcgagttccatttccctgcgacctgtcgtccacttgctgtcgagcccggtgctgccgcagccgcagtgagtattacatatggcactccattcgccgctagaggggccgacttccaagccttgccagtgggatcatctgctgccgtggccccactggggctacagttaatgtgtacagctccaccaggagcagtccagggccattgggctagagaagcaccaggagcttgggattgctctgtcgaaaacggaggctgcgaacacgcctgtaatgccatcccaggcgcccccaggtgccagtgccctgccggggctgccctacaggccgatggccgatcatgcactgccagtgcaacgcagtcatgcaacgacctctgtgagcatttttgcgtacccaacccagaccagcccgggtcctacagctgcatgtgcgaaactgggtacagactggccgccgatcagcatcggtgcgaggacgtggatgattgtatcctagaacccagtccttgtcctcagcgatgcgtgaatactcagggaggctttgaatgtcactgttaccctaactacgacttggtggatggtgaatgcgtggagccggttgatccttgctttcgcgccaattgcgaataccagtgccagcctctgaatcagacatcttacctttgtgtctgcgctgaaggattcgcgcctatcccccatgaaccacacagatgccagatgttctgcaaccagacggcctgccccgcggattgcgatcctaacacccaggctagctgtgagtgtccagaaggttatattttggacgacggctttatctgtacagatatcgacgagtgcgagaacggcggcttctgttctggcgtttgtcataaccttcccggaacgtttgagtgcatctgcggcccagatagcgcactggcccggcatatcggtaccgactgcgacagtggcaaagtagatggtggcgacagcggttccggagaacctcctccttctcccactcccgggtcaacactcacaccccctgccgtgggcttggtgcactcaggacttcttatcggtattagcatcgcaagcctgtgccttgttgtggccctccttgccctgctctgccaccttaggaagaagcagggggcagcccgtgccaaaatggagtacaaatgcgccgccccttctaaggaagtggtgcttcaacatgttcgaaccgagcgaactccccagcgtctc

SEQ ID NO: 7748 - DNA, 1725 bp, Artificial Sequence
  derived and/or modified sequence
atgctgggtgtgctggtgctgggtgccttggccctcgcaggtcttggttttccggcccccgctgaaccccagcccggaggatctcagtgtgtcgaacacgactgctttgctttgtaccccgggccggccacgtttctaaacgcttctcaaatttgtgacggattgagggggcacctgatgacagtgcggtcatcggtggcagccgacgttataagtttactcctgaacggggatggtggcgtgggacgcaggagattgtggattgggttgcagcttccccctggctgtggcgaccccaagcggcttgggcctctccggggattccagtgggtcacaggggacaataacacttcatacagccgctgggctcgactggatcttaacggagcaccactgtgcgggccactctgcgtcgcagtgtctgctgccgaggctacagtgccgagtgagccaatctgggaagagcagcagtgtgaggtgaaagccgacggcttcctatgtgaatttcacttcccagctacatgtagaccacttgctgtggagcccggagccgcagcggcagccgtgtcaataacctacggtacacccttcgccgcaagaggcgccgattttcaggcgctgcccgtggggtccagcgccgccgttgctccgttaggcttgcagctcatgtgtacagcccccccgggcgctgttcagggtcattgggctcgagaagcacctggagcatgggactgcagtgtggaaaatggaggatgtgagcacgcttgcaatgcaatccctggggctccccgatgccagtgtccggccggcgccgcattgcaagcggatggaaggtcatgtactgcttccgcgacacagagctgcaatgatctctgcgagcatttctgcgtgccaaatcctgaccagccgggcagttattcttgtatgtgtgagaccggctaccgcctggctgcagatcagcaccgatgcgaggacgtggacgactgtatcttagaaccgtccccatgtccccagaggtgtgtcaacacacaaggagggttcgagtgtcattgttatccaaactacgacctggttgacggcgaatgtgtagagccggtagacccttgttttcgagctaactgtgaatatcagtgtcagccgttgaatcagacaagctatctctgcgtttgtgcagaaggcttcgcccccattccccacgaaccacaccgatgtcagatgttctgtaatcagactgcttgcccagccgactgtgatccaaacactcaagcctcctgtgaatgccccgagggctatatcctggacgacggattcatttgcaccgatatcgacgaatgcgagaatggcggtttttgctcgggggtgtgccacaatctgccagggacatttgagtgtatctgcggcccagattcagccctagcccggcacatcggcacagactgtgacagcggtaaggtcgacggaggggactccgggtccggtgagccgccgccatctcctactccaggatctacgcttacacccccagccgttggattagtgcacagcgggctgctgataggtatttccattgccagcttatgcctcgttgtggctctgctagcactcctgtgtcacctccggaagaagcaaggtgcggcccgcgctaaaatggagtataaatgcgccgctccgagtaaggaggtggtgctgcagcacgtgcggacagaacgaacgccacagaggttg

SEQ ID NO: 7749 - DNA, 1725 bp, Artificial Sequence
  derived and/or modified sequence
atgttgggtgtgctcgtcctcggcgcgttggccctcgcgggactggggtttccagcaccggccgagccgcagccgggtggatcccagtgtgtcgagcatgactgcttcgcgctgtaccccggaccggccactttcttgaacgcctcacagatttgcgatgggctgaggggacatctcatgaccgtgagaagctcagtggcggccgacgtgatctccctcctgctcaacggagacggaggcgtgggaaggcgcagactctggatcgggcttcaactgccacctggatgtggcgatcctaagcgcctgggaccactccgtggatttcagtgggtcactggggataacaatacctcctattcgcgctgggccaggcttgacctcaatggggcccccctgtgcggaccactttgcgtcgctgtctcggctgccgaagccaccgtgccatcggagccgatttgggaagaacaacagtgcgaagtgaaagcggacggattcctgtgcgaattccattttccggcgacctgccggccgttggccgtggaacctggagccgccgccgcggccgtctctatcacctacggcacgccgttcgcggctagaggcgctgatttccaggccctgcctgtgggatcctccgctgctgtggcgccgctcggactccaactgatgtgcaccgcccctcctggcgccgtgcagggccactgggcaagagaggccccaggagcatgggactgctcagttgagaacggaggctgcgaacacgcttgcaatgcaatcccaggggcgccgcggtgccagtgtccggcgggtgctgccctgcaagccgacggacgctcttgtaccgcaagcgccacccagagctgcaacgatctgtgcgaacatttctgcgtgccaaacccagaccagccgggatcctactcgtgcatgtgtgaaactggataccgcctcgctgccgatcagcaccgctgtgaggatgtggacgactgcatccttgagccttcgccgtgtccgcagagatgtgtgaatacccaagggggatttgagtgtcactgctacccaaactacgatctggtggatggcgagtgcgtggaaccggtggacccatgcttccgggccaactgtgagtaccaatgccagccgctgaaccagacgtcgtacctgtgcgtctgcgccgaaggattcgcgccgatacctcatgaaccccatcggtgccaaatgttctgcaaccagactgcatgtcccgctgactgtgaccccaacactcaagcgagctgcgagtgtccagaaggatacatcctggacgatggcttcatctgcaccgacatcgacgaatgcgaaaatggaggtttttgctcgggcgtgtgccacaatctgccagggactttcgagtgtatctgcggaccggactcggcacttgcacggcacatcggcactgactgcgatagtggaaaggtggacggtggtgattcaggaagcggtgagccccctccttcaccgactccgggcagcactctgacgcccccggcagtaggcctggtccactccgggcttctgatcggtatctccattgctagcctgtgcttggtggtcgcactgctcgcactcctgtgccacctgcgaaagaagcaaggagcggcacgggccaaaatggagtacaagtgcgcagcgccgtcaaaggaagtcgtgctgcaacacgttcggaccgaacgcactccacagcgcctg

SEQ ID NO: 7750 - DNA, 1725 bp, Artificial Sequence
  derived and/or modified sequence
atgttaggagttttagttttaggagctttagctttagcaggattaggattcccagcaccagcagagccacaaccaggagggtctcaatgtgtcgaacatgattgttttgcactatatccaggtccagctacatttttaaatgcttcacaaatttgtgatggtttgagaggacatttgatgacagttagatcttcggtagctgcagatgttataagtttattgcttaatggtgacggtggagtaggacgaagaagactatggattgggttacaattaccacctggatgtggagatccaaagagacttggaccattaagaggatttcaatgggttacaggtgataataatacttcatattctcgatgggctagattagatcttaatggtgcaccactttgtggtccactatgtgttgcagtttcagctgctgaagctacagttccatcagaaccaatttgggaagaacaacaatgtgaagttaaagcagatggatttttatgtgaatttcattttcctgctacatgtagaccactagcagtagaaccaggtgcagcagctgccgcagtcagtattacatatggaacaccatttgcagcaagaggagctgatttccaagcattaccagttggatcctctgctgcagtagccccattagggttacaacttatgtgtacagctccaccaggagcagttcaaggacattgggcaagagaagcacctggagcatgggattgttctgtagaaaatggaggatgtgagcatgcatgtaatgctattcctggagcaccaagatgtcaatgtcctgctggtgcagcattacaagctgatggtagatcttgtacagcaagtgctactcaatcttgtaatgatctttgcgaacatttctgtgtgccaaatccagatcaaccaggaagttatagttgtatgtgtgaaactggatatcgtttagcagcagaccaacatagatgtgaagatgttgatgattgtatcttagaaccatcaccatgtccacaaagatgtgtaaatacacaaggaggatttgaatgtcattgttatccaaattatgatttagtagatggagaatgtgttgaaccagttgatccatgttttagagcaaattgtgaatatcaatgtcaaccactaaatcaaacatcatatctttgtgtttgcgctgaaggatttgcacctataccacatgaaccacacagatgtcaaatgttctgtaaccaaaccgcatgtccagctgattgtgatccaaatactcaagcatcttgtgaatgtccagaaggatatattttagatgatggatttatatgtactgatattgatgaatgtgaaaatggaggattttgttctggtgtttgtcataatttgccaggaacattcgaatgcatatgtggtccagacagtgctttagccagacatattggaactgattgtgattctggaaaagttgatggaggagattcagggtctggagaacctccaccatcaccaactccaggatcaacattaactcctccagctgtaggtttagtacatagtggattacttattggaatttctatagcaagtttatgtcttgtagtggcattgttagctcttttatgtcatttacgtaaaaagcaaggagcagctagagcaaaaatggaatataaatgtgcagctccatcaaaagaagtagttttacagcatgttagaacagagagaactccacaaagactt

SEQ ID NO: 7751 - DNA, 1725 bp, Artificial Sequence
  derived and/or modified sequence
atgcttggggtgctggtgttgggcgccctggcactcgccggactgggattcccagcccccgcagagccacaacctgggggaagccagtgtgtggaacacgactgtttcgcactgtaccccggtcccgcaaccttcctcaatgctagccaaatctgtgatggacttcgcggacatcttatgaccgtgcggtcatcggtggccgctgatgtgatttcgctcctgctgaatggagatggaggggtgggtagacgcagactgtggatcgggctgcaacttcctccaggatgtggagatcccaaaaggctgggcccgctgagaggttttcaatgggttaccggagacaacaatacttcgtactcaaggtgggcccggcttgatctgaatggagcacctctgtgtggacccctctgtgttgcagtgagcgcagcggaggccaccgtgccatctgagcccatatgggaagagcagcagtgtgaggtcaaggccgatggattcctctgtgaatttcattttccagcgacctgtcgcccgcttgcggtggagccgggagcagccgcagccgcagtgtcgattacctacggaaccccttttgcggcacgaggtgcagattttcaggcattgcctgtgggatcgagcgccgcggtcgcaccacttggtttgcaactcatgtgtaccgcccctcctggagcggtgcaagggcattgggcaagagaagcacccggggcatgggattgctccgtggaaaatgggggctgtgaacatgcgtgtaatgcaatccctggggcgcctcgctgccaatgtccagcgggagcagcactgcaagcagacggacgttcatgtacggcatccgcaactcagtcttgtaacgatctttgcgaacatttttgtgtgccaaaccctgatcagcctggatcctactcgtgtatgtgtgagactggatacagactcgctgcagatcagcatagatgcgaagatgttgatgactgtattctggaaccttctccatgtccgcaacggtgtgtgaacacccaaggaggctttgagtgtcactgttacccaaactatgatctcgtcgacggtgaatgcgtggagccagtcgatccctgttttagagcaaactgtgagtatcaatgccagccactgaaccaaacctcctacttgtgtgtctgtgccgaaggattcgcaccgattccgcacgagcctcaccgatgccagatgttctgcaaccaaaccgcatgcccagcagattgtgaccccaatacccaagcatcctgcgaatgtcctgaagggtacattttggatgatggtttcatttgcacggatatcgatgagtgcgaaaatgggggattttgctcaggagtgtgtcataatctgccaggaacctttgaatgtatttgtggtcccgacagcgcacttgcccgtcatattggcaccgactgtgactccggcaaggttgacggcggtgattcgggctccggagagcctccaccatcacctactcctggatcgactctgacccctcctgcggtgggtcttgtgcattccggacttcttatcggaatctcaattgcatcgctgtgcctcgtggtggcactgctggcactcctttgtcatctgcgaaagaagcagggagcagccagagccaagatggagtacaagtgtgcagcaccttccaaggaagtggtgctgcaacacgtgcgcactgagcggaccccacaaaggctg

SEQ ID NO: 7752 - DNA, 1725 bp, Artificial Sequence
  derived and/or modified sequence
atgctcggagtgctcgtgttgggagcactcgcactggccggactcggtttccctgcgccagccgagcctcagccaggaggctcacagtgcgtggaacacgactgttttgccctgtatccaggacccgcgaccttcttgaatgcatctcagatctgtgatggcctgcggggccacctgatgactgtccgatcttcggtggcggccgatgtcatctcgctgctgttgaatggcgacggaggggtgggaaggcgccggctctggatcggcttgcaactgccgccggggtgcggagatcccaagagattgggcccgctgagaggtttccaatgggtgactggagataacaacacctcgtactcccgatgggctcgcctggacctgaacggggctccgctttgcggacctctgtgcgtggcagtctcggccgccgaggctaccgtgccgagcgagccgatctgggaagaacagcagtgtgaagtaaaggccgacgggttcctttgtgagtttcacttccctgccacctgcaggccgctggccgtggaaccaggagcagccgccgccgcggtgagcatcacgtacggaaccccgtttgctgctagaggtgctgacttccaagcactgccggtaggatccagcgcagcagtcgccccgctgggactgcaactcatgtgcaccgcaccacctggggcggttcaaggtcactgggcccgggaggctccgggcgcatgggattgctctgtggagaacggcggatgcgagcatgcatgtaatgcgattcccggagccccgcgctgccaatgccctgcgggggcggctcttcaggccgacggccggagttgcaccgcgtccgccactcagtcctgcaacgacctgtgtgaacacttctgcgtaccaaacccggatcagcccggctcatactcatgcatgtgcgaaaccggttatcggctggcagctgatcagcaccgctgtgaggacgtggacgactgcatactcgaaccttctccgtgcccccagagatgtgtcaatactcagggaggattcgaatgccattgttaccctaactacgacctggttgacggcgaatgcgtcgaaccggtggatccctgtttccgcgccaattgtgagtaccagtgccagccactgaaccaaacgtcctacctgtgcgtgtgcgcggaaggcttcgctccgatcccgcatgagccacaccgctgccagatgttttgcaaccaaactgcttgccctgcagactgcgatcccaacactcaggcctcctgcgagtgcccggagggttacattctcgacgatggattcatctgcactgatatcgacgaatgcgaaaatgggggattttgctcaggagtgtgtcataacctgccgggtaccttcgaatgcatttgcggtccagactcggcgctcgcacggcatatcggcactgactgtgactcgggcaaagtcgatggaggagattcgggatccggggagcccccacccagcccaaccccaggatccactctcaccccgccagcggtgggcctggtccactcggggctgctcatcggcatctcaatcgcgtcgctgtgcttggtggtggcgctgcttgctcttctctgtcatctcagaaagaaacaaggagcagccagggctaagatggagtacaagtgcgcagctccatcaaaggaagttgtccttcagcacgtgcggacggagcgcactccccaacgcctt

SEQ ID NO: 7753 - DNA, 1725 bp, Artificial Sequence
  derived and/or modified sequence
atgcttggcgtgctggtcttgggggcactcgctctggcaggcctgggctttccagcacccgccgagcctcaacctggcggttcccaatgtgtggagcatgactgttttgctttgtaccctggaccagcaaccttcttgaacgcatcccaaatctgcgatggtctgcgggggcatcttatgacggtccgtagttctgttgcggcagatgtcatttcactgcttctcaatggggacggaggggtaggacgcaggcgcctttggataggacttcagctgcctccaggttgtggagatccaaagcggctcggcccactgaggggattccagtgggtgaccggtgataacaatacttcgtattcgcggtgggcacgcctcgatctgaacggagcaccactttgcggacctttgtgtgtcgcggtgtcggcagcagaagccactgtcccctcagaacctatttgggaggagcagcaatgcgaagtgaaggcagatggatttctttgtgagtttcacttccccgctacctgcagaccgctggcagtcgaacctggggcagcagccgccgcggtgtccataacttatgggactccttttgcggcaagaggcgcagactttcaggctctgccagtcggttcctccgcggcggttgcaccacttggtttgcagctcatgtgcaccgcgcctcccggtgcagtgcagggacactgggcaagggaagcgcccggtgcctgggattgctcggtggagaacggaggctgtgagcatgcatgcaacgcgattcctggggcccctagatgccagtgtccagccggtgcagcacttcaagccgatggccgcagctgtaccgcctcagcaacccagtcctgtaacgatctttgtgaacacttctgcgtacccaatcccgatcagccgggtagctactcgtgtatgtgtgaaaccggctacagactggcggcagaccaacaccggtgtgaagatgtcgacgattgtatactcgaacctagcccttgtccgcagcgttgcgtcaatactcaaggaggttttgaatgtcattgttaccctaactacgacctcgtcgacggagaatgtgtggaacccgtggatccatgttttcgggccaactgtgagtatcaatgtcaaccgctcaaccaaacctcgtacctgtgcgtgtgtgcggaaggattcgcccctattccacacgagccacacaggtgtcaaatgttttgtaaccagaccgcctgtccggccgattgtgatcctaatactcaggcctcgtgtgaatgtccggagggatacatccttgacgacggatttatctgcaccgatattgacgaatgtgaaaatggaggtttctgttccggagtgtgtcataaccttcctggcacctttgaatgtatttgcggacccgattcagctcttgcccggcatataggcactgattgtgattcagggaaagtggacggaggggattcaggaagcggtgaacctcctccttcacctactcctgggtcaaccctcacgcccccagcagtcgggctggtccacagcgggcttctcattggaatctctattgcatccctgtgtctggtggtcgcccttctcgccctcctgtgccatcttcgcaagaagcaaggcgctgcacgggcaaagatggaatacaagtgtgcagccccatccaaggaggtcgttcttcaacacgtcagaaccgagaggacgcctcaacggctg

SEQ ID NO: 7754 - DNA, 1725 bp, Artificial Sequence
  derived and/or modified sequence
atgctaggcgtactcgtattgggggccctggcactcgctggactggggttccctgcacctgcagaacctcagcctggtggatctcagtgcgtggaacatgactgctttgccttgtaccctggccctgctactttcctgaatgcctcccaaatctgcgacggtctgcgtggccacctgatgactgtgaggagcagcgtagccgctgatgtgattagtctgctcctcaatggagatggtggggttggccggagacgtctctggatcggcctgcagctgccccccggatgcggagatccaaaaagactggggccactgcgcggatttcagtgggtgactggcgacaataacacatcctacagcagatgggcaagactggacctgaacggcgcgccgctctgtggtcctctttgtgtggccgtttccgctgccgaggctacagtgccctcggagcccatttgggaggaacagcaatgcgaggttaaggccgacgggtttttatgcgagttccattttccggcaacttgccgacccctggccgtggagcccggcgctgcggcagcggcagtctctataacatacgggacgccttttgctgcccgaggtgccgacttccaagccttgcctgttggctcctctgccgctgtggcccccctgggcttgcagctgatgtgtaccgcgccgcccggcgcggtgcaaggacattgggccagagaggcgcctggggcctgggactgcagcgttgaaaatggaggctgcgaacacgcgtgcaatgccattcccggcgcaccacggtgccagtgtcccgccggcgccgccctccaggctgacggacgcagctgtaccgccagtgcgacacaatcttgcaatgatctctgcgaacatttctgcgtgcccaatcctgaccaacccggctcttacagttgtatgtgtgagaccggttatcggcttgctgccgaccagcaccgatgtgaagacgtggatgattgtatactcgagccatcaccatgcccccagagatgtgtgaacacgcaagggggtttcgagtgccattgttatcccaactacgacctggtagacggtgagtgcgtggaacctgtagatccctgttttagagccaattgtgaataccaatgtcagccactgaatcagacatcctacctatgtgtgtgtgcggaggggtttgcgccaattccacacgagcctcacaggtgccagatgttctgtaaccagactgcctgccccgcagattgtgacccaaatacacaggctagctgtgaatgcccagaaggatatattcttgacgacggctttatctgtacggacattgacgaatgcgaaaatggcggcttctgtagtggagtttgtcataacctgcccggcacttttgagtgcatctgcggacccgacagtgccctcgctcgccatattggtacggactgtgattctgggaaagtagatgggggcgactccggatcaggcgaacctccaccttcccccactccagggtcgacactgaccccacccgcagtgggcctggtccacagtggtctcctgataggcatttctatagcgtctttatgcttggttgtcgcactgctcgctctgctgtgccacttaaggaagaaacagggcgccgcccgggcgaagatggagtacaagtgcgccgcccccagtaaagaggtcgttctgcagcatgtcaggaccgaacgcactcctcagcgcctt

SEQ ID NO: 7755 - DNA, 1725 bp, Artificial Sequence
  derived and/or modified sequence
atgcttggcgtccttgttttgggcgccctcgcactggctggactgggctttcctgctcccgcagagcctcagccaggcggctcccagtgtgtggagcacgactgcttcgcactctatccaggacccgcaacttttctgaatgcgagtcagatatgtgacggccttcgggggcatctcatgactgttaggtccagcgtcgcagctgacgtcataagcctgcttcttaacggcgacgggggagtgggccggcgtcgcttatggattgggctgcagcttccaccagggtgtggcgaccccaagaggctgggacctctgcggggcttccagtgggttaccggagacaataacacttcatacagcaggtgggctcgcctggatttgaacggagccccgctgtgcgggcctctctgtgtggcggtgagtgccgccgaagcaacagttccctctgagcccatatgggaagagcaacagtgcgaagtgaaagccgacggctttctgtgtgaattccacttccccgctacttgccgccccctcgcggtagagcctggggccgccgccgccgcagtaagcataacatacggaacgccgtttgcagcccgaggcgctgatttccaggcattaccggtcggatcctcagccgcggtggctccactgggccttcagctaatgtgcacagctcctcctggggctgtgcagggtcactgggcccgagaagcgcctggggcctgggactgctccgtcgagaatggcggctgcgaacatgcctgcaatgcaatccctggcgcgccgcggtgtcagtgtcccgccggtgctgctctgcaggcagatggccggagctgtactgcgtccgcgactcagtcgtgcaatgatctgtgtgaacatttctgcgtgcctaatccagatcagcctggctcctactcctgtatgtgcgagacaggttacagattggcagcggatcagcatcgctgtgaagatgtggacgactgcatcctggagcctagcccctgtccccaacggtgcgtcaatacgcaggggggcttcgagtgccactgctaccccaactacgacctagtggacggcgagtgtgtggagccggtggatccttgcttccgcgctaactgtgagtaccagtgtcaaccactcaatcagacctcttatctgtgtgtttgtgctgagggctttgcgccgataccgcacgaaccccaccgttgtcagatgttttgcaatcaaacggcatgccccgccgactgcgaccccaacacccaagcatcctgcgagtgtcctgaaggctacatcctcgacgatggattcatctgtactgacatagacgaatgcgagaatggtggcttttgctcaggcgtttgccataacctccctggcacgttcgagtgcatctgcggaccagattcagctctcgcccggcacattgggacagactgcgatagtggaaaggtggatgggggtgactctggaagcggtgagccgcccccatcccctacccccggctccacactgactcctccggccgtggggctggtccactccggccttctgatcggcatctcaattgcgtctctgtgtcttgtggttgccctcctcgcgctgctgtgtcacttgcggaaaaagcagggagcggctcgagctaagatggagtacaaatgtgctgctccctctaaagaggtcgtccttcagcatgtgaggaccgagaggaccccacagcgtctg

SEQ ID NO: 7756 - DNA, 1725 bp, Artificial Sequence
  derived and/or modified sequence
atgctgggggttctcgtcctgggggcattagccctggcaggcctgggctttcccgccccggccgaaccccaacctgggggctcccaatgtgtggagcatgactgtttcgcactataccccggaccagcgaccttcctaaatgcctcacagatttgcgacggcttgagaggccatcttatgactgtgaggagttctgttgcggctgacgttatcagtttgctgcttaatggggatggcggagttggacggcggcggctgtggattggactccagctgccccccggctgcggtgaccctaagaggcttggacccctgaggggttttcagtgggtgacaggggacaacaacacaagttactcccgatgggcgcgtttggatctaaacggggcaccactatgcggccccctgtgtgtggctgtgagcgctgccgaagcaactgtgccatctgagcctatttgggaggaacagcagtgcgaagtgaaggccgacggttttctatgtgagtttcacttccctgctacatgtcgccctctggcagttgagcccggtgccgccgccgctgcagttagcattacttacgggaccccctttgcggctaggggagcagattttcaggccctgccagtgggttcatctgccgctgtggcccccctgggtctgcagctaatgtgtactgcgccaccaggggccgtgcaaggccattgggcccgggaggcgcctggagcgtgggactgttctgtggaaaacggcggatgtgagcacgcatgcaacgcaattccaggggccccaagatgtcagtgtccagccggagctgctttacaagccgatggaagaagctgcactgcgagcgctacccagtcatgtaatgacctctgtgaacatttctgcgtgccaaaccccgatcagcccggttcttacagctgcatgtgcgagactggatatcgtcttgccgcagaccagcatcgctgtgaagacgttgatgactgtatcctggaacccagcccatgccctcagagatgtgtcaacacacaaggcggttttgagtgtcattgctacccaaactatgaccttgtggacggcgagtgtgtggagccagtagatccttgcttcagagccaactgcgagtaccagtgtcagcccctcaaccaaacgtcatacctgtgtgtctgcgctgagggatttgcccccattccacacgagccccaccgctgccagatgttttgcaatcaaaccgcatgcccagctgactgcgatcctaatacacaggcctcatgcgaatgtcccgaaggctatattctcgacgatgggtttatctgtaccgacatcgacgagtgcgaaaatggcggcttctgctcgggagtgtgccacaacctccctggaacgtttgagtgcatttgtggccccgattccgccctggcgagacacattggtactgattgcgacagtggaaaggtggacgggggcgatagtgggagtggggagccaccacccagcccaactccagggagtacgctgacacccccagctgtgggcctggtccactcaggtttgctgataggaatctctatagcatcactatgccttgttgtggcattactcgccctgctgtgccatctgagaaagaaacagggcgccgcccgcgcaaagatggagtataagtgtgctgctccaagcaaggaagtcgttctgcagcacgtccggactgagcgcacaccacagcgcctc

SEQ ID NO: 7757 - DNA, 1725 bp, Artificial Sequence
  derived and/or modified sequence
atgcttggagtccttgtcctcggcgcactggcccttgcaggcctgggattcccagccccggccgaaccgcaaccaggaggctcacaatgtgtcgagcacgattgttttgcgctctacccaggtcctgccacctttctcaatgcttcacagatttgtgatggacttaggggacatctcatgactgtgcgttcgtcggtggctgcagacgtgatttcccttctgctgaacggtgatggtggggtgggtcgacggcgcctgtggatcggccttcaactgcctcccgggtgtggcgatcctaagcgcctgggaccattgcgaggttttcaatgggtgactggagacaataacacgtcctattcgcgttgggcacggctggacctgaacggagccccgctctgtggccccctgtgcgtggcagtgtcagccgccgaagccactgttcctagcgagcccatctgggaagagcaacaatgtgaagtcaaagctgacggtttcctgtgtgaatttcactttcctgccacctgtcgaccactggccgttgaacccggtgccgccgcagccgcagtcagcataacttacggtacgccctttgcagcacgtggagccgatttccaggcacttccagtgggtagcagcgcagcggtcgcacctttgggactgcaactgatgtgtaccgcaccacccggagcagtgcaggggcattgggcacgtgaagcaccaggtgcctgggattgcagcgtcgaaaacggtggatgtgagcatgcctgcaacgcgattcctggagcaccaagatgtcagtgtcctgctggggcagccctgcaagccgatggaaggtcttgtactgcatccgccactcagtcgtgtaacgatctttgtgagcacttttgtgtacctaaccccgatcaaccaggaagctacagctgcatgtgtgaaactggataccgtctggccgcagatcagcatagatgtgaagatgtggatgattgtattcttgagccctccccatgccctcaaaggtgtgtcaacacgcagggaggattcgaatgccactgttaccctaactacgacctggtggacggggaatgcgtggaaccagtggatccctgcttccgcgcgaactgcgaataccaatgccagccacttaaccaaacctcgtatttgtgtgtgtgcgcagaaggttttgcgcctattccacacgaaccccatcgctgtcaaatgttctgtaatcaaaccgcatgtcctgccgactgtgatcctaacacccaggcgtcgtgtgagtgtccagaaggttacattctggacgacggcttcatttgtactgatattgatgaatgtgaaaatggcggcttctgttccggagtctgtcataacctccccggtacttttgagtgtatttgcggacctgattccgcactggcacgccacattggaaccgattgtgattcaggcaaggtggatggaggtgattcgggtagcggtgaacctcctcctagcccaactcctggaagcacgctcactccacctgcagtgggactggtgcattccggacttctgattgggatttcaatcgcgtccctgtgtttggtggtggccctcttggcactgctctgccatctgcgcaagaagcaaggagccgcaagagcaaagatggagtacaaatgtgcagcaccgtccaaagaggtggtgctccagcatgtgcggactgagagaaccccccaacggctt

SEQ ID NO: 7758 - DNA, 1725 bp, Artificial Sequence
  derived and/or modified sequence
atgcttggtgttttggtcctgggggcattggccctcgccggcctggggtttcccgcgccggcggagccgcagccaggtggctcgcagtgtgtcgaacacgactgctttgcgctctacccgggcccagcgactttcctgaacgcatcacaaatctgcgatggtctgcgcggccacctgatgaccgtgcgctcatctgtcgcagctgacgtgatctcactgctgctgaacggcgacggcggcgtggggcgtcgcagactgtggattggtctgcaactcccaccgggctgtggcgaccctaagagattggggcccctgcgcgggttccagtgggtgaccggcgacaacaacacttcgtatagccgatgggccagactggacttgaacggagcaccgctctgcggccctctgtgcgtggccgtgtcagcggcggaagcaactgtcccatccgaaccgatttgggaagagcagcaatgcgaagtgaaggccgacggattcctgtgcgagtttcatttccccgcgacctgccggccactcgctgtggagccgggtgctgctgccgcagcagtgtctatcacttacggaaccccctttgccgcgcggggggccgacttccaagcgctgcccgtggggtcatccgccgccgtggccccactgggactgcagctcatgtgcactgctccaccgggagctgtgcagggtcactgggcccgagaggcacctggagcttgggattgctcagtcgagaatggtggctgtgagcatgcgtgtaatgccatcccgggagccccacgctgccagtgccctgcaggagctgccctccaagccgatggccgctcgtgcacggcttcggctacccagtcctgtaatgatctgtgcgaacatttctgcgtcccaaacccggaccagccagggtcgtacagctgcatgtgcgaaaccggataccgcctcgctgccgatcagcacagatgtgaagatgtggatgattgcatcttggagccaagtccatgcccgcagcggtgcgtgaacactcagggagggttcgaatgccattgctaccccaactacgaccttgtggacggagaatgtgtggagccggtggacccgtgcttcagagctaactgcgaataccagtgtcaaccactgaatcagacctcctacctctgcgtctgtgcagagggatttgcaccgatcccccacgaaccacacagatgccagatgttctgcaatcagacggcatgcccggctgattgtgatccaaatacccaagcctcctgcgaatgcccggaagggtacatcctggacgacggatttatctgtaccgacatcgacgagtgcgagaacgggggtttttgttccggggtttgccataacctccccggcactttcgagtgtatttgcggaccggattcagcactggcacggcatatcggtactgactgcgattctggaaaggtggacggaggagatagcggatcgggagaaccacccccgtcccctacgccggggtcgaccctgactccgcctgcggttggactggtccactcgggactgctcatcggaatcagcattgcgagcctgtgcctggtcgtggccctgctcgcactgctctgtcacctgcgcaaaaaacagggtgcggcccgcgcgaaaatggagtacaagtgcgccgcaccatcgaaagaggttgttctccaacatgtgcgcaccgaaagaaccccacaacgattg

SEQ ID NO: 7759 - DNA, 1725 bp, Artificial Sequence
  derived and/or modified sequence
atgctcggagttttagtcctgggagccctggcccttgccggattgggatttcccgcaccagccgaaccacaacccggggggagtcagtgtgtcgagcacgattgctttgctctctaccctggaccagcaacgttcctgaacgcttctcagatctgcgatgggctgagggggcatctcatgactgtccgctcatccgttgccgccgatgtgatctcgctgttacttaacggagacgggggggtcggaaggaggaggctatggatcggattgcagctgcccccagggtgcggggatcccaaaagactggggcccctgagagggtttcagtgggttactggagataacaacacttcttacagtcgctgggcaaggcttgatctcaatggggcacccctatgcgggcccttatgcgtggctgtgtctgccgcggaggcaacggttccaagtgagcctatttgggaagaacaacagtgcgaagttaaagccgatggattcctttgtgagttccacttccccgctacatgtagacccctggctgtcgagcccggggccgctgcagctgctgtttccataacgtacgggacaccttttgctgccagaggggcagactttcaggcactgcccgttggatcatcagcggcggttgctcccctagggctccagcttatgtgtactgcaccaccaggggccgtccaggggcactgggctcgggaggctcccggagcttgggactgttctgtggagaacggaggatgcgaacacgcctgcaatgcgatcccaggggctccacgctgtcagtgtcctgctggagccgcccttcaggcagatgggcggtcatgtacagcctcagccacacagtcatgtaatgacctctgtgaacatttctgtgtacccaacccagatcagcctgggagttattcttgtatgtgtgagacagggtatcgacttgctgcagatcagcaccgctgtgaggatgtcgatgattgtatcttagaaccatctccttgtccccagcgctgcgttaatactcagggggggtttgagtgtcactgctaccccaactatgatctggtggatggggaatgcgtagaacccgttgatccctgtttcagggccaactgtgaatatcagtgccagccactgaaccagacatcttatctctgcgtgtgtgctgaaggattcgcacctatcccccatgaacctcatagatgtcagatgttctgcaaccaaacagcctgcccagcagattgtgatcctaatacacaagcaagttgtgaatgcccagaaggatatatactggatgacgggtttatttgtacagatatagacgaatgcgaaaacggggggttctgcagtggagtctgtcacaatcttcccgggacatttgaatgcatatgcggacctgactctgctctcgccagacacataggaacagattgtgattcggggaaagtggatgggggagattctggatctggagaacctccccccagtcctactcctgggtccacactgactccacccgccgtggggcttgttcactcgggacttctcataggaatatcaatcgctagtctctgtctggtggtagccctattggccttactgtgccacctcagaaaaaagcagggggccgctcgcgcaaagatggaatataaatgcgcagcaccctccaaggaagtggtcctccagcatgtgaggacagagcggacaccacaacggcta

SEQ ID NO: 7760 - DNA, 1725 bp, Artificial Sequence
  derived and/or modified sequence
atgctcggcgtcctggttctgggagccttggctcttgctggattaggctttcccgctcctgcagagcctcagccaggcggctcccaatgcgtcgagcatgactgctttgctctgtacccgggccctgctaccttcctgaacgcttcacaaatctgcgatggtcttagggggcatttgatgacagtgaggtcttcggttgctgcagatgtaatttctctgctgctgaacggagacggaggagtgggcagaaggaggctgtggatcggtctccaactcccacccgggtgtggagaccccaaacgcttagggcccctccgaggcttccaatgggtgacaggcgacaataataccagctatagtagatgggccaggctcgacctcaatggcgcccccctctgcggaccgctgtgcgtagcggtatcagcagctgaagcaaccgttcctagcgagccaatttgggaggaacagcaatgcgaagtgaaagctgatggcttcctgtgtgagttccactttccagctacgtgcaggccactcgcagtcgagccgggcgcggccgccgctgccgtctctattacctacggaacaccattcgccgcgcggggagcagacttccaggctttgccggttggaagttctgctgcagtggcacccctgggattacagcttatgtgtaccgcccctcctggggctgtccagggccactgggctcgcgaggctcccggcgcttgggattgcagcgtggagaatgggggctgtgagcacgcgtgcaacgccatccctggcgcacccaggtgtcagtgccctgcgggcgctgccctgcaagccgatggaaggtcttgcactgctagcgctacccaaagctgtaacgacctttgcgaacacttctgcgtccccaatccagaccaacccggaagctacagctgcatgtgcgaaacaggctaccggcttgctgccgaccagcacagatgcgaagatgtagatgattgcattctggagccttctccttgcccacaaagatgtgtgaacacccagggagggtttgaatgccattgctatccgaactacgatcttgtggacggtgagtgtgttgagccggttgatccatgctttcgagccaactgtgaataccaatgtcagcccttgaaccagacctcctatctgtgcgtctgcgccgagggattcgcgcccatccctcacgagccgcaccgctgccaaatgttttgtaaccagacagcttgtccagctgattgcgacccaaatacccaagccagctgcgaatgccccgagggctatatcctggacgatggttttatttgtacagatatcgacgagtgtgaaaacgggggcttctgctccggtgtgtgtcacaaccttcccggcacattcgaatgcatttgtggtccggactcagcgctggctaggcacatcggcacagactgtgattctggcaaagtcgacgggggcgactccgggtcaggggaaccacctccatcgcccaccccagggtcaacccttactccccctgcggtcggtttggtgcatagcggcctgttaattggtatcagcattgccagtctttgcttagttgtcgccctgctagcccttctttgccatcttcggaagaaacaaggcgccgccagggcaaaaatggaatataaatgcgccgccccctctaaagaggtagtgctacaacacgtccgcaccgagagaaccccccagaggttg

SEQ ID NO: 7761 - DNA, 1725 bp, Artificial Sequence
  derived and/or modified sequence
atgctgggagtcctggttctgggagctttggctcttgccggtcttggatttcccgcgcctgccgagcctcagcctggtggaagtcagtgcgtagagcatgactgttttgctctctatccgggtcctgcgacgttcctgaacgcctcccaaatctgcgatggcctgagggggcacctgatgacagtgaggagttcggttgccgccgacgtcattagtctcctgctcaatggagatggcggagtcgggcggcgccgcctgtggataggattgcagctcccccctggctgtggagaccccaagaggctggggcccttaagaggcttccaatgggttacaggcgataataatacttcctatagccgctgggccaggctggacctgaatggggcccctttgtgcggaccattatgcgtcgccgtgtccgccgcagaagctactgtcccatctgaacctatctgggaggagcagcaatgtgaggtgaaggccgatggatttctgtgcgagtttcactttccggccacttgtaggccactggccgtcgagccaggagcagcagctgcggctgtgagcattacatatggcactcccttcgccgccagaggcgctgacttccaggcattgccagttgggtccagtgccgcagttgcccctctgggtctccaactcatgtgcactgcaccacccggcgccgtccagggacattgggccagggaagccccaggagcatgggattgctccgtggagaacggcgggtgtgaacatgcctgtaatgctatcccgggcgctccgcggtgccagtgccccgctggtgctgcactccaggccgacggtcgctcctgcacagcaagcgccacacagtcttgcaacgatttgtgcgaacatttttgtgtgccaaaccctgaccagcccgggagctactcctgcatgtgcgaaactgggtatcgactggctgcggaccaacaccgttgcgaggacgttgatgactgtatcctcgaaccttcaccatgtccgcagcgctgcgtcaatactcaaggaggctttgagtgtcactgttatccaaattatgatctggtcgacggcgaatgtgtagagccagttgatccctgttttagagctaactgcgagtaccagtgccagccccttaaccaaaccagttacctatgtgtgtgcgcagaagggtttgctcctattccacatgaaccacataggtgtcagatgttctgcaaccaaacagcctgtcccgcggactgtgatccaaatacgcaggcctcttgcgagtgccccgaaggttacatccttgatgacggttttatttgtactgacatagacgaatgtgaaaatggaggcttctgttccggcgtgtgccataatctcccaggaacatttgagtgcatttgtggcccagacagtgccttggctaggcatatcggaaccgattgcgactctggaaaggtcgatggcggggacagtggatctggtgaaccaccgccaagccctacacctggctccactcttacgccccccgccgtcggcctcgtgcatagcggacttttgatcggcatcagcatagccagtctgtgcctggtggttgccttgctggcactcctgtgtcatctgaggaaaaagcagggggcagcacgggctaagatggaatacaagtgcgccgccccatctaaagaggtggttctacagcacgtaagaactgaaaggacgccccagcgtctg

SEQ ID NO: 7762 - DNA, 1725 bp, Artificial Sequence
  derived and/or modified sequence
atgttgggagtcctggtgcttggagcacttgctcttgcaggacttgggtttccagcaccagctgagcctcaaccgggaggctcacagtgcgttgaacatgattgttttgctctttacccgggacctgctacttttcttaatgccagccagatatgcgatggacttcgtggtcatctaatgactgtaagaagctctgtggctgctgatgtgatctcactccttcttaacggcgatggtggcgtagggcgacgacgtctctggattggtctgcagttacccccaggatgcggagatccaaaacgacttggaccactacgtgggttccaatgggtaaccggagataataacacgtcgtacagtcggtgggctagactggatcttaacggcgcgccgctgtgcggtccactatgcgtcgcagtttcggccgctgaggctaccgtgccctcagaacctatttgggaagagcaacaatgcgaagttaaagctgatggtttcctatgtgaatttcatttcccggcaacatgtcgaccgttagcggtggaaccaggagctgccgctgcagctgtgtcaatcacttacggcacaccattcgctgctcgaggcgcagattttcaggcgcttcctgttggttcgtcagccgcagttgcgccgttgggactacagctcatgtgtactgccccaccaggtgctgtgcaagggcactgggccagagaagcccctggagcatgggactgttccgtggagaatggtggatgcgaacatgcttgcaacgccatacctggcgccccaaggtgccaatgtccggctggtgccgcgctacaagcggatggacgatcttgtacagcttcagctactcaaagctgtaacgacctatgtgaacacttctgtgtgcctaatccagatcaaccgggcagctattcctgtatgtgtgagactggataccggttagccgcagatcaacatcgttgtgaagatgttgacgattgtattttagaaccgtcaccatgcccacaaagatgtgtaaatacccaagggggattcgaatgccattgctatcctaattatgatcttgttgatggtgaatgtgtagagcctgtcgatccatgctttagagccaactgtgaatatcaatgccaacccctaaatcaaacttcatatctctgcgtatgtgctgaaggatttgcaccaattcctcacgaaccgcatcgctgtcagatgttctgtaatcaaacggcgtgtccggctgattgcgatccgaatacacaagcctcctgtgaatgtcctgaggggtatatactcgacgacggttttatatgcacagatatcgacgagtgtgaaaatggaggattctgttcaggagtctgccataatctacctggtacttttgagtgcatttgcgggcccgactcggctttagctagacatattgggaccgattgtgactctggaaaagtcgatggtggcgattcaggttcaggggaaccgccgccatcgccgactcccggaagcacgcttactccaccagctgttggacttgtacatagtggccttttgattggaatttctattgcatcgctctgtctcgtggtggcactgctagctttgttgtgtcacttacgaaaaaaacaaggcgctgcacgagcaaaaatggaatataagtgtgcagcgccaagcaaagaagtcgtcctccaacatgtacgtactgaacgtacgccgcaacgtctt

SEQ ID NO: 7763 - DNA, 1725 bp, Artificial Sequence
  derived and/or modified sequence
atgttgggcgtcttagtgttgggtgccctagcactcgcgggactcgggttccctgctccggcggagcctcaacctggaggcagccaatgtgtcgagcacgattgctttgctctgtatcccggacccgccacatttctgaatgcatctcagatatgcgatggcttgcgtggacacttgatgacggtccgatcatctgtggcagccgacgtgatctccctcttgctcaacggtgacggaggagtggggcgccgcagactgtggatcggactccaactccctcctgggtgcggagaccctaaaaggttgggacctctgaggggatttcaatgggtgactggagataacaacacaagttatagcaggtgggcccggcttgaccttaatggcgctccgctctgcggccctctgtgcgtggccgtgagcgcggccgaggctaccgtcccgtccgaaccaatctgggaagaacagcagtgcgaggtcaaggcagatggatttctctgcgagtttcatttccctgctacttgtaggccactggccgtggaaccaggggcggccgctgctgcggtgagcattacctacggcacccctttcgccgcccggggagccgattttcaagctcttcctgttgggtcgtctgcggcggtggcaccattgggtctccagttgatgtgcaccgctccaccgggagcagtgcaagggcactgggcccgagaagcccctggggcttgggattgttccgtcgagaatggaggttgcgagcacgcctgtaacgccatccccggcgccccaagatgccagtgccctgctggcgccgccctgcaggcggacggtcgtagctgcacagcgtctgcaacccagtcctgtaatgatctgtgcgaacacttctgcgtccctaatccggaccagcctggaagttactcctgtatgtgtgagacgggatatcgactggccgctgatcagcatcgatgtgaagacgtggatgactgcatcttagaaccgtcaccatgccctcagaggtgcgtcaacacacaggggggcttcgagtgccactgttaccccaattacgacctggtagatggcgaatgcgtcgaaccggtagacccttgtttcagagcaaactgtgaataccagtgccagcccctcaaccagacgagctatctttgcgtatgcgctgaggggttcgcccccatcccacacgagcctcatcgatgtcaaatgttctgcaatcaaacagcctgccccgccgactgtgaccctaacactcaagcctcttgtgaatgtcctgagggctacatcttagacgacgggtttatttgtaccgatattgacgaatgtgagaacgggggattctgctcaggcgtctgtcacaatcttcccgggaccttcgagtgtatttgcggcccagacagcgccctggcccgccacatcggaactgactgcgactctggtaaagttgatggaggagattcaggatctggagaaccgccacccagcccaacgcctggttcaactctgactcctccagctgtcggcctggtgcacagcggcctgctgatcgggatttccatagcttccctatgtctggtcgtcgccctgctcgctctgctttgccatttgcgcaaaaagcagggagcggcacgtgctaaaatggaatataagtgtgccgccccatctaaggaggtcgttctgcagcacgtgcgcaccgagcggaccccccaacgactc

SEQ ID NO: 7764 - DNA, 1725 bp, Artificial Sequence
  derived and/or modified sequence
atgttgggcgtactggtgctgggtgccctcgccctggcgggcttgggattccccgcacccgccgagccccagcctggtggctcacagtgcgtggaacacgactgcttcgctctctacccaggcccagccacttttctgaatgcgtcgcagatctgtgatggccttagggggcatttgatgacggtgcgatcatcagtcgccgcagatgtgataagcctcctacttaacggggacggaggagtcgggaggcggcggttgtggattggccttcagcttccaccaggttgtggcgacccaaagaggttaggcccattgagaggattccagtgggtcaccggagataacaacactagttacagtcgatgggcaaggttggatctgaatggagctccattgtgcggcccactctgtgtggctgtgtctgctgcggaggccaccgttccctcagagcctatttgggaggaacagcagtgcgaggtgaaggccgatggcttcttatgtgagtttcacttccctgcgacgtgtagaccgctggctgttgaacccggggcagccgctgcggctgtatccattacttatggcacacctttcgcggcccggggagctgattttcaagcgcttccagtgggctcttccgccgctgtggcacccctcgggctgcagctcatgtgcaccgcaccccccggagccgtccaaggtcactgggcaagagaggctcctggagcctgggactgtagcgtggagaacggcggctgcgaacatgcgtgcaacgctatacctggcgcccctaggtgccagtgccccgcaggagctgccctccaggctgatggtcgaagctgcacggcaagtgccacacagagctgcaatgatttgtgcgaacacttctgtgtccccaacccagaccagccgggatcttattcatgcatgtgtgagactgggtaccgcctggcagctgatcagcatcggtgtgaggatgtggacgactgcattttggaacccagcccctgtcctcagcgctgtgtgaacacccagggcggctttgaatgccattgttatcctaattacgatctggtggatggagaatgtgtggagcccgtggacccttgtttccgggcaaattgcgagtatcaatgccagcctctgaaccaaacatcctacctttgcgtatgtgccgagggcttcgctcctatcccacatgagcctcaccgctgtcagatgttctgcaatcagactgcctgcccagccgattgcgaccccaatacccaagccagttgtgagtgcccggaaggttatatcctcgacgacggctttatctgtactgatatcgacgagtgtgaaaacggtggattctgctctggcgtgtgtcataatttgccgggcacctttgagtgtatttgcggccctgacagtgccctcgccagacatataggaactgattgcgactctgggaaggtggatggaggcgattcaggttcaggcgagcctcccccaagtcccacacccgggtcaacgctgaccccgcctgccgtggggctggtgcactcgggacttctgattgggatctcaatcgcctcattatgcttggtggtggctctcctcgcactgctctgtcacttgaggaagaagcagggggccgcgagggcaaaaatggaatacaaatgcgctgcgcccagcaaggaggtggtgttgcagcacgttcgcactgagcggacaccccagcgccta

SEQ ID NO: 7765 - DNA, 1725 bp, Artificial Sequence
  derived and/or modified sequence
atgctgggagtcctcgtccttggcgcactcgccctggcggggctggggtttccggccccggcggagccgcagcctggtggctcccagtgcgtggaacatgattgcttcgctttgtacccgggtccggccactttcctgaacgcgagccagatctgcgacggattgaggggccacctgatgactgtcagatcctcggttgcagcggacgtcatctcactcctgctgaacggtgacgggggagtcgggcggagacgcctctggatcgggctgcagctgccgcccggatgcggggaccccaaaaggctgggacctttgagaggctttcaatgggtgactggcgacaataacacctcgtacagcaggtgggcacggctcgacttgaacggcgcgccactgtgcgggccgttgtgcgtcgcagtctccgcggcggaggccaccgtcccgtcagaaccgatctgggaagaacagcagtgtgaagtgaaggccgacggatttctgtgcgaattccatttcccggctacgtgcagacctcttgctgtcgaaccaggggcagccgccgctgctgtcagcattacctacggcacccctttcgccgcccgcggagcggatttccaggccctgcctgtgggaagcagcgcagcagtcgcccctcttggcctgcaactcatgtgcacggccccgccgggcgcggtgcagggacactgggccagagaggcccccggggcctgggactgttcggtggaaaatggaggatgcgagcacgcctgcaacgcaatcccaggcgctcccagatgccagtgtccagccggcgcggcgctgcaggccgacggtcgctcttgcaccgcctcggccactcagtcatgtaacgacctctgtgagcatttttgtgttccaaacccggaccagcccgggagctactcgtgcatgtgcgaaaccggctaccgcctcgcagcggaccaacacaggtgtgaagatgtcgatgactgtatcctggagcccagcccatgccctcagcgttgtgtgaatacgcaaggtggattcgaatgccactgctaccctaactacgacctcgtggacggagaatgcgtggagccggtggacccatgcttccgcgcgaattgtgaataccagtgccaacctttgaaccagacttcttacctgtgtgtgtgcgctgaaggcttcgcgcctatccctcacgagccgcatcggtgccagatgttttgtaaccaaactgcctgcccagcggattgcgatcctaacacgcaagcatcctgcgagtgccccgagggatatatcttggacgatgggttcatctgcacggatatcgacgaatgcgaaaacggcggcttctgttcgggagtgtgccacaatctgccgggtaccttcgagtgtatctgcgggccagactcggcccttgcccgccacatcggtactgattgtgatagcggtaaggtcgatggcggcgactccggaagcggcgagcctccgccctccccgacgcccggatcgacgctcaccccgcccgcggtgggactggtgcattccggccttctgatcgggatatccattgcaagtctgtgcctggtggtcgcccttctcgccctgctgtgtcacctgcgcaaaaagcaaggagccgcccgcgcgaagatggaatacaagtgcgccgcgccatcgaaggaggtcgtgctgcagcatgtgagaaccgagcgcaccccgcaacgcctc

SEQ ID NO: 7766 - DNA, 1725 bp, Artificial Sequence
  derived and/or modified sequence
atgctgggtgtgctcgtgctgggtgcactcgctctggcaggtcttggcttccctgcccccgctgagccccagcccggtggatcccagtgtgtcgaacatgactgcttcgccctgtaccctggcccagcaacctttctcaatgcttctcagatctgtgatggtttgagaggccaccttatgaccgtgcgcagctccgtggccgctgacgtgatttctttgctcctcaatggtgacggcggtgttggccgtcgtaggctgtggataggtctccagctcccccccggttgcggcgaccccaagaggctgggtcccctgcgtggttttcagtgggtaaccggtgacaataatactagctattctaggtgggctcgcctggatctgaacggcgctcccctctgcggaccattgtgtgttgccgtcagcgccgcagaagccactgtgccttctgagcctatttgggaggaacaacaatgcgaagttaaagcagacggctttctgtgcgaattccacttcccagctacctgtcgtcctttggcagtcgagcctggtgccgctgctgctgcagtgtccataacatatggaactcctttcgccgcacgcggcgccgacttccaggcattgcccgtaggttcttccgcagcagtcgctcccctcggactgcagttgatgtgcaccgcccccccaggagccgtgcagggccattgggctcgtgaggctcccggagcctgggactgttcagtggagaacggcggctgcgagcacgcttgcaatgctatcccaggagctcctagatgtcagtgtcctgcaggtgctgccctccaggctgacggacgttcttgtaccgctagtgctactcaatcttgcaacgacctttgtgagcacttctgcgtacctaatccagatcagcctggctcctactcttgcatgtgcgaaaccggctaccgcctggccgccgaccagcaccgttgcgaagacgtcgatgactgtatcctggaacccagcccctgtccccagcgctgcgttaacactcaaggaggatttgaatgccactgttaccctaactatgacttggtggacggtgagtgcgtagagccagtggacccatgttttagagcaaactgcgagtaccagtgccagcctctgaaccagacttcttacttgtgtgtgtgcgctgaaggcttcgcacctataccacatgagccccacaggtgtcaaatgttctgcaaccagaccgcatgtccagcagactgtgaccctaacactcaagctagttgtgagtgtcccgagggatacatcctggatgacggcttcatctgtaccgacattgacgaatgtgagaacggtggtttctgttccggtgtgtgtcacaacctcccaggtacattcgagtgcatctgcggaccagactccgccctcgcccgtcatataggtactgattgcgatagcggcaaggtggatggtggtgatagcggaagtggtgagccaccacctagtcctacccctggttccactttgacaccccctgctgtcggtcttgtccactccggtctcttgatcggaatcagcatcgcttcattgtgtctggttgtggctctgttggccttgttgtgccacctccgcaagaaacagggcgcagcacgtgctaagatggagtacaagtgcgccgcacccagtaaagaggttgttctgcagcatgtcaggacagagagaactccacagcgtttg

SEQ ID NO: 7767 - DNA, 1725 bp, Artificial Sequence
  derived and/or modified sequence
atgttgggtgtccttgtattgggcgccttagctcttgcaggtcttggcttcccggcccctgcagagccccagccaggtggatcacagtgcgtagagcacgactgtttcgccctgtaccccggacctgctacatttctgaacgcgagccaaatctgcgacggcctgcgtggtcatcttatgactgtccggtcctcagtcgccgccgatgtgatctcattgttactgaacggagacggcggcgtgggcaggaggcggctttggataggattgcagctcccgcctggatgcggcgacccaaaaagactggggcccttgagaggtttccagtgggttaccggggacaataatacaagttattcgcggtgggcacggctcgatttgaacggagcccctctttgtggtccactgtgcgtggcggtatccgccgcagaagccacagtacctagtgagccaatttgggaagagcagcagtgcgaagtgaaagccgacggattcctttgcgagtttcactttcccgcaacatgccgacctctggcagtggagcccggcgccgccgccgcagccgtgtcgatcacatatggcaccccatttgctgctcggggcgctgactttcaggccttgcctgtcggaagctcagctgctgtcgcccctcttggtttacagctaatgtgcaccgcaccacccggtgcggttcagggccattgggcgcgggaggcacccggtgcttgggattgcagcgtggaaaacggcggatgtgagcatgcctgcaacgctattccgggcgcccctcgctgtcagtgtcctgctggcgccgctctgcaagcggatgggagatcatgcaccgcttcggccacacagagttgcaatgatctctgcgaacacttttgtgtgcccaatcccgatcagccagggagctactcctgtatgtgtgagaccggttaccgtctcgcggcggaccagcacagatgtgaagatgtagatgattgcattctcgagcccagcccctgtccccagcggtgtgtgaacacgcagggtggcttcgagtgccattgctacccgaactacgacttggtggatggagagtgcgttgagcctgttgacccgtgctttcgggctaactgtgagtatcagtgtcagcccttgaatcagacttcctacctttgcgtctgcgccgagggtttcgccccaataccccacgagcctcacaggtgccaaatgttctgcaaccaaactgcatgcccagcagattgcgatcccaatacccaggctagctgcgaatgtccagaaggatacatcctggatgacggatttatatgcacagatatagatgaatgtgagaacggcgggttctgctccggagtgtgtcataatctgcccggtactttcgagtgcatttgtggccccgattctgcacttgcgcggcacatagggactgactgcgattccggtaaagtcgacgggggagactctgggtcaggcgagcctcccccaagccccactccgggcagcactctgacgccccccgccgtgggactggtacatagcggccttctaatcggaatcagcattgcgagcctgtgcctcgtcgtggctttgttagccttgctctgccacttaaggaagaagcaaggagccgcgcgcgccaagatggagtacaaatgtgctgccccaagcaaggaagtggtgctccagcacgttcggacagagcgcacaccacaacgccta

SEQ ID NO: 7768 - DNA, 1725 bp, Artificial Sequence
  derived and/or modified sequence
atgctgggcgtcttggtcctaggcgcccttgcccttgcgggcctgggctttcccgctcccgctgaaccgcagcccgggggctcacaatgcgtggaacatgattgctttgccttgtaccccggccccgctacatttctgaatgcgtcgcaaatttgcgatggccttaggggtcacctgatgacagtcagaagctccgttgccgccgatgtgatcagtcttctgctgaatggcgacgggggagtcgggcgtcgccgcctgtggattggactgcagctgccgccgggctgtggtgaccctaaacgcctggggccgctccggggcttccaatgggttactggagataataacacgagttattcccgatgggcccgcttagaccttaatggcgcccccctctgcggaccactgtgcgtcgccgtatctgccgccgaggccacggtgccctcggagcccatctgggaagagcaacagtgcgaagtgaaggctgatgggttcttatgtgaatttcattttccagccacctgtcgcccactggccgtggagccgggcgccgccgcggccgccgtctccataacttacggcaccccctttgctgcacggggcgcagattttcaggctctccccgttggaagctctgcagccgtggctccgttgggacttcagcttatgtgcaccgcaccaccaggcgcggtgcaaggccattgggcacgtgaggcaccaggcgcttgggattgcagcgttgagaatggaggctgcgaacacgcttgcaatgcaatcccgggcgccccccgctgccagtgcccggccggcgccgcattgcaggcggacggccgctcgtgtacagcgtccgctacccaatcttgcaacgacctgtgcgagcacttttgcgtgccaaacccagaccaaccgggttcttattcatgcatgtgcgaaacgggatatcgcttagctgccgatcagcaccgctgcgaggacgttgatgactgtatcctagagcccagcccgtgcccccagcgatgtgtgaatacacagggaggcttcgaatgccactgttatcccaactatgacctggtggacggcgagtgcgtggaaccggtcgacccatgttttcgggccaactgcgaataccagtgccaaccactgaaccagacctcgtatttgtgcgtttgcgccgagggattcgcccctataccccatgagccacaccgatgccaaatgttttgtaatcaaacagcttgtccagctgattgtgaccctaacactcaagccagctgcgagtgtcccgagggctacatacttgatgatggattcatctgtactgatatagacgagtgcgagaacggtgggttctgttcaggagtctgccacaatttgccgggtacctttgagtgcatttgtggaccagatagtgcgcttgctaggcacatcggaacggattgtgacagtggtaaggtggatggaggcgacagtggctcgggagagccaccgcctagtccaactccaggatctacacttactccgccagccgtcgggctcgtgcacagcggactgttgattggcatctccatcgccagcctgtgcctcgtagtagcgctgctggcgctgctctgccacctgaggaaaaagcaaggggccgcccgcgcgaagatggagtataagtgcgcagcccctagcaaagaggtggtgctgcagcacgtacgcaccgaacgcacgccccagcggctt

SEQ ID NO: 7769 - DNA, 1725 bp, Artificial Sequence
  derived and/or modified sequence
atgctcggcgtcttggtcttgggggcacttgccctggcaggcttgggctttccggcgccggcagagcctcagccgggcggatctcaatgtgttgaacatgactgctttgcactttatccgggaccggctacctttcttaatgccagtcagatctgcgacggcctgcgtggccatttgatgacggtgagaagtagcgtggcggccgacgttattagcttgctgttgaatggcgatggcggggtcggccggcgtaggctgtggattggactgcaactgcccccggggtgcggggatccgaagcgtttagggccattgcgcggctttcagtgggtcacaggcgataacaacacaagctactcgcgctgggccagacttgatctcaacggtgcgccgttatgcggacccttgtgtgttgctgtaagcgcggccgaagcaacagttccgtctgaaccgatctgggaagaacagcagtgtgaggtgaaagcagatggctttctgtgtgagtttcatttcccggctacgtgtcgtcctctcgcagttgaaccaggggccgcggccgcggcggtcagtatcacatatggaacgccttttgccgcacgcggggctgattttcaagccctcccggtcggatcttcagccgcggtcgcgcctctcggcctgcaacttatgtgtactgctcctccaggggctgtgcagggacattgggctcgagaagcgcctggggcttgggattgtagcgtcgaaaatggcggttgtgagcacgcttgcaatgctatcccaggggctccgcgatgccaatgtccggcgggtgccgcactccaggccgatgggcgctcatgtaccgcatccgctacacagagctgcaatgatttatgcgaacacttttgcgtacccaatcctgaccagccaggctcatactcatgtatgtgtgagacaggttatcgtttagcagcagatcagcaccgatgtgaagacgtagatgattgtatattggaaccttctccttgtcctcaaaggtgtgtcaatacgcagggaggcttcgagtgccattgttatccgaactatgatcttgtagatggcgagtgtgtcgagccggtggacccgtgctttcgcgcaaattgtgagtatcagtgtcaaccattgaatcaaacgtcatacctttgtgtatgcgcggaggggtttgcaccaatcccacatgaaccgcatcgctgtcaaatgttttgcaatcaaactgcgtgtccggcagactgcgatcctaacacgcaagcgtcttgtgaatgtccggaaggttatattcttgatgatggctttatttgcacagatattgatgaatgtgagaacggcggcttttgctctggtgtttgccataatttgccgggcaccttcgaatgtatttgcggaccagattcagcccttgcgagacatattggcacagactgtgatagcggaaaggtagatggcggcgattctggtagcggggaaccgccgccgagccctacaccgggttctacgctgacgccgccggcagtcggccttgtacattcggggcttttaatcggcatttcaattgcttctttatgtctggttgttgcactgctggcactcctctgccacctgcggaagaaacaaggcgccgctcgggctaaaatggaatataaatgtgcagcgccatctaaagaagtggttctgcaacatgtgcgaactgaaagaactccacagcgttta

SEQ ID NO: 7770 - DNA, 1725 bp, Artificial Sequence
  derived and/or modified sequence
atgctaggagtgctggtgttaggggcactggcactggcaggattgggctttcctgcccctgcggaaccccagcctggggggtcccagtgcgtggaacatgattgtttcgctctgtatccagggccagcaacgttcttgaatgcctcacagatttgcgacgggcttcgcggccacctgatgacagtgcgctccagcgtggccgcagacgtgatttctttactacttaacggagacgggggcgttggacgcaggcgattgtggattggtctccagctcccaccaggatgcggagaccccaaaagattggggcccctgcgcggtttccaatgggtgaccggggacaacaataccagttatagtagatgggctcgattagacctgaacggtgcccccctctgtggtcctctgtgcgtggcagtttctgctgccgaggccaccgttccgtccgagcctatttgggaagagcaacagtgcgaagtgaaggcagacggattcctgtgtgagttccactttccggcaacatgccgaccactcgcagtggaacccggcgcggccgcagccgctgtcagtattacatacggcacacctttcgcagcccggggggcggatttccaagctctgcccgtcggaagttctgctgccgtggcacccctaggccttcagctgatgtgtactgctccgccaggtgccgttcagggccactgggctagggaagcccccggagcatgggactgtagcgtagaaaacggcggctgcgaacacgcatgtaacgcaataccaggggccccgagatgccagtgtcctgcaggcgctgccctgcaggcagatggaaggtcctgtacggcaagtgcaacacagagttgcaatgacctctgtgagcacttttgcgtgccaaacccggaccagcctgggagctattcttgcatgtgtgagaccggctataggctcgccgccgatcagcatcgctgcgaagacgtggatgattgcatcctggagccgagcccgtgccctcagcgatgcgtgaatacccagggaggtttcgagtgtcactgctatcctaactacgatctggtcgacggcgaatgtgtggaacccgtggacccctgctttagggccaattgtgaataccagtgtcagccactgaaccagacctcgtatctgtgcgtttgtgccgaggggtttgcgcccatccctcacgagccacaccgctgccagatgttttgcaaccaaaccgcctgccctgccgactgcgacccaaatacccaggctagctgtgagtgtccagaggggtacatccttgatgacggatttatatgtacagacatagatgaatgtgaaaacggcggattttgcagcggcgtgtgccacaacctacccgggacttttgaatgcatttgcggtccggactccgctcttgccagacacattgggactgactgtgatagcggtaaggttgatggaggcgactctgggtctggcgagccacccccctcacctaccccgggctccaccctgactccccctgcagtcgggctggtgcatagtgggttgctgattggcatcagcattgcatctctctgtttggtggttgccctgctagccctgttgtgccatctgcgtaagaaacaaggagccgctagagcaaagatggagtataaatgcgcggcgccgtccaaggaggtcgtattgcagcatgtgcggacagaacgcacccctcagcgcctc

SEQ ID NO: 7771 - DNA, 1725 bp, Artificial Sequence
  derived and/or modified sequence
atgttgggagtcctggtcctgggtgcccttgcgctcgccggccttggtttcccggctcccgccgaaccacagccgggcgggtcccaatgtgttgaacacgattgtttcgctctgtaccccggacctgccacattcctgaatgccagccaaatctgtgatggcctgcgagggcatcttatgactgtacgctcatccgtggcagctgatgtcatttccctgttgcttaacggggacggcggtgttgggcgacggaggctgtggattggcctgcagctgcctccaggatgcggtgacccaaaaagactcggacccctccgggggttccagtgggttaccggggacaataacaccagctacagtcgatgggcaaggctggacctgaatggggcccctttgtgtggtcccctctgcgtggcagtttctgccgctgaggccacagtgcctagcgagcctatctgggaggagcagcagtgcgaagtcaaagccgatggttttctctgcgaatttcactttccagcaacgtgtcgccctctggcggtggagcccggagccgcggctgcagcagtcagcatcacctatggcaccccttttgctgccagaggcgcggatttccaagctctgcctgtgggttcttctgcggctgtcgcgcctcttggcttgcaattgatgtgcactgctccccctggcgcggtgcagggccattgggcgcgcgaggccccaggcgcttgggattgtagcgtggagaacggagggtgtgagcatgcttgcaatgccatacctggcgctccacgctgccaatgtcccgctggggccgcactgcaggccgacgggcgcagctgcaccgcctcagctacccaaagttgtaacgacctctgcgaacacttctgtgtgcctaaccctgatcagcccggctcatactcatgcatgtgtgaaacaggctaccggctggctgccgaccagcacaggtgtgaagatgtggacgattgtattcttgaaccttccccctgcccccagaggtgcgtcaatacacaaggcggttttgagtgccattgctaccctaattacgatctggtggatggcgaatgcgttgaaccggtggatccgtgctttagggctaactgtgaatatcagtgccaaccactcaaccagaccagctacctgtgcgtctgcgcggaggggttcgccccaattccccacgaacctcatcggtgtcagatgttttgtaatcaaaccgcctgccctgcagattgcgacccaaatacacaggccagctgcgagtgtccagagggctatattctcgacgacgggttcatttgcacagatatcgacgagtgcgagaatggcggattctgtagtggtgtgtgccacaacctccctggcaccttcgaatgtatctgcgggcccgactccgccctcgcaagacacatcgggactgattgtgatagcggcaaagtggacggcggcgatagtggctctggcgaaccgccaccgtcccctactcctggatccactcttactcctccagccgtgggactggtgcattctggactgcttattggcatcagtatcgcctcactttgcttggttgttgccttgttggcactcctgtgccacctgcgaaagaaacagggggcagctagggccaaaatggagtacaagtgcgccgcaccatcaaaggaggtggtcctccagcacgtcaggaccgaacgcactcctcagcggctc

SEQ ID NO: 7772 - DNA, 1725 bp, Artificial Sequence
  derived and/or modified sequence
atgctcggggtgctggtcctgggggccctggcgttagcaggcctcggatttcccgcgcccgccgagccccagcccggcgggtctcagtgcgtcgagcatgactgttttgccctttatcccggtcctgccacctttctgaatgcctcacagatttgtgatggactgcgaggccacctgatgactgtgcggtcaagcgtggcggccgacgtgatttccttgcttctgaatggggacggaggcgtcggtagaagacgactgtggattgggctacagttgccccccggttgcggagaccctaagcgtctcgggcccctcagaggctttcaatgggtgacgggagacaataatacatcttattctaggtgggcgaggttggacctcaatggtgctcctctttgtggccctctttgtgtggccgtcagtgctgccgaggctaccgttccatccgagcctatatgggaagagcaacaatgcgaagtcaaggccgacggcttcctgtgcgaatttcattttccagccacatgtcgccctctggcagtcgagcccggtgccgcggcagccgccgtcagcatcacctacggaacaccatttgccgcccgaggcgctgacttccaggcactgcctgtgggctcctcagcagccgtagcccctctgggtctgcagttgatgtgcacagctccaccaggcgccgtgcaagggcactgggccagggaggctccgggggcctgggactgtagtgttgaaaacggaggatgtgagcacgcatgcaacgccattcctggagcacctagatgtcagtgcccagccggcgcagctttgcaggcagatggccgtagctgcaccgccagcgctactcagtcgtgcaacgatctctgtgagcatttttgcgtgcctaaccctgaccagccaggatcttactcctgcatgtgtgaaactggctacaggctagcggctgatcaacacagatgtgaagatgtggacgactgcatcctggaaccctccccatgcccccagcgctgtgtgaatactcaagggggcttcgaatgtcactgctatcccaattacgacctagtggatggagagtgtgtcgaacccgtggacccatgctttcgagccaactgcgaatatcagtgtcagcccctgaaccagacttcttatctctgcgtatgtgctgaaggatttgcacctattcctcatgagccacacagatgtcaaatgttttgtaaccagactgcctgccccgctgattgtgacccaaatacacaggcatcatgtgaatgtccagaagggtacattctggacgatggtttcatctgtacagatatcgacgaatgcgaaaacggaggtttttgcagtggcgtgtgccacaacttacctgggactttcgaatgtatttgcggccctgacagtgccctggcgaggcatataggcacggactgcgactctggaaaggtggacgggggggactcgggatccggcgaacccccacctagtccgacccctggcagtactctgacgcctccagctgtgggactagtccattccggactcctgatcgggatcagcatcgccagcctgtgcctggtggtagcactgcttgcccttctctgccacctacgaaaaaaacagggcgccgcccgagccaagatggagtataagtgtgccgcgcctagcaaagaggtggtcctgcagcatgtaaggaccgagagaaccccacagcgattg

SEQ ID NO: 7773 - DNA, 1725 bp, Artificial Sequence
  derived and/or modified sequence
atgctgggggtgctcgtcctgggagcccttgcattggcgggtctgggtttccccgcacctgcagagccacagcctggagggagccaatgcgtggagcatgactgttttgcactttacccagggccagcaactttcctgaatgcatcacaaatttgcgatggattgcgcggtcatcttatgaccgtgcgaagcagcgtggcagccgatgtgatttcgctccttcttaatggagacggaggcgtgggtcgacggcggctgtggatcgggctgcagctcccaccgggatgtggcgatcctaagcgactcgggcccctgagaggattccaatgggtgactggagataacaacacttcctactcgaggtgggcaagactggaccttaacggagcccctctttgcggtcctctttgcgtggcggtgtcggccgccgaagcaaccgtgccctccgaaccgatatgggaagaacaacaatgcgaagtaaaggcagatggctttctttgcgaattccattttccggccacttgccgccccctggcagtggaacccggcgcagcggcggcagcagtctctattacgtacggtaccccgtttgcagcccgaggagcagactttcaagcgcttcctgtaggttcctccgcagcagttgcgccccttgggcttcagttgatgtgcactgcaccgccaggtgcagtgcaaggtcattgggctcgtgaagcaccgggtgcgtgggattgttcagtcgaaaacggtgggtgcgaacatgcgtgtaacgccattccaggggcacctcgttgccaatgtcctgcgggagccgcgctccaggcagacggacggtcgtgcaccgcatccgcaacccagtcttgtaatgacctttgcgaacatttttgcgtgcctaatcccgatcaacctggatcctattcctgtatgtgtgaaaccggatacagactggcagctgatcagcatcgctgtgaggatgtggatgattgtattcttgaacctagcccgtgtcctcaaaggtgcgtgaacacccaagggggatttgaatgtcactgttaccctaactacgacctcgtggatggcgaatgtgtcgaacctgtcgatccttgttttcgagcaaactgcgagtaccagtgccaacctctgaatcaaactagctacctgtgtgtgtgcgctgaaggtttcgctcctatccctcacgaacctcataggtgtcagatgttctgtaatcagaccgcttgtcctgcggactgcgacccaaacactcaggcttcgtgtgagtgtcccgagggatacattcttgacgatggctttatctgtaccgacatcgatgaatgtgagaatggcgggttttgctcgggtgtctgtcacaacctccctggtactttcgagtgtatctgcggcccagactcggcattggcgagacatatagggactgattgcgacagcggcaaagtcgacggaggtgactcgggatcaggggagccaccaccatccccgactcccggttcgaccctcaccccaccagcagtgggattggtgcatagcggtttgcttattggaatttccatcgcgtcactttgtcttgtggtggcgctgctcgcactgctttgtcacctgaggaagaagcaaggagcggctagagcgaaaatggaatacaagtgtgcggctcccagtaaagaggtcgtgcttcagcatgtcagaaccgagcgcacgccacaacgactg

SEQ ID NO: 7774 - DNA, 1725 bp, Artificial Sequence
  derived and/or modified sequence
atgctgggagtgctggtgctgggagcactggcgctggctggactgggcttcccagcgccggctgagcctcagccgggaggttcgcaatgcgtggaacacgactgctttgcgctctacccgggacctgcaacctttctgaacgccagccaaatctgtgatggcttgcggggccacctgatgactgttagatccagcgtcgcggcggatgtcatatcgctccttctcaacggagacggaggagtagggcgacgccgactctggatcgggttgcaactcccgccgggctgtggtgacccgaagcgcctgggacctctccggggctttcaatgggtgaccggagacaacaatacgtcgtactcgagatgggcccggctggatctgaatggcgctccactgtgtgggcctctctgcgtggcagtctcggcggctgaggcaaccgtgccatccgaaccaatctgggaggagcagcagtgcgaggtcaaggccgatgggtttctttgtgaattccacttcccggccacttgtcggccactggcggtagagcccggcgcggcagcggcggctgtgtcgatcacgtacggaactccgtttgcagccaggggcgccgacttccaagctctgcctgtgggctctagcgcggcggtggcccccttgggtttgcagctcatgtgcacggcgccgccaggtgccgtgcaagggcactgggcccgggaggcgccaggagcctgggactgtagcgttgagaatggaggctgcgaacatgcttgcaacgcaatccccggagcccctcggtgccagtgcccagcaggcgcggccttgcaagcagacggaaggtcatgtaccgcgtcggctacccagtcctgcaacgacctgtgcgaacacttctgcgtgccaaacccggaccagccaggctcctactcctgcatgtgtgaaaccggataccgcttggctgcagatcagcaccgctgcgaagatgtcgatgactgcatcctcgaaccgagcccgtgcccgcaacgctgtgttaatactcagggaggcttcgaatgtcactgttaccctaactacgatctggtggacggagaatgcgtcgaacccgtggacccgtgtttccgggccaactgcgagtaccagtgtcagcctctgaatcaaacttcctatctgtgtgtgtgcgcagaaggtttcgccccgatcccccacgaaccgcatagatgccagatgttctgcaatcagactgcatgtccggcagactgcgaccctaacacccaggcctcctgcgagtgccctgagggctacatccttgatgatggattcatctgcactgatattgacgaatgcgagaacggagggttctgctcaggagtgtgccacaacttgccaggaactttcgagtgcatctgcggacctgattctgcgctcgcgcgccatatcggtacggattgcgactcaggaaaagttgacggtggagactcaggatccggggaaccgcccccgtctccaaccccgggttcgaccctcactcctcccgctgtggggttggtgcatagcggcctgcttattggaatcagcatcgcctcattgtgccttgtggtcgctctgctcgctctgctctgccatctcaggaaaaagcagggagcagccagagccaagatggaatacaagtgcgccgccccgtcgaaggaggtggtactgcaacatgtgcgcacggaacgtaccccccagcggttg

SEQ ID NO: 7775 - DNA, 1725 bp, Artificial Sequence
  derived and/or modified sequence
atgctaggggtgctggttttgggcgcgttggcattggccggtctgggcttcccggctccggcagagcctcaaccgggaggatctcaatgcgtggagcacgactgtttcgcgttgtatcctggccctgcaacattcctgaacgcgagccaaatctgcgatggtctgcgcggacacctcatgaccgttcgctcttccgttgcggcagatgtgattagcctgctgttaaacggtgatggtggcgtcggccgccgccgactgtggatcgggttgcagctgccaccaggttgtggggacccaaaacgccttggtccgctaagaggctttcaatgggtgacgggcgataacaacacaagctacagccgctgggcgcgcctggatctcaatggtgctccgctgtgtggcccattgtgtgtggcagtctctgctgctgaggctactgttccgagcgaacctatttgggaagaacagcaatgcgaagttaaagcagacggctttttgtgcgagttccacttccctgccacgtgtagaccgttggccgttgagccaggggccgcagccgcggctgtgtctatcacttacggcacccctttcgctgcacggggcgccgactttcaggctctgccagtgggttccagcgcagcagttgcgccactgggtctgcagttgatgtgtaccgcacctccaggtgccgtgcaaggccattgggcgagggaggcaccgggtgcatgggattgctctgtcgaaaacggaggatgtgagcacgcctgcaacgcaatcccaggcgcccctaggtgccaatgccctgcgggtgccgcgctgcaggcggatggtcgatcatgcacagccagcgcaacacagagctgtaatgatctctgcgagcacttctgcgtgcccaaccctgatcaacctggctcatactcatgcatgtgtgagaccggctatcgcttggcggctgaccagcatcgttgcgaagatgtggacgactgcatcctggaaccttcgccgtgcccgcaacgctgcgtcaatacccagggtgggttcgaatgtcattgctatcctaattacgacctggtggacggcgaatgtgtggagcctgtcgatccttgttttcgtgcgaattgcgagtaccagtgccaacccctgaatcagaccagctacctgtgtgtctgcgccgagggttttgcgcctattccacatgagccacacaggtgccagatgttttgcaaccagaccgcatgcccggccgactgcgatccaaacactcaggcaagttgtgagtgcccggaaggttacatcttggacgatggctttatctgtaccgatatagatgagtgtgagaatggtgggttctgcagcggagtttgtcataacctgccaggtacttttgaatgtatttgtggtccagacagcgcactggcccgccacatcggaaccgattgtgatagcggtaaggtcgacggtggtgatagcggctccggggaaccaccaccaagccctaccccgggttctaccctcaccccaccggccgtcggactggttcatagcggtctgctcatcggcatctctatcgctagcctctgtctggttgtggccctgctagcattgttgtgtcacctgaggaagaagcagggcgcggcccgcgccaaaatggaatataaatgcgcagcaccgagcaaagaggttgttttgcagcacgttagaacagagcggacgccacagagactg

SEQ ID NO: 7776 - DNA, 1725 bp, Artificial Sequence
  derived and/or modified sequence
atgttgggcgttttggttcttggtgcacttgccctcgctggcctaggatttcctgcacccgctgaaccacaacctgggggatcgcagtgtgttgaacacgactgctttgccctctaccctgggcctgctacatttttgaacgcttcacagatttgcgatggacttagaggacaccttatgactgttcgcagcagtgttgcagctgatgttatttctcttcttttgaacggggatggtggcgtcggtagaagaagactgtggatcggtttgcagctgccaccaggatgtggtgatccgaagaggctcggtcccctccgtggctttcaatgggttacaggagataacaacacctcttacagtcgttgggcaagactagatctgaatggggcaccactatgcggaccactctgtgtcgctgtctctgctgctgaagctactgttccctcggaacccatctgggaggaacagcagtgtgaggtcaaggcagatggattcctctgtgaatttcactttcctgctacatgtagacctctggcagttgagccaggggctgctgccgctgcagtttcaattacatatgggacaccttttgctgctagaggcgcagacttccaagctttgcctgtgggtagcagtgcggctgttgcaccattgggcctgcaacttatgtgtaccgctccgcccggcgccgtacaggggcattgggcccgtgaggctcctggtgcttgggattgttcagtggagaatggtggatgtgaacatgcttgcaacgcgattcccggtgccccacgttgccagtgtccagctggagctgcacttcaagccgatggacgaagctgtaccgcgtccgcaactcaatcatgtaacgacctttgtgagcatttttgtgttcccaatcccgaccagccagggtcttatagttgcatgtgcgaaacaggttaccgtctggctgctgatcagcacaggtgcgaggatgtggacgactgtatcttggagccttccccgtgcccacaacgatgtgtaaatacacaagggggcttcgagtgtcactgctacccaaactacgacttggttgatggagaatgcgttgaaccagttgatccatgtttcagagcaaactgtgagtatcaatgtcagccgctcaaccagactagctatctctgtgtatgtgcagaggggttcgctccaattcctcatgaacctcaccggtgccaaatgttttgcaatcagacggcttgtccagctgattgtgatcctaatacacaggcgtcttgcgaatgtccggagggatatatattggacgatggattcatttgtacagatattgatgaatgtgagaatggaggcttttgcagcggcgtgtgtcataatctgccaggtaccttcgaatgcatatgcggtcctgactcggcgcttgctcgtcatattggcactgattgtgactctggtaaggtggatgggggtgactctgggtcaggagagcctcctccttcgcctacgccgggatccacattaacaccacccgctgttggcctcgttcattccggacttctgattggtatttctatcgcctccttgtgcctcgtggttgctcttttggctcttctttgccatcttaggaagaagcagggcgcagcaagagctaaaatggagtataaatgtgctgcccctagtaaggaggtagtgctacagcatgtccgaaccgagaggactcctcaaaggctg

SEQ ID NO: 7777 - DNA, 1725 bp, Artificial Sequence
  derived and/or modified sequence
atgttgggagtgctggtcctgggggctctggcacttgcaggactgggattccctgcaccggccgaaccgcagccgggaggatcccaatgtgtggaacatgactgcttcgcactttacccgggcccagccaccttcttgaacgctagccaaatctgtgatggactccggggccatctgatgaccgtcagatcatccgtggccgccgacgttattagcctccttttgaatggagacggcggggtgggtagacgcagactgtggatcggactgcagcttcctccgggatgcggtgatccaaagaggctgggcccactgcgcggattccaatgggtgactggagacaacaatactagctactccaggtgggctaggctggacctcaatggagccccgctgtgcggcccactgtgcgtggccgtgtcagcggccgaagcgacggtccctagcgagccgatctgggaggagcagcagtgcgaagtgaaggcggacggattcctctgcgaattccattttccggccacttgccggccgctggcagtggagccaggagccgcggccgcagcggtgtcgatcacgtacggaactccgttcgccgcccgcggagctgactttcaggccctcccggtcggatcaagcgccgctgtggccccgctcggactccagttgatgtgcaccgccccgcctggcgcggtgcagggacactgggcccgcgaagcgccaggtgcatgggactgctccgtggaaaacggcggctgcgagcatgcctgtaacgccattccgggagcgcctcgctgccaatgccccgccggagccgccctgcaagcggatggtcggtcctgcaccgcctccgccacccagtcgtgtaacgatctgtgcgaacacttctgcgtcccgaaccctgaccagcccggatcctacagctgtatgtgtgagactggatacagactggcggccgaccagcataggtgcgaggacgtggatgattgcatcctggagccctctccttgtcctcaaagatgcgtgaacacgcaagggggattcgaatgccactgttacccgaactacgacctcgtggacggggagtgcgtggagccggtcgacccttgcttccgggcgaactgcgagtaccagtgccagccgctgaaccaaactagctatctgtgcgtctgcgccgaaggattcgctccgatcccgcacgagccacatcggtgccagatgttctgcaaccaaaccgcgtgtccggccgattgtgacccaaatactcaggcgtcttgcgaatgccccgaaggttacatcctggacgacgggttcatttgcactgacattgatgaatgcgaaaacggagggttctgcagcggagtgtgtcacaatttgcctgggaccttcgaatgcatctgcggacctgatagcgccctggctcggcacattggaactgattgtgactcaggaaaggtggatggaggagactcaggatccggagaaccgcccccatcaccgacccctggatccaccctgactcccccagctgtcggtctggtgcactcgggactcctgatcggaatctcgatcgcaagcctttgcctggtggtcgcactcctggcactcctgtgccacttgaggaagaaacagggagctgcccgcgccaaaatggaatacaagtgtgcggccccgtccaaggaagttgtgctgcaacacgtgcggaccgagcggactccgcaaaggctt

SEQ ID NO: 7778 - DNA, 1725 bp, Artificial Sequence
  derived and/or modified sequence
atgttgggagtgttggtgcttggagcactggcactcgcagggttaggattccctgctcccgcagaacctcagcccggagggtctcagtgtgttgaacatgattgtttcgccctgtacccagggcctgccacattcctcaacgcttctcagatctgtgatggactccgaggacacctaatgacagtgcggagttccgttgctgcagatgtgatttcccttctcctcaacggagacggaggagtgggacgtaggaggctttggataggactccagctccctcctgggtgtggggatcctaagcgactggggcctctgagggggttccagtgggtaactggagataacaatactagttattctagatgggctcgactagatctaaatggagccccactatgtgggcccttatgtgtggccgtatcagccgcggaagcaacagtaccttcagaacccatatgggaagaacagcagtgtgaagtgaaggcagatggattcctgtgtgagtttcacttccccgccacttgcaggcctcttgccgtagaaccaggggcagctgcagcagcagtctctatcacttatgggactcccttcgccgcacggggagctgatttccaggcgctccccgtgggaagtagtgcagctgtagcccctctagggcttcagttaatgtgtacagcacctcctggagcggtgcagggacactgggcaagagaagcgcctggggcttgggattgtagtgtggaaaacggggggtgcgaacacgcatgtaatgcaatccccggggcaccaaggtgtcagtgcccagccggagctgctctgcaggctgatggacggtcctgcacagcatctgccacacagtcctgtaacgatctgtgcgaacatttctgcgtgcctaaccctgatcagcctggatcttatagttgtatgtgtgaaacgggatatcgcctcgctgccgatcagcatagatgcgaagatgtcgatgattgcatactcgaacccagtccatgtccacagcggtgtgtgaacacacagggagggttcgagtgccattgctatcccaactacgatctagtggatggggagtgcgtggaacccgtagatccatgctttagggcaaattgcgaataccagtgccagccactcaaccagacttcctatctctgtgtttgcgcagaagggttcgcgcctataccacatgaaccgcatcggtgccagatgttctgtaaccagacagcctgccctgccgattgcgatcccaatacacaggcctcatgcgagtgtccagaaggatatatcctggatgatggattcatctgcacagatatcgatgaatgcgaaaatggagggttttgttccggggtctgtcataacttacctgggacatttgagtgtatttgtggaccagactccgctctggctaggcacatcggaactgattgtgattctggaaaagtggatgggggggattccgggtcaggagaaccaccccctagtcccactcccggaagtactctcacacctcccgccgtaggactcgtgcattccgggctcctcataggaatatcaatcgcctctctatgtctcgtggtggctctacttgcccttctgtgccacctgcgaaaaaaacagggggctgccagagccaaaatggagtataagtgtgctgccccatctaaagaagttgtattgcagcatgtcaggacagaacgaacaccacagcgtctc

SEQ ID NO: 7779 - DNA, 1725 bp, Artificial Sequence
  derived and/or modified sequence
atgctgggtgtgctggtgctgggtgcactggcgctcgctggactgggcttccccgctccagctgagccccaaccaggcgggtctcagtgcgtcgaacacgactgctttgctctgtatcctggtcccgctacatttttgaacgcctctcagatctgtgatggcctgcggggtcatttaatgacagttcgctcgtccgtcgcagcggatgttatatccttgctgcttaacggcgacggaggcgtaggcaggcgacgcctctggatagggctgcaactcccgccgggttgcggagatccaaagcggctcggtcccctgcgagggtttcagtgggttactggagataacaacacgagttactcccgctgggctcggctcgacctgaatggggcacccctgtgcgggcctctgtgcgtcgctgtcagtgcagccgaggctacagttcctagcgaacccatttgggaggagcaacagtgtgaggtgaaagccgacggctttctgtgtgaatttcacttccccgctacttgccgaccattagctgtggaacctggtgcggccgccgccgccgtgagtattacttatgggactccgtttgcggcgaggggagcggattttcaggctctccccgtcggctcctctgctgccgttgcacccctgggtctgcagctgatgtgcacagccccccctggagctgtacagggacactgggctcgtgaggccccgggtgcctgggactgtagcgttgagaatggaggctgcgaacacgcttgcaacgccatccctggcgcgccacggtgccagtgccccgcaggggccgcattgcaggcagacggtaggagttgtactgccagtgcaacccaatcctgcaatgatttatgcgaacacttttgcgtaccaaaccccgaccagcccggatcttactcatgtatgtgtgaaacgggctatcgcttagcagctgaccagcatcgctgtgaggatgtcgacgactgcatcctggagccgtcaccctgcccccagagatgcgttaatacacagggcggcttcgagtgccactgttatcctaactacgacctggtggatggcgaatgtgtagaaccagtggatccctgcttccgtgccaactgtgaataccagtgccaacctctgaaccagacatcttatctgtgtgtgtgtgctgaaggttttgctccaattccccacgaaccacataggtgccagatgttttgtaatcagaccgcttgtccagccgactgcgatcctaacacgcaggcttcgtgcgagtgccccgaagggtatattctggacgatggctttatttgcactgacatcgatgagtgcgagaacggcggattctgcagcggagtgtgtcacaatttacctggcaccttcgagtgtatctgtgggcccgactccgcattagccagacacataggaaccgactgtgacagtggaaaggtagatgggggtgactccgggtcaggagaaccgccaccgtcaccaacgcccggtagcactctgacaccccccgccgtgggactggtgcattccgggctgctgatcggaatctccatagcgagcctttgccttgtggtagccttgctggcactattgtgccacctgcggaaaaaacagggagcggcccgagccaaaatggaatacaagtgtgcggcgccttctaaagaggtggtgttacagcatgtaaggaccgagagaacacctcagcgactc

SEQ ID NO: 7780 - DNA, 1725 bp, Artificial Sequence
  derived and/or modified sequence
atgctaggcgtgctcgtccttggcgccctggccctcgcaggcctggggttccccgctcccgccgagccccaacctggtgggtctcaatgcgtggagcatgattgtttcgccctctatcctggccctgctacttttctgaacgcaagccagatctgcgatggtctacggggacacttgatgacagttcgcagctccgtggctgcagacgtgatttctctcttgctgaacggggatggaggggtgggcaggcggcggctgtggatcggactacaattgcctccgggttgtggggatcctaaacggttaggccctttgagggggttccagtgggtcactggcgataacaacacctcgtactctcggtgggcccgccttgatctgaatggcgcaccattgtgtggccccttatgcgtggcagtctctgctgcagaggcaacagtcccaagcgagcccatatgggaagagcagcagtgcgaagtcaaagcggacgggttcctctgcgaatttcattttccagctacctgccgtcccctggccgtcgaacctggagcagctgcagcggctgtgtccattacttatggcacccccttcgcggccaggggagccgattttcaggccttgcccgttggaagctccgctgccgtggctccattggggcttcagctcatgtgcacagcgcctcctggcgcggtccaaggtcattgggcacgggaagcccctggcgcgtgggattgttcagttgaaaacggcggttgcgagcacgcttgcaacgccattccaggggcccctcgctgtcagtgccctgccggggccgccctccaagctgatgggagatcctgcaccgcctctgcaactcagtcatgtaatgatttatgtgagcacttttgcgttccgaaccctgaccagcccgggtcatactcttgcatgtgtgagacaggttatcggctagctgcagatcagcacaggtgcgaggacgtagacgattgcatactggagcccagcccctgcccccagaggtgcgtcaatacacaggggggcttcgagtgccattgctaccccaactacgacctcgtcgacggcgagtgcgtggagcccgttgacccatgctttcgggcgaactgtgagtatcaatgccagccccttaatcagacctcctatctgtgcgtgtgtgccgagggcttcgcgccgataccccatgagccccatcggtgccagatgttctgcaaccagactgcctgtccggccgactgcgatccaaatactcaagcctcctgtgagtgccccgaaggctatatactagacgacggttttatttgcacggatatcgatgaatgtgaaaacggtggcttctgttcaggcgtctgccacaacctgcctggaaccttcgagtgtatttgtgggcccgattccgctctggctaggcatattggaactgactgcgacagcggcaaagtggacggcggagattctggctcgggcgaacccccaccgtctccaacgccaggcagcactctaaccccacccgccgttggcctcgtgcactctggcttgttgataggaatttccattgctagtctgtgtctggtcgtggccttgcttgcgctcctctgtcatctgagaaagaaacagggagcggcccgtgccaagatggaatataaatgcgcggcgccatcaaaggaagtggtactgcagcatgtgcgcactgaacgaacaccccagaggctg

SEQ ID NO: 7781 - DNA, 1725 bp, Artificial Sequence
  derived and/or modified sequence
atgctcggggtactggtgctgggtgctcttgccttggctggcttgggcttcccggcccctgcggaaccacagccaggcggctcccagtgcgttgagcacgattgcttcgccctttatccaggccctgccaccttcctgaacgcgtcgcagatttgcgatggtctgcggggccaccttatgactgtgcgctcgtctgtcgccgctgatgtgatctccctgctcctcaacggcgacggtggcgtgggtcgccggcgtctgtggatcggacttcagctacccccaggttgcggcgatcctaaacgtttgggtcccctccgcggcttccagtgggtcaccggcgataacaacacctcttacagccgctgggctcggctcgacctcaacggagctcccttgtgcggccccctctgcgtcgccgtgtccgctgccgaggccaccgtcccttccgagccaatttgggaggagcaacagtgcgaggtcaaggctgatgggtttttgtgcgagttccatttccccgctacctgccgcccactggctgttgagcccggtgcggccgcggccgctgtcagtattacttacggaactcccttcgctgctcggggcgccgacttccaggccttgccggtcgggtccagtgcggctgtggctcccttgggactgcagctgatgtgtacagccccacccggcgccgtgcagggtcattgggcccgggaggctcctggagcttgggactgctccgtcgagaatggcggttgcgagcatgcctgcaacgccatccccggtgctccgcgctgccagtgcccagctggcgctgctctgcaagctgacggtcgatcatgcacagcgtctgccacccagtcctgcaacgatctctgcgagcatttctgcgttcccaaccccgaccaacctggcagctatagttgcatgtgcgaaacgggctaccggcttgccgccgaccagcaccgctgtgaggatgtggacgattgtatcctagaacccagcccctgcccgcagcgttgtgtcaacacccagggaggatttgagtgtcactgctacccgaactatgacctcgtcgatggcgagtgtgttgagcctgtcgatccctgcttccgtgcgaattgtgaataccagtgtcagcccctgaatcaaacttcttacctctgtgtgtgtgctgagggctttgcccctattcctcacgagccccaccgctgccagatgttctgcaaccagaccgcttgcccagccgactgcgaccctaacacccaggcatcgtgtgagtgccctgagggctacatcttggatgacggctttatttgcaccgacatcgacgagtgcgagaacggtggcttctgtagtggtgtatgtcacaatctccccggtactttcgagtgcatctgcggccccgactccgccctcgccagacatatcggaaccgattgcgattctgggaaggttgatgggggcgattccgggtccggagagccgcctccaagtcctactcccgggtctactttgactcctcccgcagtgggccttgtccacagtggtttgcttatcgggattagcatcgcatctctctgccttgtggtggcccttttggccctactttgccacttgcgtaagaaacagggagccgcccgcgcaaagatggaatacaagtgcgccgccccctccaaggaggtcgtcctccagcacgtgcggaccgaacgtaccccgcagcgtctc

SEQ ID NO: 7782 - DNA, 1725 bp, Artificial Sequence
  derived and/or modified sequence
atgcttggtgttctcgtgctgggggctttggcactggcaggccttggatttccagccccagcagagccacagcccggcggatcacaatgtgtcgaacatgattgctttgccttgtacccagggcctgcgactttcctgaacgcatcacaaatatgcgacggcctgcgtggacatttgatgactgtgagatcatccgtggccgccgacgtcatctctcttctccttaatggtgacggtggcgttggccgccgaaggctgtggattggcctgcagttgcccccggggtgtggggatcctaagagactgggaccactgcgcggattccaatgggtgaccggtgacaataacacctcgtactctcgctgggcaaggttggatcttaacggagcaccactttgtggacccctgtgtgtcgcagtctcggccgcggaagctactgtgccgtcggagcctatttgggaagaacagcaatgtgaggtgaaagcagacggattcctttgcgaattccacttcccagccacctgccgccccctggcagtcgaacccggcgcagcagcagctgcagtgtccataacttatggcaccccttttgcggccagaggggcagactttcaagcgctgcctgtcggatcatcggctgcagtcgcaccacttggactgcaactgatgtgtacggcgccccccggtgcggtgcaaggtcactgggcaagggaggcacctggagcatgggactgtagcgtggagaatggcgggtgtgaacatgcatgcaatgccatcccaggggcccccagatgccagtgcccagccggtgctgctctccaagctgatggacgctcctgcacggcttctgcaacccagagctgtaacgacctgtgcgagcacttttgtgtgcctaacccagatcagcctggcagctactcctgcatgtgtgaaaccggctaccgcctcgcagcagatcagcatcgttgtgaggatgtggatgattgtattctcgaaccttccccgtgtcctcagagatgcgtgaacacgcagggaggatttgaatgccactgctaccctaactatgatctggtggatggagagtgcgtcgaaccggtggatccgtgtttcagagcaaactgtgaataccaatgtcaacctctcaatcaaacctcatacctctgtgtttgtgccgaaggattcgcacccatcccgcatgaacctcatagatgtcaaatgttttgtaaccagactgcgtgccctgctgattgtgatcctaacacgcaagcatcttgtgagtgtccggaaggctacattcttgacgacggctttatctgcactgacatcgatgaatgtgaaaacggaggattttgttcgggtgtgtgtcacaatcttcctggaacctttgaatgtatttgtggtccagactcagcacttgcgcggcacattggaaccgattgtgattcggggaaggtggatgggggagactctggttccggtgagccgccaccgagccctactccaggtagcactctgacgccacctgccgtgggcttggtgcatagcggacttctcattgggatatcaattgcatccctgtgcctcgtcgtggcactcctggctctgctttgccatctgcgcaagaagcaaggggcagcccgggcgaagatggagtacaaatgtgccgccccttccaaggaagtggtgcttcagcatgtgcggactgagcgaactccccagcgtttg

SEQ ID NO: 7783 - DNA, 1725 bp, Artificial Sequence
  derived and/or modified sequence
atgttgggggtcttagtgcttggcgctttagctcttgccggcctgggatttccagcacccgcggaaccgcagccgggaggttcacagtgcgtcgagcatgattgcttcgctctataccccggtccggccactttcttgaatgcttctcagatctgtgacgggctcagaggacatctgatgacggtccgatcgtcagtcgcggctgacgtaatttctctgcttctcaacggcgacggcggcgtgggacgtcgccgactatggattggcctacagcttccgccggggtgcggtgatcctaagcgactaggccccctgcgcggattccagtgggtgacgggagacaacaacacgagctattctcgctgggccaggctcgatctgaatggggcccctctttgcggaccactctgcgtggccgtgtctgctgccgaggcaaccgttccttccgaacctatttgggaggagcaacagtgtgaggtcaaggcggatggttttctgtgtgagtttcatttccccgcgacctgtcgacctctcgcggtcgagcccggggctgccgcagctgccgtgtccattacatatgggacaccttttgccgcccggggggcggactttcaagcactgccggtcggctcgagcgctgctgtcgctcccctgggactacaactcatgtgcacagctcctccgggggccgtgcagggacactgggcacgagaagctcccggcgcctgggattgttcagtcgagaacggaggctgcgagcatgcctgtaacgccatccctggtgcaccacggtgccagtgtccagccggtgcggccctgcaagcagacggtcgatcttgcacagcgagcgccacccagagctgcaatgatttgtgtgaacacttttgcgtacctaacccagatcaacccggaagctacagctgcatgtgcgagacgggatacaggttggcagcagatcagcatcgatgcgaagatgtcgatgattgcattctggaaccgagtccgtgtccacaacgatgtgtcaacactcaggggggctttgagtgtcattgttatccaaactacgatcttgtcgacggggaatgcgtcgaaccagttgacccctgtttcagggctaactgcgagtaccagtgtcagccgttgaatcagacttcttatctttgcgtttgtgccgaaggcttcgctccaatcccgcatgagcctcacagatgccagatgttctgtaaccaaacagcttgcccagcggactgcgatcccaatacgcaagcgtcatgtgaatgccctgagggatacattctcgatgacggattcatttgcaccgatatcgacgaatgcgaaaatggcggtttttgctcaggcgtctgccataatctaccaggtacgttcgaatgcatttgcggcccagattcagcgttagctcgacacatcgggacagattgcgattcgggaaaggttgatgggggagacagcggtagtggcgaacctccgccctcaccaactccaggaagcaccctgacacctcctgccgttggcctggttcactcgggccttctcatcggtatctcaatcgccagcctttgcctggttgtcgctctattggccctcttgtgccatcttcgaaagaaacaaggcgctgcaagggctaagatggagtacaaatgtgctgcaccgagcaaggaagtcgtcctacagcacgtacgcaccgaacgcactccgcagcgcctc

SEQ ID NO: 7784 - DNA, 1725 bp, Artificial Sequence
  derived and/or modified sequence
atgctgggagtgctggtgcttggagccttagcgctagctggactgggcttcccggcccctgcggagccgcagcctggtggatctcagtgtgttgagcatgattgcttcgccttataccctggacctgccacctttctcaacgccagccagatttgtgacggcctcagggggcacttgatgactgtgcggtcctcagttgctgcagacgtcatttccttactgctcaacggggatggtggcgtgggccgacgccgactgtggattgggttacagttgccccctggctgcggtgatcctaaaagactgggccctctgcgtggttttcagtgggtgacaggggacaacaacacttcctacagccgctgggcccgattggatttgaatggagcacccctttgtggccctctctgcgtcgctgtgagcgccgctgaggcgactgtgccgagtgaaccgatctgggaagaacaacagtgcgaggttaaagctgatggctttctgtgtgaattccattttcccgccacgtgtcgtcctttggccgtggaacccggtgccgccgccgcggccgtgagcatcacttatggaacccccttcgctgcaagaggagccgacttccaggctctcccagtggggagcagcgccgctgtggcaccactcggattgcaattaatgtgtaccgctcctccaggggccgtgcagggacactgggcgcgagaagctcctggggcctgggattgttccgttgaaaacggaggatgtgagcacgcatgtaatgcaatacccggggcaccccggtgtcaatgccctgctggagcagccctacaggccgacggcaggagttgcacagcgtcggctactcaaagctgcaatgatttgtgtgaacatttctgtgtgcccaatcctgatcagccggggtcctattcgtgcatgtgcgagacgggttacagacttgccgcggaccagcaccgttgtgaggatgtggatgattgtatactcgagccatctccatgcccacagcgctgcgtcaacacacaaggtggattcgagtgccactgttaccccaactatgacctcgtggacggggagtgtgtggagccagtggacccctgtttccgggcgaactgtgagtatcagtgccagcccttaaaccaaacctcatatctttgcgtctgtgctgaaggatttgcccccattccacatgaacctcataggtgccagatgttttgcaatcaaactgcctgcccagctgattgtgaccccaacacccaggcgtcgtgtgaatgtccagagggttatattctggacgatggctttatctgcacagacatagacgagtgtgagaacggtgggttctgcagcggagtgtgtcataatttgccaggcacatttgagtgtatttgcgggcccgactctgccttggctaggcatatcgggacggattgtgatagcggtaaagtcgacggtggcgatagtggctccggggagcctcctccctcaccaaccccaggaagcaccctgaccccccctgctgtaggtctggtgcacagcgggctgttgattggtatcagcatcgcaagcctctgtctggtggtcgccctgctggcactgctctgtcacctccgtaaaaaacagggggccgcacgggctaaaatggaatacaagtgtgcggcgccatcaaaggaggttgtgctgcagcacgtaaggaccgagcggacccctcaacgattg

SEQ ID NO: 7785 - DNA, 1725 bp, Artificial Sequence
  derived and/or modified sequence
atgcttggagtgctggtgcttggagcccttgcacttgccggactcggatttcctgcacccgcagaacctcagccgggcggatcccagtgcgtggaacatgattgctttgcactttaccctggaccggcgactttcttgaatgcatcacaaatctgtgacgggcttcgcggccaccttatgaccgtccgttcctccgtggccgctgacgtcattagcctgctgcttaatggagacggcggtgtcggacgtagacgactctggattgggcttcagctgcccccgggatgtggggaccctaagagattgggccctctccgtggttttcagtgggtaaccggtgataacaatacttcctattcccggtgggcaagactggatcttaacggggcccctctgtgcgggcctctttgtgtggccgtgagcgcagccgaggcaacggtgccttctgaacccatatgggaagaacaacagtgcgaggtcaaggccgatggatttttgtgcgagtttcattttcctgcaacgtgtaggcccctggcggtggaacccggggcagcagcggccgcagtctcgattacctacggaactcctttcgctgcgaggggagcagattttcaagccctgccagtggggtcctcggcagcagttgccccgctcggactgcaattgatgtgtactgctccgccgggcgcagtgcaaggacattgggcacgggaagcaccaggtgcgtgggattgtagcgtcgagaatggcggctgtgagcatgcatgtaacgcaataccaggagccccccgctgccaatgccctgcgggagcggcacttcaagcggacggaagaagctgcactgcaagcgctactcaatcatgtaacgatctgtgtgaacacttttgtgtgccaaaccctgaccagccggggagctactcctgcatgtgcgaaacgggctacagacttgcagcagatcaacatagatgtgaagatgttgatgattgtattctggagccgtcgccttgtccacagcgttgtgtgaatacccaaggtggatttgaatgccattgttaccctaattacgaccttgtggatggcgaatgtgtggaaccggtggatccttgcttccgagcaaactgtgagtaccagtgtcaacctctcaaccagactagctacctgtgcgtgtgtgccgagggattcgcacctattccacacgaaccccacaggtgccaaatgttctgtaaccagactgcttgtcctgctgattgcgatcctaacacccaagcatcatgtgaatgcccagagggctatatcctggacgatgggttcatatgtaccgacatagatgaatgtgagaacggtgggttttgctcaggcgtgtgtcataaccttcccggaactttcgaatgtatttgtggcccggattccgcactcgcgagacatattggaaccgattgtgactctgggaaggtggatggaggcgactcgggatcgggtgaacctccaccatcgcctacccccggatcaacccttactccacccgcggtggggctggtgcactcaggactgctcattggcatctccattgcatccctctgtcttgtagtggcacttttggccttgctctgtcacttgcgcaaaaaacagggggctgccagggctaagatggaatacaaatgtgctgcgccctcgaaggaggtggtccttcaacatgtgcggaccgagagaacccctcaacgcctc

SEQ ID NO: 7786 - DNA, 1725 bp, Artificial Sequence
  derived and/or modified sequence
atgttgggagtcctcgtgctgggagcgcttgctctggcgggactggggtttccagcccccgccgaaccgcagccaggaggttcgcaatgcgtggaacacgactgttttgccctctaccctggcccagccactttcctcaatgcgtcgcaaatctgtgacgggttgaggggacacctgatgactgtgagatcctctgtggccgcagacgtgatctcactgctgctgaatggagatggaggtgtcgggagacggcggctgtggatcggacttcaactgccgccagggtgtggcgacccaaagcgccttggaccgctcagaggatttcaatgggtcaccggagataacaatacgtcttactctcggtgggcgcgactcgacctcaacggcgcaccgttgtgcggaccgctctgtgtggccgtgtcggcggccgaagccaccgtgccgagcgagcccatttgggaggagcagcagtgcgaagttaaggcagacggctttctgtgtgaattccattttcccgcaacctgtcgcccgctggctgtggaaccgggtgccgctgcggccgccgtcagcatcacttatgggaccccattcgccgctcgcggagcggatttccaagccttgcctgttggcagctccgcggcggttgctccactgggactgcagctcatgtgcaccgccccgcctggtgcggttcaaggccactgggcccgcgaagccccaggggcttgggactgctccgtggaaaatggtgggtgtgagcacgcgtgcaacgcaatccccggagcgccgcgctgccagtgccccgctggagctgcgctgcaagcggatgggcggtcgtgtacggcttcagctacccaaagctgtaacgacctctgtgaacatttctgcgtccccaacccggatcagccgggtagctactcctgtatgtgcgaaactggataccggctggccgcggaccagcatcgctgcgaggatgtggatgattgtatcctggaaccatcgccgtgcccccagaggtgtgtcaacactcaaggtggcttcgaatgccactgctaccctaactatgacctggtggatggagagtgcgtggaaccagtggacccttgtttccgtgccaattgtgaataccaatgccaaccgctgaaccaaacctcatatctctgcgtctgcgcagagggtttcgcccccatcccgcacgagccgcatcggtgtcagatgttctgcaaccagaccgcctgccccgcagattgtgacccgaacacccaggcctcatgcgagtgcccggagggatacatactcgacgacggattcatctgcactgacattgatgagtgcgagaacggcggcttctgctccggagtgtgccacaatctccctgggactttcgagtgcatctgcggacctgattcggcgttggcgcgccatatcggtaccgactgcgactccgggaaggtcgatggaggcgattcaggctcgggagagcctccgccatcgccaaccccgggttcgactctgactccgcccgctgtgggactcgtccactcgggactgctcatcggaatctccattgcctctctctgcctggtggtggctctgcttgcgctcctgtgccatctgagaaaaaagcagggagccgcaagagccaagatggagtacaagtgcgccgccccaagcaaagaagtggtgcttcagcacgtgagaacggagcgcacccctcagaggttg

SEQ ID NO: 7787 - DNA, 1725 bp, Artificial Sequence
  derived and/or modified sequence
atgctcggagtccttgtgctcggagcgctcgcacttgccggacttggttttccagcccccgccgaacctcagccaggtggttcacaatgcgtggaacatgactgtttcgcactttacccggggcctgccactttcctgaatgcatcccagatatgtgacgggctccggggtcatcttatgaccgtgcgatcatccgtcgcagcagacgtgatttcgttgctgcttaacggtgacggtggcgtggggagacgacgcctctggatcggacttcagctgcccccgggttgtggagatccaaaaagacttggacctcttagaggatttcaatgggtgaccggagataacaacacctcatactccagatgggcacgcctggatctcaacggagcacccctgtgtggtccactttgtgtggcagtgagcgcagcagaagcaactgtgcccagcgagcctatttgggaggaacagcaatgtgaagtgaaggcagacgggtttctgtgtgaattccatttccctgcaacgtgtcgtccactggcggtggaacctggcgcagcagctgcagcggtgtcaatcacgtacggtaccccttttgcggccagaggagcggatttccaagcactcccagtcgggtcgtcggcagcagtcgcacccctcggactccaacttatgtgtactgcaccaccaggagccgtgcaaggtcactgggcacgcgaagcacccggcgcatgggattgttcagtggaaaatggtggatgtgaacatgcctgcaacgcaatcccaggagcaccacgatgccaatgtccggcaggtgcagctctccaggcagacggccgctcgtgcactgcatcagccacccagagctgtaatgatctgtgcgaacatttttgtgtgcctaatcctgatcagccggggtcctactcttgcatgtgtgagactggttacaggctcgctgcagaccaacaccgctgtgaagatgtggatgattgcattctcgagccatcaccttgtccacagcggtgcgtcaatacccagggagggttcgaatgtcattgttaccctaactacgatctcgtcgacggggagtgcgtggagccagtcgacccttgttttcgtgcaaattgtgagtaccaatgtcagccacttaatcaaacgtcgtacctctgtgtgtgcgcagaaggcttcgcgcctattcctcacgagcctcacaggtgtcagatgttttgtaaccagactgcgtgtccagcagattgtgatccaaacacgcaagcgtcctgtgaatgcccagaagggtacattctcgacgatgggttcatttgcaccgatatcgatgagtgtgagaatggaggattttgtagcggagtctgtcataatctgccgggcacgtttgaatgtatttgcggccctgattcggccttggcgaggcacatcggcaccgattgtgactccggtaaagtcgacggtggggatagcggaagcggagagcctcctcccagccctactccaggatcgacgctgactcctcctgcagtgggactggtgcattccggacttctgataggaatcagtattgcctcgctgtgccttgtggtcgcactcctggcactgctttgtcaccttcgcaagaaacaaggggcagcacgggcaaagatggaatacaagtgtgcagcaccttccaaggaggtggtgctccaacatgtgcgtactgaaaggactcctcagagactc

SEQ ID NO: 7788 - DNA, 1725 bp, Artificial Sequence
  derived and/or modified sequence
atgctgggtgtgctcgtgctgggcgccctggcacttgccggattggggttcccagcacctgcggagccccagcccgggggaagccagtgtgtagaacatgattgtttcgctttgtacccagggcctgctactttccttaatgcatcccaaatatgtgatggcttgcgaggccacctcatgacagtgagaagtagcgttgccgcggatgtcattagcttgttgttaaacggcgatgggggggtgggacgtcgccggttgtggataggactgcaactgcctccaggatgtggggaccctaaacgtctgggaccactccgggggtttcagtgggtgacaggggacaataacacaagttactcaagatgggctcggcttgacctgaatggcgccccattgtgcggccctctgtgtgtggcagtgtccgccgcagaggccactgtgcccagtgagccgatttgggaagaacagcagtgtgaagtcaaagccgacggcttcctttgcgaatttcatttccctgccacttgtcggcccttggctgtggaaccgggagctgctgccgccgctgtgagtattacctatggaacaccctttgctgcaagaggtgccgattttcaggccctgccagtgggatccagcgctgcggtggctcccctgggactccaactgatgtgcactgctcccccgggagccgttcaaggccattgggccagagaggcccctggggcttgggattgtagcgtagagaacggagggtgtgagcatgcatgtaatgccatcccgggcgcaccgcgctgccagtgtcccgcaggggctgccctgcaagcggacgggaggagctgtaccgcgtcagctacccagtcctgcaatgatctgtgcgaacacttttgcgtgccgaaccccgatcaaccaggcagttatagctgtatgtgcgagactgggtatagacttgctgccgaccagcacagatgcgaagacgtggacgattgcatcttggagccctctccgtgcccccagaggtgtgtcaacacccagggcggtttcgaatgccactgttacccaaactatgaccttgtggacggcgaatgcgtggaacctgtcgacccctgtttccgggctaattgcgagtatcagtgccagccccttaaccagacctcctacttgtgcgtctgcgccgagggcttcgcaccaatcccgcacgagcctcataggtgtcaaatgttttgtaaccagactgcttgccccgctgactgtgacccaaacacccaagcctcctgtgagtgtccagaaggttacatccttgatgatggttttatttgtaccgatattgatgaatgcgagaacgggggcttctgttcgggggtgtgccacaatctgcctggaacgttcgagtgcatctgtggtccggattccgccctggctcgccatataggaacggactgcgactctggaaaggtggacgggggtgacagcggttcaggagagcctccgcctagcccgaccccagggagtactctgacaccaccagccgttggtttggtgcacagcggcctcctgatcggaattagcatcgcctccctgtgcctggtggtggcattgcttgccctcctgtgccacctccggaagaaacagggggctgccagagccaagatggagtataaatgtgcggctccatccaaggaggttgtgctgcagcatgtgagaaccgagagaacaccccagcggctg

SEQ ID NO: 7789 - DNA, 1725 bp, Artificial Sequence
  derived and/or modified sequence
atgcttggggttctggttttaggagccctggctctggctggcctgggctttccagccccggctgaacctcagcctggaggctcccagtgcgtagagcatgactgctttgcgctgtacccaggcccagccacgtttctgaatgcatcccagatatgtgatggattgcgggggcacctgatgacggtccgcagctccgtcgcggctgacgtgatttctcttctgctcaatggtgacgggggcgtgggaaggcgccgtctgtggatcgggctgcagctgccccctggctgtggggatccaaaaagacttggacctctgcgaggcttccagtgggtcacaggagacaacaatacaagctactcaagatgggcccgcctggacctgaatggtgctccactttgcggtccattgtgtgtcgcagtgtctgccgccgaagccacagttccttccgagccaatttgggaggaacaacagtgtgaagtgaaggccgacgggttcttgtgtgagttccactttcccgcaacgtgtagacccttggccgtggagccaggtgccgctgccgctgctgtgtccataacgtacggaaccccattcgcagccagaggagcagattttcaagctttgcccgtggggtcatctgcagcagtcgcccccttaggcctgcaattgatgtgtacggcacctccgggcgccgtccaaggacactgggctagggaggcccctggtgcctgggactgtagcgtcgagaacggaggctgtgagcacgcatgcaacgccatccctggagcaccccgctgtcaatgccccgcaggtgccgccttgcaggcggacggcagatcttgcaccgcgagcgcaacccagagttgcaacgatttgtgcgagcatttttgtgtgcccaatcctgaccagcctggctcctatagttgcatgtgtgagacgggctatcggttggctgctgatcagcatcgctgcgaagatgtcgacgactgcatcttggagccatcaccctgtccccaaagatgcgtgaatacacagggcggatttgaatgccactgctatccgaattacgaccttgtagacggggaatgtgtcgaaccagttgacccatgtttccgggctaattgcgagtaccagtgccagcccctgaatcagaccagctatttgtgcgtctgcgccgaaggctttgcaccgataccccacgagccgcatcgttgtcagatgttttgcaaccaaacagcctgtccggccgattgtgaccctaacacacaggccagttgcgaatgccccgagggttatatcctggacgatggcttcatctgtaccgatatcgatgaatgcgagaacggcggcttctgttccggcgtttgccacaatcttcctggcacattcgagtgtatttgcggccccgactccgccttagcccggcacatcggaacagattgtgactctggcaaggtcgatggaggggactctggatctggggaaccacctcctagccccactccaggcagcacgctgactccccccgccgtgggcctggtacattctgggctgctaattggcatttcaatcgcatccctctgcttggtagtggctctcctggcacttttatgccatttacgaaaaaaacagggagctgctagggccaaaatggaatataagtgcgctgcgccttctaaggaggtggtgctgcagcatgttaggactgaaagaacaccacaacggcta

SEQ ID NO: 7790 - DNA, 1725 bp, Artificial Sequence
  derived and/or modified sequence
atgctgggtgtcttggtgctgggggcgctggccctggcaggactgggcttccccgctccagcagaacctcagcccggaggaagtcagtgtgtggaacatgattgttttgcactgtatcccggacccgcgacattcctcaatgctagccagatctgcgacggccttaggggtcatttgatgacggtacgtagttctgtggcagcagatgtgatttcccttcttttaaacggagatggaggggtgggccggaggcgcttgtggatcggattgcagctgccccctggatgtggagaccccaagagattgggacctctcagaggattccaatgggtgaccggagacaacaacacctcttacagccgctgggcgcgactcgacttaaatggagctcctctgtgcgggcccctgtgcgtcgccgtgagtgccgccgaagctaccgtcccgtctgagcctatctgggaggaacaacagtgtgaggtgaaggcagatggctttttgtgcgaattccacttccccgctacgtgtcggcccctggcagtagagccaggtgccgccgctgccgctgttagtattacatacggtaccccattcgctgcccggggcgcagacttccaggccctgcccgtgggatccagtgcagccgtggcccctctgggtctgcagctcatgtgtaccgctccccctggcgctgtccagggacattgggcgagggaagctcctggagcctgggactgcagcgtcgaaaatggcggctgtgaacacgcatgcaacgctatcccaggggccccgcgatgtcagtgtccagccggcgcggccctgcaggctgatggcagatcctgtactgctagcgcaactcagtcgtgtaacgatctgtgtgagcacttctgtgtgcctaacccggaccaacctggttcctacagttgcatgtgcgaaacaggctaccggcttgccgccgatcaacataggtgcgaggatgtggacgattgcattttagaaccaagtccatgtccccagcggtgcgtgaatacacagggtgggttcgagtgtcattgttatccaaactacgatctcgtggatggggagtgtgtggaaccagtggacccgtgttttagggcaaattgcgaataccaatgccagcctctgaaccagaccagctacctgtgcgtgtgcgcagagggtttcgccccaatcccccacgagccgcaccgctgccagatgttttgtaatcagaccgcatgcccggccgactgcgatcccaacacccaagcgagttgtgaatgccctgaagggtatatccttgatgatgggttcatttgcacagatattgacgagtgcgagaacggaggattctgctctggggtatgtcacaacctgcctggcacatttgaatgtatctgcggcccagacagcgcgctcgcacgccacatcgggacagactgcgattctggtaaggtggatggaggggatagcggctcaggagagccaccaccctcacctacaccaggttcaacattgactccacctgccgtgggcctggttcactccgggcttctaattggcataagcattgcttccctttgccttgtggtggccctgttggccttactgtgtcatctccgaaaaaagcaaggtgccgctagagcgaaaatggagtataaatgtgccgctcctagcaaagaggttgtcttgcagcatgttcggaccgaacggactcctcagagacta

SEQ ID NO: 7791 - DNA, 1725 bp, Artificial Sequence
  derived and/or modified sequence
atgctaggtgtcctggtgcttggcgcacttgctctggccggcctgggcttcccagctcctgccgaaccgcagcctggcggcagccagtgcgtggagcacgattgtttcgccctgtaccccgggcctgcaacctttttgaatgccagccaaatttgcgacggcttgcgtggacatctgatgacagtgcgctcgtctgtggcagctgacgtaatttctctactgttgaatggagacgggggggtagggcgcaggcggctatggatcgggttgcagttacctcctggctgcggtgacccgaagaggctggggcctctgcgaggatttcaatgggtcacaggggacaacaacacttcgtattcacgatgggctagactcgacctcaatggagcccctctgtgtggcccgctgtgtgttgcggtttctgccgccgaggccacagtcccaagtgagcccatctgggaagaacagcaatgcgaagtgaaagcggacggatttctctgtgaattccactttcctgcaacttgccgaccattagcagtagagccaggggcagccgccgcggcagtgagtataacttacggaactccttttgcggctaggggtgcggatttccaggctctacctgtgggctcctcagctgctgtggccccactgggcctgcagttgatgtgtacagctccacccggcgccgtgcaggggcactgggcgcgggaagctcccggggcatgggattgctccgtcgagaacgggggctgtgagcacgcctgcaacgccatcccaggagctcctcgatgccagtgccctgccggagctgcactgcaggcggacggcaggtcttgcactgcatcagcaactcagtcttgcaacgacctctgcgagcacttttgtgttcctaatcccgatcagcccggctcatactcatgtatgtgcgaaacaggctaccgtctagccgcagatcagcatcgttgtgaggatgtcgatgattgcatcctagaaccaagtccctgtccacagagatgcgtgaacactcaggggggcttcgagtgccactgttatcctaactatgatctagttgacggggaatgtgtagagcccgtcgacccatgcttccgagcgaattgcgagtaccaatgtcagcctttgaatcagacatcctacttatgcgtctgtgctgaaggtttcgcccctattccgcatgaacctcaccgttgccagatgttctgcaatcagactgcttgtcccgcagactgcgaccccaatacccaggccagctgtgagtgtcccgaaggctatatattggatgacgggtttatttgcacagacattgacgaatgcgagaacgggggattttgctccggcgtttgccacaatctgcccggtacattcgagtgcatctgcggccccgattctgcactggcccgccacattgggaccgattgcgattcaggaaaagtggatggaggggatagtggatcgggcgagccacctccgagccctactcctggtagcaccctgacacccccagcagttgggctggtccacagcggtttgctgatcggaataagcatcgcctctctgtgtcttgtagtagctctgctggcgctgttatgtcacctccggaaaaagcaaggagcagcccgggccaaaatggaatacaagtgtgctgcaccttccaaagaagttgtgcttcagcacgtgcgcaccgagaggacccctcaacgtctc

SEQ ID NO: 7792 - DNA, 1725 bp, Artificial Sequence
  derived and/or modified sequence
atgttgggcgttctcgtgctcggcgctctggccctcgctggactcggcttccccgctcccgcagagccacaacccggcgggtcccaatgcgtcgagcacgactgtttcgccttgtaccctgggcccgcaactttcttgaatgccagtcagatctgcgacggcctgcggggacacttaatgaccgttagatcctccgtcgctgccgatgtgatctcactcctgttgaatggagatggaggcgtcggccgccgccgcctgtggatcggattgcagctgcccccagggtgcggtgatcctaagcgcctcgggcctctccggggttttcagtgggtgacaggtgacaacaatacctcttactctcggtgggctcgtctggacctgaatggcgcccccctctgtggcccactgtgtgtggcagtgagtgccgccgaggccacagtgccctccgagcccatttgggaagaacaacagtgtgaggtaaaagcagacgggtttctttgcgaatttcatttcccggctacatgccgccctctcgcggtggagccaggagctgcggctgctgccgtatcaatcacatatggcactcctttcgcagctcgtggcgccgacttccaagctctcccggtaggatccagcgcggccgtggcacctctgggactccagcttatgtgcacggctccacccggggcagtgcagggacactgggctagagaggcccccggtgcttgggactgcagcgtggagaatgggggctgtgagcacgcctgtaatgccattcctggcgctccaagatgccagtgtcctgcgggagcagctttgcaggcagatggacgatcttgcaccgccagtgccactcagagttgtaatgacctttgtgagcatttctgcgtgccaaatcccgaccagcctggctcatattcgtgcatgtgcgagacgggatatcggcttgccgctgaccagcatagatgtgaggacgtggacgattgtatcctggagccgagcccatgtccccaacgctgcgtcaatacgcagggcggcttcgagtgtcattgttaccctaactatgatctcgttgatggtgaatgcgtcgagcccgttgatccatgtttccgcgcgaattgcgagtaccagtgtcagcccctcaaccagacgagctacctctgcgtgtgtgctgagggtttcgctccgattccacacgagcctcaccgatgccagatgttttgtaatcagacagcctgccctgcagattgcgatcccaatacacaggcttcttgcgagtgtcccgaggggtacatcctcgacgacggattcatctgcaccgacattgacgagtgtgagaatggcggcttttgttctggggtttgtcataatttaccaggcacattcgagtgtatatgtggcccagattctgcactggcacggcatattggaacagattgtgattctggcaaagttgacgggggtgatagtgggtccggagaaccgccgcctagtccaacccccggatccaccttaacaccccctgctgtaggtctggtgcatagcggcctcctgattggtatttcaatagcttctctgtgtctcgtcgtagccctgctggcgctgctgtgtcacctgcgcaagaagcagggggccgcccgggctaagatggaatacaaatgtgccgctccatctaaggaggtggttctgcagcacgtgcggacggagcgaactccacaacgtttg

SEQ ID NO: 7793 - DNA, 1725 bp, Artificial Sequence
  derived and/or modified sequence
atgctaggagtactggtgcttggagccctggcccttgcaggtctggggttccccgcccctgctgaaccacagccaggcggatcccagtgcgttgagcacgactgcttcgccctgtacccgggacccgcaacattccttaatgcctcgcaaatttgtgacggactgcgcgggcacctgatgactgtaaggagcagtgtggctgccgatgttataagcctgctcctgaacggagatggcggagtcggacggcgacgcctgtggattggcctgcagctgcccccgggctgcggtgatccgaagcgtttgggccctcttaggggttttcaatgggttaccggagacaataacacaagctacagcaggtgggcacggttagacctcaacggcgctccattgtgtggaccgctttgtgttgcagtgagtgctgctgaagctactgtgccctctgagcctatctgggaggaacagcaatgtgaggtcaaggccgacgggtttctatgtgaatttcatttccctgccacttgccgcccactggcagtcgagcctggggctgccgcggcagccgtgagcattacttacggcactccatttgccgcacgaggcgcagacttccaggctctgcccgtagggagcagcgccgccgttgccccactaggattgcaactgatgtgcaccgcccctccaggagccgtgcagggccactgggcacgcgaagcacccggtgcttgggattgcagcgtcgaaaatggtggctgcgagcatgcctgcaacgctatacccggcgcccctagatgtcaatgccctgcaggagctgcactccaagccgatggaagatcctgcacagcatcagctacgcagagctgcaacgacctatgcgagcacttctgcgtgccaaaccccgatcaacctggcagttactcctgcatgtgcgagaccggatacaggcttgcggcggatcagcatcggtgtgaggatgtcgacgactgtattttggagcctagtccgtgtcctcagaggtgtgtaaacactcagggcggtttcgaatgccactgttaccctaactatgatctggtcgacggggagtgtgtagaacccgttgatccatgctttcgcgccaactgtgaataccagtgtcaacccctgaaccaaacctcgtacctgtgcgtgtgcgccgaagggttcgcccccatcccccacgaacctcaccgttgtcagatgttctgtaatcagaccgcgtgccctgcggactgtgatccaaacacgcaagcctcatgtgagtgcccagagggctacattttggacgatggctttatctgcaccgatatcgacgaatgcgagaacgggggcttttgttccggcgtgtgtcataacctgcccgggaccttcgaatgcatttgtggcccggattcagctttagcccgccacatcggcacagactgtgactcaggcaaagttgacgggggcgattctggctctggggagcctccaccctcccccacccctggatcgaccctcaccccacctgctgttggtctcgtgcactctgggctgctcatcggaatctccattgcctcattgtgtttagtggtcgcattgttggccctgctgtgtcacttgagaaaaaaacaaggcgcggcacgagcgaaaatggagtataaatgcgccgccccatctaaggaggtggtactgcagcatgttagaaccgaacgtaccccccaaaggctc

SEQ ID NO: 7794 - DNA, 1725 bp, Artificial Sequence
  derived and/or modified sequence
atgcttggagttctggtgctcggcgcattggcactggcaggactgggcttccctgcacctgcagagcctcaacctgggggatcgcagtgtgtggagcatgactgtttcgcgctctatccgggaccggcaaccttcctgaatgcttcgcaaatttgtgacggactgcgtggtcacctgatgaccgtcaggtccagcgtggccgcggatgttatatcattgctgctgaatggggatggaggagtgggacggcgcagactctggattggtttgcaactcccgcccggttgcggagatcctaagcgtctgggaccactccgggggtttcaatgggtgaccggtgataacaacacttcgtatagtcgctgggcgcgcctggatcttaatggggcaccgttgtgtgggccgctctgcgtggcggtgtcagctgccgaagcaaccgtcccaagcgaaccaatctgggaagagcaacagtgtgaggtgaaggcagacggattcctttgtgaatttcattttccagcaacttgcagaccactggcagtggaacctggcgctgccgcagccgcagtctcgattacttacgggacgccgtttgccgcacgcggtgcagattttcaagcgcttcccgttggttcgagcgccgccgtggctccgctgggtctgcaacttatgtgcacggcaccaccaggtgcagtccaaggtcattgggctcgcgaagccccaggagcttgggattgctcggtggaaaacggaggatgcgaacatgcttgcaacgccattcctggagcgcctcggtgccagtgtcccgcaggtgctgcacttcaggccgacggacgttcatgtactgcgtcagcaacccagtcctgtaatgatctttgcgaacatttttgtgtgccaaacccggaccaaccaggatcatactcctgtatgtgtgaaaccggttaccgtctggcggctgaccaacatcgctgtgaagatgtggacgattgtatcctcgagccatccccttgtccacagcggtgcgtaaacacccaaggcggtttcgaatgtcactgctaccccaactacgatttggtggatggtgaatgtgtcgaacctgtggacccttgcttccgtgcaaactgtgagtaccaatgtcagccactgaatcaaacttcgtacctttgtgtgtgcgccgaaggatttgcccctattccacatgaaccccatcgttgtcagatgttttgtaatcaaactgcgtgtccggcggattgtgaccccaacacgcaggcatcctgtgagtgtcctgaggggtacattctggatgacggattcatatgcactgatatcgacgaatgcgagaacggaggcttttgtagcggcgtgtgccataacctgcctggaacttttgagtgcatttgcggaccagattccgcactcgcgcgacacatcggcaccgactgtgactcgggaaaagtggatggaggggattccggtagcggggaaccaccaccatcgccaacgccgggatcgacccttactccccctgcggtgggattggtgcatagcggactgctgattggaatcagcatcgcctccctttgtctggtcgtggcccttttggcactcctctgtcacctgaggaagaagcagggtgcagctagagcaaagatggaatacaaatgcgctgccccatcgaaagaggtggttcttcagcacgtgcgcaccgagcggactccacagaggctt

SEQ ID NO: 7795 - DNA, 1725 bp, Artificial Sequence
  derived and/or modified sequence
atgttaggtgtattagttttaggtgcgctagcgttagcgggtctaggttttccggcgccggcggaaccgcaaccgggtggttcgcaatgtgttgaacatgattgttttgcgttatatccgggtccggcgacgtttttaaatgcgtcgcaaatatgtgatggtttacgaggtcatttaatgacggtacgatcgtcggttgcggcggatgttatatcgctactattaaatggtgatggtggtgttggtcgacgtcgactatggataggtctacaattaccgccgggttgtggtgatccgaaacgtttaggtccgttacgtggttttcaatgggttacgggtgataataatacgtcgtattcgcgttgggcgcgtctagatttaaatggtgcgccgctatgtggtccgttatgtgttgcggtttcggcggcggaagcgacggttccgtcggaaccgatatgggaagaacaacaatgtgaagtaaaagcggatggttttctatgtgaatttcattttccggcgacgtgtcgtccgctagcggttgaaccgggtgcggcggcggcggcggtttcgataacgtatggtacgccgtttgcggcgcgtggtgcggattttcaagcgctaccggtaggttcgtcggcggcggttgcgccgctaggtttacaattaatgtgtacggcgccgccgggtgcggtacaaggtcattgggcgcgtgaagcgccgggtgcgtgggattgttcggtagaaaatggtggttgtgaacatgcgtgtaatgcgataccgggtgcgccgcgatgtcaatgtccggcgggtgcggcgttacaagcggatggtcgttcgtgtacggcgtcggcgacgcaatcgtgtaatgatttatgtgaacatttttgtgttccgaatccggatcaaccgggttcgtattcgtgtatgtgtgaaacgggttatcgtttagcggcggatcaacatcgatgtgaagatgttgatgattgtatactagaaccgtcgccgtgtccgcaacgttgtgtaaatacgcaaggtggttttgaatgtcattgttatccgaattatgatttagttgatggtgaatgtgtagaaccggtagatccgtgttttcgtgcgaattgtgaatatcaatgtcaaccgctaaatcaaacgtcgtatctatgtgtatgtgcggaaggttttgcgccgataccgcatgaaccgcatcgttgtcaaatgttttgtaatcaaacggcgtgtccggcggattgtgatccgaatacgcaagcgtcgtgtgaatgtccggaaggttatatattagatgatggttttatatgtacggatatagatgaatgtgaaaatggtggtttttgttcgggtgtttgtcataatttaccgggtacgtttgaatgtatatgtggtccggattcggcgttagcgcgtcatataggtacggattgtgattcgggtaaagtagatggtggtgattcgggttcgggtgaaccgccgccgtcgccgacgccgggttcgacgttaacgccgccggcggttggtctagttcattcgggtttactaataggtatatcgatagcgtcgctatgtttagttgttgcgttactagcgctactatgtcatttacgtaaaaaacaaggtgcggcgcgagcgaaaatggaatataaatgtgcggcgccgtcgaaagaagttgtattacaacatgtacgaacggaacgaacgccgcaacgtcta

SEQ ID NO: 7796 - DNA, 1871 bp, Artificial Sequence
  derived and/or modified sequence
gggaaataagagagaaaagaagagtaagaagaaatataagagccaccatgctgggagtactggtgctcggggccttggcgcttgcgggacttgggttcccggcaccggctgagccccagccgggaggttcacagtgtgtagaacacgactgctttgcgctctaccctggacccgctacatttctgaatgcgtcgcagatctgtgacggactccgcggtcatcttatgacggtgagatcgtccgtagcggcggatgtcatttcgcttttgctcaacggggacggaggtgtgggcaggaggcgcctttggatcgggctccagttgccgcctgggtgcggtgatcccaagcggttggggcctctgaggggatttcaatgggtaacgggtgacaacaacacatcctattcccggtgggccagactcgacttgaatggtgcccctctttgcggacccctctgcgtggcggtgtcggcagcagaggcaacggtcccgagcgagccgatttgggaagagcagcagtgtgaagtcaaagcggacgggttcctttgcgagttccacttccccgcgacgtgcagacccttggcagtagagcccggagcggcagcagccgcggtatccatcacttacgggacgccgttcgctgcgagaggagcagacttccaagctcttcccgtcggctcgtcggcagcggtggccccattgggactgcaactgatgtgcactgcaccgccaggggcggtccagggacactgggcacgcgaggcaccgggagcgtgggactgttccgtcgaaaacggcggatgcgagcatgcatgtaacgcaatccccggagcgcctcgctgccagtgcccagctggagcggcgctgcaagcggatgggcggtcgtgtacggcctcagccactcagagctgcaacgatctgtgcgagcatttctgcgtcccgaatccggaccagcctgggtcgtatagctgtatgtgtgaaacaggatatcggttggcagcagaccagcacagatgcgaggatgtcgatgattgtattctggaaccctcgccttgtccgcagcgatgcgtcaatacgcagggtggtttcgagtgtcactgttatccaaactacgatcttgtggacggagaatgtgtcgagccggtcgatccctgctttcgagctaactgtgagtaccagtgtcaacccctgaatcagacaagctacctctgtgtgtgcgccgaaggatttgctcccatcccgcacgaaccccatcggtgtcagatgttttgtaaccaaacggcctgccctgccgattgcgatccgaatacacaggcttcatgtgagtgcccagagggatatatcttggatgatggttttatctgcactgacattgacgaatgtgaaaatggtgggttttgctcgggtgtgtgccacaatctccccggtaccttcgaatgcatctgtggtcccgactcggctctggcacgccatatcgggacagattgtgatagcgggaaggtcgacggtggggactccggctccggagagcctccgccctcacccacgccagggagcaccttgaccccaccggcggtggggttggtgcactcgggattgttgatcgggatctcaattgcctcgctctgccttgtggtggcgcttttggccttgctgtgccatctccgcaagaagcaaggtgcagctcgcgcgaaaatggaatacaagtgtgccgcaccgagcaaagaggtcgtcctccagcacgtaagaacagaaaggactcctcagcgactctgataagctgccttctgcggggcttgccttctggccatgcccttcttctctcccttgcacctgtacctcttggtctttgaataaagcctgagtaggaag

SEQ ID NO: 7797 - DNA, 1728 bp, Artificial Sequence
  derived and/or modified sequence
atgctgggcgtgctggtgctgggcgccctggccctggccggcctgggcttccccgcccccgccgagccccagcccggcggcagccagtgcgtggagcacgactgcttcgccctgtaccccggccccgccaccttcctgaacgccagccagatctgcgacggcctgagaggccacctgatgaccgtgagaagcagcgtggccgccgacgtgatcagcctgctgctgaacggcgacggcggcgtgggcagaagaagactgtggatcggcctgcagctgccccccggctgcggcgaccccaagagactgggccccctgagaggcttccagtgggtgaccggcgacaacaacaccagctacagcagatgggccagactggacctgaacggcgcccccctgtgcggccccctgtgcgtggccgtgagcgccgccgaggccaccgtgcccagcgagcccatctgggaggagcagcagtgcgaggtgaaggccgacggcttcctgtgcgagttccacttccccgccacctgcagacccctggccgtggagcccggcgccgccgccgccgccgtgagcatcacctacggcacccccttcgccgccagaggcgccgacttccaggccctgcccgtgggcagcagcgccgccgtggcccccctgggcctgcagctgatgtgcaccgccccccccggcgccgtgcagggccactgggccagagaggcccccggcgcctgggactgcagcgtggagaacggcggctgcgagcacgcctgcaacgccatccccggcgcccccagatgccagtgccccgccggcgccgccctgcaggccgacggcagaagctgcaccgccagcgccacccagagctgcaacgacctgtgcgagcacttctgcgtgcccaaccccgaccagcccggcagctacagctgcatgtgcgagaccggctacagactggccgccgaccagcacagatgcgaggacgtggacgactgcatcctggagcccagcccctgcccccagagatgcgtgaacacccagggcggcttcgagtgccactgctaccccaactacgacctggtggacggcgagtgcgtggagcccgtggacccctgcttcagagccaactgcgagtaccagtgccagcccctgaaccagaccagctacctgtgcgtgtgcgccgagggcttcgcccccatcccccacgagccccacagatgccagatgttctgcaaccagaccgcctgccccgccgactgcgaccccaacacccaggccagctgcgagtgccccgagggctacatcctggacgacggcttcatctgcaccgacatcgacgagtgcgagaacggcggcttctgcagcggcgtgtgccacaacctgcccggcaccttcgagtgcatctgcggccccgacagcgccctggccagacacatcggcaccgactgcgacagcggcaaggtggacggcggcgacagcggcagcggcgagcccccccccagccccacccccggcagcaccctgaccccccccgccgtgggcctggtgcacagcggcctgctgatcggcatcagcatcgccagcctgtgcctggtggtggccctgctggccctgctgtgccacctgagaaagaagcagggcgccgccagagccaagatggagtacaagtgcgccgcccccagcaaggaggtggtgctgcagcacgtgagaaccgagagaaccccccagagactgtag

SEQ ID NO: 7798 - DNA, 1674 bp, Artificial Sequence
  derived and/or modified sequence
atgagcgaggccgccagccagggcctgagagccgccgccagaagcgtgtgggccggcaccgacagaagaggctgcagacacagaagacccgtgcccctgtgcagcggcaccgccctgagccagtgccccagattccccagaagactgcacgccgccagactgggcaacatgctgggcgtgctggtgctgggcgccctggccctggccggcctgggcttccccgcccccggctgcggcgaccccaagagactgggccccctgagaggcttccagtgggtgaccggcgacaacaacaccagctacagcagatgggccagactggacctgaacggcgcccccctgtgcggccccctgtgcgtggccgtgagcgccgccgaggccaccgtgcccagcgagcccatctgggaggagcagcagtgcgaggtgaaggccgacggcttcctgtgcgagttccacttccccgccacctgcagacccctggccgtggagcccggcgccgccgccgccgccgtgagcatcacctacggcacccccttcgccgccagaggcgccgacttccaggccctgcccgtgggcagcagcgccgccgtggcccccctgggcctgcagctgatgtgcaccgccccccccggcgccgtgcagggccactgggccagagaggcccccggcgcctgggactgcagcgtggagaacggcggctgcgagcacgcctgcaacgccatccccggcgcccccagatgccagtgccccgccggcgccgccctgcaggccgacggcagaagctgcaccgccagcgccacccagagctgcaacgacctgtgcgagcacttctgcgtgcccaaccccgaccagcccggcagctacagctgcatgtgcgagaccggctacagactggccgccgaccagcacagatgcgaggacgtggacgactgcatcctggagcccagcccctgcccccagagatgcgtgaacacccagggcggcttcgagtgccactgctaccccaactacgacctggtggacggcgagtgcgtggagcccgtggacccctgcttcagagccaactgcgagtaccagtgccagcccctgaaccagaccagctacctgtgcgtgtgcgccgagggcttcgcccccatcccccacgagccccacagatgccagatgttctgcaaccagaccgcctgccccgccgactgcgaccccaacacccaggccagctgcgagtgccccgagggctacatcctggacgacggcttcatctgcaccgacatcgacgagtgcgagaacggcggcttctgcagcggcgtgtgccacaacctgcccggcaccttcgagtgcatctgcggccccgacagcgccctggccagacacatcggcaccgactgcgacagcggcaaggtggacggcggcgacagcggcagcggcgagcccccccccagccccacccccggcagcaccctgaccccccccgccgtgggcctggtgcacagcggcctgctgatcggcatcagcatcgccagcctgtgcctggtggtggccctgctggccctgctgtgccacctgagaaagaagcagggcgccgccagagccaagatggagtacaagtgcgccgcccccagcaaggaggtggtgctgcagcacgtgagaaccgagagaaccccccagagactgtag

SEQ ID NO: 7799 - DNA, 1728 bp, Artificial Sequence
  derived and/or modified sequence
atgctgggcgtattggtgctaggagccctagctcttgccggacttgggttccctgcaccagcagaaccccagcccggtggctcccagtgcgtggagcacgactgcttcgccctgtacccagggccagccactttcctaaacgcatcccagatctgcgacggcctacggggacacctgatgaccgtccgctccagcgtggctgccgatgtcatttccctccttctcaacggagacggaggagtcggacggcgcagactttggattggcctgcagttgcccccgggttgtggtgacccaaaacgcctgggcccacttagaggcttccagtgggtcaccggcgacaacaatacaagctactccagatgggcacgtcttgatctcaatggggctcctttatgcggccctttgtgcgttgcggtgtccgcagctgaggctaccgttccctccgagccgatttgggaagaacagcagtgtgaggtcaaggccgacggatttctgtgcgagtttcattttcccgctacctgtaggccacttgccgtggagcctggtgccgcagcagctgctgtgagtatcacatacggtacccctttcgcagctaggggagcagacttccaggcactccccgtgggctcctctgctgctgtcgcccccctgggtttacagctgatgtgcaccgcgccccccggagctgtacagggacactgggcccgagaagccccaggcgcctgggactgtagtgttgagaacggtggatgcgagcacgcctgcaatgcaatcccaggagcacccagatgccaatgcccagccggcgccgctttacaggccgatggtcggtcttgcacggcctctgcaacccagagctgtaatgatctgtgcgaacacttttgcgtccctaacccggaccagcctggcagctactcatgtatgtgtgagaccggttatcgcctagccgccgaccaacacagatgcgaggatgtggatgattgcattttagagccttccccttgcccacagcgttgtgtgaatacccagggcgggttcgaatgccactgttacccaaattacgacctggtggacggggaatgcgttgagcctgtcgacccctgttttcgggcgaattgcgagtaccagtgccagcctctaaaccagacctcttatttgtgtgtgtgcgcggaaggctttgcccccattccacacgagccacaccggtgccagatgttctgcaaccagacggcatgtcctgcagactgcgacccgaatactcaggcctcatgcgagtgccctgaagggtacatcctggacgacggtttcatctgcactgatatcgacgagtgtgagaatggaggcttctgcagcggggtgtgccataatttgccggggactttcgagtgcatctgcgggcccgattcagcacttgctcgacatatcggaaccgactgtgatagcggcaaggtggacgggggcgatagtggaagtggggaacctccaccgtcgccaactcctggctccacactcacgcctcctgcggtgggcctggtccatagtgggcttctgattggtatctctatcgcgagtctgtgcttggttgtggccttgctcgcattactgtgccacctacgcaaaaaacaaggcgccgccagggccaagatggagtataaatgcgcagctccctccaaagaagtagtgctgcagcacgttcgcacggagcgaaccccccagcgactatag

SEQ ID NO: 7800 - DNA, 1674 bp, Artificial Sequence
  derived and/or modified sequence
atgtctgaagctgcaagtcagggtttgcgagcagccgctaggagtgtatgggcgggaacagatagacgcggttgtcgccatcgcaggccagtgcctctgtgtagtgggacagccctctctcagtgcccccgtttcccgagaagattgcacgcggcgcgtttgggtaacatgctcggggttcttgtgctgggagccctggccctcgccggattgggctttcccgcacccgggtgtggcgatcctaagcggctgggacctttacgcggcttccaatgggtaactggagataacaatactagctacagtcgctgggcgagacttgacttgaatggggcgccgctttgtggtcctctgtgtgttgcggttagtgctgccgaagccacagttcctagtgaacccatttgggaagagcagcagtgtgaggtcaaggcagacgggttcctgtgcgaattccacttcccagcaacatgcagacctctggctgtggagcccggagcggccgccgctgccgtttcaatcacctacggcacaccttttgcggctcgtggagcagactttcaggctcttccagtgggcagttcggccgctgtagctcccttggggctgcagttgatgtgcacagccccacccggagcggtgcaggggcattgggctagagaagcaccaggggcttgggattgcagtgtggagaatgggggatgtgaacacgcatgtaacgccattcccggggcccctcggtgccagtgtcctgctggagccgcgctgcaggcagatggacgttcctgtaccgcatctgctacgcaatcatgtaacgatctgtgcgagcatttctgtgtgccaaacccagaccagccgggttcatacagctgcatgtgcgagacaggctatcgcctggctgcggaccagcacagatgcgaggatgttgacgattgcatcctggagcccagcccctgccctcagcggtgcgtcaatacccagggcggtttcgagtgccattgttatccaaactacgacctggtcgatggagagtgcgtcgaacccgtggacccctgcttccgcgcaaactgcgagtaccagtgccagcccctcaatcagactagttacctgtgcgtgtgtgcagaaggatttgctcccatcccacacgagccacacagatgtcagatgttctgtaaccagacagcctgtccggcagattgtgatcctaatacacaggcatcttgcgaatgtccagaaggctatatacttgacgatgggtttatttgcacagacatcgacgagtgcgagaatggtggtttctgcagcggcgtctgccataacctgcctggcacctttgagtgcatctgtggccctgacagcgccctggcccgccacatcgggacggattgtgacagcggaaaggtagatggcggagattccggtagcggcgaaccccccccttcacccacccccggtagcactctgacaccccccgctgtggggttagtgcactcaggcttgttgatcggaatttcaatcgcgtccctttgtcttgttgtggccctcctggccctgttgtgccacttacgcaaaaagcagggggccgcgcgcgccaagatggagtacaagtgcgcagcaccgagtaaagaggtggtgttgcagcacgtccggactgaacggactccccagcgcctgtag

SEQ ID NO: 7801 - DNA, 1728 bp, Artificial Sequence
  derived and/or modified sequence
atgctgggcgtgctggtgctgggcgccctggccctggccggcctgggcttccctgccccagctgagccccagcccggcggcagccagtgtgtggagcatgactgctttgccctgtacccaggccctgccaccttcctgaatgccagccagatctgtgatggcctgcggggccacctgatgacagtgcgcagctctgtggccgcagatgtgatcagcctgctgctgaatggagatggcggcgtgggcagaagaaggctgtggattggcctgcagctgcccccaggctgtggggaccccaagaggctgggccccctgcggggcttccagtgggtgactggagacaacaacaccagctacagccgctgggcccggctggacctgaatggagcccccctgtgtggccccctgtgtgtggccgtgtctgctgctgaggccaccgtgcccagcgagcccatctgggaggagcagcagtgtgaggtgaaggcagatggcttcctgtgtgagttccacttccctgccacctgccggcccctggccgtggagcccggggctgctgctgctgctgtgtccatcacctacggcaccccatttgctgcccggggagctgacttccaggccctgcctgtgggcagcagcgctgctgtggcccccctgggcctgcagctgatgtgcacagcccctcctggagctgtgcagggccactgggcccgggaggcccctggggcctgggactgcagcgtggagaatggaggctgtgagcacgcctgcaatgccatccctggggccccccgctgccagtgcccagctggagctgccctgcaggctgatggccgcagctgcacagccagcgccacccagagctgcaatgacctgtgtgagcacttctgtgtgcccaacccagaccagcccggcagctacagctgcatgtgtgagaccggctaccgcctggccgctgaccagcaccgctgtgaagatgtggatgactgcatcctggagcccagcccctgcccccagagatgtgtgaacacccagggcggctttgagtgccactgctaccccaactatgacctggtggatggagaatgtgtggagcctgtggacccctgcttccgggccaactgtgagtaccagtgccagcccctgaaccagaccagctacctgtgtgtgtgtgccgagggctttgcccccatcccccatgagccccaccgctgccagatgttctgcaaccagacagcctgcccagctgactgtgaccccaacacccaggccagctgtgagtgcccagagggctacatcctggatgatggcttcatctgcacagacattgatgaatgtgaaaatggaggcttctgcagcggcgtgtgccacaacctgcccggcacctttgagtgcatctgtggccctgacagcgccctggcccggcacatcggcacagactgtgacagcggcaaggtggatggaggagacagcggcagcggggagcccccacccagccccaccccaggcagcaccctgaccccacctgctgtgggcctggtgcacagcggcctgctgattggcatcagcatcgccagcctgtgcctggtggtggccctgctggccctgctgtgccacctgaggaagaagcagggcgccgcccgggccaagatggagtacaagtgtgccgcccccagcaaggaggtggtgctgcagcacgtgaggacagagaggaccccccagaggctgtag

SEQ ID NO: 7802 - DNA, 1674 bp, Artificial Sequence
  derived and/or modified sequence
atgtctgaggccgccagccagggcctgcgggccgccgcccggtctgtgtgggccggcacagaccggcggggctgccgccaccggcggcctgtgcccctgtgcagcggcacagccctgagccagtgcccccgcttcccccggcggctgcatgctgcccggctgggcaacatgctgggcgtgctggtgctgggcgccctggccctggccggcctgggcttccctgcccctggctgtggggaccccaagaggctgggccccctgcggggcttccagtgggtgactggagacaacaacaccagctacagccgctgggcccggctggacctgaatggagcccccctgtgtggccccctgtgtgtggccgtgtctgctgctgaggccaccgtgcccagcgagcccatctgggaggagcagcagtgtgaggtgaaggcagatggcttcctgtgtgagttccacttccctgccacctgccggcccctggccgtggagcccggggctgctgctgctgctgtgtccatcacctacggcaccccatttgctgcccggggagctgacttccaggccctgcctgtgggcagcagcgctgctgtggcccccctgggcctgcagctgatgtgcacagcccctcctggagctgtgcagggccactgggcccgggaggcccctggggcctgggactgcagcgtggagaatggaggctgtgagcacgcctgcaatgccatccctggggccccccgctgccagtgcccagctggagctgccctgcaggctgatggccgcagctgcacagccagcgccacccagagctgcaatgacctgtgtgagcacttctgtgtgcccaacccagaccagcccggcagctacagctgcatgtgtgagaccggctaccgcctggccgctgaccagcaccgctgtgaagatgtggatgactgcatcctggagcccagcccctgcccccagagatgtgtgaacacccagggcggctttgagtgccactgctaccccaactatgacctggtggatggagaatgtgtggagcctgtggacccctgcttccgggccaactgtgagtaccagtgccagcccctgaaccagaccagctacctgtgtgtgtgtgccgagggctttgcccccatcccccatgagccccaccgctgccagatgttctgcaaccagacagcctgcccagctgactgtgaccccaacacccaggccagctgtgagtgcccagagggctacatcctggatgatggcttcatctgcacagacattgatgaatgtgaaaatggaggcttctgcagcggcgtgtgccacaacctgcccggcacctttgagtgcatctgtggccctgacagcgccctggcccggcacatcggcacagactgtgacagcggcaaggtggatggaggagacagcggcagcggggagcccccacccagccccaccccaggcagcaccctgaccccacctgctgtgggcctggtgcacagcggcctgctgattggcatcagcatcgccagcctgtgcctggtggtggccctgctggccctgctgtgccacctgaggaagaagcagggcgccgcccgggccaagatggagtacaagtgtgccgcccccagcaaggaggtggtgctgcagcacgtgaggacagagaggaccccccagaggctgtag

SEQ ID NO: 7803 - DNA, 1728 bp, Artificial Sequence
  derived and/or modified sequence
atgctgggcgtgctggtgctgggcgccctggccctggccggcctgggcttccccgctccagccgaaccccaaccgggtggatcacaatgtgtagaacacgactgctttgccctataccctggaccagcaactttcctgaacgcatcacagatttgtgatggccttcgtgggcacttaatgacggttaggagctctgttgccgccgatgtaatctcattgctcttgaacggtgacggtggcgtggggcgcagacgcttgtggatcgggctgcagcttccacctggttgcggcgatcccaagcggcttggaccattgcggggcttccaatgggtgacgggagacaataacacgtcatactcacgatgggcaaggctcgatctgaatggcgcgcctctgtgtgggccactatgtgtggccgtctcagcagccgaggccactgtgcccagtgagcccatttgggaagaacaacagtgtgaagtcaaggcagatggattcctctgcgagtttcattttcccgctacatgcagacccctggctgtcgagcccggagcagccgctgctgccgtttcaataacctatggaaccccattcgccgctaggggcgctgatttccaggccttaccggtcgggtccagtgccgccgtggccccacttggactccagctcatgtgtacagcgccgccaggagccgtgcaggggcactgggctcgcgaagctccaggagcgtgggactgcagcgtggagaacgggggatgtgaacatgcctgtaatgctattcctggggcaccgaggtgccagtgtccagcaggtgcagcactacaggctgacggaaggagctgcactgcatctgccacacagagctgtaatgacctctgcgagcatttctgtgtgcctaacccagaccagcctggatcctactcgtgcatgtgcgagaccggctatagactggcggccgaccaacatagatgtgaagatgtggatgattgcatccttgagccctccccatgcccgcaacggtgcgtgaatacacagggcggctttgagtgccattgctaccctaattatgacctggtcgatggcgagtgcgtagagcccgtcgatccatgctttagagcgaattgtgaatatcagtgccagccactgaaccagacctcttacctgtgtgtgtgcgccgaggggttcgcccccatccctcacgagccacaccgctgtcagatgttttgcaaccaaacggcatgcccagcagattgcgatccaaacacgcaagcaagctgcgaatgccccgaaggatacatactggacgatggatttatatgcaccgacatagatgaatgtgaaaatggcgggttctgctctggagtctgccataacctccctgggacttttgaatgtatttgcggtcctgacagcgcactggcaaggcacataggcaccgattgcgacagtggtaaggtcgacggaggtgactccgggtctggggagccacccccctcccctacgcccgggtctacactcactcctccggcagttggactggtgcatagcggacttctgataggcatcagtatcgctagtttgtgtctggttgtcgctttgctagcactgctctgccatctgcggaagaagcagggagccgctcgggctaagatggaatataagtgtgccgccccaagcaaggaggtagtcttacagcacgttagaactgagagaacacctcaacggctttag

SEQ ID NO: 7804 - DNA, 1674 bp, Artificial Sequence
  derived and/or modified sequence
atgagcgaggccgccagccagggcctgcgggccgccgcccggagcgtgtgggccggcaccgatcgaagaggatgccgccatcgaaggccagtgcccttgtgtagcggtacagcgctttctcagtgcccccgctttccgcgccgactgcacgccgctcggctgggcaatatgttaggggtgcttgtcctcggtgcgctggcccttgctggccttgggtttcccgctccaggctgtggcgacccaaagcgcctgggccccctccgagggttccagtgggttactggtgacaacaacaccagttactccagatgggcccggttggatcttaatggtgcaccactgtgcggacctctgtgtgtggccgtgtctgccgccgaggcaacggttcctagtgagcccatctgggaggagcagcagtgcgaggtcaaagcagatggctttttgtgtgaattccatttccctgccacatgtagacccctcgccgtggagcccggggcagccgctgcggctgtttccatcacctatgggactccgtttgccgctagaggggccgacttccaggcactccctgtgggaagctccgcggcagtggcccctctgggtctgcaattgatgtgcacagctccaccgggagcagtacagggccactgggctagagaagccccaggtgcctgggattgtagtgtcgagaatgggggctgtgaacacgcctgtaatgcaatccccggcgcgccccgttgccagtgtcctgcaggggcagcgttgcaggctgatggtaggtcctgtacggcctccgccacccagtcttgtaacgatctgtgcgagcacttctgtgtacctaatccggatcagccgggctcctattcttgtatgtgcgaaacaggatatcgcctagcagctgatcagcatcgctgtgaggacgttgatgactgcattctggaaccgtcaccttgtccccagaggtgtgtgaacactcaggggggttttgagtgtcactgttaccccaactatgatctggttgacggagagtgcgtcgagccagttgatccatgtttccgggcaaattgcgaataccaatgtcagcctctcaaccagacatcttatctgtgcgtgtgtgcagagggatttgcccctattcctcacgagccacatagatgccagatgttttgcaaccaaactgcctgccctgcggactgtgaccccaatacacaagcatcttgtgagtgtcccgaggggtacattctggacgacggattcatatgtaccgacatcgatgagtgcgagaatggggggttttgcagcggcgtatgccataatctcccagggacctttgagtgcatatgcggacccgattctgcgctggctcgacatattggaacagattgtgattcaggaaaggtcgacggtggagactccggttccggcgagcctccgcccagccccacacccgggtctactctcaccccgcctgctgtgggactggtgcactctggcttgctgatcggcatcagtattgcctccctttgtctcgtcgtggcgctcctggcacttctgtgccacctgcggaaaaagcagggcgctgctcgggctaagatggaatacaagtgtgctgccccctctaaggaagtcgtgcttcagcacgttcgcacagagcgtacaccgcagaggctgtag

SEQ ID NO: 7805 - DNA, 1728 bp, Artificial Sequence
  derived and/or modified sequence
atgctcggcgttctggtgctcggggctctggctctcgctgggcttgggttcccagcccctgcagagcctcaacctggcggtagtcagtgtgtagaacatgactgttttgccctttatccaggacccgcaacatttcttaatgcctcgcagatttgcgacgggctacgcggacacctgatgacagttaggtcgtctgtggcagccgacgtgatctccctgctgctgaacggtgacgggggagtcggcagacggagactgtggatcggcctgcagctgcctcctgggtgcggcgatcccaaacggctcggcccactgcggggtttccagtgggtcaccggggacaacaacacctcgtattctaggtgggctcgactcgacctcaacggagcaccactctgtggacctctctgtgtggctgtttccgctgccgaggccaccgtgccttcggaacctatatgggaagagcaacagtgcgaagttaaagccgacgggtttctgtgtgaattccatttccccgcaacatgtcgcccactggctgtagaaccaggggcagctgcagctgccgtgagcatcacgtatgggactccttttgccgcacgcggagccgatttccaagctctaccagtgggcagtagcgccgctgtggcaccactgggactgcagctgatgtgtacagcccctcctggggcagtgcaggggcactgggcacgggaagcaccaggcgcttgggactgtagcgtggagaatgggggttgcgagcacgcatgcaatgccattccaggagctcctagatgtcagtgtcccgctggagccgctctgcaggctgacggaaggagttgcacagctagcgccacgcaatcgtgtaatgatttgtgtgagcacttttgcgtgcctaatccagaccagccaggaagctacagctgtatgtgtgaaactggttatcggctggcagcagaccaacatcgatgtgaagatgttgatgactgcattctggaaccttccccatgtccccagcggtgcgtcaatactcaaggtggatttgagtgtcactgctaccctaattatgatctggtggacggagaatgcgttgaaccagtagatccatgttttagagcaaattgtgagtatcagtgtcagcctctgaaccagacaagctacctgtgtgtttgcgccgagggcttcgcacccatcccccacgaaccccatcggtgtcagatgttctgtaaccaaaccgcatgtccagccgactgcgatcccaacacacaggcttcatgcgagtgtccagagggctatattctggatgacggctttatctgcactgatatcgatgagtgcgagaatggcggtttctgttcaggggtttgccacaaccttcctgggacatttgagtgcatttgcggacccgactccgccctggcccgtcacattgggaccgattgcgactccgggaaggtggacggcggagattctggatctggcgaacctccaccgtctccaaccccagggtccacactgactccccctgctgtgggcctggtacactctggccttttgatcgggattagtatcgctagtctgtgtcttgttgtggcactactggccctgctgtgccacctgaggaagaaacagggcgctgccagggccaagatggagtataagtgtgcagccccatccaaggaagtggtgctccagcacgtgaggaccgaaagaactccgcagcgcctgtag

SEQ ID NO: 7806 - DNA, 1674 bp, Artificial Sequence
  derived and/or modified sequence
atgagcgaagcagcctcccaggggttgagggctgccgcaaggagcgtatgggccggtactgaccgccgagggtgtagacacagacgtccagtccctttgtgtagtggtactgcactgagccaatgtccccgttttccacgaaggctgcatgccgctagattgggcaacatgctcggcgttttagtattaggtgccttggcactggcgggattggggttcccagcacccggatgtggtgatcccaagcgattgggtcctttgcgcggttttcagtgggtaaccggggacaacaacacaagttatagccgctgggcccgactggatttgaatggcgctccattatgcgggccactctgcgtcgccgtttcagctgccgaggccactgtgccatccgaacccatttgggaggaacaacagtgcgaagtgaaggccgacggctttctgtgtgagttccatttcccagccacctgcagaccactggccgtggaacccggagctgccgcagctgccgtgagcattacctatggcactcctttcgctgccagaggagctgattttcaggccttgccggtgggatcttcagcagctgtcgctcctcttgggctccagttaatgtgtaccgctccgccaggtgcagtccaaggacattgggcccgagaagcacctggcgcttgggattgctcagtagaaaatgggggatgtgaacatgcttgtaatgcaatacctggtgcacccagatgtcagtgccctgcgggagcagctctccaggccgacggtcgttcctgtactgcctccgctactcagtcatgcaacgacctgtgtgaacatttctgtgtgcccaacccagatcaacccggttcttactcttgcatgtgcgagaccggttatagactggctgcagatcagcacagatgtgaggatgtggatgactgcatccttgagccgagtccatgtccccagaggtgtgttaatacccagggcggattcgaatgccattgttatcctaactacgacctggtggatggcgaatgcgtggagccagtcgacccgtgctttcgcgcaaactgtgagtaccagtgccaacccctgaaccagaccagctatttgtgtgtctgtgctgaagggttcgccccaatcccccatgaaccgcaccggtgccagatgttctgtaatcagacggcctgcccagccgattgtgatcctaacacgcaggcaagctgcgaatgccccgaggggtacatcctggatgatgggttcatatgtaccgacattgacgagtgtgagaatgggggattctgcagcggcgtgtgccacaatcttccaggtactttcgagtgtatttgtggcccagatagcgccttggctaggcacatcggtaccgattgcgatagcggcaaagtcgacggcggagacagtggcagtggtgagccgccacccagcccaacacccggttccactctgacaccaccagctgttgggttagtccacagtgggctgctcatcggcatatctattgcctccctgtgtttggtggtagccttactcgctttgctgtgccacctccggaagaagcagggagcggcaagggccaagatggagtacaagtgtgccgcacccagtaaggaagttgtgctgcagcatgtcagaactgagagaactccgcagagactctag

SEQ ID NO: 7807 - DNA, 4109 bp, Artificial Sequence
  derived and/or modified sequence
ccttccttttcccgaacgtccagggagggagggccgggcacttataaactcgagccctggccgatccgcatgtcagaggctgcctcgcaggggctgcgcgcagcggcaagaagtgtctgggctgggacggacaggagaggctgtcgccatcggcgtcctgtgcccctctgctccggcacggccctgtcgcagtgcccgcgctttccccggcgcctgcacgcggcgcgcctgggtaacatgcttggggtcctggtccttggcgcgctggccctggccggcctggggttccccgcacccgcagagccgcagccgggtggcagccagtgcgtcgagcacgactgcttcgcgctctacccgggccccgcgaccttcctcaatgccagtcagatctgcgacggactgcggggccacctaatgacagtgcgctcctcggtggctgccgatgtcatttccttgctactgaacggcgacggcggcgttggccgccggcgcctctggatcggcctgcagctgccacccggctgcggcgaccccaagcgcctcgggcccctgcgcggcttccagtgggttacgggagacaacaacaccagctatagcaggtgggcacggctcgacctcaatggggctcccctctgcggcccgttgtgcgtcgctgtctccgctgctgaggccactgtgcccagcgagccgatctgggaggagcagcagtgcgaagtgaaggccgatggcttcctctgcgagttccacttcccagccacctgcaggccactggctgtggagcccggcgccgcggctgccgccgtctcgatcacctacggcaccccgttcgcggcccgcggagcggacttccaggcgctgccggtgggcagctccgccgcggtggctcccctcggcttacagctaatgtgcaccgcgccgcccggagcggtccaggggcactgggccagggaggcgccgggcgcttgggactgcagcgtggagaacggcggctgcgagcacgcgtgcaatgcgatccctggggctccccgctgccagtgcccagccggcgccgccctgcaggcagacgggcgctcctgcaccgcatccgcgacgcagtcctgcaacgacctctgcgagcacttctgcgttcccaaccccgaccagccgggctcctactcgtgcatgtgcgagaccggctaccggctggcggccgaccaacaccggtgcgaggacgtggatgactgcatactggagcccagtccgtgtccgcagcgctgtgtcaacacacagggtggcttcgagtgccactgctaccctaactacgacctggtggacggcgagtgtgtggagcccgtggacccgtgcttcagagccaactgcgagtaccagtgccagcccctgaaccaaactagctacctctgcgtctgcgccgagggcttcgcgcccattccccacgagccgcacaggtgccagatgttttgcaaccagactgcctgtccagccgactgcgaccccaacacccaggctagctgtgagtgccctgaaggctacatcctggacgacggtttcatctgcacggacatcgacgagtgcgaaaacggcggcttctgctccggggtgtgccacaacctccccggtaccttcgagtgcatctgcgggcccgactcggcccttgcccgccacattggcaccgactgtgactccggcaaggtggacggtggcgacagcggctctggcgagcccccgcccagcccgacgcccggctccaccttgactcctccggccgtggggctcgtgcattcgggcttgctcataggcatctccatcgcgagcctgtgcctggtggtggcgcttttggcgctcctctgccacctgcgcaagaagcagggcgccgccagggccaagatggagtacaagtgcgcggccccttccaaggaggtagtgctgcagcacgtgcggaccgagcggacgccgcagagactctgagcggcctccgtccaggagcctggctccgtccaggagcctgtgcctcctcacccccagctttgctaccaaagcaccttagctggcattacagctggagaagaccctccccgcaccccccaagctgttttcttctattccatggctaactggcgagggggtgattagagggaggagaatgagcctcggcctcttccgtgacgtcactggaccactgggcaatgatggcaattttgtaacgaagacacagactgcgatttgtcccaggtcctcactaccgggcgcaggagggtgagcgttattggtcggcagccttctgggcagaccttgacctcgtgggctagggatgactaaaatatttattttttttaagtatttaggtttttgtttgtttcctttgttcttacctgtatgtctccagtatccactttgcacagctctccggtctctctctctctacaaactcccacttgtcatgtgacaggtaaactatcttggtgaatttttttttcctagccctctcacatttatgaagcaagccccacttattccccattcttcctagttttctcctcccaggaactgggccaactcacctgagtcaccctacctgtgcctgaccctacttcttttgctcttagctgtctgctcagacagaacccctacatgaaacagaaacaaaaacactaaaaataaaaatggccatttgctttttcaccagatttgctaatttatcctgaaatttcagattcccagagcaaaataattttaaacaaaggttgagatgtaaaaggtattaaattgatgttgctggactgtcatagaaattacacccaaagaggtatttatctttacttttaaacagtgagcctgaattttgttgctgttttgatttgtactgaaaaatggtaattgttgctaatcttcttatgcaatttccttttttgttattattacttatttttgacagtgttgaaaatgttcagaaggttgctctagattgagagaagagacaaacacctcccaggagacagttcaagaaagcttcaaactgcatgattcatgccaattagcaattgactgtcactgttccttgtcactggtagaccaaaataaaaccagctctactggtcttgtggaattgggagcttgggaatggatcctggaggatgcccaattagggcctagccttaatcaggtcctcagagaatttctaccatttcagagaggccttttggaatgtggcccctgaacaagaattggaagctgccctgcccatgggagctggttagaaatgcagaatcctaggctccaccccatccagttcatgagaatctatatttaacaagatctgcagggggtgtgtctgctcagtaatttgaggacaaccattccagactgcttccaattttctggaatacatgaaatatagatcagttataagtagcaggccaagtcaggcccttattttcaagaaactgaggaattttctttgtgtagctttgctctttggtagaaaaggctaggtacacagctctagacactgccacacagggtctgcaaggtctttggttcagctaagctaggaatgaaatcctgcttcagtgtatggaaataaatgtatcatagaaatgtaacttttgtaagacaaaggttttcctcttctattttgtaaactcaaaatatttgtacatagttatttatttattggagataatctagaacacaggcaaaatccttgcttatgacatcacttgtacaaaataaacaaataacaatgtgctctcgggttgtgtgtctgttcacttttcctccctcagtgccctcattttatgtcattaaatggggctcacaaaccatgcaaatgctatgagatgcatggagggctgccctgtaccccagcacttgtgttgtctggtggtggcaccatctctgattttcaaagctttttccagaggctattattttcactgtagaatgatttcatgctatctctgtgtgcacaaatatttattttctttctgtaaccataacaacttcatatatgaggacttgtgtctctgtgcttttaaatgcataaatgcattataggatcatttgttggaatgaattaaataaacccttcctggggcatctggcgaatccca

SEQ ID NO: 7808 - DNA, 3480 bp, Artificial Sequence
  derived and/or modified sequence
tataaactcgagccctggccgatccgcatgtcagaggctgcctcgcaggggctgcgcgcagcggcaagaagtgtctgggctgggacggacaggagaggctgtcgccatcggcgtcctgtgcccctctgctccggcacggccctgtcgcagtgcccgcgctttccccggcgcctgcacgcggcgcgcctgggtaacatgcttggggtcctggtccttggcgcgctggccctggccggcctggggttccccgcacccggctgcggcgaccccaagcgcctcgggcccctgcgcggcttccagtgggttacgggagacaacaacaccagctatagcaggtgggcacggctcgacctcaatggggctcccctctgcggcccgttgtgcgtcgctgtctccgctgctgaggccactgtgcccagcgagccgatctgggaggagcagcagtgcgaagtgaaggccgatggcttcctctgcgagttccacttcccagccacctgcaggccactggctgtggagcccggcgccgcggctgccgccgtctcgatcacctacggcaccccgttcgcggcccgcggagcggacttccaggcgctgccggtgggcagctccgccgcggtggctcccctcggcttacagctaatgtgcaccgcgccgcccggagcggtccaggggcactgggccagggaggcgccgggcgcttgggactgcagcgtggagaacggcggctgcgagcacgcgtgcaatgcgatccctggggctccccgctgccagtgcccagccggcgccgccctgcaggcagacgggcgctcctgcaccgcatccgcgacgcagtcctgcaacgacctctgcgagcacttctgcgttcccaaccccgaccagccgggctcctactcgtgcatgtgcgagaccggctaccggctggcggccgaccaacaccggtgcgaggacgtggatgactgcatactggagcccagtccgtgtccgcagcgctgtgtcaacacacagggtggcttcgagtgccactgctaccctaactacgacctggtggacggcgagtgtgtggagcccgtggacccgtgcttcagagccaactgcgagtaccagtgccagcccctgaaccaaactagctacctctgcgtctgcgccgagggcttcgcgcccattccccacgagccgcacaggtgccagatgttttgcaaccagactgcctgtccagccgactgcgaccccaacacccaggctagctgtgagtgccctgaaggctacatcctggacgacggtttcatctgcacggacatcgacgagtgcgaaaacggcggcttctgctccggggtgtgccacaacctccccggtaccttcgagtgcatctgcgggcccgactcggcccttgcccgccacattggcaccgactgtgactccggcaaggtggacggtggcgacagcggctctggcgagcccccgcccagcccgacgcccggctccaccttgactcctccggccgtggggctcgtgcattcgggcttgctcataggcatctccatcgcgagcctgtgcctggtggtggcgcttttggcgctcctctgccacctgcgcaagaagcagggcgccgccagggccaagatggagtacaagtgcgcggccccttccaaggaggtagtgctgcagcacgtgcggaccgagcggacgccgcagagactctgagcggcctccgtccaggagcctggctccgtccaggagcctgtgcctcctcacccccagctttgctaccaaagcaccttagctggcattacagctggagaagaccctccccgcaccccccaagctgttttcttctattccatggctaactggcgagggggtgattagagggaggagaatgagcctcggcctcttccgtgacgtcactggaccactgggcaatgatggcaattttgtaacgaagacacagactgcgatttgtcccaggtcctcactaccgggcgcaggagggtgagcgttattggtcggcagccttctgggcagaccttgacctcgtgggctagggatgactaaaatatttattttttttaagtatttaggtttttgtttgtttcctttgttcttacctgtatgtctccagtatccactttgcacagctctccggtctctctctctctacaaactcccacttgtcatgtgacaggtaaactatcttggtgaatttttttttcctagccctctcacatttatgaagcaagccccacttattccccattcttcctagttttctcctcccaggaactgggccaactcacctgagtcaccctacctgtgcctgaccctacttcttttgctcttagctgtctgctcagacagaacccctacatgaaacagaaacaaaaacactaaaaataaaaatggccatttgctttttcaccagatttgctaatttatcctgaaatttcagattcccagagcaaaataattttaaacaaaggttgagatgtaaaaggtattaaattgatgttgctggactgtcatagaaattacacccaaagaggtatttatctttacttttaaacagtgagcctgaattttgttgctgttttgatttgtactgaaaaatggtaattgttgctaatcttcttatgcaatttccttttttgttattattacttatttttgacagtgttgaaaatgttcagaaggttgctctagattgagagaagagacaaacacctcccaggagacagttcaagaaagcttcaaactgcatgattcatgccaattagcaattgactgtcactgttccttgtcactggtagaccaaaataaaaccagctctactggtcttgtggaattgggagcttgggaatggatcctggaggatgcccaattagggcctagccttaatcaggtcctcagagaatttctaccatttcagagaggccttttggaatgtggcccctgaacaagaattggaagctgccctgcccatgggagctggttagaaatgcagaatcctaggctccaccccatccagttcatgagaatctatatttaacaagatctgcagggggtgtgtctgctcagtaatttgaggacaaccattccagactgcttccaattttctggaatacatgaaatatagatcagttataagtagcaggccaagtcaggcccttattttcaagaaactgaggaattttctttgtgtagctttgctctttggtagaaaaggctaggtacacagctctagacactgccacacagggtctgcaaggtctttggttcagctaagctaggaatgaaatcctgcttcagtgtatggaaataaatgtatcatagaaatgtaacttttgtaagacaaaggttttcctcttctattttgtaaactcaaaatatttgtacatagttatttatttattggagataatctagaacacaggcaaaatccttgcttatgacatcacttgtacaaaataaacaaataacaatgtg

SEQ ID NO: 7809 - RNA, 1871 nt, Artificial Sequence
  derived and/or modified sequence
gggaaauaagagagaaaagaagaguaagaagaaauauaagagccaccaugcugggaguacuggugcucggggccuuggcgcuugcgggacuuggguucccggcaccggcugagccccagccgggagguucacaguguguagaacacgacugcuuugcgcucuacccuggacccgcuacauuucugaaugcgucgcagaucugugacggacuccgcggucaucuuaugacggugagaucguccguagcggcggaugucauuucgcuuuugcucaacggggacggaggugugggcaggaggcgccuuuggaucgggcuccaguugccgccugggugcggugaucccaagcgguuggggccucugaggggauuucaauggguaacgggugacaacaacacauccuauucccggugggccagacucgacuugaauggugccccucuuugcggaccccucugcguggcggugucggcagcagaggcaacggucccgagcgagccgauuugggaagagcagcagugugaagucaaagcggacggguuccuuugcgaguuccacuuccccgcgacgugcagacccuuggcaguagagcccggagcggcagcagccgcgguauccaucacuuacgggacgccguucgcugcgagaggagcagacuuccaagcucuucccgucggcucgucggcagcgguggccccauugggacugcaacugaugugcacugcaccgccaggggcgguccagggacacugggcacgcgaggcaccgggagcgugggacuguuccgucgaaaacggcggaugcgagcaugcauguaacgcaauccccggagcgccucgcugccagugcccagcuggagcggcgcugcaagcggaugggcggucguguacggccucagccacucagagcugcaacgaucugugcgagcauuucugcgucccgaauccggaccagccugggucguauagcuguaugugugaaacaggauaucgguuggcagcagaccagcacagaugcgaggaugucgaugauuguauucuggaacccucgccuuguccgcagcgaugcgucaauacgcagggugguuucgagugucacuguuauccaaacuacgaucuuguggacggagaaugugucgagccggucgaucccugcuuucgagcuaacugugaguaccagugucaaccccugaaucagacaagcuaccucugugugugcgccgaaggauuugcucccaucccgcacgaaccccaucggugucagauguuuuguaaccaaacggccugcccugccgauugcgauccgaauacacaggcuucaugugagugcccagagggauauaucuuggaugaugguuuuaucugcacugacauugacgaaugugaaaaugguggguuuugcucgggugugugccacaaucuccccgguaccuucgaaugcaucuguggucccgacucggcucuggcacgccauaucgggacagauugugauagcgggaaggucgacgguggggacuccggcuccggagagccuccgcccucacccacgccagggagcaccuugaccccaccggcggugggguuggugcacucgggauuguugaucgggaucucaauugccucgcucugccuugugguggcgcuuuuggccuugcugugccaucuccgcaagaagcaaggugcagcucgcgcgaaaauggaauacaagugugccgcaccgagcaaagaggucguccuccagcacguaagaacagaaaggacuccucagcgacucugauaagcugccuucugcggggcuugccuucuggccaugcccuucuucucucccuugcaccuguaccucuuggucuuugaauaaagccugaguaggaag

SEQ ID NO: 7810 - protein, 211 aa, Artificial Sequence
  derived and/or modified sequence
MTPWLGLIVLLGSWSLGDWGAEACTCSPSHPQDAFCNSDIVIRAKVVGKKLVKEGPFGTLVYTIKQMKMYRGFTKMPHVQYIHTEASESLCGLKLEVNKYQYLLTGRVYDGKMYTGLCNFVERWDQLTLSQRKGLNYRYHLGCNCKIKSCYYLPCFVTSKNECLWTDMLSNFGYPGYQSKHYACIRQKGGYCSWYRGWAPPDKSIINATDP

SEQ ID NO: 7811 - protein, 145 aa, Artificial Sequence
  derived and/or modified sequence
MKMYRGFTKMPHVQYIHTEASESLCGLKLEVNKYQYLLTGRVYDGKMYTGLCNFVERWDQLTLSQRKGLNYRYHLGCNCKIKSCYYLPCFVTSKNECLWTDMLSNFGYPGYQSKHYACIRQKGGYCSWYRGWAPPDKSIINATDP
